United States Patent Application Publication US 2006/0107345 A1 - sequence listing, part 3

SEQ ID NO: 7969 - protein, 197 aa, Arabidopsis thaliana
MATAIALIMVAMVVDAAGADKGKDKEECTAQLVGMATCLPYVQGKAKSPTPDCCSGLKQVINSDMKCLCMIIQERNDPDLGLQVNVSLALALPSVCHATADITKCPALLHLDPNSPDAQVFYQLAKGLNETVSASAPTGSASEPTSMSSTPGSSAGNNSGRTTSVPGTNHAQSFSKQWLGLEVVAHFFVIFYIFILV

SEQ ID NO: 7970 - protein, 189 aa, Arabidopsis thaliana
MVAMVVDAAGADKGKDKEECTAQLVGMATCLPYVQGKAKSPTPDCCSGLKQVINSDMKCLCMIIQERNDPDLGLQVNVSLALALPSVCHATADITKCPALLHLDPNSPDAQVFYQLAKGLNETVSASAPTGSASEPTSMSSTPGSSAGNNSGRTTSVPGTNHAQSFSKQWLGLEVVAHFFVIFYIFILV

SEQ ID NO: 7971 - DNA, 2532 bp, Arabidopsis thaliana
gaatggatataaacatcaaaattcaataattgcgatagagtatcaatcaagatcttacatataaaaaaagattcatcccccaaagaacggaacactcactcttctaaaacgatgggagagatagcaacagagttcacgccggttatggatgatgatgatgaccggtgcgttgtaccggaggtagagctcactgtacccaagaccgacgattcaactttaccggttttaacatttcggatgtgagttcttggtataggcgcgtgcattgtactctcctttatcaaccagtttttctggtacagaacgatgccgttgagtatcaccggaatctccgctcagatcgccgtcgtgccgcttggtcatctcatggcgagagtgcttccgacaaaaagattcttggaaggtacgaggtttcagtttaccttaaacccgggtgccttcaacgtcaaggaacatgttctgataactatctttgcaaattccggcgccggctctgtttacgctactcacatacttagtgctattaagctttactacaaacgttctcttcctttcctccctgcatttctcgtcatgatcaccactcagattcttggatttggttgggctggtctcttcaggaaacaccttgttgagcctggtgaaatgtggtggccaagcaatcttgttcaagtctctctctttggtgcgttacacgagaaagaaaagaaatcaagaggaggcatgagtagaactcaattcttcttaatcgtcctcgtagctagctttgcttactacatctttcctggttatcttttcaccatgttaacatcaatctcatgggtctgttggctcaatcccaaatcaattctggtaaaccaactcggttcaggtgaacatggtcttggcattggttccattggttttgattgggtcactattagtgcttatcttggaagccctttagctagtcctttgttcgcttccgtcaatgtagccattggtttcgtgctggttatgtatatcgtcacgcctgtttgttactggcttaacatttatgatgccaagaccttccctatcttctctagtcagctcttcatggggaatggctcacgttatgatgttttgagcattattgatagcaaattccatcttgaccgtgtggtttactctaggaccgggtccatcaatatgagcaccttctttgctgttacttatggtctcgggtttgctacattgtctgccaccattgtccatgttttagtcttcaacggaagtgacttgtggaagcagacaagaggggcgtttcagaagaataagaaaatggatatacacacgagaatcatgaagaaaaactacagggaagttccattgtggtggtttttggtaatccttttactgaatatcgcgcttatcatgttcatctccgtgcactacaacgctactgtgcagcttccttggtggggagtgttacttgcttgtgccattgccatcagtttcactcctttgatcggtgtcatagctgccaccactaatcaggcaccgggattgaatatcataacagagtatgttatcgggtatatctacccggaacgtcctgttgcaaacatgtgtttcaaggtctatggatacattagtatgactcaagcgctaactttcatttccgacttcaagcttggtcattacatgaagatcccgcctagatccatgttcatggctcaggtggctgggacacttgtggcggtggttgtgtacacaggaacagcctggtggttaatggaagagattcctcatctttgtgatacatccttgcttccttcagacagccaatggacttgtcccatggaccgcgttttctttgacgcctctgtgatttggggactagtgggaccacgcagggtgtttggagaccttggagaatactcaaatgtcaactggttcttcctcgttggagccatagctccactcttagtttggctagccacaaagatgtttccggctcagacatggatcgccaagattcatatccctgtccttgtgggagccaccgcaatgatgccaccagcaacagcagttaacttcactagttggctcatcgtcgcattcatctttggccacttcatcttcaagtacagaagagtgtggtggaccaagtataactatgtgttgtctggtggtttagatgctggctctgcttttatgaccatacttctgtttctagcactcggacgaaaaggaattgaagtgcagtggtggggaaattccggcgaccgagatacatgtcccttagcttcttgtccaactgctaaaggtgttgtcgtcaaaggctgtcccgtcttctagctcatgagtcatgagacaaaagcatataccaagtgctttgtacagaacacacagcaaactgataattgtaattctcggaaatgtctttactctccaagaactatatcttttgtgatagctttaaaactaggtactatcctgttctttgactgaacacaaatgctagtgattctatatgtggttccttaaaatgattttaatgcatgcttc

SEQ ID NO: 7972 - protein, 671 aa, Arabidopsis thaliana
MPLSITGISAQIAVVPLGHLMARVLPTKRFLEGTRFQFTLNPGAFNVKEHVLITIFANSGAGSVYATHILSAIKLYYKRSLPFLPAFLVMITTQILGFGWAGLFRKHLVEPGEMWWPSNLVQVSLFGALHEKEKKSRGGMSRTQFFLIVLVASFAYYIFPGYLFTMLTSISWVCWLNPKSILVNQLGSGEHGLGIGSIGFDWVTISAYLGSPLASPLFASVNVAIGFVLVMYIVTPVCYWLNIYDAKTFPIFSSQLFMGNGSRYDVLSIIDSKFHLDRVVYSRTGSINMSTFFAVTYGLGFATLSATIVHVLVFNGSDLWKQTRGAFQKNKKMDIHTRIMKKNYREVPLWWFLVILLLNIALIMFISVHYNATVQLPWWGVLLACAIAISFTPLIGVIAATTNQAPGLNIITEYVIGYIYPERPVANMCFKVYGYISMTQALTFISDFKLGHYMKIPPRSMFMAQVAGTLVAVVVYTGTAWWLMEEIPHLCDTSLLPSDSQWTCPMDRVFFDASVIWGLVGPRRVFGDLGEYSNVNWFFLVGAIAPLLVWLATKMFPAQTWIAKIHIPVLVGATAMMPPATAVNFTSWLIVAFIFGHFIFKYRRVWWTKYNYVLSGGLDAGSAFMTILLFLALGRKGIEVQWWGNSGDRDTCPLASCPTAKGVVVKGCPVF

SEQ ID NO: 7973 - protein, 651 aa, Arabidopsis thaliana
MARVLPTKRFLEGTRFQFTLNPGAFNVKEHVLITIFANSGAGSVYATHILSAIKLYYKRSLPFLPAFLVMITTQILGFGWAGLFRKHLVEPGEMWWPSNLVQVSLFGALHEKEKKSRGGMSRTQFFLIVLVASFAYYIFPGYLFTMLTSISWVCWLNPKSILVNQLGSGEHGLGIGSIGFDWVTISAYLGSPLASPLFASVNVAIGFVLVMYIVTPVCYWLNIYDAKTFPIFSSQLFMGNGSRYDVLSIIDSKFHLDRVVYSRTGSINMSTFFAVTYGLGFATLSATIVHVLVFNGSDLWKQTRGAFQKNKKMDIHTRIMKKNYREVPLWWFLVILLLNIALIMFISVHYNATVQLPWWGVLLACAIAISFTPLIGVIAATTNQAPGLNIITEYVIGYIYPERPVANMCFKVYGYISMTQALTFISDFKLGHYMKIPPRSMFMAQVAGTLVAVVVYTGTAWWLMEEIPHLCDTSLLPSDSQWTCPMDRVFFDASVIWGLVGPRRVFGDLGEYSNVNWFFLVGAIAPLLVWLATKMFPAQTWIAKIHIPVLVGATAMMPPATAVNFTSWLIVAFIFGHFIFKYRRVWWTKYNYVLSGGLDAGSAFMTILLFLALGRKGIEVQWWGNSGDRDTCPLASCPTAKGVVVKGCPVF

SEQ ID NO: 7974 - protein, 582 aa, Arabidopsis thaliana
MITTQILGFGWAGLFRKHLVEPGEMWWPSNLVQVSLFGALHEKEKKSRGGMSRTQFFLIVLVASFAYYIFPGYLFTMLTSISWVCWLNPKSILVNQLGSGEHGLGIGSIGFDWVTISAYLGSPLASPLFASVNVAIGFVLVMYIVTPVCYWLNIYDAKTFPIFSSQLFMGNGSRYDVLSIIDSKFHLDRVVYSRTGSINMSTFFAVTYGLGFATLSATIVHVLVFNGSDLWKQTRGAFQKNKKMDIHTRIMKKNYREVPLWWFLVILLLNIALIMFISVHYNATVQLPWWGVLLACAIAISFTPLIGVIAATTNQAPGLNIITEYVIGYIYPERPVANMCFKVYGYISMTQALTFISDFKLGHYMKIPPRSMFMAQVAGTLVAVVVYTGTAWWLMEEIPHLCDTSLLPSDSQWTCPMDRVFFDASVIWGLVGPRRVFGDLGEYSNVNWFFLVGAIAPLLVWLATKMFPAQTWIAKIHIPVLVGATAMMPPATAVNFTSWLIVAFIFGHFIFKYRRVWWTKYNYVLSGGLDAGSAFMTILLFLALGRKGIEVQWWGNSGDRDTCPLASCPTAKGVVVKGCPVF

SEQ ID NO: 7975 - DNA, 888 bp, Arabidopsis thaliana
atcttcttaaacccaaacgttcaagaaaaagaaaaaaaaacgatacttacgatgagtgcggtaaaatcggcgttaggtgatatggtgataacctttttgtgggttattctctcggcgacgtttgggatacagacggcggcgattgtttccgccgtagggtttcatggtatcacttgggctcctcttgtgatctcaacgttggttgtttttgtctccatctcgatttttacggttattggaaacgttcttggtggtgctagcttcaatccttgtggaaacgcagcgttttataccgccggtgtttccagtgattctctcttctccttggccattagatctcctgctcaggcaattggtgcggcaggcggtgcgataacgatcatggagatgataccggaaaagtataagactaggattggaggaaagccttcattgcaatttggtgcacacaatggagctatttctgaagtggtcctaagttttagtgttacatttttggttttactaattatcctaagaggtcctcgaaaactgctcgcgaaaacgttcttgctcgcactcgctaccgtatcggtgtttgtcgtaggttctaaattcactagaccattcatgaatcctgccattgcgtttgggtgggcatatatctacaagtctcacaacacatgggaccatttttatgtgtattggatcagctcctacaccggagctattttatctgcgatgctctttagaattatatttccggctccacctctggttcagaaaaaacagaagaaagcttgagaaaaaaatggaaaaatctaagtaaaaatttcatgaatcataatcccatttgttgtatgttttatgctgttgtcgtatttgtacttaatttatagtttatagccc

SEQ ID NO: 7976 - protein, 260 aa, Arabidopsis thaliana
IFLNPNVQEKEKKTILTMSAVKSALGDMVITFLWVILSATFGIQTAAIVSAVGFHGITWAPLVISTLVVFVSISIFTVIGNVLGGASFNPCGNAAFYTAGVSSDSLFSLAIRSPAQAIGAAGGAITIMEMIPEKYKTRIGGKPSLQFGAHNGAISEVVLSFSVTFLVLLIILRGPRKLLAKTFLLALATVSVFVVGSKFTRPFMNPAIAFGWAYIYKSHNTWDHFYVYWISSYTGAILSAMLFRIIFPAPPLVQKKQKKA

SEQ ID NO: 7977 - protein, 243 aa, Arabidopsis thaliana
MSAVKSALGDMVITFLWVILSATFGIQTAAIVSAVGFHGITWAPLVISTLVVFVSISIFTVIGNVLGGASFNPCGNAAFYTAGVSSDSLFSLAIRSPAQAIGAAGGAITIMEMIPEKYKTRIGGKPSLQFGAHNGAISEVVLSFSVTFLVLLIILRGPRKLLAKTFLLALATVSVFVVGSKFTRPFMNPAIAFGWAYIYKSHNTWDHFYVYWISSYTGAILSAMLFRIIFPAPPLVQKKQKKA

SEQ ID NO: 7978 - protein, 233 aa, Arabidopsis thaliana
MVITFLWVILSATFGIQTAAIVSAVGFHGITWAPLVISTLVVFVSISIFTVIGNVLGGASFNPCGNAAFYTAGVSSDSLFSLAIRSPAQAIGAAGGAITIMEMIPEKYKTRIGGKPSLQFGAHNGAISEVVLSFSVTFLVLLIILRGPRKLLAKTFLLALATVSVFVVGSKFTRPFMNPAIAFGWAYIYKSHNTWDHFYVYWISSYTGAILSAMLFRIIFPAPPLVQKKQKKA

SEQ ID NO: 7979 - DNA, 1155 bp, Arabidopsis thaliana
gttatttcattttcaagctctggacatttgattggtgatgaagctgagggagtgaatttatggcttaagatagtcttcaaagctacatacaaaactatattacaatttcgaagctgcccatggccatggcgttacagattatagcttcttcttcttcatcaccaacgattacaaaatctcaccttttctcttatcctcctctgcaatctcgttataaagcttcgaaacctaacctctcctcatggttttctcttctgggttcttctcgtttctctccttacattggtttaaagcatttgggcatctcaatctcgccgaaatcttcaaacccagagaagaagagaagatgtaagagtatgatgattcgtgcgtctctgtttggtgttggagcacctgaggctttggttattggtgttgttgctttgttagtctttggtcctaaaggtcttgctgaggtagctcggaatcttggaaaaactctgcgtacatttcagccaacgattagagagctacaggatgtttcaagagattttaaaagtacccttgagcgtgaaattggccttgatgatatctcaacgccaaacgtgtacaaccaaaacagaacgaatcctgttcaacctcctcctccaccaccaccaccatcagttcctagcactgaagctcctgtgactgcaaatgatcccaatgattcacaatcaccaaaagcttacacatccgaggattacctcaagttcactgaagagcagctaaaagctttgtctcccgctgaaagccaaacagaggatcaaactcagactcaagaaccgccacaacccacaactgtacaaacacctaccggagaaagccagcccaatggtacagcgagagaaacaacagctgcatctcctccaaggcaagattgaaagcaccaaaatatgacttgtagtgttaaaaagcataagcctctctatactgggaagctgctgagggaatttttttgatctgccaaaaaggacgaagctattagctctcaggacattctcgcaaagctgtatgtgcatcttgataatatgtctgtgtatttatgttacattagattctttcttaatggtaattgagtttattaggtcaaagcttggaaaataatgaaatgagtataaattattggctcttgct

SEQ ID NO: 7980 - protein, 260 aa, Arabidopsis thaliana
MAMALQIIASSSSSPTITKSHLFSYPPLQSRYKASKPNLSSWFSLLGSSRFSPYIGLKHLGISISPKSSNPEKKRRCKSMMIRASLFGVGAPEALVIGVVALLVFGPKGLAEVARNLGKTLRTFQPTIRELQDVSRDFKSTLEREIGLDDISTPNVYNQNRTNPVQPPPPPPPPSVPSTEAPVTANDPNDSQSPKAYTSEDYLKFTEEQLKALSPAESQTEDQTQTQEPPQPTTVQTPTGESQPNGTARETTAASPPRQD

SEQ ID NO: 7981 - protein, 258 aa, Arabidopsis thaliana
MALQIIASSSSSPTITKSHLFSYPPLQSRYKASKPNLSSWFSLLGSSRFSPYIGLKHLGISISPKSSNPEKKRRCKSMMIRASLFGVGAPEALVIGVVALLVFGPKGLAEVARNLGKTLRTFQPTIRELQDVSRDFKSTLEREIGLDDISTPNVYNQNRTNPVQPPPPPPPPSVPSTEAPVTANDPNDSQSPKAYTSEDYLKFTEEQLKALSPAESQTEDQTQTQEPPQPTTVQTPTGESQPNGTARETTAASPPRQD

SEQ ID NO: 7982 - protein, 181 aa, Arabidopsis thaliana
MMIRASLFGVGAPEALVIGVVALLVFGPKGLAEVARNLGKTLRTFQPTIRELQDVSRDFKSTLEREIGLDDISTPNVYNQNRTNPVQPPPPPPPPSVPSTEAPVTANDPNDSQSPKAYTSEDYLKFTEEQLKALSPAESQTEDQTQTQEPPQPTTVQTPTGESQPNGTARETTAASPPRQD

SEQ ID NO: 7983 - DNA, 2012 bp, Arabidopsis thaliana
gtgtgtgtcgccttatctgttcgtcatggctctgtagagtagcctcatgttcttattcttcttcttccttagccattcgtggaagcaaaaacagagtcttttattctttggtgattctgtgaaatggaagctacgaggaacttggtttcttcatctccttcgtttcagacaaagactcatctcaagagcagctactcttctccttcctctgtagtgatgcttcatgatcaaacaacaactcctgttgttaactcacgtcatctcaattctctatctcgacattttcctgcgtcggttctctcacaggagccacgggaagagtctaggcctctgtcacatgcgttaagagacgatagaacatcccagttgactctggagaggaggcagtttgatgaattggtttcatctcgagaagatgagaaatttgaacagcaacttcttcactctactggtttatggaatttattaatatctcctttaacatctgaaacgaaattgccggcagttgtgtctcctttagctgatgcagagctttgtgatgtggttgcactagctcagaaggctttatcagcttcaaaacaagctgcattgttagttgatgacactgaagcaaatccatctgacaacatcaaggattctctctccactagctcttctatgtccttaccggaaaagggaaacatagtaagatcgaagcggcagctagagagacgagcaaagaacagacgggctccaaaatcaaacgatgtggacgatgagggttatgttcctcagaaaactagtgcgaagaaaaagtataaacaaggggctgataatgatgatgcgcttcagctcttcttgtggggacctgagacaaaacaacttctgactgctaaagaagaagctgagctgatatcacatatacagcatttattaaagttggagaaggtaaagactaaacttgaatctcaaaacggctgcgaaccaacaataggcgagtgggctgaagctatggggataagttcccctgtcttaaaatctgatatccaccgtgggagaagcagccgggaaaagttgattacagcaaacctacgtctggtagtccatatagctaaacaatatcagaatcgtggactcaactttcaggacttattgcaggaaggaagcatggggctaatgaaaagtgtagaaaaattcaaaccgcaatccggatgcagattcgctacttacgcttactggtggattcgacaatccataagaaagtctatatttcaaaactccagaacaatccgtttaccggagaacgtatacatgctactaggcaaagtatccgaagccagaaaaacttgcgtgcaggaagggaattaccgaccaagtaaagaggaactcgctggccacgttggggtttcaacagagaagctggataaactgctgtacaatacaagaacacctctttcaatgcaacagcccatttggtctgatcaagacaccacctttcaggaaataacaccagacagtgggattgagacaccaacaatgagcgtggggaagcagctgatgaggaaccatgtacggaatctcctcaatgtactgagtccaaaggagagaaggatcatcaagctgagatttgggattgatggcggtaaacagagatcgttatcggaaataggagagatttacggattgtcaaaggagagggtaaggcagctagagagccgggcattgtacaggcttaagcagaacatgaacagccatggacttcatgcttatgctgatttgcttgtctagctcatggagatattggtttcttctattataatgatgtgtatacaaaatatacttttgttgatattatgaggaatagtgtttcttggataaagagttttgccgttaaaactttgtttattgtggtagttaaggaaaaagagggattaccacattttcataatttgtttatctctgctttctgtgcaattgtgcatatctgttttagttcttgtaatcaaatttctctgaaggcaactagaaaaagg

SEQ ID NO: 7984 - protein, 547 aa, Arabidopsis thaliana
MEATRNLVSSSPSFQTKTHLKSSYSSPSSVVMLHDQTTTPVVNSRHLNSLSRHFPASVLSQEPREESRPLSHALRDDRTSQLTLERRQFDELVSSREDEKFEQQLLHSTGLWNLLISPLTSETKLPAVVSPLADAELCDVVALAQKALSASKQAALLVDDTEANPSDNIKDSLSTSSSMSLPEKGNIVRSKRQLERRAKNRRAPKSNDVDDEGYVPQKTSAKKKYKQGADNDDALQLFLWGPETKQLLTAKEEAELISHIQHLLKLEKVKTKLESQNGCEPTIGEWAEAMGISSPVLKSDIHRGRSSREKLITANLRLVVHIAKQYQNRGLNFQDLLQEGSMGLMKSVEKFKPQSGCRFATYAYWWIRQSIRKSIFQNSRTIRLPENVYMLLGKVSEARKTCVQEGNYRPSKEELAGHVGVSTEKLDKLLYNTRTPLSMQQPIWSDQDTTFQEITPDSGIETPTMSVGKQLMRNHVRNLLNVLSPKERRIIKLRFGIDGGKQRSLSEIGEIYGLSKERVRQLESRALYRLKQNMNSHGLHAYADLLV

SEQ ID NO: 7985 - protein, 516 aa, Arabidopsis thaliana
MLHDQTTTPVVNSRHLNSLSRHFPASVLSQEPREESRPLSHALRDDRTSQLTLERRQFDELVSSREDEKFEQQLLHSTGLWNLLISPLTSETKLPAVVSPLADAELCDVVALAQKALSASKQAALLVDDTEANPSDNIKDSLSTSSSMSLPEKGNIVRSKRQLERRAKNRRAPKSNDVDDEGYVPQKTSAKKKYKQGADNDDALQLFLWGPETKQLLTAKEEAELISHIQHLLKLEKVKTKLESQNGCEPTIGEWAEAMGISSPVLKSDIHRGRSSREKLITANLRLVVHIAKQYQNRGLNFQDLLQEGSMGLMKSVEKFKPQSGCRFATYAYWWIRQSIRKSIFQNSRTIRLPENVYMLLGKVSEARKTCVQEGNYRPSKEELAGHVGVSTEKLDKLLYNTRTPLSMQQPIWSDQDTTFQEITPDSGIETPTMSVGKQLMRNHVRNLLNVLSPKERRIIKLRFGIDGGKQRSLSEIGEIYGLSKERVRQLESRALYRLKQNMNSHGLHAYADLLV

SEQ ID NO: 7986 - protein, 369 aa, Arabidopsis thaliana
MSLPEKGNIVRSKRQLERRAKNRRAPKSNDVDDEGYVPQKTSAKKKYKQGADNDDALQLFLWGPETKQLLTAKEEAELISHIQHLLKLEKVKTKLESQNGCEPTIGEWAEAMGISSPVLKSDIHRGRSSREKLITANLRLVVHIAKQYQNRGLNFQDLLQEGSMGLMKSVEKFKPQSGCRFATYAYWWIRQSIRKSIFQNSRTIRLPENVYMLLGKVSEARKTCVQEGNYRPSKEELAGHVGVSTEKLDKLLYNTRTPLSMQQPIWSDQDTTFQEITPDSGIETPTMSVGKQLMRNHVRNLLNVLSPKERRIIKLRFGIDGGKQRSLSEIGEIYGLSKERVRQLESRALYRLKQNMNSHGLHAYADLLV

SEQ ID NO: 7987 - DNA, 1202 bp, Arabidopsis thaliana
aacaacaagtctttctcacgaaaatggattctcggatttttctcgcattttccctctgttttctcttcactctccctctaatttcatctgcacctaaccgcttcctcactagatcgagtaacactagagatgggtcagtgataaagatgaaaacaagtgcttcttcttttgggtttgatccaactcgtgtcactcaactctcttggactcctagagtttttttgtatgaagggtttctttctgatgaggaatgtgatcattttatcaaattggcgaaagggaagcttgagaagtcaatggtggctgataatgattctggtgagagtgttgagagtgaagtacgcactagttctggaatgtttctctccaaacgacaggatgatatagtaagtaatgtggaggcaaaacttgctgcgtggacctttcttcccgaagagaatggtgaatccatgcaaatattgcattatgagaatggtcaaaagtatgaaccgcattttgactactttcacgaccaggctaatctagagctcggtggtcatcggattgccacagtattgatgtacttgtccaatgttgaaaagggaggagaaacagtgtttcccatgtggaagggtaaagcaactcagttgaaagacgatagctggaccgaatgtgcaaaacaaggctatgcagtgaaaccgaggaaaggggatgcattactgttcttcaatcttcacccaaatgcaaccacagattcaaatagcttacatggaagctgtccagtggttgagggagagaaatggtcagcaaccagatggattcacgttaagtcattcgaaagagcgtttaataagcaatctggatgtatggacgagaatgtgagctgcgaaaaatgggcaaaggcaggggaatgccagaagaatccaacatacatggttggttcagacaaagaccatggatattgcagaaagagttgcaaagcttgctcatcttaagaacaacaagtaaaatcaaagctcttattaaaggatcaaaatttttgtatagcgaaaaaccgggttttcgccattcgggtagataaacatatcgtcaatagaatgaaaaatttagaactatatactaaaaaaataattctgattctatgttactggtttcatgtgcaagttatgttccttatggttcataactagaccaaaacttaataaaagtcggtttatgttacc

SEQ ID NO: 7988 - protein, 323 aa, Arabidopsis thaliana
QQVFLTKMDSRIFLAFSLCFLFTLPLISSAPNRFLTRSSNTRDGSVIKMKTSASSFGFDPTRVTQLSWTPRVFLYEGFLSDEECDHFIKLAKGKLEKSMVADNDSGESVESEVRTSSGMFLSKRQDDIVSNVEAKLAAWTFLPEENGESMQILHYENGQKYEPHFDYFHDQANLELGGHRIATVLMYLSNVEKGGETVFPMWKGKATQLKDDSWTECAKQGYAVKPRKGDALLFFNLHPNATTDSNSLHGSCPVVEGEKWSATRWIHVKSFERAFNKQSGCMDENVSCEKWAKAGECQKNPTYMVGSDKDHGYCRKSCKACSS

SEQ ID NO: 7989 - protein, 316 aa, Arabidopsis thaliana
MDSRIFLAFSLCFLFTLPLISSAPNRFLTRSSNTRDGSVIKMKTSASSFGFDPTRVTQLSWTPRVFLYEGFLSDEECDHFIKLAKGKLEKSMVADNDSGESVESEVRTSSGMFLSKRQDDIVSNVEAKLAAWTFLPEENGESMQILHYENGQKYEPHFDYFHDQANLELGGHRIATVLMYLSNVEKGGETVFPMWKGKATQLKDDSWTECAKQGYAVKPRKGDALLFFNLHPNATTDSNSLHGSCPVVEGEKWSATRWIHVKSFERAFNKQSGCMDENVSCEKWAKAGECQKNPTYMVGSDKDHGYCRKSCKACSS

SEQ ID NO: 7990 - protein, 275 aa, Arabidopsis thaliana
MKTSASSFGFDPTRVTQLSWTPRVFLYEGFLSDEECDHFIKLAKGKLEKSMVADNDSGESVESEVRTSSGMFLSKRQDDIVSNVEAKLAAWTFLPEENGESMQILHYENGQKYEPHFDYFHDQANLELGGHRIATVLMYLSNVEKGGETVFPMWKGKATQLKDDSWTECAKQGYAVKPRKGDALLFFNLHPNATTDSNSLHGSCPVVEGEKWSATRWIHVKSFERAFNKQSGCMDENVSCEKWAKAGECQKNPTYMVGSDKDHGYCRKSCKACSS

SEQ ID NO: 7991 - DNA, 1168 bp, Arabidopsis thaliana
aaatagaaatttgtggtgcttcattggatcgacgaaaggcgtcccgatattgaggttcgttacgccggcgaagattttcatcggaaacttatctgatcgtttacgccggcgaagatttccatcggaaacttaatctgatcggaaggaagaaggctcgatgaagagcagattgaagagctacaggaggaagaagctagggttagccacagttatcgtcttctgttctctctgtttcctcttcggtttctatggctccactctactttctcagaatgtgcctcgtgttaaacccaggttgagaatgttggatatggttgagaatggggaagaagaagctagctcgatgcctcatggtgttactggagaagaatctattggatcgattccttttcaggtacttagttggagacctagggctatatattttccgaattttgcaactgcagaacaatgccaagctattattgagagagcaaaggttaatctgaaaccttctgctttggctctccggaaaggagaaactgctgagaacactaagggcactagaacaagctcaggaacttttatcagtgcttcagaagagagtactggtgctctggattttgttgaaaggaaaatcgcaagagctacgatgatcccaaggtcccatggagagtcattcaatattttacggtatgaacttggccaaaagtatgattcccactatgatgttttcaacccaacagaatatggaccacaatcaagccaaaggattgcctccttcctgttgtacttatctgatgttgaagaaggcggtgaaaccatgttcccatttgagaacggttctaatatgggcatcggatacgattacaagcaatgtattgggttgaaagtaaagcctcggaaaggagatggtcttcttttttattccgtgtttccaaatggaacgattgatcagacttcgcttcacgggagctgcccggtgaccaaaggagagaaatgggtggcaaccaaatggatcagagaccaagaccaggaagaataagttaggtttttttccatatatctatctcactctcacagcttctatcttttgactaaaaatctgctgctggatccctcgtgtacagttcttcgctgaaacagtgtaactatttagctttcttataatgcgaatgatacaaaaatc

SEQ ID NO: 7992 - protein, 288 aa, Arabidopsis thaliana; identical to SEQ ID NO: 6701

SEQ ID NO: 7993 - protein, 240 aa, Arabidopsis thaliana; identical to SEQ ID NO: 6702

SEQ ID NO: 7994 - protein, 237 aa, Arabidopsis thaliana; identical to SEQ ID NO: 6703

SEQ ID NO: 7995 - DNA, 1710 bp, Arabidopsis thaliana
ctctttagtgatatgatccgtcgcaaatcggaatctgccggcgagatggttccagtcgtctttgttcccttattgatagaataatcaaaaatccgagtcggagacgacgaagacccgagttccagctattaactatgcagataccatcaagagagcatagtttcattctatttctcttcatatctgcttttgtaattggtgctgcgtctgtacctgtacctgattctaattgctacgctctcgacaattcaagtcgtcttgtcgattttagcagctggatcggtcatccatttgaatatgatggcaaggaatttgatttggtggttagattttgcaaggatgtggaaacaagagggcaggcgggatatgttgattttggacgatttgacccgttaagctactttgtttctagttctgaaaatttcgatttcgtgcaagggttttaccatggcgacctgtcaaattgtgaacagagttatgacaaacttggacgtacagcacaggttaatattatttgtgggaactgtagtgatggacggtgtaaaggtggacttggatgcatatgtagtgtcacccaagattcaacttgtagagttactgtcgacttggctattccatgtgagaaacctggtccgcgggtgtttaagggatttacagtcggtttgcatcctcgctcatgggaaattatctataatgggatgacacagtttggatttgataagccccgtcgtgagtttagcttcaagaccgagcagactcatctcactctctatatgactgcaattgcttctctttcaacattggtagggaagcctatcatcaaggtttccccagagaatggtcttgatgttaagatagctggttcttccttgactgggaatcatccaacaactttatcaccgtcaactttagtactggattggaattgtgagaaatctcggcgaactccatatgaagtcaatgtcaccatcccagtggatggttatgatcctgttcagtttttccttacaaaactctgcgaatacaatcaaggtaacgaaggaggatcagcgaaaggatgggctatatttggagttttttcctgcgtattcctcgttgcatctgcacttttctgctgtgggggctttatttataaaacaagagtagagcgtgtgcgtggaactgatgcattgccggggatgtcacttctatcgggcttactagaaactgtgagtggaagtggacaaagctactcaagaactgaagacatcaacaatgcttttgccaatgaagtctcatgggaccgctcttccgcatcttctactcaagcgacaacaacacagagaccaagtgaaagaacatatggtgcgatctaattttgtcaagtgcctcacaagaggtactgtttcaagccatggtatggcacgcttgtgatctgcgatttctggattttgctttgtatgtttattttctaccttctagaaagaggtcaaaaagttaatagcttcaccgtgagaatgttgttttcaccagattcatgtgctatgatagaaaaagacaaagcaaacaagagttctttctttgcttaggttacaagaacaagagtatcgttataaagtcaacaaagattgaaacatatttttgtcaagggagtggttagaatctcttcctactctcttgcctttctcactaagacaaaaaaaagacttggactttgtctaaggttttgtg

SEQ ID NO: 7996 - protein, 406 aa, Arabidopsis thaliana
MQIPSREHSFILFLFISAFVIGAASVPVPDSNCYALDNSSRLVDFSSWIGHPFEYDGKEFDLVVRFCKDVETRGQAGYVDFGRFDPLSYFVSSSENFDFVQGFYHGDLSNCEQSYDKLGRTAQVNIICGNCSDGRCKGGLGCICSVTQDSTCRVTVDLAIPCEKPGPRVFKGFTVGLHPRSWEIIYNGMTQFGFDKPRREFSFKTEQTHLTLYMTAIASLSTLVGKPIIKVSPENGLDVKIAGSSLTGNHPTTLSPSTLVLDWNCEKSRRTPYEVNVTIPVDGYDPVQFFLTKLCEYNQGNEGGSAKGWAIFGVFSCVFLVASALFCCGGFIYKTRVERVRGTDALPGMSLLSGLLETVSGSGQSYSRTEDINNAFANEVSWDRSSASSTQATTTQRPSERTYGAI

SEQ ID NO: 7997 - protein, 218 aa, Arabidopsis thaliana
MTQFGFDKPRREFSFKTEQTHLTLYMTAIASLSTLVGKPIIKVSPENGLDVKIAGSSLTGNHPTTLSPSTLVLDWNCEKSRRTPYEVNVTIPVDGYDPVQFFLTKLCEYNQGNEGGSAKGWAIFGVFSCVFLVASALFCCGGFIYKTRVERVRGTDALPGMSLLSGLLETVSGSGQSYSRTEDINNAFANEVSWDRSSASSTQATTTQRPSERTYGAI

SEQ ID NO: 7998 - DNA, 5072 bp, Arabidopsis thaliana
aagagaagagagatctctctctcgattgctctcaagaacccaagtgacgtctggtttcagctgatttgtttcttctcattctctatcttcttctctgggaaatatcgattttgatctattaagagctgctacgagctttgggatgtggtgagatgcttgttctatctcgaacaatccgccggttgttgattttaaacaaactctctatcacaaatctttcccgatcatggattttattgagatctcgttgatctttcgagagcatttgccactactggaactatgttcggtcatcatcaacctcctactctttcttgtctttctatttgctgtctccgcgaggcagattctcgtctgcgtgagaagaggcagagataggctctctaaggacgatacggtttcagcttctaatcttagcttggaaagagaggttaaccatgttagtgttgggtttgggtttaatctgtctttgctctgttgcttatatgtgttaggcgtccaagttttggtgttagtatatgatggggttaaggttagaagagaagtcagtgactggtttgttctttgctttccagcttctcagagtttagcttggtttgtccttagcttcttagttcttcatttgaaatacaagtcttcagagaagctacccttcttggtgaggatatggtggttcctggcgttttcgatttgcctctgtactatgtatgtcgatggaagaaggctagccattgaaggttggagcagatgttcttctcatgttgtcgccaatttagctgttacacctgctcttgggtttctctgctttctggcctggagaggcgtttctggtattcaagttaccagaagctcctctgatcttcaagagcctttgcttgttgaagaagaggcagcttgtcttaaagttactccatatagtactgctgggctagttagccttattacgctttcatggttggatccacttctctcggctggttcaaaaagaccgcttgagcttaaggatataccgcttcttgcaccaagagatagagccaaatcaagttacaaggtcttgaagtcgaattggaagagatgcaagtccgagaatccttcaaagcctccttctttagctcgtgcaattatgaaatcattttggaaagaagctgcttgcaatgccgtatttgctgggttgaatactcttgtgtcctatgtcggtccttacttgatcagctactttgttgattatcttggagggaaggagattttccctcatgaaggatacgtactcgctgggatattctttacgtccaagcttatagagacagtcaccacccgccagtggtatatgggtgttgatatcctagggatgcatgttagatcagctcttacagcaatggtataccgaaaaggtctcaaactttcaagtatagccaagcagaaccacacgagcggtgaaattgtaaactacatggcagtcgatgtccagcgcataggagattactcatggtatcttcatgatatttggatgcttccgatgcaaatagttcttgctcttgcaatcctatataaaagcgtgggcatagctgctgtagctacattggttgctacaataatctcgattcttgtcacgattccactcgctaaggtccaggaagactatcaagataagttgatgactgcgaaagatgaaagaatgaggaaaacctcagagtgtcttaggaacatgagagttctgaaattgcaggcatgggaagatcgttatagagtgagattggaagaaatgagggaagaggagtatggttggcttcgcaaagccttatattctcaggcttttgttacttttatcttttggagttcccccatttttgtcgccgcagttacattcgctacttcgatatttctaggcactcaacttaccgctggaggtgttctttctgctctggcgacattcagaattcttcaggagccacttcggaactttcctgatctggtttcaatgatggctcagacaaaggtttctcttgataggatttctgggttcttgcaggaggaagaacttcaagaagatgcaactgttgttattccacggggactttcgaatatagccatagagattaaagatggtgtgttttgttgggaccctttttcttcaaggccgacattatctgggattcagatgaaagtggagaagggtatgcgtgtggctgtctgtggcacagttggctctggaaaatcaagttttatctcttgcatcctaggggaaatcccaaaaatctctggcgaagttagaatatgtggtactactggttatgtgtctcaatcggcttggattcagtctggtaacattgaagaaaacattctatttggcagtccaatggagaaaacaaagtacaagaatgtgatacaagcatgttccctaaagaaagatatagagcttttctcacatggggaccaaactattatcggggagagaggtataaatctcagcggaggtcagaaacagcgtgtacaacttgcaagggcattatatcaagatgctgacatttatttactagacgacccttttagtgctcttgatgcacacactggctctgatttgtttagggattatattctatctgcattggctgagaaaactgtggtttttgtaacgcatcaagttgagtttctccctgcagctgatctaatattggttctgaaggaaggcaggattattcaatcgggtaaatatgatgatctgctgcaagcaggtactgattttaaggccttagtgtctgcccaccatgaagcaatcgaggcaatggacatcccaagtccctcctcagaagactctgatgaaaatcctattcgcgatagtttggtcttgcataatccaaagtctgatgtttttgaaaatgacatcgagactttggcaaaggaagtacaagagggaggatctgcttcagatctaaaggcaatcaaagagaagaagaagaaagctaagcgttcccgcaaaaagcagcttgttcaagaagaggaacgagtaaagggaaaagtcagcatgaaggtgtacttgtcatacatgggtgctgcatataaaggggctctgattcctcttattatactcgcacaagctgctttccaatttcttcagattgctagtaattggtggatggcttgggcaaatcctcaaactgaaggtgacgaatctaaagtggatcctactctgcttctcatcgtttatacggctttagctttcgggagctctgtgttcatatttgttcgagctgctctggttgcaacttttggtcttgcagctgcacagaaactgttcttaaatatgctcagaagtgtgttccgagcgccaatgtcattctttgattccactcctgcaggaagaattttgaatcgggtttctattgatcaaagtgttgtagatcttgacattccttttagactcggtgggtttgcttcaacaacaatacaactctgtggcattgtcgctgtaatgaccaatgttacctggcaagttttccttcttgttgttccggtagctgttgcttgcttttggatgcagaaatattacatggcttcttcaagagaattggttcggatagttagtatccagaagtctccaataattcatctttttggagaatcaattgctggtgctgccacaataagaggatttggccaggaaaaaagatttatcaaaaggaatctttatcttctagattgttttgttcgacctttcttctgcagtatcgctgctatcgaatggctttgtttacgcatggaattactttccacacttgtatttgctttctgtatggttttactcgtcagttttccacatggaaccattgatccaagcatggcaggtcttgctgtgacatatggacttaacttgaatggacgtctatcacgatggatacttagcttttgtaagcttgaaaacaaaataatctcaatcgaaaggatttatcagtacagtcagattgtaggagaggccccagcaattatagaagatttccgcccgccttcctcgtggcctgcaacgggaacaattgagctagttgatgttaaggttcgttatgctgagaatcttccaacagtactccatggggtgagctgtgtgtttccgggtggaaaaaagattgggattgttgggcgaacgggaagcggaaagtcgactttgattcaagctttgtttcgattgattgagccaactgctggaaaaattactattgacaacattgacatttctcaaattggtcttcatgatcttcgtagtcgccttgggattatacctcaagatcctacattatttgaaggaacaatccgagcaaatcttgacccacttgaagaacattcagatgataaaatctgggaggcgcttgataaatcccagcttggagacgttgttagaggaaaagacctaaaacttgactctccagtactggaaaatggagataactggagtgtagggcagagacagcttgtgtcacttggacgagcattactgaaacaagccaaaatacttgttcttgatgaagcaacagcatcggttgacacagcaacagacaatctgatccagaagataatcagaacagagtttgaagactgcacggtctgcaccattgctcaccggataccaactgttatagacagtgacctagttttggttctcagcgacggtagagtagcagagtttgatactcctgcacggctattagaagacaaatcatcgatgttcttgaaattggtaacagaatactcctcaagatctactggaatccctgaattatgatcctccatgttaaaaattcagtttagggggtttcttttctcaagaggatataaaagaactgatatgtgacaaaagcttaaggtctaaagtaagagagagttttccacagggtttaagaaaagaaaaagcatgaaaggatgccaaaatctccgcgcttaaaaaactttgggtttaaatctcttctgtcgaacattgggagaaactttttttgtatggaacagttagtttctttggttttcatgtttatcaataaactgcaaaaacaaacaaagattagagtagaaactactaatcattcgtc

SEQ ID NO: 7999 - protein, 1514 aa, Arabidopsis thaliana
MDFIEISLIFREHLPLLELCSVIINLLLFLVFLFAVSARQILVCVRRGRDRLSKDDTVSASNLSLEREVNHVSVGFGFNLSLLCCLYVLGVQVLVLVYDGVKVRREVSDWFVLCFPASQSLAWFVLSFLVLHLKYKSSEKLPFLVRIWWFLAFSICLCTMYVDGRRLAIEGWSRCSSHVVANLAVTPALGFLCFLAWRGVSGIQVTRSSSDLQEPLLVEEEAACLKVTPYSTAGLVSLITLSWLDPLLSAGSKRPLELKDIPLLAPRDRAKSSYKVLKSNWKRCKSENPSKPPSLARAIMKSFWKEAACNAVFAGLNTLVSYVGPYLISYFVDYLGGKEIFPHEGYVLAGIFFTSKLIETVTTRQWYMGVDILGMHVRSALTAMVYRKGLKLSSIAKQNHTSGEIVNYMAVDVQRIGDYSWYLHDIWMLPMQIVLALAILYKSVGIAAVATLVATIISILVTIPLAKVQEDYQDKLMTAKDERMRKTSECLRNMRVLKLQAWEDRYRVRLEEMREEEYGWLRKALYSQAFVTFIFWSSPIFVAAVTFATSIFLGTQLTAGGVLSALATFRILQEPLRNFPDLVSMMAQTKVSLDRISGFLQEEELQEDATVVIPRGLSNIAIEIKDGVFCWDPFSSRPTLSGIQMKVEKGMRVAVCGTVGSGKSSFISCILGEIPKISGEVRICGTTGYVSQSAWIQSGNIEENILFGSPMEKTKYKNVIQACSLKKDIELFSHGDQTIIGERGINLSGGQKQRVQLARALYQDADIYLLDDPFSALDAHTGSDLFRDYILSALAEKTVVFVTHQVEFLPAADLILVLKEGRIIQSGKYDDLLQAGTDFKALVSAHHEAIEAMDIPSPSSEDSDENPIRDSLVLHNPKSDVFENDIETLAKEVQEGGSASDLKAIKEKKKKAKRSRKKQLVQEEERVKGKVSMKVYLSYMGAAYKGALIPLIILAQAAFQFLQIASNWWMAWANPQTEGDESKVDPTLLLIVYTALAFGSSVFIFVRAALVATFGLAAAQKLFLNMLRSVFRAPMSFFDSTPAGRILNRVSIDQSVVDLDIPFRLGGFASTTIQLCGIVAVMTNVTWQVFLLVVPVAVACFWMQKYYMASSRELVRIVSIQKSPIIHLFGESIAGAATIRGFGQEKRFIKRNLYLLDCFVRPFFCSIAAIEWLCLRMELLSTLVFAFCMVLLVSFPHGTIDPSMAGLAVTYGLNLNGRLSRWILSFCKLENKIISIERIYQYSQIVGEAPAIIEDFRPPSSWPATGTIELVDVKVRYAENLPTVLHGVSCVFPGGKKIGIVGRTGSGKSTLIQALFRLIEPTAGKITIDNIDISQIGLHDLRSRLGIIPQDPTLFEGTIRANLDPLEEHSDDKIWEALDKSQLGDVVRGKDLKLDSPVLENGDNWSVGQRQLVSLGRALLKQAKILVLDEATASVDTATDNLIQKIIRTEFEDCTVCTIAHRIPTVIDSDLVLVLSDGRVAEFDTPARLLEDKSSMFLKLVTEYSSRSTGIPEL

SEQ ID NO: 8000 - protein, 1355 aa, Arabidopsis thaliana
MYVDGRRLAIEGWSRCSSHVVANLAVTPALGFLCFLAWRGVSGIQVTRSSSDLQEPLLVEEEAACLKVTPYSTAGLVSLITLSWLDPLLSAGSKRPLELKDIPLLAPRDRAKSSYKVLKSNWKRCKSENPSKPPSLARAIMKSFWKEAACNAVFAGLNTLVSYVGPYLISYFVDYLGGKEIFPHEGYVLAGIFFTSKLIETVTTRQWYMGVDILGMHVRSALTAMVYRKGLKLSSIAKQNHTSGEIVNYMAVDVQRIGDYSWYLHDIWMLPMQIVLALAILYKSVGIAAVATLVATIISILVTIPLAKVQEDYQDKLMTAKDERMRKTSECLRNMRVLKLQAWEDRYRVRLEEMREEEYGWLRKALYSQAFVTFIFWSSPIFVAAVTFATSIFLGTQLTAGGVLSALATFRILQEPLRNFPDLVSMMAQTKVSLDRISGFLQEEELQEDATVVIPRGLSNIAIEIKDGVFCWDPFSSRPTLSGIQMKVEKGMRVAVCGTVGSGKSSFISCILGEIPKISGEVRICGTTGYVSQSAWIQSGNIEENILFGSPMEKTKYKNVIQACSLKKDIELFSHGDQTIIGERGINLSGGQKQRVQLARALYQDADIYLLDDPFSALDAHTGSDLFRDYILSALAEKTVVFVTHQVEFLPAADLILVLKEGRIIQSGKYDDLLQAGTDFKALVSAHHEAIEAMDIPSPSSEDSDENPIRDSLVLHNPKSDVFENDIETLAKEVQEGGSASDLKAIKEKKKKAKRSRKKQLVQEEERVKGKVSMKVYLSYMGAAYKGALIPLIILAQAAFQFLQIASNWWMAWANPQTEGDESKVDPTLLLIVYTALAFGSSVFIFVRAALVATFGLAAAQKLFLNMLRSVFRAPMSFFDSTPAGRILNRVSIDQSVVDLDIPFRLGGFASTTIQLCGIVAVMTNVTWQVFLLVVPVAVACFWMQKYYMASSRELVRIVSIQKSPIIHLFGESIAGAATIRGFGQEKRFIKRNLYLLDCFVRPFFCSIAAIEWLCLRMELLSTLVFAFCMVLLVSFPHGTIDPSMAGLAVTYGLNLNGRLSRWILSFCKLENKIISIERIYQYSQIVGEAPAIIEDFRPPSSWPATGTIELVDVKVRYAENLPTVLHGVSCVFPGGKKIGIVGRTGSGKSTLIQALFRLIEPTAGKITIDNIDISQIGLHDLRSRLGIIPQDPTLFEGTIRANLDPLEEHSDDKIWEALDKSQLGDVVRGKDLKLDSPVLENGDNWSVGQRQLVSLGRALLKQAKILVLDEATASVDTATDNLIQKIIRTEFEDCTVCTIAHRIPTVIDSDLVLVLSDGRVAEFDTPARLLEDKSSMFLKLVTEYSSRSTGIPEL

SEQ ID NO: 8001 - protein, 1215 aa, Arabidopsis thaliana
MKSFWKEAACNAVFAGLNTLVSYVGPYLISYFVDYLGGKEIFPHEGYVLAGIFFTSKLIETVTTRQWYMGVDILGMHVRSALTAMVYRKGLKLSSIAKQNHTSGEIVNYMAVDVQRIGDYSWYLHDIWMLPMQIVLALAILYKSVGIAAVATLVATIISILVTIPLAKVQEDYQDKLMTAKDERMRKTSECLRNMRVLKLQAWEDRYRVRLEEMREEEYGWLRKALYSQAFVTFIFWSSPIFVAAVTFATSIFLGTQLTAGGVLSALATFRILQEPLRNFPDLVSMMAQTKVSLDRISGFLQEEELQEDATVVIPRGLSNIAIEIKDGVFCWDPFSSRPTLSGIQMKVEKGMRVAVCGTVGSGKSSFISCILGEIPKISGEVRICGTTGYVSQSAWIQSGNIEENILFGSPMEKTKYKNVIQACSLKKDIELFSHGDQTIIGERGINLSGGQKQRVQLARALYQDADIYLLDDPFSALDAHTGSDLFRDYILSALAEKTVVFVTHQVEFLPAADLILVLKEGRIIQSGKYDDLLQAGTDFKALVSAHHEAIEAMDIPSPSSEDSDENPIRDSLVLHNPKSDVFENDIETLAKEVQEGGSASDLKAIKEKKKKAKRSRKKQLVQEEERVKGKVSMKVYLSYMGAAYKGALIPLIILAQAAFQFLQIASNWWMAWANPQTEGDESKVDPTLLLIVYTALAFGSSVFIFVRAALVATFGLAAAQKLFLNMLRSVFRAPMSFFDSTPAGRILNRVSIDQSVVDLDIPFRLGGFASTTIQLCGIVAVMTNVTWQVFLLVVPVAVACFWMQKYYMASSRELVRIVSIQKSPIIHLFGESIAGAATIRGFGQEKRFIKRNLYLLDCFVRPFFCSIAAIEWLCLRMELLSTLVFAFCMVLLVSFPHGTIDPSMAGLAVTYGLNLNGRLSRWILSFCKLENKIISIERIYQYSQIVGEAPAIIEDFRPPSSWPATGTIELVDVKVRYAENLPTVLHGVSCVFPGGKKIGIVGRTGSGKSTLIQALFRLIEPTAGKITIDNIDISQIGLHDLRSRLGIIPQDPTLFEGTIRANLDPLEEHSDDKIWEALDKSQLGDVVRGKDLKLDSPVLENGDNWSVGQRQLVSLGRALLKQAKILVLDEATASVDTATDNLIQKIIRTEFEDCTVCTIAHRIPTVIDSDLVLVLSDGRVAEFDTPARLLEDKSSMFLKLVTEYSSRSTGIPEL

SEQ ID NO: 8002 - DNA, 1232 bp, Arabidopsis thaliana
atgttgtcttcaacctcacccacactttcttcggtctcatccttttataaaatccccatttcctctaacgatttttcgcctctctctctctctctctctctctctctctttcttctatcttctccgtcatcgttctctctctctcctctcccggagatttttactcaggcgttcttctgtggatcagaggtgaaaaagatgaatcattgcaaccttcagcagaacgccttcatgtctcgtgaggagatgatgggatttgaccgtaaggatcttgttgtttgtcctaagcctcgacgtgttggtttactcgccaacaacgttattcgtcctcttagattacatatgagtcaagctgcagccgacttgtgtgattctaaagctggtgctgagcttttggaaatcattcgtagaaaggaggataatggaacaatagggcagttactatcatcatccccaccgtattttcccggttcaccaccgagtagagcggcgaacccattagcccaagatgctcgttttcgagatgagaaactcaatccaatctcaccaaactctcctttccttcagccatattcggcaaccgggtttccatctccatcttcttcctcatcatcgtcgtcttcccgtggttgtgttagaatgaaatttggactcaactcgcctgcagttagagtagaaggatttgattgcttgaaccgtgaccgtcaaaactcgagcatccctgccatggcttagtagacaaacaacaaaaaaacaagtgtacatagagattccggaatcgttcgttcgccaatgcctaacagaggaggatttgattactactgctgcaactattactactaccatttttgaaagtaaatgaatatgtttttgtttttcatcttctcctaagagagagagagagggaagaggaaggaggaagatgaagatcagttaccgtcgccggtcaccgtttaactgttttattcaggttagtgtttgtatataaagatgcagtatttaaaagaagagtcgaatctatgtattcgtttggtgtttttctgggtcgggcggatctttagtactgtttcatatataactaagagggaagattagaagatgaagaagctgtaaaattttcttgggaagaaaactctggtttctatcttctcgttgtaatatagataatcaacttggatttatcttctttcagattcaccattgtatatagtaatgtttatttttcttggtgc

SEQ ID NO: 8003 - protein, 244 aa, Arabidopsis thaliana
MLSSTSPTLSSVSSFYKIPISSNDFSPLSLSLSLSLFLLSSPSSFSLSPLPEIFTQAFFCGSEVKKMNHCNLQQNAFMSREEMMGFDRKDLVVCPKPRRVGLLANNVIRPLRLHMSQAAADLCDSKAGAELLEIIRRKEDNGTIGQLLSSSPPYFPGSPPSRAANPLAQDARFRDEKLNPISPNSPFLQPYSATGFPSPSSSSSSSSSRGCVRMKFGLNSPAVRVEGFDCLNRDRQNSSIPAMA

SEQ ID NO: 8004 - protein, 178 aa, Arabidopsis thaliana
MNHCNLQQNAFMSREEMMGFDRKDLVVCPKPRRVGLLANNVIRPLRLHMSQAAADLCDSKAGAELLEIIRRKEDNGTIGQLLSSSPPYFPGSPPSRAANPLAQDARFRDEKLNPISPNSPFLQPYSATGFPSPSSSSSSSSSRGCVRMKFGLNSPAVRVEGFDCLNRDRQNSSIPAMA

SEQ ID NO: 8005 - protein, 167 aa, Arabidopsis thaliana
MSREEMMGFDRKDLVVCPKPRRVGLLANNVIRPLRLHMSQAAADLCDSKAGAELLEIIRRKEDNGTIGQLLSSSPPYFPGSPPSRAANPLAQDARFRDEKLNPISPNSPFLQPYSATGFPSPSSSSSSSSSRGCVRMKFGLNSPAVRVEGFDCLNRDRQNSSIPAMA

SEQ ID NO: 8006 - DNA, 649 bp, Arabidopsis thaliana
gctcagtactcagcattgtctgattaagctgtcgtacaaaacaagtcagctatttagttagggtttggtcggcaattaaataatctatcaacctaattggctctcaatcggaaaatgagccgaggtgggagctttggaggcggacaaagctcgttaggttatctttttgggtcagacaatgagattccaaaaactcccgctccaccggtagccccaaagcctgcaccaccgtacggtgtagattccacagaggaggaccatgaagctgaccaaaaacccaagatctctaacaacaactaccaaagagttcagggccaaaactccggcaacttcgtcaccgatcgtccaacgacgaaggtgaaatcggttcctggtggaggctcatctctaggatacttgttcggagataagtgaagaaatgaaaatgaagttaaaaaactagggtttgtatctctctagtgaggcttttactctatatcatacgtacgtaatgtaatgtggagatccctatctagatctctacacatcacttatttatatttacgtatgaaaatgtgtgttttgagttaacagttaattactttcaacttgtggaaaaagggtttctagtcaatattttcagcaatatatatgtactatataagtattg

SEQ ID NO: 8007 - protein, 99 aa, Arabidopsis thaliana
MSRGGSFGGGQSSLGYLFGSDNEIPKTPAPPVAPKPAPPYGVDSTEEDHEADQKPKISNNNYQRVQGQNSGNFVTDRPTTKVKSVPGGGSSLGYLFGDK

SEQ ID NO: 8008 - DNA, 1961 bp, Arabidopsis thaliana
aaggaaggtcgtgagaaaagaaaaacacttctcaatctttctacagtcttcttcttccaaaagaacaccatcttccttcgtaatgtcagagaaccagtccgaagaagtccagcaaatcgagaagctctatgagttcagtgagcgtctcaatgcctccaaggacaagtctcagaatgttgaggattatgaggggatcattaagatgtccaagactagtatgaaggcaaagcagcttgcgtcgcagctaattcctcgctacttcaagttcttccctagtctctctactgaggctttcgatgcgcatatggactgtatcgatgatggagatcttggggtacgtgttcaagccatccgtgggctcccgctgttttgtaaggatacgccagatattttatctaagattgttgatgttcttgttcaactcttgaatacagaggaacctgtggagcgtgatgctgtgcataaggctctgatgtcattgttacgacaagatccaaaagcatcatcgactgccttatttacccatgctggggttactccaactactgatgatcaaattcgtgaaaaggtcttgaatttcatcagagataaggtgattcctcttaaaggggaactcttaaagcctcaagaggagatggaaagacatataacagatttgatcaaacagagcctagaagatgtaactggaggagagtttaaaatgtttatggatttcctgacaagtttgagtatatttggaggcaaagctcctccagaaagaatgcaagaacttgtggaaattattgaaggacaggcggatttaaatgcacaatttgaattttcagatacggaccatattgacaggttgatatcatgcctgcaactggctcttcccttttttgcgagaggtgctccaagcagcaggtttcttatctatttgaacaaacatatcatacctgtttttgacaagctcccagaagagaggaaacttgatttgctcaaagcacttgctgatatttctccatacacaactgctcaggaagcaaggcagctgcttccttcaatcgttgagcttttaaagatatacatgcctgctagaaagactggagaggaaatgaacttcacatacgtcgagtgtttgttgtatgcgtttcatcaccttgcccacaaggttccaaatgctacaaacagcttgtgtgggtacaagattgtgaccggccagccatcagacagattgggggaggacttctcagagttgaacaaagactttactgagagattaaccattgttgaggatctaactaaggcaacgatgaagaaattaactcagggaatgactgagcacaacaaagccatgtcggctgctaagacagatgaagagaaagcgagtattaaaacaaagaggcagaatactacaactggacttaggacctgtaataacatattggcgatgacaaagccattgcatgcaaaagtgccaccttttatcggagacactaatctcaacctgtcttggaaagaagccacaaagccgttagcctcaacaacaacaacaattggaggaaagcggcctgctaatagcaacaatggaagtggtaacaatgttgcagcaaagaagggacgtgggtcgggtactatgcaaaaccagcttgtgaacaaggcctttgaggggatatcatcctatggagctggtagaggcggaaaccgaggttggggaagacgtggaggtggtcgaggaagaggacaaggaagaggtcactggtaataacaagtttccagtagaggattccatgactgtgtttctgtttctgtgtctgtctgtcagtacaagttttgattttggtacttagtagagtttggagacttctcttctcatatcagaatagatcatctgtgtttttctctgttcactaaagatatttcgagcattagaaaaaaagatatttcgagcatttatgaccttagttatacaatctttctag

SEQ ID NO: 8009 - protein, 580 aa, Arabidopsis thaliana
RKVVRKEKHFSIFLQSSSSKRTPSSFVMSENQSEEVQQIEKLYEFSERLNASKDKSQNVEDYEGIIKMSKTSMKAKQLASQLIPRYFKFFPSLSTEAFDAHMDCIDDGDLGVRVQAIRGLPLFCKDTPDILSKIVDVLVQLLNTEEPVERDAVHKALMSLLRQDPKASSTALFTHAGVTPTTDDQIREKVLNFIRDKVIPLKGELLKPQEEMERHITDLIKQSLEDVTGGEFKMFMDFLTSLSIFGGKAPPERMQELVEIIEGQADLNAQFEFSDTDHIDRLISCLQLALPFFARGAPSSRFLIYLNKHIIPVFDKLPEERKLDLLKALADISPYTTAQEARQLLPSIVELLKIYMPARKTGEEMNFTYVECLLYAFHHLAHKVPNATNSLCGYKIVTGQPSDRLGEDFSELNKDFTERLTIVEDLTKATMKKLTQGMTEHNKAMSAAKTDEEKASIKTKRQNTTTGLRTCNNILAMTKPLHAKVPPFIGDTNLNLSWKEATKPLASTTTTIGGKRPANSNNGSGNNVAAKKGRGSGTMQNQLVNKAFEGISSYGAGRGGNRGWGRRGGGRGRGQGRGHW

SEQ ID NO: 8010 - protein, 553 aa, Arabidopsis thaliana
MSENQSEEVQQIEKLYEFSERLNASKDKSQNVEDYEGIIKMSKTSMKAKQLASQLIPRYFKFFPSLSTEAFDAHMDCIDDGDLGVRVQAIRGLPLFCKDTPDILSKIVDVLVQLLNTEEPVERDAVHKALMSLLRQDPKASSTALFTHAGVTPTTDDQIREKVLNFIRDKVIPLKGELLKPQEEMERHITDLIKQSLEDVTGGEFKMFMDFLTSLSIFGGKAPPERMQELVEIIEGQADLNAQFEFSDTDHIDRLISCLQLALPFFARGAPSSRFLIYLNKHIIPVFDKLPEERKLDLLKALADISPYTTAQEARQLLPSIVELLKIYMPARKTGEEMNFTYVECLLYAFHHLAHKVPNATNSLCGYKIVTGQPSDRLGEDFSELNKDFTERLTIVEDLTKATMKKLTQGMTEHNKAMSAAKTDEEKASIKTKRQNTTTGLRTCNNILAMTKPLHAKVPPFIGDTNLNLSWKEATKPLASTTTTIGGKRPANSNNGSGNNVAAKKGRGSGTMQNQLVNKAFEGISSYGAGRGGNRGWGRRGGGRGRGQGRGHW

SEQ ID NO: 8011 - protein, 513 aa, Arabidopsis thaliana
MSKTSMKAKQLASQLIPRYFKFFPSLSTEAFDAHMDCIDDGDLGVRVQAIRGLPLFCKDTPDILSKIVDVLVQLLNTEEPVERDAVHKALMSLLRQDPKASSTALFTHAGVTPTTDDQIREKVLNFIRDKVIPLKGELLKPQEEMERHITDLIKQSLEDVTGGEFKMFMDFLTSLSIFGGKAPPERMQELVEIIEGQADLNAQFEFSDTDHIDRLISCLQLALPFFARGAPSSRFLIYLNKHIIPVFDKLPEERKLDLLKALADISPYTTAQEARQLLPSIVELLKIYMPARKTGEEMNFTYVECLLYAFHHLAHKVPNATNSLCGYKIVTGQPSDRLGEDFSELNKDFTERLTIVEDLTKATMKKLTQGMTEHNKAMSAAKTDEEKASIKTKRQNTTTGLRTCNNILAMTKPLHAKVPPFIGDTNLNLSWKEATKPLASTTTTIGGKRPANSNNGSGNNVAAKKGRGSGTMQNQLVNKAFEGISSYGAGRGGNRGWGRRGGGRGRGQGRGHW

SEQ ID NO: 8012 - DNA, 970 bp, Arabidopsis thaliana
tctacgggagctaaaaaggaactgggaagagtttgtttcttcgattcgtagatcaattctcagctgacattgaggtttatctcagatcgaaatcgagaagaagatgtttctcactaggactgagtatgacagaggagtcaatacattttctcctgaaggtcgtctctttcaggttgagtatgccattgaagctatcaagcttggttctactgctattggtgtaaagacgaaagagggagttgttcttgcagtcgagaagcgtattacttcgcctttactggagccgagtagtgttgagaagattatggaaattgatgaccatataggttgtgctatgagtggtctgattgctgacgcgcgaacacttgttgagcatgcacgagtagagacccagaaccacaggttctcgtatggtgagccaatgactgtagaatctacaacacaagctttgtgtgatcttgctttacggtttggtgaaggagaggaagagtcaatgtctcgtccatttggagtatcccttctcattgctgggcatgatgaaaatggaccgagcctgtactacacagatccatcgggaacattctggcaatgcaatgcaaaggcaattgggtctggctcagaaggagctgatagttctctccaagagcaattcaacaaggatataactcttcaagaagctgaaacaatagctgtatctatcctaaagcaagtaatggaagaaaaggtgactccaaacaatgtcgacattgccaaagtcgcaccagcttatcacctctacactcctcaggaggttgaagccgtcatcagtcgtctatgaagaaataaaccgccattctcttcctgttatcttaccttgtctgttcggtaatttatcaggcttctgtctgcttccggttctctaaaccaaaaattagtttcgtttaatcagataatggattttatcgagttgagttttattgagctttctatc

SEQ ID NO: 8013 - protein, 237 aa, Arabidopsis thaliana
MFLTRTEYDRGVNTFSPEGRLFQVEYAIEAIKLGSTAIGVKTKEGVVLAVEKRITSPLLEPSSVEKIMEIDDHIGCAMSGLIADARTLVEHARVETQNHRFSYGEPMTVESTTQALCDLALRFGEGEEESMSRPFGVSLLIAGHDENGPSLYYTDPSGTFWQCNAKAIGSGSEGADSSLQEQFNKDITLQEAETIAVSILKQVMEEKVTPNNVDIAKVAPAYHLYTPQEVEAVISRL

SEQ ID NO: 8014 - protein, 170 aa, Arabidopsis thaliana
MEIDDHIGCAMSGLIADARTLVEHARVETQNHRFSYGEPMTVESTTQALCDLALRFGEGEEESMSRPFGVSLLIAGHDENGPSLYYTDPSGTFWQCNAKAIGSGSEGADSSLQEQFNKDITLQEAETIAVSILKQVMEEKVTPNNVDIAKVAPAYHLYTPQEVEAVISRL

SEQ ID NO: 8015 - protein, 160 aa, Arabidopsis thaliana
MSGLIADARTLVEHARVETQNHRFSYGEPMTVESTTQALCDLALRFGEGEEESMSRPFGVSLLIAGHDENGPSLYYTDPSGTFWQCNAKAIGSGSEGADSSLQEQFNKDITLQEAETIAVSILKQVMEEKVTPNNVDIAKVAPAYHLYTPQEVEAVISRL

SEQ ID NO: 8016 - DNA, 1764 bp, Arabidopsis thaliana
aatataacagaaaaataaatatcttgtctgaatcagagagagagctctcaacaaccaaagctttggactctcaggccaggaagactatgggattgggcggcgatcaatcctttgttcccgtcatggattccggccaagtccgcctcaaggagctcggctacaagcaagagctcaagcgcgatctctcggtcttctccaatttcgccatctccttctccatcatatcggtgctcactggtatcaccaccacctacaacaccggtttaagattcggcggcactgtcactctggtctacggatggttcctggccggctccttcacaatgtgcgttgggttatctatggccgagatctgctcctcttaccctacctccggtggtctctactactggagtgctatgctcgctggccctcgttgggctcctcttgcctcttggatgactggctggttcaacatcgttggtcagtgggcagtgacggccagcgttgacttctctctggcacagttgattcaggtgatcgtccttctctccaccggcggtagaaacggcggcggttataaaggatcagactttgttgtgattggtatccatggtgggatcctcttcatccacgctcttctcaacagcctccccatctccgtcttgtctttcattggacagcttgctgctctttggaatctcctcggggttttggtgctcatgattctgattcctttggtttctacggaaagagcaaccactaagtttgtctttaccaatttcaacactgataatggccttggcatcaccagctacgcttacatattcgttttgggactcctcatgagccagtacaccattacagggtatgatgcctctgcccacatgacagaagagacagtcgacgcagacaagaacgggcccagaggaataatcagtgcaattggtatatcaattctgtttggatggggttatatattgggcataagctatgccgtcacagacataccttctcttctgagtgagaccaacaactctggtgggtatgccattgctgagatcttctacttagctttcaagaataggtttgggagcggtactggtggaatcgtgtgcttaggcgttgttgcggttgctgtgtttttctgtggcatgagctctgtcaccagcaattccaggatggcgtatgcgttttcgagagatggagcgatgccaatgtcgccgttatggcacaaagtgaacagcagagaggtccccattaatgcggtttggctctctgctctcatatcattttgtatggccctcacctcactggggagcatagtggcgttccaagcaatggtgtcgatcgcaacgattggactgtacatagcatacgcaatcccgattatattgagagtgacgcttgcgcgcaacaccttcgtacctggaccattcagcctgggaaaatacggaatggtagtcgggtgggtggcagtcctgtgggttgtaaccatatcagtcctcttctccttacccgtggcatatcccataacagcagagacactcaactacactccggtggcagttgctggtttggtggccataaccctctcatattggcttttcagtgcccgccactggtttacgggtcccatctccaacattcttagctgaaacaacgtttcaggggttgatttatagtaaagccattgttagctagctgatatttacccttttatacattcaacaagcaacaacacatctgtcacatttttatttcatcgccaaaactttaaacttt

SEQ ID NO: 8017 - protein, 544 aa, Arabidopsis thaliana
YNRKINILSESERELSTTKALDSQARKTMGLGGDQSFVPVMDSGQVRLKELGYKQELKRDLSVFSNFAISFSIISVLTGITTTYNTGLRFGGTVTLVYGWFLAGSFTMCVGLSMAEICSSYPTSGGLYYWSAMLAGPRWAPLASWMTGWFNIVGQWAVTASVDFSLAQLIQVIVLLSTGGRNGGGYKGSDFVVIGIHGGILFIHALLNSLPISVLSFIGQLAALWNLLGVLVLMILIPLVSTERATTKFVFTNFNTDNGLGITSYAYIFVLGLLMSQYTITGYDASAHMTEETVDADKNGPRGIISAIGISILFGWGYILGISYAVTDIPSLLSETNNSGGYAIAEIFYLAFKNRFGSGTGGIVCLGVVAVAVFFCGMSSVTSNSRMAYAFSRDGAMPMSPLWHKVNSREVPINAVWLSALISFCMALTSLGSIVAFQAMVSIATIGLYIAYAIPIILRVTLARNTFVPGPFSLGKYGMVVGWVAVLWVVTISVLFSLPVAYPITAETLNYTPVAVAGLVAITLSYWLFSARHWFTGPISNILS

SEQ ID NO: 8018 - protein, 516 aa, Arabidopsis thaliana
MGLGGDQSFVPVMDSGQVRLKELGYKQELKRDLSVFSNFAISFSIISVLTGITTTYNTGLRFGGTVTLVYGWFLAGSFTMCVGLSMAEICSSYPTSGGLYYWSAMLAGPRWAPLASWMTGWFNIVGQWAVTASVDFSLAQLIQVIVLLSTGGRNGGGYKGSDFVVIGIHGGILFIHALLNSLPISVLSFIGQLAALWNLLGVLVLMILIPLVSTERATTKFVFTNFNTDNGLGITSYAYIFVLGLLMSQYTITGYDASAHMTEETVDADKNGPRGIISAIGISILFGWGYILGISYAVTDIPSLLSETNNSGGYAIAEIFYLAFKNRFGSGTGGIVCLGVVAVAVFFCGMSSVTSNSRMAYAFSRDGAMPMSPLWHKVNSREVPINAVWLSALISFCMALTSLGSIVAFQAMVSIATIGLYIAYAIPIILRVTLARNTFVPGPFSLGKYGMVVGWVAVLWVVTISVLFSLPVAYPITAETLNYTPVAVAGLVAITLSYWLFSARHWFTGPISNILS

SEQ ID NO: 8019 - protein, 504 aa, Arabidopsis thaliana
MDSGQVRLKELGYKQELKRDLSVFSNFAISFSIISVLTGITTTYNTGLRFGGTVTLVYGWFLAGSFTMCVGLSMAEICSSYPTSGGLYYWSAMLAGPRWAPLASWMTGWFNIVGQWAVTASVDFSLAQLIQVIVLLSTGGRNGGGYKGSDFVVIGIHGGILFIHALLNSLPISVLSFIGQLAALWNLLGVLVLMILIPLVSTERATTKFVFTNFNTDNGLGITSYAYIFVLGLLMSQYTITGYDASAHMTEETVDADKNGPRGIISAIGISILFGWGYILGISYAVTDIPSLLSETNNSGGYAIAEIFYLAFKNRFGSGTGGIVCLGVVAVAVFFCGMSSVTSNSRMAYAFSRDGAMPMSPLWHKVNSREVPINAVWLSALISFCMALTSLGSIVAFQAMVSIATIGLYIAYAIPIILRVTLARNTFVPGPFSLGKYGMVVGWVAVLWVVTISVLFSLPVAYPITAETLNYTPVAVAGLVAITLSYWLFSARHWFTGPISNILS

SEQ ID NO: 8020 - DNA, 975 bp, Arabidopsis thaliana
gagatcccatttcttttgttggcttacttctctcgaatttacgcaggaagatcattagcagagaattctcatctgattcagtccatggctgccacggctcttttccgatcgattcgccgacgcgacgtcgtctccgcgcctctttccgtttacaaatcccttgctggtaatgctcaaccttcctggggtagttcatacattggtcagaactatgcaagtttctccagagctttcgggtcaaaacctgttgtgaatgacattcttggtactggtttgggcactaacaatgccattagagaggagagagagaagtcaaaatctactgaagctgcaattgttggtgctcaattgactcgatctttccgtgctcttgatgtgggaacatcgaaacgattgttttctacaatctcaggggatataaagacaacacaggaggaaccaaaaatcaaaagctttcgccctttatctcctcacctttctgtttaccagcctcagatgaactccatgctatcgattttcaacagaatctcaggggtttacttgaccggtgtcactttcgctggctaccttctctacctgaagatgggtatgatctgcctcacctacccgagtttctaccaagtcctttaccatacacaacagcaacttccagtcatcacctcggttactgcattagccgctatttatcatactatcaagagtactcactcactcttgacccattaaaaacctttaccaaagctctttcgatgaagccgccaaagtctccagtaagagtttctttgagatgattaataaggagacaagaaaacatttgttaaactctgtcttgaaaaggtaaagatttagcacctgtttctttggattcgaggcttttttgggggtatgtttgttgcttttctttgttctcagaccttttttgaatgatgtaataaatgtttaccaaagttctgttgctacgttactctttttgtt

SEQ ID NO: 8021 - protein, 241 aa, Arabidopsis thaliana
EIPFLLLAYFSRIYAGRSLAENSHLIQSMAATALFRSIRRRDVVSAPLSVYKSLAGNAQPSWGSSYIGQNYASFSRAFGSKPVVNDILGTGLGTNNAIREEREKSKSTEAAIVGAQLTRSFRALDVGTSKRLFSTISGDIKTTQEEPKIKSFRPLSPHLSVYQPQMNSMLSIFNRISGVYLTGVTFAGYLLYLKMGMICLTYPSFYQVLYHTQQQLPVITSVTALAAIYHTIKSTHSLLTH

SEQ ID NO: 8022 - protein, 213 aa, Arabidopsis thaliana
MAATALFRSIRRRDVVSAPLSVYKSLAGNAQPSWGSSYIGQNYASFSRAFGSKPVVNDILGTGLGTNNAIREEREKSKSTEAAIVGAQLTRSFRALDVGTSKRLFSTISGDIKTTQEEPKIKSFRPLSPHLSVYQPQMNSMLSIFNRISGVYLTGVTFAGYLLYLKMGMICLTYPSFYQVLYHTQQQLPVITSVTALAAIYHTIKSTHSLLTH

SEQ ID NO: 8023 - DNA, 1531 bp, Arabidopsis thaliana
aattgtcaaaaactcacaaggcattatcatgtggacatgcaaccttttttttctatacgcattacagaaatgaaaacaatgattaggatcgcatgcacgtcaagaaaacaacctatagctgtactttgatatactaactcaaatcatgtcttggctcaagcacacaagcttctagctagatacaactgcaaacatatatgatggctttgtctaataagaagacgacgacttgggcaccgctttgaccagtcaatacaccaaatctgtatgtatcatttatataaatattatctttccacagttgttgaagaatcacatagacagcacacacggattccatggagactaaacagagtatccctctcctcatgccctataagatgggacccttcaatctttctcacagggttgttttggcgccattgactagatcgagatcgtatggtaacattcctcagcctaatgccaaattatattacactcagagaacaacacctggtggtcttcttatttccgaatcctgtgtagtctccgagacatcattgggctatccggatttacctggattatggaacagagaccaagtggaggcatggaagcccatcgtggatgcggttcattcgaaaggcggtatcttcttctgccagatttggcatggtggcagagtttttcatcaagaccagccaaatggggaagcacccgtctcctctacagacaagccattgatgtgcaagaacatgtatggaggtcagtttaagcctccacggcggttaaggagcgacgagcttcccgccattgtcaacgactttagaatcgctgcacgaaacgcgatcgaagctggcttcgatggagtggaggttcacggcgcacatggttacctgatcgatcagttcctgaaagacaaagtgaatgacagaagtgaccaatatggtgggtcattagagaaccgctgtagatttgctcttgaagtaatcgaagcagtggtgaacgagatcggttcagatcgtgttggaatcagactctcgccatttgcagattacatggagtcaggagactcgaatccagaagcattagggctctacctggtgcaagctatgaacaagcatggcatggagtcgtctacggtcacatggttgaacctagaatgaaaacccttgaaggaatcttcgaatgcacggaatcgcttacgcccatgcgaaaagccttcaaaggtacgttcatagtagcaggaggatattctagagaagacgggaacaaggcggtggaagagggaagaaccgatcttgtggcttatggacggccgttcttggcgaatccggatctgacgaggagattcgaactcaatgagccgttgaataggtacgatagatcaacgttctacacttcagatcctgtagtgggctatacagactaccctttcctcgagaccacagatacaacaactgcttaaggggtttattcagatgcattattagcaaaacatatttttcaatcacataaggctaaaagcttgcctcaaacaagcttcggc

SEQ ID NO: 8024 - protein, 269 aa, Arabidopsis thaliana
METKQSIPLLMPYKMGPFNLSHRVVLAPLTRSRSYGNIPQPNAKLYYTQRTTPGGLLISESCVVSETSLGYPDLPGLWNRDQVEAWKPIVDAVHSKGGIFFCQIWHGGRVFHQDQPNGEAPVSSTDKPLMCKNMYGGQFKPPRRLRSDELPAIVNDFRIAARNAIEAGFDGVEVHGAHGYLIDQFLKDKVNDRSDQYGGSLENRCRFALEVIEAVVNEIGSDRVGIRLSPFADYMESGDSNPEALGLYLVQAMNKHGMESSTVTWLNLE

SEQ ID NO: 8025 - protein, 259 aa, Arabidopsis thaliana
MPYKMGPFNLSHRVVLAPLTRSRSYGNIPQPNAKLYYTQRTTPGGLLISESCVVSETSLGYPDLPGLWNRDQVEAWKPIVDAVHSKGGIFFCQIWHGGRVFHQDQPNGEAPVSSTDKPLMCKNMYGGQFKPPRRLRSDELPAIVNDFRIAARNAIEAGFDGVEVHGAHGYLIDQFLKDKVNDRSDQYGGSLENRCRFALEVIEAVVNEIGSDRVGIRLSPFADYMESGDSNPEALGLYLVQAMNKHGMESSTVTWLNLE

SEQ ID NO: 8026 - protein, 255 aa, Arabidopsis thaliana
MGPFNLSHRVVLAPLTRSRSYGNIPQPNAKLYYTQRTTPGGLLISESCVVSETSLGYPDLPGLWNRDQVEAWKPIVDAVHSKGGIFFCQIWHGGRVFHQDQPNGEAPVSSTDKPLMCKNMYGGQFKPPRRLRSDELPAIVNDFRIAARNAIEAGFDGVEVHGAHGYLIDQFLKDKVNDRSDQYGGSLENRCRFALEVIEAVVNEIGSDRVGIRLSPFADYMESGDSNPEALGLYLVQAMNKHGMESSTVTWLNLE

SEQ ID NO: 8027 - DNA, 1277 bp, Arabidopsis thaliana
acacaaagaagaccaacaagaaacagagttgaatcagttctacaatgatctctgtctctcgattcttgtcgcctcaattctacgcaattccaaggagcttcgtaaaaatgtctgcttcagcgactcaaacggccggagaagtttcaatggggatcaagcctccttcacaccctacttacgatttgaaagctgttatcaaactagccctagctgaagatgctggtcatacaggagatgtaacgtgtatggctacgataccgtttgatatggaagtggaagcttatttcttggccaaggaagatggtattgttgctggagttgctcttgctgacatgatttttgaacatgttgatccctccttgaaggttgaatggatgcgaaaggatggagattatgttcataaaggattgaagtttgggaaagtatcagggaatgcacataagattgttgttgctgaaagagttttgctcaactttatgcagaggatgagtggaattgcaacccttaccaagttaatggcagatgctgcatcccctgcatgtatactggagacaagaaaaactgctcctggtttgcggttggtagataaatgggcggtactgattggtggagggaggaatcataggatggggttatttgatatggtgatgataaaagataaccatatctcagctgcaggcggtatagtaaacgccgtcaaatccgtagacgaatatctaaagcaaaagaatctcgaaatggatgtagaggtggagacgaggacgcttgaggaagtgaaggaagtgttagagtatgctagtggatccgagactcggttgacgagaataatgctggataatatggttgtgcccttagagaatggagatgtcgatgtcacaatgcttaaagatgcggtagagctaatcaacgggagattcgagacagaggcatcaggcaatgttacacttgagacagtacacaagatcggacagagtggagttacattcattagcagtggagctcttacgcattcggtgaaagcactagacatatctctgaagatcgatacagagttggctctcgaggtgggaagaaggaccaaacgagcatagagaacatcgtcttcctcgtatacttactttctttttattttccgggaaacatgtaatcaataaggtgagaggcaaacgaatgaatctgcctataaaatgactgtttcttctacaatgtaataatagtaaaactcttgagtacaatagagtggagacatggatgaatatctgaataagctttctccc

SEQ ID NO: 8028 - protein, 348 aa, Arabidopsis thaliana
MISVSRFLSPQFYAIPRSFVKMSASATQTAGEVSMGIKPPSHPTYDLKAVIKLALAEDAGHTGDVTCMATIPFDMEVEAYFLAKEDGIVAGVALADMIFEHVDPSLKVEWMRKDGDYVHKGLKFGKVSGNAHKIVVAERVLLNFMQRMSGIATLTKLMADAASPACILETRKTAPGLRLVDKWAVLIGGGRNHRMGLFDMVMIKDNHISAAGGIVNAVKSVDEYLKQKNLEMDVEVETRTLEEVKEVLEYASGSETRLTRIMLDNMVVPLENGDVDVTMLKDAVELINGRFETEASGNVTLETVHKIGQSGVTFISSGALTHSVKALDISLKIDTELALEVGRRTKRA

SEQ ID NO: 8029 - protein, 327 aa, Arabidopsis thaliana
MSASATQTAGEVSMGIKPPSHPTYDLKAVIKLALAEDAGHTGDVTCMATIPFDMEVEAYFLAKEDGIVAGVALADMIFEHVDPSLKVEWMRKDGDYVHKGLKFGKVSGNAHKIVVAERVLLNFMQRMSGIATLTKLMADAASPACILETRKTAPGLRLVDKWAVLIGGGRNHRMGLFDMVMIKDNHISAAGGIVNAVKSVDEYLKQKNLEMDVEVETRTLEEVKEVLEYASGSETRLTRIMLDNMVVPLENGDVDVTMLKDAVELINGRFETEASGNVTLETVHKIGQSGVTFISSGALTHSVKALDISLKIDTELALEVGRRTKRA

SEQ ID NO: 8030 - protein, 314 aa, Arabidopsis thaliana
MGIKPPSHPTYDLKAVIKLALAEDAGHTGDVTCMATIPFDMEVEAYFLAKEDGIVAGVALADMIFEHVDPSLKVEWMRKDGDYVHKGLKFGKVSGNAHKIVVAERVLLNFMQRMSGIATLTKLMADAASPACILETRKTAPGLRLVDKWAVLIGGGRNHRMGLFDMVMIKDNHISAAGGIVNAVKSVDEYLKQKNLEMDVEVETRTLEEVKEVLEYASGSETRLTRIMLDNMVVPLENGDVDVTMLKDAVELINGRFETEASGNVTLETVHKIGQSGVTFISSGALTHSVKALDISLKIDTELALEVGRRTKRA

SEQ ID NO: 8031 - DNA, 822 bp, Arabidopsis thaliana
atgtttacttattcggactagagagcttccgcataaagctgaggaaaaaaaagagagaagacgcacaccgaagaaaacacacaagactccattattctcctgcttcttcgtctcttcaattattttctctgagactagctttgattcaaccatggctaatgcagcatcaggaatggcagtccatgatgactgcaagctgaaatttatggaattgaagacgaaaaggacacaccgtttcatcatttacaagattgaggagctgcagaaacaagtgattgttgagaaaatcggtgaaccgggtcaaacccatgaggaccttgctgcaagtcttccagctgatgaatgccgctatgccattttcgattttgattttgtcagttctgagggtgtcccaaggagcaggatttttttcgtggcatggtctccggacacagcaagagtgagaagcaagatgatctatgcgagctccaaggacaggttcaagagagaactagacggaattcaggtcgagcttcaggcaaccgatccaaccgagatggatcttgatgttttcaaaagccgagccaattgatgaaagaaatcccctgaaaatttcggttgaatcaaactttttcgtactattactcagtgatgctttttcctaaagtttgctgtgacggtaccaacctgaacagcttcattttatcagtttggtctttgtctttgtctttggtctcctttttgggtccttatagtgttgtcttaaaacttaaggaatctggcttgtgctctttaccattgtggaagaaatcgaaccctttattaaacaagaatcctattggc

SEQ ID NO: 8032 - protein, 189 aa, Arabidopsis thaliana
CLLIRTRELPHKAEEKKERRRTPKKTHKTPLFSCFFVSSIIFSETSFDSTMANAASGMAVHDDCKLKFMELKTKRTHRFIIYKIEELQKQVIVEKIGEPGQTHEDLAASLPADECRYAIFDFDFVSSEGVPRSRIFFVAWSPDTARVRSKMIYASSKDRFKRELDGIQVELQATDPTEMDLDVFKSRAN

SEQ ID NO: 8033 - protein, 139 aa, Arabidopsis thaliana
MANAASGMAVHDDCKLKFMELKTKRTHRFIIYKIEELQKQVIVEKIGEPGQTHEDLAASLPADECRYAIFDFDFVSSEGVPRSRIFFVAWSPDTARVRSKMIYASSKDRFKRELDGIQVELQATDPTEMDLDVFKSRAN

SEQ ID NO: 8034 - protein, 132 aa, Arabidopsis thaliana
MAVHDDCKLKFMELKTKRTHRFIIYKIEELQKQVIVEKIGEPGQTHEDLAASLPADECRYAIFDFDFVSSEGVPRSRIFFVAWSPDTARVRSKMIYASSKDRFKRELDGIQVELQATDPTEMDLDVFKSRAN

SEQ ID NO: 8035 - DNA, 1476 bp, Arabidopsis thaliana
gtaatgatatgaactttacaaaagaaaattgtcaatttcgaaaaatgttgagcacaagctctgatcttcatggccgtcttctccgattatcagaaccaatagcagagattcttagacgtacacagtacacaccgcaagagagcagcaaagtatccaccaaagatatactcttgtccttgttaccaaacacttcgtcttctcgtctcgccaatgaagaatcgatcaaaagtctcgcgcttgcttgtgcccttctcgcttcttcacgttcatccactcacgaacttctctcatggattccagaaaacctctctgtcatgggggaatctacattttgggagatttcaagggattgtttcagtgatttttctagcaacagtaatgctgagaagcttgtggaattggtagaggatagtgagaagatcgaaatgttgccgatagttttgccggagttaaaagatggaatcgaaaagagttcacttggtaaaggcagtgatgcagaggatgtttcagctgcaatggctagaacacctgttggttatgctatacttgctgctcaccagctcaggtggtttgttactcaggttaaaaaaccgaatttggtgaaattttgtaacttggtggttccttgtgctttgacagcacttgatcattggtctcctgaagtcaaagggcagggtatgataacctttgttcatcttgctaaaaatgtgagttccggtgatcttggtttgtatggagatgtggttcttgatgcgtgttgccagaatatagcttccgatgatgagatttggatacatgtggtagagttatctgtgcttcttgttactaaaatccacccaaataatcctcgaagcccgtggtatgagaagatcatgaatgagatgctcgggcatttggaacgccaaccaagaaataaggagcgacgtatcacttggctaagatttgttgagccactcttgaactctctagggcttttcttacttgctcattttcgacgtatcttccctcttttctttcagtggatgcattcagacgacgccgaaacagttctgttggttcttgagagactggagacagttgtgaggttgacgtggattagacactcacctgtgttcccaagattggtggatgagcttgtttccttgtacaaagagtcatcgatgcgtaaggatcgcgatgatattagacctcttatcctccgtatcttgatgctactccgccagtgcaaaggtctacggtttgagtcagcgtggagtcaataccaggaggatccaaatctgagtactgttagtcaacatatatggactagttcaagttgatctcaagagcgtatgtttgactaaaacagccatttttttttctaattttcgatattagtttggtctaggcctagtgatgcaagtaattactggcgaatcctcgaatttttgtaagcatttggctcttgactcttcttaagctaatctgatttgatac

SEQ ID NO: 8036 - protein, 438 aa, Arabidopsis thaliana
NDMNFTKENCQFRKMLSTSSDLHGRLLRLSEPIAEILRRTQYTPQESSKVSTKDILLSLLPNTSSSRLANEESIKSLALACALLASSRSSTHELLSWIPENLSVMGESTFWEISRDCFSDFSSNSNAEKLVELVEDSEKIEMLPIVLPELKDGIEKSSLGKGSDAEDVSAAMARTPVGYAILAAHQLRWFVTQVKKPNLVKFCNLVVPCALTALDHWSPEVKGQGMITFVHLAKNVSSGDLGLYGDVVLDACCQNIASDDEIWIHVVELSVLLVTKIHPNNPRSPWYEKIMNEMLGHLERQPRNKERRITWLRFVEPLLNSLGLFLLAHFRRIFPLFFQWMHSDDAETVLLVLERLETVVRLTWIRHSPVFPRLVDELVSLYKESSMRKDRDDIRPLILRILMLLRQCKGLRFESAWSQYQEDPNLSTVSQHIWTSSS

SEQ ID NO: 8037 - protein, 436 aa, Arabidopsis thaliana
MNFTKENCQFRKMLSTSSDLHGRLLRLSEPIAEILRRTQYTPQESSKVSTKDILLSLLPNTSSSRLANEESIKSLALACALLASSRSSTHELLSWIPENLSVMGESTFWEISRDCFSDFSSNSNAEKLVELVEDSEKIEMLPIVLPELKDGIEKSSLGKGSDAEDVSAAMARTPVGYAILAAHQLRWFVTQVKKPNLVKFCNLVVPCALTALDHWSPEVKGQGMITFVHLAKNVSSGDLGLYGDVVLDACCQNIASDDEIWIHVVELSVLLVTKIHPNNPRSPWYEKIMNEMLGHLERQPRNKERRITWLRFVEPLLNSLGLFLLAHFRRIFPLFFQWMHSDDAETVLLVLERLETVVRLTWIRHSPVFPRLVDELVSLYKESSMRKDRDDIRPLILRILMLLRQCKGLRFESAWSQYQEDPNLSTVSQHIWTSSS

SEQ ID NO: 8038 - protein, 424 aa, Arabidopsis thaliana
MLSTSSDLHGRLLRLSEPIAEILRRTQYTPQESSKVSTKDILLSLLPNTSSSRLANEESIKSLALACALLASSRSSTHELLSWIPENLSVMGESTFWEISRDCFSDFSSNSNAEKLVELVEDSEKIEMLPIVLPELKDGIEKSSLGKGSDAEDVSAAMARTPVGYAILAAHQLRWFVTQVKKPNLVKFCNLVVPCALTALDHWSPEVKGQGMITFVHLAKNVSSGDLGLYGDVVLDACCQNIASDDEIWIHVVELSVLLVTKIHPNNPRSPWYEKIMNEMLGHLERQPRNKERRITWLRFVEPLLNSLGLFLLAHFRRIFPLFFQWMHSDDAETVLLVLERLETVVRLTWIRHSPVFPRLVDELVSLYKESSMRKDRDDIRPLILRILMLLRQCKGLRFESAWSQYQEDPNLSTVSQHIWTSSS

SEQ ID NO: 8039 - DNA, 560 bp, Arabidopsis thaliana
aagagtttttagggttttcagtcgctgagaacaattttcttctccttcttcttcttcaagcagagacgctctcagctcaccagacatggatcctagcatggcaaacaacccggaattgcttcaattcctcgcccaagagaaagaaagagcaatggtgaacgaaatggtgtcgaagatgacaagtgtgtgctgggacaaatgcatcacaagcgcaccgggaagtaagttcagctcaagcgagagttcttgcctcactcattgtgctcaacgctacatggatatgagtatgatcatcatgaaacgctttaattcgcagtaaaattgattggaggatatcatacttgttggaattttaatttatcctttttttgtttctcttggcaagtgttgaaatcccttttattactctagtgatcttgcaagagtattctcggataagtgttttaggtgtttctttatggttatgtgattgagattgttattgatggctagtaatatattaagagacaagtgttgaataatgtggttttaataaggagggttgtacaagggttgggttg

SEQ ID NO: 8040 - protein, 77 aa, Arabidopsis thaliana
MDPSMANNPELLQFLAQEKERAMVNEMVSKMTSVCWDKCITSAPGSKFSSSESSCLTHCAQRYMDMSMIIMKRFNSQ

SEQ ID NO: 8041 - protein, 73 aa, Arabidopsis thaliana
MANNPELLQFLAQEKERAMVNEMVSKMTSVCWDKCITSAPGSKFSSSESSCLTHCAQRYMDMSMIIMKRFNSQ

SEQ ID NO: 8042 - protein, 55 aa, Arabidopsis thaliana
MVNEMVSKMTSVCWDKCITSAPGSKFSSSESSCLTHCAQRYMDMSMIIMKRFNSQ

SEQ ID NO: 8043 - DNA, 1041 bp, Arabidopsis thaliana
aaaaaaactctccactcaactctctctggtcagctgtctcttccccattctctagggttttcaagctcaacctcaagctccactacgatctcttcttcttctctaatctcagttgacagttgaaagatgcaaggtgtgattcgatccttcgtctccggtggaaatgttgtgaaaggctctgtgctgcaacatctccgtgtgattaacccggcgattcagccttctgtgttttgttcacgctatgaatcaactcaacctgcacgtatggaggaatctggattcgagagcacaactatttccgatgtcatgaaatccaaaggcaaaagtgctgatggatcttggctttggtgtactactgatgacactgtttatgatgctgttaaatccatgacacaacacaatgttggtgccttggtggttgtgaaacctggtgagcaacaagctcttgctggtatcattacagagagagattatctacggaagatcattgtgcaagggagatcatccaaatcaacaaaagttggagacattatgactgaagagaataagcttatcactgtgacaccggagaccaaggtcttgcgtgctatgcaactgatgacagataaccgaatcaggcatattccggtaatcaaagacaagggcatgattggaatggtgtccataggagatgttgtccgtgcagtggttcatgagcatagagaggagcttcaacgcctaaatgcgtatattcagggaggttactagatcttgaataatggaaagaaaagagttccctgttgtgtcgtctggtcttgtgctgctgaatctgaaaagcttccagatcagtgtaaatatgcagtcctcgttgttattgttgttgttgttgtgtttgatgttttgtgttgtttcgttgtttaacttgtcaaaactaaggccttgtgctgcttctcttcttgcgcttacttagcaagagaataaaaccaaagacatgatgtttgtttttgttatcaaatcttgcgtcaagtatccatgtgtgttatgaaataatagaattacttc

SEQ ID NO: 8044 - protein, 206 aa, Arabidopsis thaliana
MQGVIRSFVSGGNVVKGSVLQHLRVINPAIQPSVFCSRYESTQPARMEESGFESTTISDVMKSKGKSADGSWLWCTTDDTVYDAVKSMTQHNVGALVVVKPGEQQALAGIITERDYLRKIIVQGRSSKSTKVGDIMTEENKLITVTPETKVLRAMQLMTDNRIRHIPVIKDKGMIGMVSIGDVVRAVVHEHREELQRLNAYIQGGY

SEQ ID NO: 8045 - protein, 160 aa, Arabidopsis thaliana
MEESGFESTTISDVMKSKGKSADGSWLWCTTDDTVYDAVKSMTQHNVGALVVVKPGEQQALAGIITERDYLRKIIVQGRSSKSTKVGDIMTEENKLITVTPETKVLRAMQLMTDNRIRHIPVIKDKGMIGMVSIGDVVRAVVHEHREELQRLNAYIQGGY

SEQ ID NO: 8046 - protein, 146 aa, Arabidopsis thaliana
MKSKGKSADGSWLWCTTDDTVYDAVKSMTQHNVGALVVVKPGEQQALAGIITERDYLRKIIVQGRSSKSTKVGDIMTEENKLITVTPETKVLRAMQLMTDNRIRHIPVIKDKGMIGMVSIGDVVRAVVHEHREELQRLNAYIQGGY

SEQ ID NO: 8047 - DNA, 1609 bp, Arabidopsis thaliana
atgaagctttattctgtttccatcatcatcttcgtcttaattgctctctccaccatagttaatgctcaacaagctgctacagattcctgcaactcaactctacctctcaacgacctcaccttcaacaccagcctccttcaatgcaccgaagcttggactccccaaaatttcatcctccgatatgcaagaacggcagagaacacatggagctttatcttatcggcgccggattcaagcgctttcatcgggatcggattctctaccaacggtcagatgatcggaagcagcgcgatcgttggttggataccttccgacggcggttccgggactgtgaaaccgtacttgctcggtgggaaatctcccggagaggttaatcctgaccaaggagatctaacgatcgtcaacggctcgttgaagatcgaatcagtgtcgtcgcgtctttacatgagatttcaattgacggcgacgctgccgcggcagagtcttctttacgctgtgggacctgccggattcttcccatcttcgccggattttaggttgagagagcaccgcttcgtgaccaccacgaccatcaattataatacaggttcgcaaagtgtggttaaagtttcaccacactctaagctaaagaagacacatgggctaatgaacatgttcggctggggaatattgattatcgttggcgccatagtggctcgacatatgaagcaatgggaccccacttggttctatgcccatatcgctctccaaaccactggttttctcctcggtttaactggtgtcatttgcggtttggttcttgaaaaccggctcaaggccaataatgtttccaagcacaaaggcctcgggataaccatacttgtcatgggcgttcttcagatgctggcattgctagctcggccggataagcaatcgaaatacagaaaatattggaattggtatcatcataacataggaagacttctgatcatactggctatttctaacatcttctacggtattcatttggctaaagctggaactagttggaatggtggttacggttttgcggtcgcggtcttggccttgacggctattggattagaagttagaaagttcttgaaaaaagagattcagagacattgcagaaattggaagaagaagaagaaagagatgttgagaactcgccttctctggtttacgcttggtttttccgtgaccggaggttccattgctcatatcgtgtggcgtgatctctatgccgaacgtttcgctatttcttctgatatgaaggagaaattcagtgctctggaaggtagagtatcaggtttggagtctggtggttatgagaacccgaatccagctcaggttgagagttgaagactcctgcaagtggtaccagcgcaaattaatcaaagacttggctgatgtgtgagagagttacgatcttctcttggaacttctaagatgcttggaataatcttctgaatagaaaacttttcgtttttgtaaactgacttaccttttgactcgagatttcttctgtaagctacgagcaagacttacatttgtgttacaaaacagtcggctttattattacaagaaatggttcagtactttcgtttcattc

SEQ ID NO: 8048 - protein, 452 aa, Arabidopsis thaliana
MKLYSVSIIIFVLIALSTIVNAQQAATDSCNSTLPLNDLTFNTSLLQCTEAWTPQNFILRYARTAENTWSFILSAPDSSAFIGIGFSTNGQMIGSSAIVGWIPSDGGSGTVKPYLLGGKSPGEVNPDQGDLTIVNGSLKIESVSSRLYMRFQLTATLPRQSLLYAVGPAGFFPSSPDFRLREHRFVTTTTINYNTGSQSVVKVSPHSKLKKTHGLMNMFGWGILIIVGAIVARHMKQWDPTWFYAHIALQTTGFLLGLTGVICGLVLENRLKANNVSKHKGLGITILVMGVLQMLALLARPDKQSKYRKYWNWYHHNIGRLLIILAISNIFYGIHLAKAGTSWNGGYGFAVAVLALTAIGLEVRKFLKKEIQRHCRNWKKKKKEMLRTRLLWFTLGFSVTGGSIAHIVWRDLYAERFAISSDMKEKFSALEGRVSGLESGGYENPNPAQVES

SEQ ID NO: 8049 - protein, 361 aa, Arabidopsis thaliana
MIGSSAIVGWIPSDGGSGTVKPYLLGGKSPGEVNPDQGDLTIVNGSLKIESVSSRLYMRFQLTATLPRQSLLYAVGPAGFFPSSPDFRLREHRFVTTTTINYNTGSQSVVKVSPHSKLKKTHGLMNMFGWGILIIVGAIVARHMKQWDPTWFYAHIALQTTGFLLGLTGVICGLVLENRLKANNVSKHKGLGITILVMGVLQMLALLARPDKQSKYRKYWNWYHHNIGRLLIILAISNIFYGIHLAKAGTSWNGGYGFAVAVLALTAIGLEVRKFLKKEIQRHCRNWKKKKKEMLRTRLLWFTLGFSVTGGSIAHIVWRDLYAERFAISSDMKEKFSALEGRVSGLESGGYENPNPAQVES

SEQ ID NO: 8050 - protein, 304 aa, Arabidopsis thaliana
MRFQLTATLPRQSLLYAVGPAGFFPSSPDFRLREHRFVTTTTINYNTGSQSVVKVSPHSKLKKTHGLMNMFGWGILIIVGAIVARHMKQWDPTWFYAHIALQTTGFLLGLTGVICGLVLENRLKANNVSKHKGLGITILVMGVLQMLALLARPDKQSKYRKYWNWYHHNIGRLLIILAISNIFYGIHLAKAGTSWNGGYGFAVAVLALTAIGLEVRKFLKKEIQRHCRNWKKKKKEMLRTRLLWFTLGFSVTGGSIAHIVWRDLYAERFAISSDMKEKFSALEGRVSGLESGGYENPNPAQVES

SEQ ID NO: 8051 - DNA, 1356 bp, Arabidopsis thaliana
atattgttttgagccatggaaactcttttccacactcttcttagattattactattcgtagccatctctcatactctgtcccctctcgccggttctttccggatttctaatgactttccggcggttttcaacttcggagactctaactctgacaccggagaacttagctcgggtcttggattccttccacaaccttcctatgaaataaccttctttagatctccaacttccggaagattctgcaatggacgtcttatcgtcgattttctaatggaagcaattgatcgaccatatttgaggccttatttagattcgataagtcgacaaacttaccgaagaggctgcaattttgctgcggctgcgtcaacgattcagaaggcaaatgctgcatcctatagcccctttggttttggtgttcaagtctctcaattcatcacctttaagtccaaagtccttcaattgatacaacaagatgaagagctccaaagatacttaccgtccgaatatttttttagtaatggattgtatatgtttgatatcggacaaaatgatattgccggagcattttacaccaagacagtagatcaagttcttgctctggttcctataatcttagatatatttcaagatggaataaagagattatatgcagagggggcaagaaactattggatacacaacacaggaccacttgggtgtttagcacaagttgtgtcaatttttggggaagacaaatcaaagcttgatgagtttggttgtgtcagtgaccataaccaagctgctaagcttttcaatttgcagcttcatggtcttttcaaaaaactccctcaacaatatcccaattcccgtttcacatacgtagatatcttctctatcaaatccgacctcatcctgaatcattccaaatatggttttgatcattcgataatggtatgttgtggaaccggaggaccaccactgaactacgatgatcaggttggttgcggtaagacagcaagatcaaatggtacgatcataaccgccaaaccttgttatgatagttccaaatatgttaactgggacggcattcattacactgaagctgcaaatcggtttgttgcactacacattctcaccggtaaatactctgagacggcgtcatctttgaatctttagcaatgtaacaaagaaagttacattatcactttctttatggattacatatatatttagttgtatgttaactggtttatttatgattatatgaataatttccataaacttaactgtttcatttccaaaaaaaggcattttccaattttctttcacaaagatagatgctttgtcacaataaaatgaatctttcaaatttcctgc

SEQ ID NO: 8052 - protein, 379 aa, Arabidopsis thaliana
METLFHTLLRLLLFVAISHTLSPLAGSFRISNDFPAVFNFGDSNSDTGELSSGLGFLPQPSYEITFFRSPTSGRFCNGRLIVDFLMEAIDRPYLRPYLDSISRQTYRRGCNFAAAASTIQKANAASYSPFGFGVQVSQFITFKSKVLQLIQQDEELQRYLPSEYFFSNGLYMFDIGQNDIAGAFYTKTVDQVLALVPIILDIFQDGIKRLYAEGARNYWIHNTGPLGCLAQVVSIFGEDKSKLDEFGCVSDHNQAAKLFNLQLHGLFKKLPQQYPNSRFTYVDIFSIKSDLILNHSKYGFDHSIMVCCGTGGPPLNYDDQVGCGKTARSNGTIITAKPCYDSSKYVNWDGIHYTEAANRFVALHILTGKYSETASSLNL

SEQ ID NO: 8053 - protein, 294 aa, Arabidopsis thaliana
MEAIDRPYLRPYLDSISRQTYRRGCNFAAAASTIQKANAASYSPFGFGVQVSQFITFKSKVLQLIQQDEELQRYLPSEYFFSNGLYMFDIGQNDIAGAFYTKTVDQVLALVPIILDIFQDGIKRLYAEGARNYWIHNTGPLGCLAQVVSIFGEDKSKLDEFGCVSDHNQAAKLFNLQLHGLFKKLPQQYPNSRFTYVDIFSIKSDLILNHSKYGFDHSIMVCCGTGGPPLNYDDQVGCGKTARSNGTIITAKPCYDSSKYVNWDGIHYTEAANRFVALHILTGKYSETASSLNL

SEQ ID NO: 8054 - protein, 208 aa, Arabidopsis thaliana
MFDIGQNDIAGAFYTKTVDQVLALVPIILDIFQDGIKRLYAEGARNYWIHNTGPLGCLAQVVSIFGEDKSKLDEFGCVSDHNQAAKLFNLQLHGLFKKLPQQYPNSRFTYVDIFSIKSDLILNHSKYGFDHSIMVCCGTGGPPLNYDDQVGCGKTARSNGTIITAKPCYDSSKYVNWDGIHYTEAANRFVALHILTGKYSETASSLNL

SEQ ID NO: 8055 - DNA, 860 bp, Arabidopsis thaliana
aatatcaatagccgtacacgcgtgaagactgacaatattatctttttcgaattcggagctcaagtttgaaattcggagaagctagagagttttctgagatggctcgtactaagcaaacagctcgtaagtctactggaggaaaggctcctaggaagcagcttgctacaaaggctgcacgtaagtctgcaccaaccactggaggagtcaagaagccccatcgttaccgtccaggaactgttgcactacgtgaaattcgtaagtaccagaagagtaccgagttgctgatcaggaagctccctttccagaggctagttcgtgagattgcccaggatttcaagactgacttgcgtttccagagccatgctgtgcttgcactccaggaggctgctgaagcataccttgtgggtctctttgaggacactaacctctgcgccatccatgccaagcgtgtgaccataatgcccaaagacattcagctcgctcgcaggatcagaggagaacgtgcttaattgtgattgggaagtagttggattatgtgaatgtgggtggttttctaaatagatagttggaattagataatggcttaaaaagcttttgggtgtaggagacttggaaacaatggtgttttttttttcttttctttctgtttcttgtctagtcggtttatgatttgcttgtgttcttcttagctacgttttgtggtgtgtattgctttcttctttggcaatgttgaacaccttttgttgttgaattcatctctgaaacatatgaatatgttaaagtttctgactcttgtttcatctgtatctgttcgatattgtatgattgagttttattgtttatcaataagctttctgttt

SEQ ID NO: 8056 - protein, 136 aa, Arabidopsis thaliana
MARTKQTARKSTGGKAPRKQLATKAARKSAPTTGGVKKPHRYRPGTVALREIRKYQKSTELLIRKLPFQRLVREIAQDFKTDLRFQSHAVLALQEAAEAYLVGLFEDTNLCAIHAKRVTIMPKDIQLARRIRGERA

SEQ ID NO: 8057 - DNA, 1369 bp, Arabidopsis thaliana
acagaaaaaaatccttcgatggaatttgagatcaatgaaagttagggtttttctttgagatttcttcacccagataaaaaatgtcgctcgtgagaagatttcaaacagttcgttctttattgaaaacagctggatcaagagaatcttcttctcttccatttaggaatggaaatgagttctctttgattcaaattggagatgatttcagatttggttgttggagaagctatcattcttctctttgtcacgttcctgaagctcatggaaaaagtgcgtattcacgtttatatgaaggccacagcgtcaatacacatttgcttcgatctacaatgattgcagagtttttgccgtttatgaatgaaaaaaggtctgctacaacgcaagttaaggctccacctcagctacagaaaacgggtgctgttagagtgtcgatggtaagtcctggatttgtatatgaaccctatgcgctccgggagaaaatctcgatttggcggagatgttttacaagaagtggttggcgaagaacgaaagaggattttatacgggagctaagaagtgcctacgctatcgctaagttaagaaagactgggtattcgaagaatacgttctacatagaagcactagagttatacaaacagattaatattcagatggccaatggtgagaagaagacgataaggaaaaacgtaactgaaagaatgtactctgcactgaagaacgaaattaaacaaagagaagccatgtgggatggtgtttactgggaaatggttgagccggttgtcaaaatccgaactttacaagctcgactgattggaattgaccggacggaccttaagaaagcatttatacaactgacactcgagtttctgacgaagcagaaatttgaagcatacgatgcaaaaggcaatgtagcagctggagataagaacaaagaggtgcttgtacgtgacatatgggtctttgagaagtctcttttccatacaggagcttactggcggctctgtggccggatcaaattatgaagttttgcaacattgtggacaaagagtgtcaacagttttcagacaaagaataaaatccaacatgttcctgatttctactgagtcagtaactgttagctttcttcaaattttctcttacaattcaagcctgaatgttatctgtttaggtccctagaaaaactttgctattttgcgaggtaaatcatcaatacgagcaaagatcagaaaaaatatgtattggttagtctctttgtatacctcatttatctttgttgtagttcagtaacagagactggttgttgctgcttctgtcactttctttgatctcttctactttaaatgttatcaatgattcaagttcgacattc

SEQ ID NO: 8058 - protein, 313 aa, Arabidopsis thaliana
MSLVRRFQTVRSLLKTAGSRESSSLPFRNGNEFSLIQIGDDFRFGCWRSYHSSLCHVPEAHGKSAYSRLYEGHSVNTHLLRSTMIAEFLPFMNEKRSATTQVKAPPQLQKTGAVRVSMVSPGFVYEPYALREKISIWRRCFTRSGWRRTKEDFIRELRSAYAIAKLRKTGYSKNTFYIEALELYKQINIQMANGEKKTIRKNVTERMYSALKNEIKQREAMWDGVYWEMVEPVVKIRTLQARLIGIDRTDLKKAFIQLTLEFLTKQKFEAYDAKGNVAAGDKNKEVLVRDIWVFEKSLFHTGAYWRLCGRIKL

SEQ ID NO: 8059 - protein, 230 aa, Arabidopsis thaliana
MIAEFLPFMNEKRSATTQVKAPPQLQKTGAVRVSMVSPGFVYEPYALREKISIWRRCFTRSGWRRTKEDFIRELRSAYAIAKLRKTGYSKNTFYIEALELYKQINIQMANGEKKTIRKNVTERMYSALKNEIKQREAMWDGVYWEMVEPVVKIRTLQARLIGIDRTDLKKAFIQLTLEFLTKQKFEAYDAKGNVAAGDKNKEVLVRDIWVFEKSLFHTGAYWRLCGRIKL

SEQ ID NO: 8060 - protein, 222 aa, Arabidopsis thaliana
MNEKRSATTQVKAPPQLQKTGAVRVSMVSPGFVYEPYALREKISIWRRCFTRSGWRRTKEDFIRELRSAYAIAKLRKTGYSKNTFYIEALELYKQINIQMANGEKKTIRKNVTERMYSALKNEIKQREAMWDGVYWEMVEPVVKIRTLQARLIGIDRTDLKKAFIQLTLEFLTKQKFEAYDAKGNVAAGDKNKEVLVRDIWVFEKSLFHTGAYWRLCGRIKL

SEQ ID NO: 8061 - DNA, 759 bp, Arabidopsis thaliana
atcaaccaaaacaaaacataaaaaacaagtggaagctttaaaacgagagggagagagcaaaaatggcgacgtcgggaacgtacgtgacggaagttccgctaaaaggatcggccgagaaatactacaagaggtggaagaacgagaaccatgtcttccctgatgctatcggccaccacatccaaaatgttaccgttcacgaaggcgaacatgactctcacgggtctatcaggagttggaactacacatgggatggaaaggaggaggtgttcaaggagagaagagagatagacgatgagaccaaaacgttgacgttaagaggacttgagggtcacgtgatggagcagctcaaagtgtacgacgtcgtctaccaattcattcccaaatctgaggatacctgcatcggcaaaatcactttaatatgggagaagcgcaacgatgattccccagaaccaagcggctacatgaaattcgtcaagagcttggttgctgacatgggaaaccacgttagcaaaacttaatcatcattcccacagtcgtcgtcgtcgtcatcatcatcatcatcatcatcatcatcatcatcatcatcatcatcatcatcatcatcactatctcgatttataagttaagatgttttcagtataataaatggggtcttgtggatcgttcatttctatgtgtaaaccgtttggttctgtatgatgcttcgatatattgttatgttcatgatcatatgtcgggttcgatataatgattcttaag

SEQ ID NO: 8062 - protein, 151 aa, Arabidopsis thaliana
MATSGTYVTEVPLKGSAEKYYKRWKNENHVFPDAIGHHIQNVTVHEGEHDSHGSIRSWNYTWDGKEEVFKERREIDDETKTLTLRGLEGHVMEQLKVYDVVYQFIPKSEDTCIGKITLIWEKRNDDSPEPSGYMKFVKSLVADMGNHVSKT

SEQ ID NO: 8063 - DNA, 1910 bp, Arabidopsis thaliana
acttaactcatatcaaccttcgccggaaataatggctttcccgcgatttctttctctcctcgccgtcgtcactctctctcttttcctcaccaccactgatgcttcctctcgctctctatccactccacctaaaacgaacgtactcgacgtcgtttcatctctccagcaaacacaaactatcctctcactcgacccgactcgttcctcactcaccaccaccaaacccgaatccctatccgacccggttttcttcaattcatcttcaccactatctctagagcttcactctcgagacactttcgtcgcgtcacagcacaaagactacaaaagcttaacactcagtcgactcgagcgcgactcatcccgagtcgccggaatcgtcgcgaagatccgtttcgccgtcgaaggagtcgatagatccgatctcaaacccgtttacaacgaagatacacgataccaaaccgaggatctaacgacacctgtcgtctccggagcctctcaaggaagcggcgagtatttctcaagaatcggtgtcggaactccggcgaaagagatgtacttggttctcgacaccggaagcgacgtaaattggatccagtgtgaaccttgcgccgactgttaccaacagtccgacccggtttttaacccgacttcgtcttccacatacaaatctctcacttgctctgctccacagtgctctcttctcgaaacctccgcttgtcggtcaaacaaatgtctctaccaagttagttacggagacggatctttcaccgtcggtgaactcgctaccgatacggtgacgtttggtaactctggtaaaataaacaacgtcgctttgggttgtggtcacgacaacgaaggtctctttaccggagcagccggtttactcggtttaggcggtggtgttttatcgataaccaatcaaatgaaagcgacgtcgttttcttactgcctcgttgaccgtgactcgggaaagtcctcaagtcttgatttcaactcggtccaactcggtggcggagacgcgacggcgccgcttctacgtaacaaaaagatcgacactttctactacgtcggactcagtggattcagcgtcggtggtgaaaaagtcgtgctgcctgatgcgatcttcgatgtcgatgcttcgggaagcggaggagtgatcttggattgtggaaccgccgtgactcgtcttcagacgcaggcttataactcgctgcgtgacgcgtttcttaaactcaccgtgaatctcaaaaaaggatcttcgagcatctctctgttcgacacgtgttacgatttctcgtctctctccactgtgaaagtaccgacggttgcgtttcatttcacgggagggaagtcgcttgatttgccggcgaagaattatctgatccctgtggatgatagtggaacgttttgcttcgcttttgctccgacgtcgtcgtcgttgtcgatcatcgggaatgtgcagcagcaagggacacgtatcacttacgatctatccaaaaatgttatcggattgtcagggaataaatgctaaacatgtcaaagtagaaaaattaatagttttacgggtaatcagtaaaactttttatggtactagctagctacggtaacaagatgaaaacaaaatccttaagtgtgaatttttctaccttttttttaattaatcataagttattgtcgtcttttatcgaataataataggattaattaattttattataaagttgaaagtgttgttgtctcagcaagaagttttcagtagtgaagaagaagaagagtcaataaagtaagaagttacaaaaaagaagggtctttttgtaacaaaagtttagtcttcaaagaaacaaacagacttttgttgttgtggccctttaatgtccttcaatattttaaattatagtctgaatttt

SEQ ID NO: 8064 - protein, 510 aa, Arabidopsis thaliana
LNSYQPSPEIMAFPRFLSLLAVVTLSLFLTTTDASSRSLSTPPKTNVLDVVSSLQQTQTILSLDPTRSSLTTTKPESLSDPVFFNSSSPLSLELHSRDTFVASQHKDYKSLTLSRLERDSSRVAGIVAKIRFAVEGVDRSDLKPVYNEDTRYQTEDLTTPVVSGASQGSGEYFSRIGVGTPAKEMYLVLDTGSDVNWIQCEPCADCYQQSDPVFNPTSSSTYKSLTCSAPQCSLLETSACRSNKCLYQVSYGDGSFTVGELATDTVTFGNSGKINNVALGCGHDNEGLFTGAAGLLGLGGGVLSITNQMKATSFSYCLVDRDSGKSSSLDFNSVQLGGGDATAPLLRNKKIDTFYYVGLSGFSVGGEKVVLPDAIFDVDASGSGGVILDCGTAVTRLQTQAYNSLRDAFLKLTVNLKKGSSSISLFDTCYDFSSLSTVKVPTVAFHFTGGKSLDLPAKNYLIPVDDSGTFCFAFAPTSSSLSIIGNVQQQGTRITYDLSKNVIGLSGNKC

SEQ ID NO: 8065 - protein, 500 aa, Arabidopsis thaliana [sequence omitted]

SEQ ID NO: 8066 - protein, 326 aa, Arabidopsis thaliana
MYLVLDTGSDVNWIQCEPCADCYQQSDPVFNPTSSSTYKSLTCSAPQCSLLETSACRSNKCLYQVSYGDGSFTVGELATDTVTFGNSGKINNVALGCGHDNEGLFTGAAGLLGLGGGVLSITNQMKATSFSYCLVDRDSGKSSSLDFNSVQLGGGDATAPLLRNKKIDTFYYVGLSGFSVGGEKVVLPDAIFDVDASGSGGVILDCGTAVTRLQTQAYNSLRDAFLKLTVNLKKGSSSISLFDTCYDFSSLSTVKVPTVAFHFTGGKSLDLPAKNYLIPVDDSGTFCFAFAPTSSSLSIIGNVQQQGTRITYDLSKNVIGLSGNKC

SEQ ID NO: 8067 - DNA, 1691 bp, Arabidopsis thaliana
aattcgaaacacacaaatttgcttgaatcaaagactcttcttcttcgttcgttcgtttcagtgattccaaagattccaaatttgtcggtgtaatcttcgttgtattcagaggtgtatgtatatgtattgaaatcgagaatggatctgttccgagtttggtcagggatggatttcttagcttggagaggaatggcttacacacttcttcttctcaacttcgtctttgcttgccaacttcttcttctccaacctctcgtttccgctctagatggtcaatcggtagatgctgctgagttattcgagagagcttcacaaagtatcaaggttaagcgttatagtgatgccctcgatgatctgaatgcagccattgaagcagaccctgcgctttcagaagcttattttaagcgtgcctctgtgcttcgtcatttttgcagatacgaagactctgagaatagttaccagaaatatctggaattcaaatcaggagattcgaatgctgagaaagaactctctcagcttcatcaagctaagagtgctttggagactgcctcgactctgtatgaatcaaaggatattgcgaaagctcttgaatttgttgataaagttgttcttgtcttctctccagcttgctctaaggcaaagcttctcaaagtgaagctccttatggtgtctaaagactactcaggtgcaatttctgagactggttatattctcaaggaagatgaaaataacctcgaggcgttgctccttcgtggccgtgcctactactatttggcggatcatgatatcgcccaaaggcattaccaaaaagggcttcgtcttgatccggaacacagtgaactgaagaaagcatacttcggattgaaaaaactgctcaagaaaacaaaaagcgcagaagataatgcaaacaaaggaaagttgcgagtttcagcagaggaatataaagaagctattgctctggaccctgaacacacggcaaataacgttcatctctatcttggactatgcaaggtctcagtcaggctcggccgtggaaaagacggcttaaatagctgtaatgaagcacttaacatcgatgcagaactgattgaagctttacatcagagaggagaagctaaactgttgcttgaagattgggaaggagctgtggaggatttaaagcaagctgctcaaaactctcaggacatggaaattcatgaatcacttggtaaagcagagaaagcactgaagatgagcaaacgaaaagattggtataagattcttggaatttccagaaccgcctctatctcagaaatcaaaaaagcttacaagaagcttgctcttcaatggcatcccgataaaaacgtaggcaatagagaagaagctgagaacaaattccgagaaatcgctgcagcttatgagattcttggagatgacgataagcgggcgagatttgacagaggagaggatcttgaagatatgggtggaggcggcggtggaggatataatccgttccatggtggtggtggtggtggacaacaatacactttccatttcgagggtggttttcctggtggtggtggcggttttggtggtttcggtttctaacttgaacaacatgatggaatcatgtaacttaagactaatcttttcaaattatactcaatatcacattttcctttctttcatcaaaaaaagttgtgtgcaatctt

SEQ ID NO: 8068 - protein, 482 aa, Arabidopsis thaliana
MDLFRVWSGMDFLAWRGMAYTLLLLNFVFACQLLLLQPLVSALDGQSVDAAELFERASQSIKVKRYSDALDDLNAAIEADPALSEAYFKRASVLRHFCRYEDSENSYQKYLEFKSGDSNAEKELSQLHQAKSALETASTLYESKDIAKALEFVDKVVLVFSPACSKAKLLKVKLLMVSKDYSGAISETGYILKEDENNLEALLLRGRAYYYLADHDIAQRHYQKGLRLDPEHSELKKAYFGLKKLLKKTKSAEDNANKGKLRVSAEEYKEAIALDPEHTANNVHLYLGLCKVSVRLGRGKDGLNSCNEALNIDAELIEALHQRGEAKLLLEDWEGAVEDLKQAAQNSQDMEIHESLGKAEKALKMSKRKDWYKILGISRTASISEIKKAYKKLALQWHPDKNVGNREEAENKFREIAAAYEILGDDDKRARFDRGEDLEDMGGGGGGGYNPFHGGGGGGQQYTFHFEGGFPGGGGGFGGFGF

SEQ ID NO: 8069 - protein, 473 aa, Arabidopsis thaliana
MDFLAWRGMAYTLLLLNFVFACQLLLLQPLVSALDGQSVDAAELFERASQSIKVKRYSDALDDLNAAIEADPALSEAYFKRASVLRHFCRYEDSENSYQKYLEFKSGDSNAEKELSQLHQAKSALETASTLYESKDIAKALEFVDKVVLVFSPACSKAKLLKVKLLMVSKDYSGAISETGYILKEDENNLEALLLRGRAYYYLADHDIAQRHYQKGLRLDPEHSELKKAYFGLKKLLKKTKSAEDNANKGKLRVSAEEYKEAIALDPEHTANNVHLYLGLCKVSVRLGRGKDGLNSCNEALNIDAELIEALHQRGEAKLLLEDWEGAVEDLKQAAQNSQDMEIHESLGKAEKALKMSKRKDWYKILGISRTASISEIKKAYKKLALQWHPDKNVGNREEAENKFREIAAAYEILGDDDKRARFDRGEDLEDMGGGGGGGYNPFHGGGGGGQQYTFHFEGGFPGGGGGFGGFGF

SEQ ID NO: 8070 - protein, 465 aa, Arabidopsis thaliana
MAYTLLLLNFVFACQLLLLQPLVSALDGQSVDAAELFERASQSIKVKRYSDALDDLNAAIEADPALSEAYFKRASVLRHFCRYEDSENSYQKYLEFKSGDSNAEKELSQLHQAKSALETASTLYESKDIAKALEFVDKVVLVFSPACSKAKLLKVKLLMVSKDYSGAISETGYILKEDENNLEALLLRGRAYYYLADHDIAQRHYQKGLRLDPEHSELKKAYFGLKKLLKKTKSAEDNANKGKLRVSAEEYKEAIALDPEHTANNVHLYLGLCKVSVRLGRGKDGLNSCNEALNIDAELIEALHQRGEAKLLLEDWEGAVEDLKQAAQNSQDMEIHESLGKAEKALKMSKRKDWYKILGISRTASISEIKKAYKKLALQWHPDKNVGNREEAENKFREIAAAYEILGDDDKRARFDRGEDLEDMGGGGGGGYNPFHGGGGGGQQYTFHFEGGFPGGGGGFGGFGF

SEQ ID NO: 8071 - DNA, 2054 bp, Arabidopsis thaliana
tggttcctctcctctctctctctcttcccgttttcacttttgttcgttctctggcggccgatcccgtcgctcgctaccttttaagatattttttttatctaatgaacctgaaattgtaattaggcatataattggggattatttgctgaaattctcatttctagatcgaaaaaagcgaataattcgttttcatttgattcttgcctaatcttagggtgtctttatttatctaccaaaagaatgtctaattatcgaggagatgatgctgagtacatggaagacgtagatgatgagatggaagatgttgaagatgatatggatgaggagtttcgtggtgatgatcttggtgcttcagattctgacgttgaagaatttgactattcgaacaataaagtagctgataccacggctgagcaagctcggaaagggaaagatatccaggggattccgtgggacagacttaatatttctagagagaaatacagacaaactagattagaacagtataagaattatgaaaatgtccctaattctggagaatcatcagaaaaggtttgcaaggtcacacagaaaggaggactattttatgacttctggcggaattcacgatctattaagtctactatactacatttccagctgagaaatttggtatgggcaacttctaagcacgacgtgtatcttatgtcaaattttctggttacacattattcttctctaacgtctggaaagcatgaagttctcaatgtccgtggtcatgttgcgccatctgagaaacatcctggaagtttacttgaaggatttacgcagactcaagtaagtacacttgcagtaaaagatgactttctggttgctggcgggtttcaaggagaacttatttgcaagcatcttgatagaccgggtgtcagcttttgctctcgtatgacttatgatgataatgctataaccaatgctattgagatctacaacaaacccagtggtgcacttcattttactgcgtcaaataatgactgtggagttagagactttgacatggagagataccagcttgttaagcatttccgttttccttggccagtgaatcacgcatctttgagtcctgatggtaaattactggctattgttggagacaacccggagggccttattgtagaccccaacacaggaaagacgttggaaacactatcaggacacttggacttttcctttgcctctgcgtggcatccggatggagtcactttctctacaggaaaccaagataagacttgtcgtgtatgggacatccgtaacctatctcagtctgttactgtcttgaagggtaacctgggagcaatccggtcaatccgctacacatcagatggaaaatacatggccatggctgaaccggctgactttgtccatgtctatgatgtctcaaacgggtatgaaacagagcaggaaatcgacttctttggggaaatctctggaatatctttcagccctgacacagaggcgctatttattggggtatgggaccgcacttatggtagcctccttgagtttggtcggcgcaggaactattcctaccttgactcgtatctttaagctagaagagaagtatacacaaccctgtccaatgaagaaaagagagctcattcagcaaccagtgaacatgacagaagcaaagcatagatatatggatatctcaaagatgtaaatgatgtgttgtgcaaatgctagttagttagtgtcttttgtttccttctccggctggtgtgttattttccttatgtctggttatgtctggtctcaaaaggttcaagatgtgtacagaaagggctggttcagtggtggcacagactggattaggacttgagggtggctccgcagcgggttctggattcaaagtcgggaggatcattgttgttgtgtttggtggcttgtgatcttttctttttgttccttgtacttgtggttgttgtaggaactcgagtgtttagatcctgttctgagtttagaatttggagatacttaactaaattaaaataaattaataatagtcctttgttcgttat

SEQ ID NO: 8072 - protein, 447 aa, Arabidopsis thaliana
MSNYRGDDAEYMEDVDDEMEDVEDDMDEEFRGDDLGASDSDVEEFDYSNNKVADTTAEQARKGKDIQGIPWDRLNISREKYRQTRLEQYKNYENVPNSGESSEKVCKVTQKGGLFYDFWRNSRSIKSTILHFQLRNLVWATSKHDVYLMSNFLVTHYSSLTSGKHEVLNVRGHVAPSEKHPGSLLEGFTQTQVSTLAVKDDFLVAGGFQGELICKHLDRPGVSFCSRMTYDDNAITNAIEIYNKPSGALHFTASNNDCGVRDFDMERYQLVKHFRFPWPVNHASLSPDGKLLAIVGDNPEGLIVDPNTGKTLETLSGHLDFSFASAWHPDGVTFSTGNQDKTCRVWDIRNLSQSVTVLKGNLGAIRSIRYTSDGKYMAMAEPADFVHVYDVSNGYETEQEIDFFGEISGISFSPDTEALFIGVWDRTYGSLLEFGRRRNYSYLDSYL

SEQ ID NO: 8073 - protein, 436 aa, Arabidopsis thaliana
MEDVDDEMEDVEDDMDEEFRGDDLGASDSDVEEFDYSNNKVADTTAEQARKGKDIQGIPWDRLNISREKYRQTRLEQYKNYENVPNSGESSEKVCKVTQKGGLFYDFWRNSRSIKSTILHFQLRNLVWATSKHDVYLMSNFLVTHYSSLTSGKHEVLNVRGHVAPSEKHPGSLLEGFTQTQVSTLAVKDDFLVAGGFQGELICKHLDRPGVSFCSRMTYDDNAITNAIEIYNKPSGALHFTASNNDCGVRDFDMERYQLVKHFRFPWPVNHASLSPDGKLLAIVGDNPEGLIVDPNTGKTLETLSGHLDFSFASAWHPDGVTFSTGNQDKTCRVWDIRNLSQSVTVLKGNLGAIRSIRYTSDGKYMAMAEPADFVHVYDVSNGYETEQEIDFFGEISGISFSPDTEALFIGVWDRTYGSLLEFGRRRNYSYLDSYL

SEQ ID NO: 8074 - protein, 429 aa, Arabidopsis thaliana
MEDVEDDMDEEFRGDDLGASDSDVEEFDYSNNKVADTTAEQARKGKDIQGIPWDRLNISREKYRQTRLEQYKNYENVPNSGESSEKVCKVTQKGGLFYDFWRNSRSIKSTILHFQLRNLVWATSKHDVYLMSNFLVTHYSSLTSGKHEVLNVRGHVAPSEKHPGSLLEGFTQTQVSTLAVKDDFLVAGGFQGELICKHLDRPGVSFCSRMTYDDNAITNAIEIYNKPSGALHFTASNNDCGVRDFDMERYQLVKHFRFPWPVNHASLSPDGKLLAIVGDNPEGLIVDPNTGKTLETLSGHLDFSFASAWHPDGVTFSTGNQDKTCRVWDIRNLSQSVTVLKGNLGAIRSIRYTSDGKYMAMAEPADFVHVYDVSNGYETEQEIDFFGEISGISFSPDTEALFIGVWDRTYGSLLEFGRRRNYSYLDSYL

SEQ ID NO: 8075 - DNA, 964 bp, Arabidopsis thaliana
ctctatccactctcagccggaaaatttttccttgattcattacgacagagagaaccatgccggcgaaacagaggaccccgaaggtcaacagaaaccctgatctgatcaggggtgttggtaaatactcgagatcccagatgtaccataagagaggtttgtgggctatcaaggccaaaaatggaggcgttttcccacgtcacgacgctaaatctaaggttgatgctccggtggagaagccaccgaagttctatccagctgaagatgttaagaaacctctccccaacaggcgcacggcaaaaccaaccaagctcagagctagcattactccaggtacagtgttgattatccttgctggtaggttcaagggaaagagagttgtcttccttaagcagcttgcctctggtttgcttcttgtgactggaccattcaagatcaatggtgttcctttgagacgtgttaaccaggcctatgtgattggcacttccacaaaggttgacatttctggagtcaccctcgataaattcgatgataagtactttggcaaggttgctgagaagaaaaagaagaagacagaaggagagttctttgaggctgagaaagaggagaagaaggagatcccacaggtgaagaaagatgaccagaaagctgtggatgcagctttgatcaaagccattgaagcagttccagagttgaagacttaccttggcgcaaggttttcattgaaacaaggaatgaagccccatgagcttgttttctagatttcattactttttttctgaggtctctagagtatctgtctcctgaagtgttttaccttctaaatggttgttttgttcttgttcactgaacacatacaatttttggcttatacattctctgttcttacgtatggacaaactatcgatcctgtttttgattgtgagctttgtagcgtggttcgtgatagaaatgggataattattgt

SEQ ID NO: 8076 - protein, 233 aa, Arabidopsis thaliana
MPAKQRTPKVNRNPDLIRGVGKYSRSQMYHKRGLWAIKAKNGGVFPRHDAKSKVDAPVEKPPKFYPAEDVKKPLPNRRTAKPTKLRASITPGTVLIILAGRFKGKRVVFLKQLASGLLLVTGPFKINGVPLRRVNQAYVIGTSTKVDISGVTLDKFDDKYFGKVAEKKKKKTEGEFFEAEKEEKKEIPQVKKDDQKAVDAALIKAIEAVPELKTYLGARFSLKQGMKPHELVF

SEQ ID NO: 8077 - protein, 206 aa, Arabidopsis thaliana
MYHKRGLWAIKAKNGGVFPRHDAKSKVDAPVEKPPKFYPAEDVKKPLPNRRTAKPTKLRASITPGTVLIILAGRFKGKRVVFLKQLASGLLLVTGPFKINGVPLRRVNQAYVIGTSTKVDISGVTLDKFDDKYFGKVAEKKKKKTEGEFFEAEKEEKKEIPQVKKDDQKAVDAALIKAIEAVPELKTYLGARFSLKQGMKPHELVF

SEQ ID NO: 8078 - DNA, 1693 bp, Arabidopsis thaliana
gattcattctcttcagtcagagatttcgaaaccctagtcgatttcgagatccaaccaactctgctccttatctcagcttgttgaatttgcgaagtatgggagacgctagagacaacgaagcctacgaggaggagctcttggactatgaagaagaagacgagaaggtcccagattctggaaacaaagttaacggtgaagccgtgaaaaaagggtacgtgggaatacacagttctggattcagagacttccttttaaaaccggagcttctcagagctattgttgactctggatttgaacatccatctgaagtgcaacatgaatgtatccctcaagctatcttgggcatggatgtcatctgccaagcaaagtctggtatggggaagactgctgtgtttgtcctgtctactctacaacagattgaaccatctcctggccaggtttctgcacttgtcttgtgccatacaagagagctagcttaccagatctgcaatgagtttgtgcgattcagtacctatctgcctgatacaaaggtttcggtgttctatggtggagtcaacattaaaattcacaaagacttgctgaagaatgaatgtcctcacattgttgttggtacccctggtcgggtgcttgcacttgccagggagaaagatctctctttgaagaatgtgaggcattttattcttgatgaatgtgataaaatgctcgagtcacttgacatgcgaagggatgtgcaggagattttcaagatgactcctcatgacaaacaagtaatgatgttctcagcaacgctcagcaaagagatacgcccagtctgcaaaaaatttatgcaagatccaatggaaatatatgtcgatgatgaagccaagttgactcttcatgggcttgtccagcactacatcaaactgagcgagatggagaaaaaccggaagttgaatgaccttcttgatgcgttggacttcaatcaagttgtcatttttgtgaagagcgtgagcagggctgctgagctgaacaagttactggtggaatgcaatttcccctcaatatgcatccactctggaatgtctcaagaagagaggttgactcgatacaaaagtttcaaggaagggcacaaaaggatccttgtggcgactgacttggtaggaagagggattgacattgagcgtgtcaacattgtcatcaactatgacatgccagattctgctgatacctatcttcacagggttggcagagctggtagatttggaaccaagggtcttgcaatcacatttgttgcatctgcttcagattcagaggttcttaaccaggtacaagagaggtttgaggttgatataaaggaacttccggagcagattgatacttcaacctacatgccttcttaaacaagtagcacgtccctcaggaaagaagctcttcagatttcaaccttgtaggtgttcgaagggtgatgggggttcacaactatctctcgctccgtttgttttagtgttttctatgacgacatttttttccatatgtttagaacgtctgttgtactctttaaaggagattcgagtcactctccaaatcgcacagttaaaagctgtccagttttttgtacaagagattattatgtttgaaatatcaggatttagtctcgacctgattactgtgttccttaggaatcgatctattatcaatttatcatggtgttgct

SEQ ID NO: 8079 - protein, 458 aa, Arabidopsis thaliana
FILFSQRFRNPSRFRDPTNSAPYLSLLNLRSMGDARDNEAYEEELLDYEEEDEKVPDSGNKVNGEAVKKGYVGIHSSGFRDFLLKPELLRAIVDSGFEHPSEVQHECIPQAILGMDVICQAKSGMGKTAVFVLSTLQQIEPSPGQVSALVLCHTRELAYQICNEFVRFSTYLPDTKVSVFYGGVNIKIHKDLLKNECPHIVVGTPGRVLALAREKDLSLKNVRHFILDECDKMLESLDMRRDVQEIFKMTPHDKQVMMFSATLSKEIRPVCKKFMQDPMEIYVDDEAKLTLHGLVQHYIKLSEMEKNRKLNDLLDALDFNQVVIFVKSVSRAAELNKLLVECNFPSICIHSGMSQEERLTRYKSFKEGHKRILVATDLVGRGIDIERVNIVINYDMPDSADTYLHRVGRAGRFGTKGLAITFVASASDSEVLNQVQERFEVDIKELPEQIDTSTYMPS

SEQ ID NO: 8080 - protein, 427 aa, Arabidopsis thaliana; identical to SEQ ID NO: 6084

SEQ ID NO: 8081 - protein, 344 aa, Arabidopsis thaliana; identical to SEQ ID NO: 6085

SEQ ID NO: 8082 - DNA, 1160 bp, Arabidopsis thaliana
aaaaactttgggaagcagctaaaatactgtgttctttatttcttccatcgaaatcgaaaaaagctaagatctttgcgttttgaaacgatggcggaagaacataagcatgatgaatctgtgatcgctcctgagccagctgttgaggttgtggagagagaatcgttgatggataagaagaagaagactaagaagccctcttctccttcgtcttctatgaaatcgaaagtttaccgcttgttcggacgagagcagcctgttcataaggttctcggcggtggaaagccggctgatatattcatgtggaagaacaagaagatgtctggtggtgtacttggtggtgctacagctgctttggttgtgtttgaattgatggagtaccatcttctcactctgctttgccacgtgatgattgttgttctcgctgtgctgtttttgtggtctaatgccgctatgttcattaacaagtccccaccaaagattcctgaagttcatatccctgaagaacctattcttcagcttgcgtctgggctcagaatcgagatcaaccgtggattctcttctctccgtgaaattgcatcaggaagggatctcaagaaattcctcattgctattgccgggttatgggttctctcaatcttgggcggttgcttcaacttcttgacattggcatacatagctcttgtgttgctcttcacggttcctcttgcctacgacaagtatgaagacaaagtcgacccattaggtgagaaagcaatgatcgagctcaagaagcagtatgcagtgttggatgagaaggtgttgagcaagatcccacttgggccgttgaagaacaagaagaaagattaggggtttacacaaggttgtccgtggctagcaaaacgggtgttgtgaaatggtatcgaagtaatgtgttttgggcgtttttttaggtggctctttcggttatgtgaatgaacttggaattttcctgactggtttgttctgttgtttatgtcattgttgatcagcgtcgagggataaaagtagtgatatttcttctctctctaagcctctatataactaagaatttcaagatatttgaattttgcaatctcgtggttaatgttgttctttctctatattctcctctttcattacatttgtaaaatggaatcaatgtc

SEQ ID NO: 8083 - protein, 281 aa, Arabidopsis thaliana
KNFGKQLKYCVLYFFHRNRKKLRSLRFETMAEEHKHDESVIAPEPAVEVVERESLMDKKKKTKKPSSPSSSMKSKVYRLFGREQPVHKVLGGGKPADIFMWKNKKMSGGVLGGATAALVVFELMEYHLLTLLCHVMIVVLAVLFLWSNAAMFINKSPPKIPEVHIPEEPILQLASGLRIEINRGFSSLREIASGRDLKKFLIAIAGLWVLSILGGCFNFLTLAYIALVLLFTVPLAYDKYEDKVDPLGEKAMIELKKQYAVLDEKVLSKIPLGPLKNKKKD

SEQ ID NO: 8084 - protein, 252 aa, Arabidopsis thaliana
MAEEHKHDESVIAPEPAVEVVERESLMDKKKKTKKPSSPSSSMKSKVYRLFGREQPVHKVLGGGKPADIFMWKNKKMSGGVLGGATAALVVFELMEYHLLTLLCHVMIVVLAVLFLWSNAAMFINKSPPKIPEVHIPEEPILQLASGLRIEINRGFSSLREIASGRDLKKFLIAIAGLWVLSILGGCFNFLTLAYIALVLLFTVPLAYDKYEDKVDPLGEKAMIELKKQYAVLDEKVLSKIPLGPLKNKKKD

SEQ ID NO: 8085 - protein, 226 aa, Arabidopsis thaliana
MDKKKKTKKPSSPSSSMKSKVYRLFGREQPVHKVLGGGKPADIFMWKNKKMSGGVLGGATAALVVFELMEYHLLTLLCHVMIVVLAVLFLWSNAAMFINKSPPKIPEVHIPEEPILQLASGLRIEINRGFSSLREIASGRDLKKFLIAIAGLWVLSILGGCFNFLTLAYIALVLLFTVPLAYDKYEDKVDPLGEKAMIELKKQYAVLDEKVLSKIPLGPLKNKKKD

SEQ ID NO: 8086 - DNA, 1445 bp, Arabidopsis thaliana
aatcgaaaaatcatcaaaccctttcttcaccacattattttcactgagcgcataacatttttgagacaagagactctctctctctctcttctctctttctctccccctctctccggcgatggttgttgctatggaccaacgcaccaatgtgaacggagatcccggcgccggagaccggaagaaagaagaaaggtttgatccgagtgcacaaccaccgttcaagatcggagatataagggcggcgattcctaagcactgttgggttaagagtcctttgagatcaatgagttacgtcgtcagagacattatcgccgtcgcggctttggccatcgctgccgtgtatgttgatagctggttcctttggcctctttattgggccgcccaaggaacacttttctgggccatctttgttctcggccacgactgtggacatgggagtttctcagacattcctctactgaatagtgtggttggtcacattcttcattctttcatcctcgttccttaccatggttggagaataagccaccggacacaccaccagaaccatggccatgttgaaaacgacgagtcatgggttccgttaccagaaagggtgtacaagaaattgccccacagtactcggatgctcagatacactgtccctctccccatgctcgcatatcctctctatttgtgctacagaagtcctggaaaagaaggatcacattttaacccatacagtagtttatttgctccaagcgagagaaagcttattgcaacttcaactacttgttggtccataatgttcgtcagtcttatcgctctatctttcgtcttcggtccactcgcggttcttaaagtctacggtgtaccgtacattatctttgtgatgtggttggatgctgtcacgtatttgcatcatcatggtcacgatgagaagttgccttggtatagaggcaaggaatggagttatctacgtggaggattaacaacaattgatagagattacggaatctttaacaacattcatcacgacattggaactcacgtgatccatcatctcttcccacaaatccctcactatcacttggtcgacgccacgaaagcagctaaacatgtgttgggaagatactacagagaaccaaagacgtcaggagcaataccgatccacttggtggagagtttggtcgcaagtattaagaaagatcattacgtcagcgacactggtgatattgtcttctacgagacagatccagatctctacgtttacgcttctgacaaatctaaaatcaattaatctccatttgtttagctctattaggaataaaccagcccacttttaaaatttttatttcttgttgtttttaagttaaaagtgtactcgtgaaactcttttttttttcttttttttttattaatgtatttacattacaaggcgtaaagttttgttatttctcttttct

SEQ ID NO: 8087 - protein, 386 aa, Arabidopsis thaliana
MVVAMDQRTNVNGDPGAGDRKKEERFDPSAQPPFKIGDIRAAIPKHCWVKSPLRSMSYVVRDIIAVAALAIAAVYVDSWFLWPLYWAAQGTLFWAIFVLGHDCGHGSFSDIPLLNSVVGHILHSFILVPYHGWRISHRTHHQNHGHVENDESWVPLPERVYKKLPHSTRMLRYTVPLPMLAYPLYLCYRSPGKEGSHFNPYSSLFAPSERKLIATSTTCWSIMFVSLIALSFVFGPLAVLKVYGVPYIIFVMWLDAVTYLHHHGHDEKLPWYRGKEWSYLRGGLTTIDRDYGIFNNIHHDIGTHVIHHLFPQIPHYHLVDATKAAKHVLGRYYREPKTSGAIPIHLVESLVASIKKDHYVSDTGDIVFYETDPDLYVYASDKSKIN

SEQ ID NO: 8088 - protein, 382 aa, Arabidopsis thaliana
MDQRTNVNGDPGAGDRKKEERFDPSAQPPFKIGDIRAAIPKHCWVKSPLRSMSYVVRDIIAVAALAIAAVYVDSWFLWPLYWAAQGTLFWAIFVLGHDCGHGSFSDIPLLNSVVGHILHSFILVPYHGWRISHRTHHQNHGHVENDESWVPLPERVYKKLPHSTRMLRYTVPLPMLAYPLYLCYRSPGKEGSHFNPYSSLFAPSERKLIATSTTCWSIMFVSLIALSFVFGPLAVLKVYGVPYIIFVMWLDAVTYLHHHGHDEKLPWYRGKEWSYLRGGLTTIDRDYGIFNNIHHDIGTHVIHHLFPQIPHYHLVDATKAAKHVLGRYYREPKTSGAIPIHLVESLVASIKKDHYVSDTGDIVFYETDPDLYVYASDKSKIN

SEQ ID NO: 8089 - protein, 331 aa, Arabidopsis thaliana
MSYVVRDIIAVAALAIAAVYVDSWFLWPLYWAAQGTLFWAIFVLGHDCGHGSFSDIPLLNSVVGHILHSFILVPYHGWRISHRTHHQNHGHVENDESWVPLPERVYKKLPHSTRMLRYTVPLPMLAYPLYLCYRSPGKEGSHFNPYSSLFAPSERKLIATSTTCWSIMFVSLIALSFVFGPLAVLKVYGVPYIIFVMWLDAVTYLHHHGHDEKLPWYRGKEWSYLRGGLTTIDRDYGIFNNIHHDIGTHVIHHLFPQIPHYHLVDATKAAKHVLGRYYREPKTSGAIPIHLVESLVASIKKDHYVSDTGDIVFYETDPDLYVYASDKSKIN

SEQ ID NO: 8090 - DNA, 1116 bp, Arabidopsis thaliana
atagaacatcctaatcgaaaaacattagttttgctgcgtttagtattcaatttcatcgacccaaatcaaaatatataggatactagataaagagtgactgaaggagagaaaaacaaaaatggcgattgtttccgtctctaactcttttctcactttcaattctcccaatcagctccgatttagccgaagaagattctctgccatggcttcttcaactactggagtgagagtcgctgaaggagaaggcaatttgccaaaacttgtccttacttctcctcagaacagcgaggctgagatatatctcttcggaggctgcattacttcttggaaagttgcgagcggtaaagatcttctttttgtcagaccagatgctgtcttcaataagattaagcccattagcggagggattccacattgttttccacagtttggacctgggctaattcaacagcatgggtttggaaggaacatggactggtctgttgtcgattcccagaatgcagatgacaatgctgctgttactcttgagcttaaggatggtccctatagtcgagccatgtgggactttgctttccaggctctatacaaggtcattgttggcgcggactccctttccactgagctaaagattacaaacacagacgataaaccattttctttcagcactgcgttgcatacttacttccgtgcttcttctgcgggggcctccgtgagaggtctaaagggttgtaaaactctcaataaggatccagaccctaagaacccaatagagggtaaagaagacagggatgcagtcacttttcctggatttgtggataccgtctatcttgatgctcccaatgaattgcagtttgataatggcttgggtgataaaataatcatcaaaaacacaaattggtcggatgcggtcttgtggaacccgcatactcagatggaggcttgttacagagactttgtgtgcgtggaaaatgcaaagcttggggatgtcaagctagagccgggacagtcttggactgcaacacaacttctcagcatcagttgaaaacattgtactttaaacttataatgtccagtggatccattttcttaagcaataaaagttttatttcctctccc

SEQ ID NO: 8091 - protein, 307 aa, Arabidopsis thaliana
MAIVSVSNSFLTFNSPNQLRFSRRRFSAMASSTTGVRVAEGEGNLPKLVLTSPQNSEAEIYLFGGCITSWKVASGKDLLFVRPDAVFNKIKPISGGIPHCFPQFGPGLIQQHGFGRNMDWSVVDSQNADDNAAVTLELKDGPYSRAMWDFAFQALYKVIVGADSLSTELKITNTDDKPFSFSTALHTYFRASSAGASVRGLKGCKTLNKDPDPKNPIEGKEDRDAVTFPGFVDTVYLDAPNELQFDNGLGDKIIIKNTNWSDAVLWNPHTQMEACYRDFVCVENAKLGDVKLEPGQSWTATQLLSIS

SEQ ID NO: 8092 - protein, 279 aa, Arabidopsis thaliana
MASSTTGVRVAEGEGNLPKLVLTSPQNSEAEIYLFGGCITSWKVASGKDLLFVRPDAVFNKIKPISGGIPHCFPQFGPGLIQQHGFGRNMDWSVVDSQNADDNAAVTLELKDGPYSRAMWDFAFQALYKVIVGADSLSTELKITNTDDKPFSFSTALHTYFRASSAGASVRGLKGCKTLNKDPDPKNPIEGKEDRDAVTFPGFVDTVYLDAPNELQFDNGLGDKIIIKNTNWSDAVLWNPHTQMEACYRDFVCVENAKLGDVKLEPGQSWTATQLLSIS

SEQ ID NO: 8093 - protein, 190 aa, Arabidopsis thaliana
MDWSVVDSQNADDNAAVTLELKDGPYSRAMWDFAFQALYKVIVGADSLSTELKITNTDDKPFSFSTALHTYFRASSAGASVRGLKGCKTLNKDPDPKNPIEGKEDRDAVTFPGFVDTVYLDAPNELQFDNGLGDKIIIKNTNWSDAVLWNPHTQMEACYRDFVCVENAKLGDVKLEPGQSWTATQLLSIS

SEQ ID NO: 8094 - DNA, 1278 bp, Arabidopsis thaliana
tcgacccacgcgtccggtaattaacttctaacttgaggggcttttcattatctcctcctcgtcgtcctccctccatttttcttcacgtctggttttctctctcttttcctctatcttttcctctatctctctcctctctttgtctctctcgcttctgtgatttgggctttttcagatgggaaatgcgaacggcaaagacgaagacgccgccgccggtagcggtggtgcagatgttacctcgtcctcggcgagatctaatggcggcgatccttctgcacgcagtcgtcaccgtcgtccttcttcagactctatgagcagttctcctcccggaagtcctgctcgatctccatctcctttcttattcgctcctcaggttcccgtggctccattgcagagagcaaacgcccctccttctcctaataacatccaatggaaccaatcacagagagtttttgataatcccccagagcaaggaatccctaccatcattacatggaaccaaggaggtaatgatgtgacggtggaaggatcatgggacaattggagatcaaggaagaagctgcagaaatcaggaaaagaccactcgattctctttgtccttccatctggcatataccattacaaggtgattgtggacggtgaatccaaatacatcccagatttaccctttgtagcagacgaagttggcaatgtctgtaacattctcgatgttcataactttgtgccagaaaacccagaaagcatagtggagtttgaggcgccaccatcacctgatcatagctacggtcaaaccctaccagccgcagaagattacgcgaaagagccactggcggtgccacctcagcttcatctaacacttcttggcactactgaagagacagccatagccacaaagcctcaacatgtggtgcttaaccatgtgttcatagagcaaggatggactcctcaatccatagtagctttgggtttaacccacaggttcgagtctaagtacataactgttgtcctctacaaaccgctcacacggtaaccctaaaaattcagtgccacattgttctctctctttctttttttttcatctctcaattatgtgaaaacatgttctttgttcatagtgactagtgagtgcccaacatttgagtttattaacctctttcttacctggtttgtggtgcttgtgtacaaagcttctctcattgtaacgattgttgttttattttctgcaaaaactgtaaaatacattcgctaataatggctataagaagcttatctgctagc

SEQ ID NO: 8095 - protein, 284 aa, Arabidopsis thaliana
MGNANGKDEDAAAGSGGADVTSSSARSNGGDPSARSRHRRPSSDSMSSSPPGSPARSPSPFLFAPQVPVAPLQRANAPPSPNNIQWNQSQRVFDNPPEQGIPTIITWNQGGNDVTVEGSWDNWRSRKKLQKSGKDHSILFVLPSGIYHYKVIVDGESKYIPDLPFVADEVGNVCNILDVHNFVPENPESIVEFEAPPSPDHSYGQTLPAAEDYAKEPLAVPPQLHLTLLGTTEETAIATKPQHVVLNHVFIEQGWTPQSIVALGLTHRFESKYITVVLYKPLTR

SEQ ID NO: 8096 - protein, 239 aa, Arabidopsis thaliana
MSSSPPGSPARSPSPFLFAPQVPVAPLQRANAPPSPNNIQWNQSQRVFDNPPEQGIPTIITWNQGGNDVTVEGSWDNWRSRKKLQKSGKDHSILFVLPSGIYHYKVIVDGESKYIPDLPFVADEVGNVCNILDVHNFVPENPESIVEFEAPPSPDHSYGQTLPAAEDYAKEPLAVPPQLHLTLLGTTEETAIATKPQHVVLNHVFIEQGWTPQSIVALGLTHRFESKYITVVLYKPLTR

SEQ ID NO: 8097 - DNA, 1035 bp, Arabidopsis thaliana
accacccatttcttggcttacaacaacaaatcttaaacgttttactttgtgctgcactactcaacctcaatggccgcctcaacaatggctctctcctcccctgccttcgccggtaaggccgtcaagctttcccccgcggcatctgaagtccttggaagcggccgtgtgacaatgaggaagactgttgccaagccaaagggcccatcaggcagcccatggtacggatctgaccgtgtcaagtacttgggtccattctctggcgaatcaccgagctaccttaccggagagttccccggagactacggatgggacaccgccggactttcagctgaccccgagacattcgcaaggaaccgtgagctagaagttatccacagcaggtgggcaatgctcggagccctaggctgcgtcttccctgagcttttggctaggaacggagtcaagttcggagaggcggtttggttcaaggccggttcacagatcttcagcgatggagggctcgattacttgggaaaccctagcttagttcacgctcagagcattttggccatttgggccactcaagttatcttgatgggagctgttgaaggctacagagtcgcaggaaatgggccattgggagaggccgaggacttgctttaccccggtggcagcttcgacccattgggtcttgctaccgacccagaggctttcgcggagttgaaggtgaaggagctcaagaacggaagattggctatgttctctatgtttggattcttcgttcaagccattgtcactggtaagggaccgatagagaaccttgctgaccatttggccgatccagtcaacaacaacgcatgggccttcgcaaccaactttgttcccggaaagtgagccaagttttatcagtttgtattttgcttttctttcagtcttttgaattcgagtgagagacatgaggagaaagagaaggttgtatgtgatggtttgagactttcagatgtaaatttgcaagactttgtatgatttgtcattaatcaaactcatttttctcta

SEQ ID NO: 8098 - protein, 267 aa, Arabidopsis thaliana
MAASTMALSSPAFAGKAVKLSPAASEVLGSGRVTMRKTVAKPKGPSGSPWYGSDRVKYLGPFSGESPSYLTGEFPGDYGWDTAGLSADPETFARNRELEVIHSRWAMLGALGCVFPELLARNGVKFGEAVWFKAGSQIFSDGGLDYLGNPSLVHAQSILAIWATQVILMGAVEGYRVAGNGPLGEAEDLLYPGGSFDPLGLATDPEAFAELKVKELKNGRLAMFSMFGFFVQAIVTGKGPIENLADHLADPVNNNAWAFATNFVPGK

SEQ ID NO: 8099 - protein, 262 aa, Arabidopsis thaliana
MALSSPAFAGKAVKLSPAASEVLGSGRVTMRKTVAKPKGPSGSPWYGSDRVKYLGPFSGESPSYLTGEFPGDYGWDTAGLSADPETFARNRELEVIHSRWAMLGALGCVFPELLARNGVKFGEAVWFKAGSQIFSDGGLDYLGNPSLVHAQSILAIWATQVILMGAVEGYRVAGNGPLGEAEDLLYPGGSFDPLGLATDPEAFAELKVKELKNGRLAMFSMFGFFVQAIVTGKGPIENLADHLADPVNNNAWAFATNFVPGK

SEQ ID NO: 8100 - protein, 233 aa, Arabidopsis thaliana
MRKTVAKPKGPSGSPWYGSDRVKYLGPFSGESPSYLTGEFPGDYGWDTAGLSADPETFARNRELEVIHSRWAMLGALGCVFPELLARNGVKFGEAVWFKAGSQIFSDGGLDYLGNPSLVHAQSILAIWATQVILMGAVEGYRVAGNGPLGEAEDLLYPGGSFDPLGLATDPEAFAELKVKELKNGRLAMFSMFGFFVQAIVTGKGPIENLADHLADPVNNNAWAFATNFVPGK

SEQ ID NO: 8101 - DNA, 1173 bp, Arabidopsis thaliana
aacggacggcaaaactcggagtcggagatcgtaccggaggacggcgaatctttcatcttctgtcctttcgttttttatacgcgtcagatgagtctttaacttccgattagctttgtaaacaatcgcgattagtcgggattacatctaaaggattcgttgatggcggcgtcgtggcaatgggaaaatgccaccgccggcgccgtcgctggattcgccaccgtagctgctatgcaccctcttgatgttgttcgtacgagattccaagtcaacgatggtagagggtcaagtctcccaacgtacaagaacactgctcacgctgtcttcaccattgcccgtctcgagggtttgagagggctttatgcaggcttcttccctgcagttatcggttctactgtttcctggggcttatacttctttttttatggaagagccaagcagagatacgctagaggcagggatgatgagaaactcagccctgctctccaccttgcttctgctgctgaagcaggggccttggtctgtttatgcacaaatcctatttggcttgtcaaaacaaggttacagcttcagacacctcttcatcaaactcaaccatactcagggcttttagatgcctttagaaccatagtgaaagaggaaggacccagggcgctctacaagggtattgtccctggtcttgtactggtttctcatggtgctattcagttcacagcttatgaggaactccgtaaaatcattgtggatttgaaagaaaggagaagaaagtccgaatccactgataatctattgaactcagcagattacgctgcacttggcggctcctccaaagtcgctgcagttctacttacgtatccatttcaagttattcgagcacgattacagcaacgacctagtaccaacggaatcccaagatatatagacagcttacatgtcgtcagagaaaccgcaagatatgaaggtctcaggggtttctacaggggactaacggctaatcttttgaaaaatgttcctgcgtcttccatcacattcatcgtctatgaaaacgttttgaaattgctaaaacagcatccaacaacaaaagattagatccttcctcttcctttatcgttatttcttagactcaacaagcacgcggttgacttgtcactcctaatactaaagaattattctttg

SEQ ID NO: 8102 - protein, 308 aa, Arabidopsis thaliana
MAASWQWENATAGAVAGFATVAAMHPLDVVRTRFQVNDGRGSSLPTYKNTAHAVFTIARLEGLRGLYAGFFPAVIGSTVSWGLYFFFYGRAKQRYARGRDDEKLSPALHLASAAEAGALVCLCTNPIWLVKTRLQLQTPLHQTQPYSGLLDAFRTIVKEEGPRALYKGIVPGLVLVSHGAIQFTAYEELRKIIVDLKERRRKSESTDNLLNSADYAALGGSSKVAAVLLTYPFQVIRARLQQRPSTNGIPRYIDSLHVVRETARYEGLRGFYRGLTANLLKNVPASSITFIVYENVLKLLKQHPTTKD

SEQ ID NO: 8103 - protein, 285 aa, Arabidopsis thaliana
MHPLDVVRTRFQVNDGRGSSLPTYKNTAHAVFTIARLEGLRGLYAGFFPAVIGSTVSWGLYFFFYGRAKQRYARGRDDEKLSPALHLASAAEAGALVCLCTNPIWLVKTRLQLQTPLHQTQPYSGLLDAFRTIVKEEGPRALYKGIVPGLVLVSHGAIQFTAYEELRKIIVDLKERRRKSESTDNLLNSADYAALGGSSKVAAVLLTYPFQVIRARLQQRPSTNGIPRYIDSLHVVRETARYEGLRGFYRGLTANLLKNVPASSITFIVYENVLKLLKQHPTTKD

SEQ ID NO: 8104 - DNA, 2105 bp, Arabidopsis thaliana
aaaaatatcataaggctgagagcttatcagagaagaagaagatatttctgtaagcgagaaaaatggcgagagaacatgcgatcggagaagccaccggaaaacgaaagaaacgcggcagagttgaagaagcagaagaatactgtaacgatggaatcgaagaacaagtagaggatgagaagcttccgttagaggttgggatgttctattacccaatgactccgccttcgttcattgtttccgatgctctggagccagattttcctttgatctatgtcaacagagtcttcgaagtcttcactggctatcgtgccgatgaagttcttggtcgtaactgtcgattcctacagtacagagatcctcgagctcaaaggcgtcacccattggttgatcctgtggttgtatctgagattaggagatgtcttgaagaaggtattgaattccaaggagagcttcttaatttcagaaaagatggtactcctttggttaacagactacggcttgctccaatacgtgacgatgatggaaccattacacacgtaattgggatacaggtcttctctgaaacgactatagaccttgaccgtgtctcgtatcctgtgttcaaacataaacaacagcttgatcaaacatctgagtgcttgtttccaagtggaagcccgaggtttaaggagcatcatgaagatttctgtgggatattgcagctatctgatgaagttttggctcataacatcttatctcggttaactccaagggacgttgcttcaattggttctgcttgcaggaggttgaggcagttgacgaagaacgagagtgtgaggaagatggtatgtcagaatgcgtggggaaaagagataactggaacactggagattatgactaagaagctaagatggggtcggttagctagagagctcaccactcttgaagctgtgtgttggcgtaaatttactgttggagggattgtacaaccttcccgctgcaatttcagcgcgtgtgctgttgggaaccggcttgtgctatttggtggggaaggggttaacatgcagccattggatgatacttttgttctcaatcttgatgcagagtgtcctgagtggcagcgtgtgagggtgacgtcgtcgcctccaggacgttggggacacacactctcgtgtctcaacgggtcgtggttggtagtctttggagggtgtggaagacaaggattgcttaatgatgtatttgtgcttgatctagacgctaagcatcccacatggaaggaagtagcaggaggaactcctccattgccaagatcttggcacagctcgtgcaccattgagggctctaaactggttgtctcaggtggctgcacagacgctggagtgcttctcagcgacaccttcttgttggatctgacaacagataaaccgacatggaaagagatcccgacatcatgggctcctccttctagacttgggcattctttatcggtctttggtcggactaaaatcctaatgtttggcgggcttgcaaatagtggtcatctaaagctaaggtcaggggaggcatacactatagacttggaggatgaagaaccaagatggagagagcttgagtgtagcgcattcccaggcgtggttgtaccgcctccaagactagaccatgtggctgtgagcatgccgtgtggtagggtcatcatctttggagggtcgattgcagggcttcactctccttcgcaactgtttctaatagatcctgcagaagagaaaccgtcatggaggatcctgaatgtccccgggaaaccgcctaagttagcttggggacatagcacatgcgttgttggaggaactagagtattggtccttggtggtcacactggtgaggaatggatactcaatgaattacatgaactctgcttggctagccggcaagactcggatctgtaaagactctttccttcttcatttggtttgtggttttgtatctgtcacattccaaactcttacgacatgtagaagagatatatcagaagctagaagcgtgtgtacatagtaaattagtgattgttgtacgctttagatagatattcatgtaatgttaatggttttgctgtatgaagatccttctat

SEQ ID NO: 8105 - protein, 619 aa, Arabidopsis thaliana
MAREHAIGEATGKRKKRGRVEEAEEYCNDGIEEQVEDEKLPLEVGMFYYPMTPPSFIVSDALEPDFPLIYVNRVFEVFTGYRADEVLGRNCRFLQYRDPRAQRRHPLVDPVVVSEIRRCLEEGIEFQGELLNFRKDGTPLVNRLRLAPIRDDDGTITHVIGIQVFSETTIDLDRVSYPVFKHKQQLDQTSECLFPSGSPRFKEHHEDFCGILQLSDEVLAHNILSRLTPRDVASIGSACRRLRQLTKNESVRKMVCQNAWGKEITGTLEIMTKKLRWGRLARELTTLEAVCWRKFTVGGIVQPSRCNFSACAVGNRLVLFGGEGVNMQPLDDTFVLNLDAECPEWQRVRVTSSPPGRWGHTLSCLNGSWLVVFGGCGRQGLLNDVFVLDLDAKHPTWKEVAGGTPPLPRSWHSSCTIEGSKLVVSGGCTDAGVLLSDTFLLDLTTDKPTWKEIPTSWAPPSRLGHSLSVFGRTKILMFGGLANSGHLKLRSGEAYTIDLEDEEPRWRELECSAFPGVVVPPPRLDHVAVSMPCGRVIIFGGSIAGLHSPSQLFLIDPAEEKPSWRILNVPGKPPKLAWGHSTCVVGGTRVLVLGGHTGEEWILNELHELCLASRQDSDL

SEQ ID NO: 8106 - protein, 574 aa, Arabidopsis thaliana
MFYYPMTPPSFIVSDALEPDFPLIYVNRVFEVFTGYRADEVLGRNCRFLQYRDPRAQRRHPLVDPVVVSEIRRCLEEGIEFQGELLNFRKDGTPLVNRLRLAPIRDDDGTITHVIGIQVFSETTIDLDRVSYPVFKHKQQLDQTSECLFPSGSPRFKEHHEDFCGILQLSDEVLAHNILSRLTPRDVASIGSACRRLRQLTKNESVRKMVCQNAWGKEITGTLEIMTKKLRWGRLARELTTLEAVCWRKFTVGGIVQPSRCNFSACAVGNRLVLFGGEGVNMQPLDDTFVLNLDAECPEWQRVRVTSSPPGRWGHTLSCLNGSWLVVFGGCGRQGLLNDVFVLDLDAKHPTWKEVAGGTPPLPRSWHSSCTIEGSKLVVSGGCTDAGVLLSDTFLLDLTTDKPTWKEIPTSWAPPSRLGHSLSVFGRTKILMFGGLANSGHLKLRSGEAYTIDLEDEEPRWRELECSAFPGVVVPPPRLDHVAVSMPCGRVIIFGGSIAGLHSPSQLFLIDPAEEKPSWRILNVPGKPPKLAWGHSTCVVGGTRVLVLGGHTGEEWILNELHELCLASRQDSDL

SEQ ID NO: 8107 - protein, 569 aa, Arabidopsis thaliana
MTPPSFIVSDALEPDFPLIYVNRVFEVFTGYRADEVLGRNCRFLQYRDPRAQRRHPLVDPVVVSEIRRCLEEGIEFQGELLNFRKDGTPLVNRLRLAPIRDDDGTITHVIGIQVFSETTIDLDRVSYPVFKHKQQLDQTSECLFPSGSPRFKEHHEDFCGILQLSDEVLAHNILSRLTPRDVASIGSACRRLRQLTKNESVRKMVCQNAWGKEITGTLEIMTKKLRWGRLARELTTLEAVCWRKFTVGGIVQPSRCNFSACAVGNRLVLFGGEGVNMQPLDDTFVLNLDAECPEWQRVRVTSSPPGRWGHTLSCLNGSWLVVFGGCGRQGLLNDVFVLDLDAKHPTWKEVAGGTPPLPRSWHSSCTIEGSKLVVSGGCTDAGVLLSDTFLLDLTTDKPTWKEIPTSWAPPSRLGHSLSVFGRTKILMFGGLANSGHLKLRSGEAYTIDLEDEEPRWRELECSAFPGVVVPPPRLDHVAVSMPCGRVIIFGGSIAGLHSPSQLFLIDPAEEKPSWRILNVPGKPPKLAWGHSTCVVGGTRVLVLGGHTGEEWILNELHELCLASRQDSDL

SEQ ID NO: 8108 - DNA, 1879 bp, Arabidopsis thaliana
atagattatagatataacccactgaattaatattacggtcttcaatataggtgcatttaaaacataacgttccctctcttgtcttcttatttttgctctctgttctttagaactgccattaacgagagtgagagagagacacacacacacagcgagtgaaaatgtctccggagaagaagagtcaaaacttccctccaataacggaatgcagagacggagagtacgattcgatagccgccgatcttgacgggactctgcttctctcaagaagctccttcccttacttcatgctcgtcgctgttgaagctggaagccttttacgtggactaatcctccttctctcgttaccattcgtcattatctcttacctattcgtatccgaatctcttggtatccagatcctcatcttcatctcattcgctggtctcaaaatccgcgatatcgaacttgtctctcgcgcagttcttccacggtacgagatctaacatagagtgttttcttgttagtagatcactttagtttttttccgatgaactatgtttaggttttacgcggcggatgtgaggaaagacagttttgaggtgtttgataagtgtaagaagaaagtggtagtgacggcgaatccgattgtgatggtggaggcgtttgtgaaggattatcttggaggtgataaagttttgggaacagagattgaagttaaccctaaaaccaatagagccactggatttgtgaagaagcctggtgttcttgttggtgatcttaagaggttagccattttaaaagagtttggtaacgaatcacctgatctcggcctcggtgatcgaacctctgatcatgatttcatgtctctctgcaagaaaggttacatggttcatgcgaccaagtcagccacaacgattccaaaagaacgcttaaagaaccgcatagtcttccatgatgggcgtttagcgcaacgtccaactccgttaaacgccattatcacatacctatggcttccttttggtttcatcctctccatcattcgcgtctacttcaacctccctttacctgaaagatttgtccgttacacttacgagatgctcgggatccacttaaccattcgtggtcatcgtcctccacctccttcccctggaactcttggcaacctctatgtccttaaccaccgtaccgcgcttgatcccatcatcgttgctattgctcttggacgtaagatctgttgcgtcacttacagtgtctctcgtctctcccttatgctttctcctattcctgctgttgccctcacccgtgaccgtgccaccgatgctgccaacatgagaaaacttctcgagaaaggcgacttggtgatatgtcccgaaggcacgacgtgcagagaagagtatctactgagatttagcgctctattcgcagagctaagcgaccggattgtgccagtagcgatgaactgtaaacaaggaatgttcaacgggaccacagttaggggtgtgaagttttgggacccttacttcttcttcatgaacccaagaccaagctatgaagccactttcttggatcgtttgcctgaagaaatgactgtcaacggtggtggcaagactcctatagaggtggctaattacgtccagaaagttatcggcgcggttttgggcttcgaatgcaccgaacttactcgcaaggataaatatcttttgcttggaggtaatgacggcaaggtagagtctatcaacaacaccaagaagtgaaaatccaaacaagggttttttcttgttatgtcgtatacgaattttcatgtgtgtaattgctggagctcttgtcatcattatggtacgtttttgttatgtgtaatacgacgtatatatgtttgaataaaactatgtttcggtgg

SEQ ID NO: 8109 - protein, 399 aa, Arabidopsis thaliana
MFRFYAADVRKDSFEVFDKCKKKVVVTANPIVMVEAFVKDYLGGDKVLGTEIEVNPKTNRATGFVKKPGVLVGDLKRLAILKEFGNESPDLGLGDRTSDHDFMSLCKKGYMVHATKSATTIPKERLKNRIVFHDGRLAQRPTPLNAIITYLWLPFGFILSIIRVYFNLPLPERFVRYTYEMLGIHLTIRGHRPPPPSPGTLGNLYVLNHRTALDPIIVAIALGRKICCVTYSVSRLSLMLSPIPAVALTRDRATDAANMRKLLEKGDLVICPEGTTCREEYLLRFSALFAELSDRIVPVAMNCKQGMFNGTTVRGVKFWDPYFFFMNPRPSYEATFLDRLPEEMTVNGGGKTPIEVANYVQKVIGAVLGFECTELTRKDKYLLLGGNDGKVESINNTKK

SEQ ID NO: 8110 - protein, 367 aa, Arabidopsis thaliana
MVEAFVKDYLGGDKVLGTEIEVNPKTNRATGFVKKPGVLVGDLKRLAILKEFGNESPDLGLGDRTSDHDFMSLCKKGYMVHATKSATTIPKERLKNRIVFHDGRLAQRPTPLNAIITYLWLPFGFILSIIRVYFNLPLPERFVRYTYEMLGIHLTIRGHRPPPPSPGTLGNLYVLNHRTALDPIIVAIALGRKICCVTYSVSRLSLMLSPIPAVALTRDRATDAANMRKLLEKGDLVICPEGTTCREEYLLRFSALFAELSDRIVPVAMNCKQGMFNGTTVRGVKFWDPYFFFMNPRPSYEATFLDRLPEEMTVNGGGKTPIEVANYVQKVIGAVLGFECTELTRKDKYLLLGGNDGKVESINNTKK

SEQ ID NO: 8111 - protein, 297 aa, Arabidopsis thaliana
MSLCKKGYMVHATKSATTIPKERLKNRIVFHDGRLAQRPTPLNAIITYLWLPFGFILSIIRVYFNLPLPERFVRYTYEMLGIHLTIRGHRPPPPSPGTLGNLYVLNHRTALDPIIVAIALGRKICCVTYSVSRLSLMLSPIPAVALTRDRATDAANMRKLLEKGDLVICPEGTTCREEYLLRFSALFAELSDRIVPVAMNCKQGMFNGTTVRGVKFWDPYFFFMNPRPSYEATFLDRLPEEMTVNGGGKTPIEVANYVQKVIGAVLGFECTELTRKDKYLLLGGNDGKVESINNTKK

SEQ ID NO: 8112 - DNA, 1488 bp, Arabidopsis thaliana
aagaaaccctagaaaattccgattcatcaactgagagagaagaagaattgagaaatgatgaagcgtctgatcccaacgttcaaccgcatcttggtgcagagagtcatccagcccgctaaaaccgaaagcggcattctcctacctgagaaatcctccaagctgcggttgaacgttgggatcagacgcttcatcattttcacattctcttctctctcgatatcatctaaatctctctcgatctcaatttcgcaaaatggctgacaagaagatcagaatcggaatcaacggtttcggaagaatcggtcgtttggttgctagagttgttcttcagagggatgatgttgagctcgtcgctgttaacgatcctttcatcaccaccgagtacatgacatacatgtttaagtatgacagtgttcacggtcagtggaagcaccatgagcttaaggtgaaggatgacaaaactcttctcttcggtgagaagccagtcactgttttcggcatcaggaaccctgaggacatcccatggggtgaggctggagctgactttgttgttgagtctactggtgtcttcactgacaaagacaaggctgctgctcacttgaagggtggtgctaaaaaggttgtcatctctgccccaagcaaagatgcgcccatgttcgttgttggtgtcaacgagcacgagtacaagtctgaccttgacattgtttccaacgctagttgcaccactaactgccttgctcctcttgccaaggttattaatgacaggtttggcattgttgagggactcatgaccactgtccactctatcactgctactcagaagacagttgatggtccatcaatgaaggactggagaggtggaagagctgcttccttcaacattattcctagcagcactggtgccgccaaggctgttgggaaagtgttgccatccctcaatggaaaattgaccggaatgtctttccgtgttccaaccgttgatgtctcagttgttgatctcaccgttagacttgagaaagctgcaacatacgacgaaatcaagaaggccatcaaggaggaatctgaaggcaaaatgaagggaattttgggatacactgaggatgatgttgtgtctaccgactttgttggtgacaacaggtcaagcattttcgatgccaaggctgggattgcattgagcgacaagtttgtgaagttggtgtcatggtacgacaacgaatggggttacagttctcgtgtcgttgaccttatcgttcacatgtcaaaggcctaagcttacaccggcgagagtttgtgtgtggttgagttcgtactgttctgaataaaaaaaaggagaaaagaaaactcgagttgttatgttttttcactgattccatgcgcagtcatgagagtttgtagcttttgtctttttgctttctcttaatgtttccctgctttatttactgaaaccattggtttggttttttatgttaattaagtttttagttcatt

SEQ ID NO: 8113 - protein, 338 aa, Arabidopsis thaliana
MADKKIRIGINGFGRIGRLVARVVLQRDDVELVAVNDPFITTEYMTYMFKYDSVHGQWKHHELKVKDDKTLLFGEKPVTVFGIRNPEDIPWGEAGADFVVESTGVFTDKDKAAAHLKGGAKKVVISAPSKDAPMFVVGVNEHEYKSDLDIVSNASCTTNCLAPLAKVINDRFGIVEGLMTTVHSITATQKTVDGPSMKDWRGGRAASFNIIPSSTGAAKAVGKVLPSLNGKLTGMSFRVPTVDVSVVDLTVRLEKAATYDEIKKAIKEESEGKMKGILGYTEDDVVSTDFVGDNRSSIFDAKAGIALSDKFVKLVSWYDNEWGYSSRVVDLIVHMSKA

SEQ ID NO: 8114 - protein, 294 aa, Arabidopsis thaliana
MTYMFKYDSVHGQWKHHELKVKDDKTLLFGEKPVTVFGIRNPEDIPWGEAGADFVVESTGVFTDKDKAAAHLKGGAKKVVISAPSKDAPMFVVGVNEHEYKSDLDIVSNASCTTNCLAPLAKVINDRFGIVEGLMTTVHSITATQKTVDGPSMKDWRGGRAASFNIIPSSTGAAKAVGKVLPSLNGKLTGMSFRVPTVDVSVVDLTVRLEKAATYDEIKKAIKEESEGKMKGILGYTEDDVVSTDFVGDNRSSIFDAKAGIALSDKFVKLVSWYDNEWGYSSRVVDLIVHMSKA

SEQ ID NO: 8115 - protein, 291 aa, Arabidopsis thaliana
MFKYDSVHGQWKHHELKVKDDKTLLFGEKPVTVFGIRNPEDIPWGEAGADFVVESTGVFTDKDKAAAHLKGGAKKVVISAPSKDAPMFVVGVNEHEYKSDLDIVSNASCTTNCLAPLAKVINDRFGIVEGLMTTVHSITATQKTVDGPSMKDWRGGRAASFNIIPSSTGAAKAVGKVLPSLNGKLTGMSFRVPTVDVSVVDLTVRLEKAATYDEIKKAIKEESEGKMKGILGYTEDDVVSTDFVGDNRSSIFDAKAGIALSDKFVKLVSWYDNEWGYSSRVVDLIVHMSKA

SEQ ID NO: 8116 - DNA, 1210 bp, Arabidopsis thaliana
caatattttttctcctctattcttctccactgagcggagaaaaaaaaaaatcattatcgtccgcgagatatctggtgttcttctcgtacttgcggattcctccgaattgtttcttcacagtttcttaacgcttggaagtatggttagtgagagaagagtgcatccggattgtataaacgcttcaaatccttatcacgagtgtgtcgagtattgctttaagaaaatcgctgaagcaaaggccagattcgagaagcagaacactggattagctaaagttcacgagcagacgagggagccgctcgatgataaaagaatagaggaagatagttcagaagaagaagaggaggaagaggataaccaagaacctcaagtagatgtaactcaacttacagggagacaaaagaagttgtttgagttgagacttaagatgaatgaagcaagaaaatccaatcagacggatgtcgggagtgaaaagaagaaaatggaagcaccaacagagacaaaaggaatctcaaaacagaaatggttggaggggaggaagaaaaagattgggaaacttcttgatgctaatggtttagatatgacacaggcttatatgctcgatactcaagaagcagctgaatcaaaatacaaaaaatgggaaaaggaacctacgcctgcgggttgggatgtctttaaccagaagacgttatacaacgcatacaagaaacggacaaagaacattcaggttgatctggaggagtataacagaatgagagcagctgatccagagttttaccgtgaggcctcaagcttgcaatatggaaaggctccaaaaacttcgcaagataagatagataagatggcaaaagagctcttagacagagagcaaaagcgacaagagtttagcaggaggaggaagttccgggaagagaaggatatcgattccatcaacgacagaaacgagcatttcaacaagaaaatcgagcgtgcgtttgggaaatacacgctggagatcaaaaacaacttggaacgaggaactgcattacccgactaagctacttgagctcacatgttggaaacaagggaatggatttctggttcgaaagtaaactatgctgttgtctgattaattgtccttaaattatccttcttgagagaactaaattgtagaatgaacgtttctttagcccactttgaaattcaaacaaaatttctgtaccagctctcg

SEQ ID NO: 8117 - protein, 344 aa, Arabidopsis thaliana
NIFSPLFFSTERRKKKIIIVREISGVLLVLADSSELFLHSFLTLGSMVSERRVHPDCINASNPYHECVEYCFKKIAEAKARFEKQNTGLAKVHEQTREPLDDKRIEEDSSEEEEEEEDNQEPQVDVTQLTGRQKKLFELRLKMNEARKSNQTDVGSEKKKMEAPTETKGISKQKWLEGRKKKIGKLLDANGLDMTQAYMLDTQEAAESKYKKWEKEPTPAGWDVFNQKTLYNAYKKRTKNIQVDLEEYNRMRAADPEFYREASSLQYGKAPKTSQDKIDKMAKELLDREQKRQEFSRRRKFREEKDIDSINDRNEHFNKKIERAFGKYTLEIKNNLERGTALPD

SEQ ID NO: 8118 - protein, 298 aa, Arabidopsis thaliana
MVSERRVHPDCINASNPYHECVEYCFKKIAEAKARFEKQNTGLAKVHEQTREPLDDKRIEEDSSEEEEEEEDNQEPQVDVTQLTGRQKKLFELRLKMNEARKSNQTDVGSEKKKMEAPTETKGISKQKWLEGRKKKIGKLLDANGLDMTQAYMLDTQEAAESKYKKWEKEPTPAGWDVFNQKTLYNAYKKRTKNIQVDLEEYNRMRAADPEFYREASSLQYGKAPKTSQDKIDKMAKELLDREQKRQEFSRRRKFREEKDIDSINDRNEHFNKKIERAFGKYTLEIKNNLERGTALPD

SEQ ID NO: 8119 - protein, 202 aa, Arabidopsis thaliana
MNEARKSNQTDVGSEKKKMEAPTETKGISKQKWLEGRKKKIGKLLDANGLDMTQAYMLDTQEAAESKYKKWEKEPTPAGWDVFNQKTLYNAYKKRTKNIQVDLEEYNRMRAADPEFYREASSLQYGKAPKTSQDKIDKMAKELLDREQKRQEFSRRRKFREEKDIDSINDRNEHFNKKIERAFGKYTLEIKNNLERGTALPD

SEQ ID NO: 8120 - DNA, 2494 bp, Arabidopsis thaliana
aacatgttaatggcgactccaacgtctcgagcctctctcaatcttcttcgtcgatcgccaaaacccaaatatttctcatcttcttcttgtcattttcgtccctcaacttttcgtaaatcatatccttgccccatctggtcttcttctttctctttttgtctccctcctcctagatccaccacttccacctctctctcctcctcctctttccgccccttctcctctcctccgtccatgtcttccgccgccgctgccgccgtggaatccgtcgtctccgacgagactctttcctcgaatcctctcttgcaggacttcgatttccctccgtttgattccgttgatgccagtcatgttcgtcctgggattcgtgctctattgcagcatctcgaagctgaattggaggagctagagaaatctgtggagccaacatggccaaaactggtggaaccattagagaaaatcgttgatcggttaactgttgtttggggaatgatcaatcaccttaaggctgtcaaggacacacctgagctacgtgctgccatcgaagacgttcagccagagaaagtgaagttccagctcaggttggggcaaagcaagcctatttacaatgcctttaaagctattcgtgaatctcctgattggtcatcgctcagtgaagctcgtcaacgcttagtagaagctcaaataaaggaggcggttctcattggtattgctcttgatgatgaaaagagagaagagtttaataaaattgaacaggaactcgaaaaactttcccataagttttctgagaatgttttggatgcaacaaagaaatttgaaaagttgataacagacaagaaagagatcgagggattgcctccatctgctcttgggctattcgcacaagcagctgtctccaagggccatgaaaatgcaactgctgagaatggaccatggatcattacactggatgctcctagttatcttcctgtcatgcaacatgctaaaaaccgtgctctgcgtgaggaagtctaccgtgcttacctatctcgtgcctcttctggcgatttggataatacggcaattattgaccagattttgaagcttcgcttggaaaaagctaagcttcttggttacaacaattacgctgaggtaagcatggctatgaaaatggctactgttgagaaagcagcagagcttttagagaagcttcgtagtgcatcctgggatgcggctgttcaagacatggaagacctcaagagtttcgcaaagaaccagggtgctgcagaatctgacagtatgactcattgggacaccactttctggagtgagaggcttcgtgaatccaaatacgatattaatgaggaagaactacgtccatacttctcactgccaaaggttatggatggacttttcagtctagctaagacactttttggaattgatattgaaccagcagatggtttagctccggtctggaacaatgatgttcggttctaccgcgtcaaagattcttctgggaacccaatcgcttacttttactttgatccatactctcgcccgtcagagaaaagaggtggcgcttggatggatgaggttgtttcccgtagccgagtcatggctcagaaaggctcttctgttaggctgcctgttgcacacatggtctgcaaccaaactccaccagtaggtgacaagccaagccttatgacattccgtgaggtagagacagtatttcatgaatttggacatgctcttcagcacatgcttacgaagcaggatgaggggctagttgctggtatccgaaatatcgagtgggacgcggttgaattaccatcacagtttatggagaattggtgctaccacagggacactttaatgagcattgctaagcattacgaaacaggagaaacactcccagaggaagtatacaagaaactcctggccgcaagaacattccgtgcagggtcctttagtcttcgtcagttgaaatttgccagtgttgatcttgagctgcacacaaaatacgtaccaggaggaccagagtccatctatgacgtagatcaaagggtatcagtaaaaacccaagttatccctccacttcctgaggatagatttctctgtagcttcagtcacatctttgccgggggatatgcagctggatattacagttacaagtgggcagaagttttgtctgctgatgcattttcagcatttgaagacgctggactagacgacatcaaggctgttaaagaaacaggacagagattcagaaacaccatacttgcacttggaggagggaaagcgcctcttaaggtgtttgttgagtttagaggacgagaaccttcacccgagcctcttctcagacacaatggactcttggctgcctctgcttctgcttaactcttatataatcctcacaacatttggaaactttgaaagacatttataagatggaaaatcaacttttcttttttaatatgccaaccatttacatctaatacattgcattgatttc

SEQ ID NO: 8121 - protein, 792 aa, Arabidopsis thaliana
NMLMATPTSRASLNLLRRSPKPKYFSSSSCHFRPSTFRKSYPCPIWSSSFSFCLPPPRSTTSTSLSSSSFRPFSSPPSMSSAAAAAVESVVSDETLSSNPLLQDFDFPPFDSVDASHVRPGIRALLQHLEAELEELEKSVEPTWPKLVEPLEKIVDRLTVVWGMINHLKAVKDTPELRAAIEDVQPEKVKFQLRLGQSKPIYNAFKAIRESPDWSSLSEARQRLVEAQIKEAVLIGIALDDEKREEFNKIEQELEKLSHKFSENVLDATKKFEKLITDKKEIEGLPPSALGLFAQAAVSKGHENATAENGPWIITLDAPSYLPVMQHAKNRALREEVYRAYLSRASSGDLDNTAIIDQILKLRLEKAKLLGYNNYAEVSMAMKMATVEKAAELLEKLRSASWDAAVQDMEDLKSFAKNQGAAESDSMTHWDTTFWSERLRESKYDINEEELRPYFSLPKVMDGLFSLAKTLFGIDIEPADGLAPVWNNDVRFYRVKDSSGNPIAYFYFDPYSRPSEKRGGAWMDEVVSRSRVMAQKGSSVRLPVAHMVCNQTPPVGDKPSLMTFREVETVFHEFGHALQHMLTKQDEGLVAGIRNIEWDAVELPSQFMENWCYHRDTLMSIAKHYETGETLPEEVYKKLLAARTFRAGSFSLRQLKFASVDLELHTKYVPGGPESIYDVDQRVSVKTQVIPPLPEDRFLCSFSHIFAGGYAAGYYSYKWAEVLSADAFSAFEDAGLDDIKAVKETGQRFRNTILALGGGKAPLKVFVEFRGREPSPEPLLRHNGLLAASASA

SEQ ID NO: 8122 - protein, 791 aa, Arabidopsis thaliana
MLMATPTSRASLNLLRRSPKPKYFSSSSCHFRPSTFRKSYPCPIWSSSFSFCLPPPRSTTSTSLSSSSFRPFSSPPSMSSAAAAAVESVVSDETLSSNPLLQDFDFPPFDSVDASHVRPGIRALLQHLEAELEELEKSVEPTWPKLVEPLEKIVDRLTVVWGMINHLKAVKDTPELRAAIEDVQPEKVKFQLRLGQSKPIYNAFKAIRESPDWSSLSEARQRLVEAQIKEAVLIGIALDDEKREEFNKIEQELEKLSHKFSENVLDATKKFEKLITDKKEIEGLPPSALGLFAQAAVSKGHENATAENGPWIITLDAPSYLPVMQHAKNRALREEVYRAYLSRASSGDLDNTAIIDQILKLRLEKAKLLGYNNYAEVSMAMKMATVEKAAELLEKLRSASWDAAVQDMEDLKSFAKNQGAAESDSMTHWDTTFWSERLRESKYDINEEELRPYFSLPKVMDGLFSLAKTLFGIDIEPADGLAPVWNNDVRFYRVKDSSGNPIAYFYFDPYSRPSEKRGGAWMDEVVSRSRVMAQKGSSVRLPVAHMVCNQTPPVGDKPSLMTFREVETVFHEFGHALQHMLTKQDEGLVAGIRNIEWDAVELPSQFMENWCYHRDTLMSIAKHYETGETLPEEVYKKLLAARTFRAGSFSLRQLKFASVDLELHTKYVPGGPESIYDVDQRVSVKTQVIPPLPEDRFLCSFSHIFAGGYAAGYYSYKWAEVLSADAFSAFEDAGLDDIKAVKETGQRFRNTILALGGGKAPLKVFVEFRGREPSPEPLLRHNGLLAASASA

SEQ ID NO: 8123 - protein, 789 aa, Arabidopsis thaliana
MATPTSRASLNLLRRSPKPKYFSSSSCHFRPSTFRKSYPCPIWSSSFSFCLPPPRSTTSTSLSSSSFRPFSSPPSMSSAAAAAVESVVSDETLSSNPLLQDFDFPPFDSVDASHVRPGIRALLQHLEAELEELEKSVEPTWPKLVEPLEKIVDRLTVVWGMINHLKAVKDTPELRAAIEDVQPEKVKFQLRLGQSKPIYNAFKAIRESPDWSSLSEARQRLVEAQIKEAVLIGIALDDEKREEFNKIEQELEKLSHKFSENVLDATKKFEKLITDKKEIEGLPPSALGLFAQAAVSKGHENATAENGPWIITLDAPSYLPVMQHAKNRALREEVYRAYLSRASSGDLDNTAIIDQILKLRLEKAKLLGYNNYAEVSMAMKMATVEKAAELLEKLRSASWDAAVQDMEDLKSFAKNQGAAESDSMTHWDTTFWSERLRESKYDINEEELRPYFSLPKVMDGLFSLAKTLFGIDIEPADGLAPVWNNDVRFYRVKDSSGNPIAYFYFDPYSRPSEKRGGAWMDEVVSRSRVMAQKGSSVRLPVAHMVCNQTPPVGDKPSLMTFREVETVFHEFGHALQHMLTKQDEGLVAGIRNIEWDAVELPSQFMENWCYHRDTLMSIAKHYETGETLPEEVYKKLLAARTFRAGSFSLRQLKFASVDLELHTKYVPGGPESIYDVDQRVSVKTQVIPPLPEDRFLCSFSHIFAGGYAAGYYSYKWAEVLSADAFSAFEDAGLDDIKAVKETGQRFRNTILALGGGKAPLKVFVEFRGREPSPEPLLRHNGLLAASASA

SEQ ID NO: 8124 - DNA, 3331 bp, Arabidopsis thaliana
ggagcaattgcaaattctgtgtctttgtgctatgcagacattaccaagctcagaaaccgttcttttaggctccaactcagcaccacctgtgttgcgtagtcccggtggcgatgacgtggacatcgattttggtgacgtgtttggtggtcctcctaagagacgctctaaagttactagtaacgaagtcacacgacatagcttcagtgaatccgctctccggcgtcgtgacgtcatcgtcgacgtcggcgatctgcttccgcaagacgagaagcctgtattcggcgaagatacatcatctgtccggcgtcgtttcaccactgatgatttcttcgacgatattttcagagttaatgaatcatcatcacttccgggttctcggatccttagcccggctcacaaacccgaatcttcttcagggacttcgtctccatcccaattcagtcttcctgcaaaagcaacagagattccaacatttaatttagcagctactcgtagtttgaacaagaacaaagaaactgtttcgagctctcctttgtcaagaacttcaagcaaagcagatgtggtctctactgctaaatcatattcagatgattgtgatgatcctccacaagtttttgttactgggaaaggaaggcaatttcatttctctatctacaagtggcctaataaaggagttcctgttgttatttggggaagctctagattgagttctatgtctaaagctgaggagacaacacctgtaccattgagtgattatcgaaaaacttcagttgttgagaaattgggtaaaaatgaagaaggagatggaaaaagtggtttatctggtttgaaagatgtgaagaagacctcgctaaagcgtcctggtgtccagacaaaagaagagaaaacagaaacagatttgaagtctgaacaagccttctttggtgtctcaaaagcacgtgaggctaatgtgaagcctcttgattcagttgagtctgaacaggccttctctggtgtgtcaaaagcacatgaagctactactgtgaagcctcttcattcaatttttcatgaagaagatgagagacaagatgagaaaatagtatcagagagagaagtgagaaaaggtaaaagcaaagcgaagaacactcgaagttttaccgaagattcaagaaccaagaagaaatcacaaggcactaaaagttctttggatagtagcccgatacccgataaatccagcttcgcaagttcatcagcagcaccagaagttggcaaagatggagtcaaaggaaaagtgagtgacttcgttaagattttcagtaaaggagcttcagttggagcaggtggggaatctcttggacaaagctctagatggagagctaaagaaactcccaagactgatatcattcatgatggttctaatgccaaggaaactgtaaacattcctgatcaacaaaagaaatcgactccagatatccccgctatgaatcgggatcagaaaccttcacagtcaactcagaaaaaagattcagaccgggagagcatgaactataaggctcctggtgatactgtacaagaagagagacaagaacctagcacaacacatactacctcagaggatatagatgagcccttccatgtaaatttcgatgtggaggatataacacaagatgaaaacaaaatggaagaggccaataaggatgctgaagaaatcaagaacatcgatgctaaaatccgcaagtggtcaagcggaaagagtggaaacattcggtctcttctatccacgctgcaatatattctttggtctgggagcgggtggaagccggttcctctaatggatatgatcgaaggaaacgcggttcgaaaatcgtaccagagggcattactaatacttcatccagacaaactacaacaaaagggtgcttctgcaaaccagaaatacatggccgagaaagttttcgaattattacaggaagcatgggaccacttcaacactctcggaccggtttaaaggaagaaaacgagtctttagtcttttagttctttacacaaaggctatgtacagatacggttctgaatcaaaagatgttgcagaattttagttgtcacaggtatacttacatcaaaaaaaaaaaaaaaaaaaaaaaaaaaaaaaaaaaaaaaaaaaaaacaccgatattcattaatcttatctagtttctcaaaaaaattcatatcttccacacgtggatcatgtggattgaacaagatggattgcacgcaggttctccggccgcttgggtggagaggctattcggctatgactgggcacaacagacaatcggctgctctgatgccgccgtgttccggctgtcagcgcaggggcgcccggttctttttgtcaagaccgacctgtccggtgccctgaatgaactgcaggacgaggcagcgcggctatcgtggctggccacgacgggcgttccttgcgcagctgtgctcgacgttgtcactgaagcgggaagggactggctgctattgggcgaagtgccggggcaggatctcctgtcatctcaccttgctcctgccgagaaagtatccatcatggctgatgcaatgcggcggctgcatacgcttgatccggctacctgcccattcgaccaccaagcgaaacatcgcatcgagcgagcacgtactcggatggaagccggtcttgtcgatcaggatgatctggacgaagagcatcaggggctcgcgccagccgaactgttcgccaggctcaaggcgcgcatgcccgacggcgaggatctcgtcgtgacccatggcgatgcctgcttgccgaatatcatagtggaaaatggccgcttttctggattcatcgactgtggccggctgggtgtggcggaccgctatcaggacatagcgttggctacccgtgatattgctgaagagcttggcggcgaatgggctgaccgcttcctcgtgctttacggtatcgccgctcccgattcgcagcgcatcgccttctatcgccttcttgacgagttcttctgagcgggactctggggttcgaaatgaccgaccaagcgacgcccaacctgccatcacgagatttcgattccaccgccgccttctatgaaaggttgggcttcggaatcgttttccgggacgccggctggatgatcctccagcgcggggatctcatgctggagttcttcgcccaccccctgctttaatgagatatgcgagacgcctatgatcgcatgatatttgctttcaattctgttgtgcacgttgtaaaaaacctgagcatgtgtagctcagatccttaccgccggtttcggttcattctaatgaatatatcacccgttactatcgc

SEQ ID NO: 8125 - protein, 661 aa, Arabidopsis thaliana
EQLQILCLCAMQTLPSSETVLLGSNSAPPVLRSPGGDDVDIDFGDVFGGPPKRRSKVTSNEVTRHSFSESALRRRDVIVDVGDLLPQDEKPVFGEDTSSVRRRFTTDDFFDDIFRVNESSSLPGSRILSPAHKPESSSGTSSPSQFSLPAKATEIPTFNLAATRSLNKNKETVSSSPLSRTSSKADVVSTAKSYSDDCDDPPQVFVTGKGRQFHFSIYKWPNKGVPVVIWGSSRLSSMSKAEETTPVPLSDYRKTSVVEKLGKNEEGDGKSGLSGLKDVKKTSLKRPGVQTKEEKTETDLKSEQAFFGVSKAREANVKPLDSVESEQAFSGVSKAHEATTVKPLHSIFHEEDERQDEKIVSEREVRKGKSKAKNTRSFTEDSRTKKKSQGTKSSLDSSPIPDKSSFASSSAAPEVGKDGVKGKVSDFVKIFSKGASVGAGGESLGQSSRWRAKETPKTDIIHDGSNAKETVNIPDQQKKSTPDIPAMNRDQKPSQSTQKKDSDRESMNYKAPGDTVQEERQEPSTTHTTSEDIDEPFHVNFDVEDITQDENKMEEANKDAEEIKNIDAKIRKWSSGKSGNIRSLLSTLQYILWSGSGWKPVPLMDMIEGNAVRKSYQRALLILHPDKLQQKGASANQKYMAEKVFELLQEAWDHFNTLGPV

SEQ ID NO: 8126 - protein, 651 aa, Arabidopsis thaliana
MQTLPSSETVLLGSNSAPPVLRSPGGDDVDIDFGDVFGGPPKRRSKVTSNEVTRHSFSESALRRRDVIVDVGDLLPQDEKPVFGEDTSSVRRRFTTDDFFDDIFRVNESSSLPGSRILSPAHKPESSSGTSSPSQFSLPAKATEIPTFNLAATRSLNKNKETVSSSPLSRTSSKADVVSTAKSYSDDCDDPPQVFVTGKGRQFHFSIYKWPNKGVPVVIWGSSRLSSMSKAEETTPVPLSDYRKTSVVEKLGKNEEGDGKSGLSGLKDVKKTSLKRPGVQTKEEKTETDLKSEQAFFGVSKAREANVKPLDSVESEQAFSGVSKAHEATTVKPLHSIFHEEDERQDEKIVSEREVRKGKSKAKNTRSFTEDSRTKKKSQGTKSSLDSSPIPDKSSFASSSAAPEVGKDGVKGKVSDFVKIFSKGASVGAGGESLGQSSRWRAKETPKTDIIHDGSNAKETVNIPDQQKKSTPDIPAMNRDQKPSQSTQKKDSDRESMNYKAPGDTVQEERQEPSTTHTTSEDIDEPFHVNFDVEDITQDENKMEEANKDAEEIKNIDAKIRKWSSGKSGNIRSLLSTLQYILWSGSGWKPVPLMDMIEGNAVRKSYQRALLILHPDKLQQKGASANQKYMAEKVFELLQEAWDHFNTLGPV

SEQ ID NO: 8127 - protein, 424 aa, Arabidopsis thaliana
MSKAEETTPVPLSDYRKTSVVEKLGKNEEGDGKSGLSGLKDVKKTSLKRPGVQTKEEKTETDLKSEQAFFGVSKAREANVKPLDSVESEQAFSGVSKAHEATTVKPLHSIFHEEDERQDEKIVSEREVRKGKSKAKNTRSFTEDSRTKKKSQGTKSSLDSSPIPDKSSFASSSAAPEVGKDGVKGKVSDFVKIFSKGASVGAGGESLGQSSRWRAKETPKTDIIHDGSNAKETVNIPDQQKKSTPDIPAMNRDQKPSQSTQKKDSDRESMNYKAPGDTVQEERQEPSTTHTTSEDIDEPFHVNFDVEDITQDENKMEEANKDAEEIKNIDAKIRKWSSGKSGNIRSLLSTLQYILWSGSGWKPVPLMDMIEGNAVRKSYQRALLILHPDKLQQKGASANQKYMAEKVFELLQEAWDHFNTLGPV

SEQ ID NO: 8128 - DNA, 1233 bp, Arabidopsis thaliana
ctcttttctctcttagttcagggaggaggctcgagaacagtgccccatatctgaaagctgaagctaagaatctggacgttcgtgtttaaaccgacgacgtatttgaaattggctttgaaggaaaggtgaaattaatggcggaatcgtcgtcgccgtcgcctactgaagagatcgttcggttgattaagcgtttaagcgcttacgttgctttcaaaatgtcaagccttttctccactacatcgattcgaaatctggattcaagatcaattggtgcgattgcggggcttgcgattgcggtgatatttacgtggagggcgataagaacgcccggagagcaacgtcagagaaggcagccgaagcgtaggattcacaatgctgaaacgtctagtgctgctgctgctgcttctcagtcgaatctagcttcttcggttgctccggaagtttcttcgcctcgtgaggataatgcggtgcaagatgttgttgatcagttctttcaacctgttaaacctactttggggcaaatagttagacagaagcttagtgaaggaaggaaggtaacatgccgtcttcttggagtaattcttgaggaaacaagtccagaagaactccaaaaacaagccacagtgaggtcatctgttttggaagttctactagagattacaaagtatagtgatttgtatcttatggaaagagttcttgacgatgaaagcgaggccaaagttttacaggctttagagaatgcaggagtttttacatctggtggtttagtcaaagataaggtgctcttttgtagtacagagataggaagaacttcctttgtcagacagctagaacctgactggcatattgatacaaacccggaaatcagcacacaactagctaggttcatcaaatatcagcttcatgtcgctacggtgaaacccgagcgaacagctccaaatgtgttcacctcgcagtcaatagaacagttctttggaagtgtttaatatcaacaaaaaaagagaggtgaaagatattacgttgtcctgacttaagcatcgttgatcgagtgtctcttaggctgaaacttgaaacttgtttttcatttttctttgattgtgtctaaattaaagtttgatatacatttggagttagatattactgcgagtgcctctgtgaaagtatccaagtttgtaatttttgtattagcaacttagcaaaattctttaagaaataaacaaatgtccgttgtct

SEQ ID NO: 8129 - protein, 283 aa, Arabidopsis thaliana
MAESSSPSPTEEIVRLIKRLSAYVAFKMSSLFSTTSIRNLDSRSIGAIAGLAIAVIFTWRAIRTPGEQRQRRQPKRRIHNAETSSAAAAASQSNLASSVAPEVSSPREDNAVQDVVDQFFQPVKPTLGQIVRQKLSEGRKVTCRLLGVILEETSPEELQKQATVRSSVLEVLLEITKYSDLYLMERVLDDESEAKVLQALENAGVFTSGGLVKDKVLFCSTEIGRTSFVRQLEPDWHIDTNPEISTQLARFIKYQLHVATVKPERTAPNVFTSQSIEQFFGSV

SEQ ID NO: 8130 - protein, 256 aa, Arabidopsis thaliana
MSSLFSTTSIRNLDSRSIGAIAGLAIAVIFTWRAIRTPGEQRQRRQPKRRIHNAETSSAAAAASQSNLASSVAPEVSSPREDNAVQDVVDQFFQPVKPTLGQIVRQKLSEGRKVTCRLLGVILEETSPEELQKQATVRSSVLEVLLEITKYSDLYLMERVLDDESEAKVLQALENAGVFTSGGLVKDKVLFCSTEIGRTSFVRQLEPDWHIDTNPEISTQLARFIKYQLHVATVKPERTAPNVFTSQSIEQFFGSV

SEQ ID NO: 8131 - DNA, 1155 bp, Arabidopsis thaliana
atttctttcttctccacgatcacagcgacgaggtcgaatacgatcttcttacccctgtcgacagttctgaattaatatcaattttcattgtcttcctatctctctttctctctttggcttcttccaatctaatttcagtgatttacttgttaagaattcaccttttgagaggcccagttttgaaatatggctggccaaaacgcgcgtttgaatgtggttcccactgttactatgctcggggttatgaaagctcgtcttgttggcgctacaagaggtcatgctctcctcaagaaaaagagtgatgctttaactgttcagtttagggcacttctcaagaaaatcgttacagctaaggagtctatgggagatatgatgaagacatcgtcttttgctcttaccgaagtaaagtatgttgctggtgacaatgtcaaacatgttgtcctcgagaacgttaaagaagctactttgaaggttcgttctcggacagagaatatcgctggagtgaagctgcctaagtttgatcacttctctgaaggtgagaccaagaatgacttgaccggtttagctagaggtggtcaacaggtccgagcttgccgtgttgcttatgtgaaagccattgaagttctagttgagcttgcttctctccagacttctttcttgacccttgatgaagcaatcaagacgactaaccgtagggtcaacgctctggagaatgtggtgaaaccaaagctggagaatacaatcagttacatcaagggagagcttgatgagcttgagagagaggatttcttcaggttgaagaagattcagggatacaagaggagggaagtcgaacgacaggcagctaatgctaaggagtttgctgaggaaatggttcttgaagacatctctatgcagagagggatttcgataaacgctgctcgtaacttccttgttggtggtgctgagaaggattcagacattattttctgaggtgtgggctctctctctctctctctctctctctttgtgccttctgtgtttgctcggtttctattttcgccttcgcgctgttattactctcttcatcagacttatgtttcttcaaataaaatggatttgatgtagatgaaatactgtatcatcttggattgtgctttgatataaaatttttcg

SEQ ID NO: 8132 - protein, 261 aa, Arabidopsis thaliana
MAGQNARLNVVPTVTMLGVMKARLVGATRGHALLKKKSDALTVQFRALLKKIVTAKESMGDMMKTSSFALTEVKYVAGDNVKHVVLENVKEATLKVRSRTENIAGVKLPKFDHFSEGETKNDLTGLARGGQQVRACRVAYVKAIEVLVELASLQTSFLTLDEAIKTTNRRVNALENVVKPKLENTISYIKGELDELEREDFFRLKKIQGYKRREVERQAANAKEFAEEMVLEDISMQRGISINAARNFLVGGAEKDSDIIF

SEQ ID NO: 8133 - protein, 246 aa, Arabidopsis thaliana
MLGVMKARLVGATRGHALLKKKSDALTVQFRALLKKIVTAKESMGDMMKTSSFALTEVKYVAGDNVKHVVLENVKEATLKVRSRTENIAGVKLPKFDHFSEGETKNDLTGLARGGQQVRACRVAYVKAIEVLVELASLQTSFLTLDEAIKTTNRRVNALENVVKPKLENTISYIKGELDELEREDFFRLKKIQGYKRREVERQAANAKEFAEEMVLEDISMQRGISINAARNFLVGGAEKDSDIIF

SEQ ID NO: 8134 - protein, 242 aa, Arabidopsis thaliana
MKARLVGATRGHALLKKKSDALTVQFRALLKKIVTAKESMGDMMKTSSFALTEVKYVAGDNVKHVVLENVKEATLKVRSRTENIAGVKLPKFDHFSEGETKNDLTGLARGGQQVRACRVAYVKAIEVLVELASLQTSFLTLDEAIKTTNRRVNALENVVKPKLENTISYIKGELDELEREDFFRLKKIQGYKRREVERQAANAKEFAEEMVLEDISMQRGISINAARNFLVGGAEKDSDIIF

SEQ ID NO: 8135 - DNA, 1842 bp, Arabidopsis thaliana
gcttctaaaattttctggtagatctgagtccacaatcatcagaaatcaactttgtgaattgaaggccgatcactcctttgactttgttcttagggttcatcctcaaaggtgtttaatgagctcttagaagctatgggaatggcgtccatgagctctggtactgaaagccttcgtctttgcgtgtttgacttaagaagaggccaacacgaaggacaggaactggacaagatcttgttcttctatcctcctgatctaaccttctccactcagctatcggttataggtctcagtgaagggcttatcacgttcacgagacttttctccccggaggcagcttgtgaggtaattgaagcagagagacattcccatgttttctatgaggccgagcccgatatctggatggtcatgattgtagagaaaaataaggagattgaagctgtatggaggattgatgcattgcggagagtgcttaaggaagtgcactctctctttgttatgtttcaagggtcaattagggcattgcttgagaaagaaccaactggaggacttgtaagatcgcacttgtatccattcatcacagactatttaaatgatcttttcgttgggaaaaaacatcagttaccttccttccgtgactctttgaaagagcgtggaacagttcagatgctaactttagctagagatgcggcacttgaagttcagtctctcgtcggagtgctagattcgtgtgctgggaccgttcgatgccactctgtgattctatttcatgatctactggtgtcaacaactctctcacctgatgataccgtcgacttgtttgcattttctgtcatgagattaaccacaaacgcgctatcatctggcacaagttcctggtcatatctacgcaagggatccggttcacctcaaatatcttctagatctactacggtgccccctcttggttcaggcggtacattgccttcgggaaatggtagtagcacaggtcgtgttattagacctttgcagcacgataagtggtcaaaggggaaagacgggtttcttgtaactgatatttggggtttagatgccaccccgacaattttgatacagaagacgcaggaaagattttaccttttgacttatcaatacaagagtctcaccttggttcttctcgtgcctatcgctgcaattgttaatggagagctagacatctcattcgtgaagcagcaagttattgaaaacgcatcgaccaaaatcttgaaagtcgaagagaagctatcgaaagggtggggcggtgagaatgcttaccatgtaagcggttaccgttacttactagttgataatgacatggaagtttccagagcttctccaccaggaaaggtagcaacactagcaaaggagtctttgcttgcactaaacaagctaagggaagaagtggatacagaaaaaaaccgctcgaagcaagagaaagacatggaaatatgcattcgagcgaagaacaacacatgggtcatcgcgcgtctaaacagaggtaaagagctttacatggctttagagaaagcaagtgaaactcttcttgatgctacagactctgtccaaagattcagcaacaggtactgcagcggggcattctccatggattagattctgcaattgtttgttttgatagaagttgcaaaggaaagtgtttttgaagtgttttgagatatgttttagattttcaattataagatataaaagaaaccgttacaaagaaagagaatttggtgacttttgtatccacaactaaaagtaaacgtggaacttgacccttgacggtttgaactttgaagaagtcaaataaaaccttcgcttaatctc

SEQ ID NO: 8136 - protein, 497 aa, Arabidopsis thaliana
MGMASMSSGTESLRLCVFDLRRGQHEGQELDKILFFYPPDLTFSTQLSVIGLSEGLITFTRLFSPEAACEVIEAERHSHVFYEAEPDIWMVMIVEKNKEIEAVWRIDALRRVLKEVHSLFVMFQGSIRALLEKEPTGGLVRSHLYPFITDYLNDLFVGKKHQLPSFRDSLKERGTVQMLTLARDAALEVQSLVGVLDSCAGTVRCHSVILFHDLLVSTTLSPDDTVDLFAFSVMRLTTNALSSGTSSWSYLRKGSGSPQISSRSTTVPPLGSGGTLPSGNGSSTGRVIRPLQHDKWSKGKDGFLVTDIWGLDATPTILIQKTQERFYLLTYQYKSLTLVLLVPIAAIVNGELDISFVKQQVIENASTKILKVEEKLSKGWGGENAYHVSGYRYLLVDNDMEVSRASPPGKVATLAKESLLALNKLREEVDTEKNRSKQEKDMEICIRAKNNTWVIARLNRGKELYMALEKASETLLDATDSVQRFSNRYCSGAFSMD

SEQ ID NO: 8137 - protein, 495 aa, Arabidopsis thaliana
MASMSSGTESLRLCVFDLRRGQHEGQELDKILFFYPPDLTFSTQLSVIGLSEGLITFTRLFSPEAACEVIEAERHSHVFYEAEPDIWMVMIVEKNKEIEAVWRIDALRRVLKEVHSLFVMFQGSIRALLEKEPTGGLVRSHLYPFITDYLNDLFVGKKHQLPSFRDSLKERGTVQMLTLARDAALEVQSLVGVLDSCAGTVRCHSVILFHDLLVSTTLSPDDTVDLFAFSVMRLTTNALSSGTSSWSYLRKGSGSPQISSRSTTVPPLGSGGTLPSGNGSSTGRVIRPLQHDKWSKGKDGFLVTDIWGLDATPTILIQKTQERFYLLTYQYKSLTLVLLVPIAAIVNGELDISFVKQQVIENASTKILKVEEKLSKGWGGENAYHVSGYRYLLVDNDMEVSRASPPGKVATLAKESLLALNKLREEVDTEKNRSKQEKDMEICIRAKNNTWVIARLNRGKELYMALEKASETLLDATDSVQRFSNRYCSGAFSMD

SEQ ID NO: 8138 - protein, 492 aa, Arabidopsis thaliana
MSSGTESLRLCVFDLRRGQHEGQELDKILFFYPPDLTFSTQLSVIGLSEGLITFTRLFSPEAACEVIEAERHSHVFYEAEPDIWMVMIVEKNKEIEAVWRIDALRRVLKEVHSLFVMFQGSIRALLEKEPTGGLVRSHLYPFITDYLNDLFVGKKHQLPSFRDSLKERGTVQMLTLARDAALEVQSLVGVLDSCAGTVRCHSVILFHDLLVSTTLSPDDTVDLFAFSVMRLTTNALSSGTSSWSYLRKGSGSPQISSRSTTVPPLGSGGTLPSGNGSSTGRVIRPLQHDKWSKGKDGFLVTDIWGLDATPTILIQKTQERFYLLTYQYKSLTLVLLVPIAAIVNGELDISFVKQQVIENASTKILKVEEKLSKGWGGENAYHVSGYRYLLVDNDMEVSRASPPGKVATLAKESLLALNKLREEVDTEKNRSKQEKDMEICIRAKNNTWVIARLNRGKELYMALEKASETLLDATDSVQRFSNRYCSGAFSMD

SEQ ID NO: 8139 - DNA, 1196 bp, Arabidopsis thaliana
aatgataacactaataaaaaaaagaagaagaaggttacggtctcgtaaagctttcaaaagtccgcaacgatcacacacgtctttctccgaaactcgtctgagagaggctctgagattcgatgtcgttcgaggaagaagaagaggaggaaacattcgagcatacacttctcgtggtgcgtgaggtctccgtttacaagatcccgccgcgaaccacatccggcggatacaagtgcggcgaatggcttcaatccgataagatctggtctggtagactccgcgtcgtatcgtgcaaggatcgatgcgagatccgcctcgaggattcgaattccggtgatcttttcgcagcttgttttgtggatcctggacgtagagagaactctgtagagccgtctctcgattcgtctaggtatttcgttctcaggatcgatgacgggagagggaagtatgcgtttatcgggctaggattcgctgagaggaacgaagcgtttgatttcaatgttgcgttatcggatcatgaaaagtacgttaggagggagaaagagaaggagacaggggaaacgagtgagagcgataatcatattgatatccatcctgccgttaatcacagattgaaggaaggtgaaaccataagaatcaacgtgaagccgaaaccaacaacaaatggcactgggatgctctcagctgctctttcaggaacggggaagccaaaacctctagcacttgccccaccccccaaagctgccggagtaaccaggtctcctttacctcctcctccaaacgatcccgtcgcttcaaggattgcatctgatggctgcaaggaatcacgcaggaacgagcctctatctgatctatctcagctcaagaaaaatcttccttcaacggcgggatcaggatcgagcaagtcaacaggagctgcatcaggttgggcagctttctgatgaatggagtgtaaaatttaagttattggacaagtccggcttcatcttcttgtgacttgagagcacgagacaatagacaacaatggtggtcagccaacagtctttttgatgtatgttaatggtaagttgatgtgtgtttctttgtaatcctcccacactccctgttttaattatttttcttccttataatcatcgttgttacattatcgattatcatttgtatcactgagatattaatatatacaaaaaggctttttc

SEQ ID NO: 8140 - protein, 272 aa, Arabidopsis thaliana
MSFEEEEEEETFEHTLLVVREVSVYKIPPRTTSGGYKCGEWLQSDKIWSGRLRVVSCKDRCEIRLEDSNSGDLFAACFVDPGRRENSVEPSLDSSRYFVLRIDDGRGKYAFIGLGFAERNEAFDFNVALSDHEKYVRREKEKETGETSESDNHIDIHPAVNHRLKEGETIRINVKPKPTTNGTGMLSAALSGTGKPKPLALAPPPKAAGVTRSPLPPPPNDPVASRIASDGCKESRRNEPLSDLSQLKKNLPSTAGSGSSKSTGAASGWAAF

SEQ ID NO: 8141 - DNA, 1387 bp, Arabidopsis thaliana
gactcaactcaagagtggtgtagtgagagaagaaagatagagaaaaaaaatgggaggcaaaggtgtgatgatggtggcgatactttgcctttgggcactctctgcaacatctgaagcagtaacagaggctgagccaggtttgatgatgaacttctacaaggacacgtgtcctcaggccgaagacatcgtccgtgaacaagtcaaactcctctacaaacgccacaagaacaccgctttctcttggctccgtaacatcttccatgactgcgccgttgagtcatgtgatgcgtcgcttttgctggattcgacaagaagagagctaggagagaaagaacacgacaggagcttcggacttagaaactttaggtacatcgaggagatcaaggaagctctcgagagggagtgtcctggtgttgtctcatgttctgacattctcgtcttgtccgcaagagaaggcatcgaagcagtaggaggaccttatattcctttgaagacaggaaggagagatggacttaaaagcaggacggatatgctcgagtcatatcttcccgaccacaacgagagtatctccgtcgttcttgaaaagttcaaatccatcggtatcgacactcccggcctcgtcgccctcctagggtcacacagcgtgggaagaactcactgtgtcaagctggtccatcgtttgtaccctgaggtggacccgtccttaaacccggaccacgtccctcacatgctacacaagtgtcctgactcgatccctgacccaaaggcggtccagtacgtgcgtaacgaccgtggcacccccatggtgctagacaacaattactaccgtaacatcctagacaacaagggtttgctccttgtggaccatcagctcgcacacgacaaacgaaccagaccaatcgttaagaagatggctaaggaccaggcctacttcttcaaggagttcactagggcaatccagatcttatccgagaacaaccccttgactggctctaagggtgagatcaggaagcaatgtaatctcgcaaacaagaaccattgaagttggaaaaagtgagaaagacaggggctctggtgtgttgagttctctgcttggtacgaaccaagatgaataaaaaaatcttttaagttaaatcaaagaaagggtgatgatgaatacatcatggtagtgaccacctccttcttttgtgtgttcagccttaatgctttaattatgatgttagtggctttgagttatttaatctaaatgttggctcttcgttgattttgggtttgtggtgggggtgatataatgataatggaaaggatgtatgatatgatggatggtgttgggtatcatgtatgacgatgtaatgataagtaaacatgtccgaatcttttgataatt

SEQ ID NO: 8142 - protein, 330 aa, Arabidopsis thaliana
MGGKGVMMVAILCLWALSATSEAVTEAEPGLMMNFYKDTCPQAEDIVREQVKLLYKRHKNTAFSWLRNIFHDCAVESCDASLLLDSTRRELGEKEHDRSFGLRNFRYIEEIKEALERECPGVVSCSDILVLSAREGIEAVGGPYIPLKTGRRDGLKSRTDMLESYLPDHNESISVVLEKFKSIGIDTPGLVALLGSHSVGRTHCVKLVHRLYPEVDPSLNPDHVPHMLHKCPDSIPDPKAVQYVRNDRGTPMVLDNNYYRNILDNKGLLLVDHQLAHDKRTRPIVKKMAKDQAYFFKEFTRAIQILSENNPLTGSKGEIRKQCNLANKNH

SEQ ID NO: 8143 - protein, 324 aa, Arabidopsis thaliana
MMVAILCLWALSATSEAVTEAEPGLMMNFYKDTCPQAEDIVREQVKLLYKRHKNTAFSWLRNIFHDCAVESCDASLLLDSTRRELGEKEHDRSFGLRNFRYIEEIKEALERECPGVVSCSDILVLSAREGIEAVGGPYIPLKTGRRDGLKSRTDMLESYLPDHNESISVVLEKFKSIGIDTPGLVALLGSHSVGRTHCVKLVHRLYPEVDPSLNPDHVPHMLHKCPDSIPDPKAVQYVRNDRGTPMVLDNNYYRNILDNKGLLLVDHQLAHDKRTRPIVKKMAKDQAYFFKEFTRAIQILSENNPLTGSKGEIRKQCNLANKNH

SEQ ID NO: 8144 - protein, 323 aa, Arabidopsis thaliana
MVAILCLWALSATSEAVTEAEPGLMMNFYKDTCPQAEDIVREQVKLLYKRHKNTAFSWLRNIFHDCAVESCDASLLLDSTRRELGEKEHDRSFGLRNFRYIEEIKEALERECPGVVSCSDILVLSAREGIEAVGGPYIPLKTGRRDGLKSRTDMLESYLPDHNESISVVLEKFKSIGIDTPGLVALLGSHSVGRTHCVKLVHRLYPEVDPSLNPDHVPHMLHKCPDSIPDPKAVQYVRNDRGTPMVLDNNYYRNILDNKGLLLVDHQLAHDKRTRPIVKKMAKDQAYFFKEFTRAIQILSENNPLTGSKGEIRKQCNLANKNH

SEQ ID NO: 8145 - DNA, 1833 bp, Arabidopsis thaliana
gtaaataaaacaaaatgcttttaggatactaaataagtaactttttaatatttttgatccacgatttgtttagtagacaaacaaggcaactatataagtaacatcatcgtttcttcaatcccataacccaaaaattctctcacagaaaaccaaaaaaaaaatggactccaaaacaacttttctcacatttctcctctgtattttcattttctctcatttttcaccctcaacttccaaatctctgacagaaaagcccttatctttctcaccgtcggcgagtttgccgactctcacggcggagagacttatcaaaggattcaatttgatgcctacacgcgacgtcaatgtcatcgatgaagaaggttctgaggctccgagactggtcgagagagcattcgatttgccggcggcggttgaccgtcgtggctccggtggttctccgtcggttcaagattttggtcaccatgctggttactacaaactccctaactcaaaagcagcaaggatgttctactttttcttcgagtcaaggacgaacaaagccgatccagtggtgatttggctaaccggtggaccaggttgcagtagtgaactggctctgttctacgagaacggaccgttcaccgtctctaacaactcatctctttcttggaacgaatttggttgggacaaggcatcaaatctaatctacgtggaccaaccggtaggaactggtttcagttacacatcggaccaaagcgatcttcgtcatgacgaggatggtgtcagtaatgacctttatgacttcttacaggcgtttttcaaagagcatccacaatttgtgaagaatgatttttacattaccggtgaatcctacgctggacattacattccggcattggcttcacgtgttcaccgtggaaacaagaacaaagaaggaactcacattaaccttaagggttttgcgatcggtaacggtttaaccaacccggagattcaatatggtgcgtatgcggattacgcgctagacatgaatttaatcacacagtctgatcatgataacctcaaccgttattacgcaacttgtcaacaatctatcaaagaatgcagcgcggatggtggtgaaggggatgcgtgtgcttcttcttacactgtctgcaacaacattttccaaaagataatggatattgctggaaacgtaaactattatgacgtgaggaaacaatgtgaaggaagcttatgctatgatttctcgaacatggagaatttcttgaaccagaaatcggtgcggaaggcattaggtgtgggagatatcgagtttgtgtcttgcagtacagcggtctacgaagcaatgcagatggactggatgcggaatcttgaggtcgggattccagctcttcttcaagatggaattaagctccttgtttatgccggagaatacgatctcatctgcaattggctcggaaactcaaagtgggttcacgaaatggaatggtcaggccagaaagagtttgtagcagcagcgacagttccattccacgtagacaacaaagaagcgggtttaatgaagaactacggttcactcactttcctaaaggtccatgatgctggacacatggttccgatggatcagccaaaggcagcattgcaaatgcttcagaactggatgcaaggaaagctcagtacacccactggtcggaccgctcatcagtaaatccaaattccgaaccggctgaattattatgtatttaggagatcaatattttacttttaagaaaagctaaataacatatacttgtgaattatttctatcaatacacaggaaacttcattgttaatttctaaccatcatat

SEQ ID NO: 8146 - protein, 510 aa, Arabidopsis thaliana
MDSKTTFLTFLLCIFIFSHFSPSTSKSLTEKPLSFSPSASLPTLTAERLIKGFNLMPTRDVNVIDEEGSEAPRLVERAFDLPAAVDRRGSGGSPSVQDFGHHAGYYKLPNSKAARMFYFFFESRTNKADPVVIWLTGGPGCSSELALFYENGPFTVSNNSSLSWNEFGWDKASNLIYVDQPVGTGFSYTSDQSDLRHDEDGVSNDLYDFLQAFFKEHPQFVKNDFYITGESYAGHYIPALASRVHRGNKNKEGTHINLKGFAIGNGLTNPEIQYGAYADYALDMNLITQSDHDNLNRYYATCQQSIKECSADGGEGDACASSYTVCNNIFQKIMDIAGNVNYYDVRKQCEGSLCYDFSNMENFLNQKSVRKALGVGDIEFVSCSTAVYEAMQMDWMRNLEVGIPALLQDGIKLLVYAGEYDLICNWLGNSKWVHEMEWSGQKEFVAAATVPFHVDNKEAGLMKNYGSLTFLKVHDAGHMVPMDQPKAALQMLQNWMQGKLSTPTGRTAHQ

SEQ ID NO: 8147 - protein, 455 aa, Arabidopsis thaliana
MPTRDVNVIDEEGSEAPRLVERAFDLPAAVDRRGSGGSPSVQDFGHHAGYYKLPNSKAARMFYFFFESRTNKADPVVIWLTGGPGCSSELALFYENGPFTVSNNSSLSWNEFGWDKASNLIYVDQPVGTGFSYTSDQSDLRHDEDGVSNDLYDFLQAFFKEHPQFVKNDFYITGESYAGHYIPALASRVHRGNKNKEGTHINLKGFAIGNGLTNPEIQYGAYADYALDMNLITQSDHDNLNRYYATCQQSIKECSADGGEGDACASSYTVCNNIFQKIMDIAGNVNYYDVRKQCEGSLCYDFSNMENFLNQKSVRKALGVGDIEFVSCSTAVYEAMQMDWMRNLEVGIPALLQDGIKLLVYAGEYDLICNWLGNSKWVHEMEWSGQKEFVAAATVPFHVDNKEAGLMKNYGSLTFLKVHDAGHMVPMDQPKAALQMLQNWMQGKLSTPTGRTAHQ

SEQ ID NO: 8148 - protein, 395 aa, Arabidopsis thaliana
MFYFFFESRTNKADPVVIWLTGGPGCSSELALFYENGPFTVSNNSSLSWNEFGWDKASNLIYVDQPVGTGFSYTSDQSDLRHDEDGVSNDLYDFLQAFFKEHPQFVKNDFYITGESYAGHYIPALASRVHRGNKNKEGTHINLKGFAIGNGLTNPEIQYGAYADYALDMNLITQSDHDNLNRYYATCQQSIKECSADGGEGDACASSYTVCNNIFQKIMDIAGNVNYYDVRKQCEGSLCYDFSNMENFLNQKSVRKALGVGDIEFVSCSTAVYEAMQMDWMRNLEVGIPALLQDGIKLLVYAGEYDLICNWLGNSKWVHEMEWSGQKEFVAAATVPFHVDNKEAGLMKNYGSLTFLKVHDAGHMVPMDQPKAALQMLQNWMQGKLSTPTGRTAHQ

SEQ ID NO: 8149 - DNA, 1043 bp, Arabidopsis thaliana
  misc_feature (568)..(568): n is a, c, g, or t
  misc_feature (677)..(677): n is a, c, g, or t
  misc_feature (860)..(860): n is a, c, g, or t
ctcgttttctggcgtcagactctcaccctttgtgcaagaaaccttgagagcttaaaaattcttcacttgggtctcttctctctctcttctcttgcgaccattccgttgttcgatccatatatcaaagcttgatttagttggttttcaatgggggacagtcagtactcgttttctctcaccaccttcagcccatcagggaagctggttcagatagaacatgccctaacagctgttggatcaggccaaacatcacttggaattaaagcttcaaatggagttgtcattgcaactgaaaagaaacttccttctatattggttgatgaagcgtctgttcaaaagattcaacatttgactcccaacattggaactgtacagtggtatgggtcctgatttccgagttcttgtgcgaaagagtagggaagcaggctgagcaatatctccgtctgtacaaggaacccatccccgttactcaacttgtaagggaaactgcacggtgatgcaagagttcactcaatcgggtggtttaggccgttggagttctctactggtggctgggtatgatgacaangggtcacaccctgatcaagtggatccatctggctcttattctcatggaaagcttctgcaatgggaaagaatgtttcgaatgcaaagacgtttctttgagaagaggtacncagaagatatggaacttgatgatgccattcacacgcgcaatattgacattgaaggaaggtttcgagggagaaatctcaagcaaaaacatcgagattggcaaaatcggtactgacaaagttttcagggtgctaacaccagcagaaatcgatgattacttggctgaagtcgagtaaaactttcanttaaccgtgcaaccaacctgatttgaatctcagtatactctcagagttgatggttcttgcttttgtaaaacttttggaatttgttaaggagactcgtgacccaataatttagaatatgttttttcacccatttaaacgtctgttgtgaaaattcagtttcatataaccaagtttcatgcacgc

SEQ ID NO: 8150 - protein, 97 aa, Arabidopsis thaliana
  misc_feature (4)..(4): Xaa can be any naturally occurring amino acid
  misc_feature (40)..(40): Xaa can be any naturally occurring amino acid
MMTXGHTLIKWIHLALILMESFCNGKECFECKDVSLRRGXQKIWNLMMPFTRAILTLKEGFEGEISSKNIEIGKIGTDKVFRVLTPAEIDDYLAEVE

SEQ ID NO: 8151 - protein, 97 aa, Arabidopsis thaliana
  misc_feature (24)..(24): Xaa can be any naturally occurring amino acid
  misc_feature (61)..(61): Xaa can be any naturally occurring amino acid
MQEFTQSGGLGRWSSLLVAGYDDXGSHPDQVDPSGSYSHGKLLQWERMFRMQRRFFEKRYXEDMELDDAIHTRNIDIEGRFRGRNLKQKHRDWQNRY

SEQ ID NO: 8152 - protein, 96 aa, Arabidopsis thaliana
  misc_feature (3)..(3): Xaa can be any naturally occurring amino acid
  misc_feature (39)..(39): Xaa can be any naturally occurring amino acid
MTXGHTLIKWIHLALILMESFCNGKECFECKDVSLRRGXQKIWNLMMPFTRAILTLKEGFEGEISSKNIEIGKIGTDKVFRVLTPAEIDDYLAEVE

SEQ ID NO: 8153 - DNA, 2320 bp, Arabidopsis thaliana
atctgtcgtgttctgtttgttctcacttctcacttctcagatttttataaacatgaatgaaacctgaattgttccactaactctcagcaaaaatgcgatcactttacttaatcgtcttcatcgttattagtcttgttaaagcttcgaaaagcgatgatgggttttgttcagcgccttcgattgttgaatcggatgagaagacgaaccccatttattggaaagccacgaatccaacactctctccttcacacctccaagacttgcctggtttcacacgaagtgtatacaaacgagatcatgcgttaataacaccggaaagtcatgtatacagccctttacctgactggacaaacacattaggggcgtatttgatcacaccggcaacgggttcccattttgtcatgtacttggcgaaaatgaaagaaatgtcaagttcaggtttgcctccacaagacatagagcgtcttatattcgtggtcgagggtgctgtgacactcactaacacatccagttcttcaaaaaaattgacggttgattcatatgcgtacctacctccaaactttcaccattccttggactgtgttgagtctgcaacacttgttgtcttcgagcggaggtatgaatatctaggaagtcacaccacagagcttattgttggctccacagacaagcaaccactactcgagactcctggtgaggtttttgaactgcggaaacttcttccgatgtccgttgcttatgacttcaacatccatactatggattttcagcctggagagtttctgaatgttaaggaagttcattataaccagcatggtttgttgcttctggaggggcaaggcatttatcgcttgggtgataactggtatccagttcaggctggtgatgtcatatggatggctccttttgtccctcaatggtatgctgcactcggaaagactaggtctcggtatttgttgtacaaagatgtgaatcgaaatccattgtgatcaaagattgatatgactttgcagtaaaagtcagaatcttgttgttcagcttcttgtcttataaacgccatgtccactctaagcactagctacgtgagacttagttgtatgaatcttataacaattgtgaaaagaaacacattgataaatgatgaaaaaaaaaaaaaaaaaaaaaaaaaaaaaaagaaaaaaaaaaaaaaaaaacggcacgagaagctttttttttttttttttttagtcatcgtcccaattgggcagttgattgtatagctaagcgaacgtttgatgttaacctaaaatggttatgtttctgtttttagtcatgttatcctttgtcaaattgtgaaatccctaaaagccactactacacaaacatcggattgcttgagaaacaaggaactggaactatacagactgcatcgcgctcttttctggatcaataatgatgtgatcaacatttaacaacaatcaaaaacctgaaaactagagtcgagcagagatctcatgtgccattagtagcattatcagtgtgacctccattgctgtctttgccattcacttgagccctcggtctccgatctgcaggatcaacaccgttcccattcaagagtttgtgactctcttctttggttctgtcttttgagatcacagggagcaatgccgttgttcgatcaggcaattctggtaatttcttgtcgaggaagaagacaaccaagttcacagtataccacgcaacaaccacatcaacagtgtaatgtttacgggacgcaataatcaagaggctttgcaagatggcaatgacccaacctaacagctttatgaaccttttagaaccgtatttctggtaagtgcggacaaagactagtgtgaatatcatgtgcgatgagaaaatcaggtctccacatccgtatatcacaccacgaggcaagtctcttgcgtctttccctcaaggctgttattactcgacggcattaggtgggcttaggagcttcgagaaccctaagaacaagatcactgcagttcctgctaatgagggagaaatttggggagctaccttcaaggtggaaggagcaacagttcttgcagattgaaaatgaaagagaaacacaaaagaagtttcatgtctcttaaagctctcgaactgtaacagcacaaacaaaaaaaaatatgtaggaaaaacaaaaagctgttctatgagtacttgaagctatcaatggttggtgataatgtgtgtagtgttgtatctctcttatgtcttatgcttctttgtacagcacgtgtgtgtcttctggtgttattagtgtcttcttcctaataagttaatgtctccg

SEQ ID NO: 8154 - protein, 298 aa, Arabidopsis thaliana
MRSLYLIVFIVISLVKASKSDDGFCSAPSIVESDEKTNPIYWKATNPTLSPSHLQDLPGFTRSVYKRDHALITPESHVYSPLPDWTNTLGAYLITPATGSHFVMYLAKMKEMSSSGLPPQDIERLIFVVEGAVTLTNTSSSSKKLTVDSYAYLPPNFHHSLDCVESATLVVFERRYEYLGSHTTELIVGSTDKQPLLETPGEVFELRKLLPMSVAYDFNIHTMDFQPGEFLNVKEVHYNQHGLLLLEGQGIYRLGDNWYPVQAGDVIWMAPFVPQWYAALGKTRSRYLLYKDVNRNPL

SEQ ID NO: 8155 - protein, 195 aa, Arabidopsis thaliana
MYLAKMKEMSSSGLPPQDIERLIFVVEGAVTLTNTSSSSKKLTVDSYAYLPPNFHHSLDCVESATLVVFERRYEYLGSHTTELIVGSTDKQPLLETPGEVFELRKLLPMSVAYDFNIHTMDFQPGEFLNVKEVHYNQHGLLLLEGQGIYRLGDNWYPVQAGDVIWMAPFVPQWYAALGKTRSRYLLYKDVNRNPL

SEQ ID NO: 8156 - protein, 190 aa, Arabidopsis thaliana
MKEMSSSGLPPQDIERLIFVVEGAVTLTNTSSSSKKLTVDSYAYLPPNFHHSLDCVESATLVVFERRYEYLGSHTTELIVGSTDKQPLLETPGEVFELRKLLPMSVAYDFNIHTMDFQPGEFLNVKEVHYNQHGLLLLEGQGIYRLGDNWYPVQAGDVIWMAPFVPQWYAALGKTRSRYLLYKDVNRNPL

SEQ ID NO: 8157 - DNA, 2013 bp, Arabidopsis thaliana
aaaacaaataaaaagatccaattttttgataattctggaagaggaagcaatggtgttgtctcggcgatttgctcaagtgtcgagtgacgaagaagacgatgtaccgattactaggtctaagggaagaaactcggcgagtcctgaggaatctttggggaaacggaggaagcgtaagacggtgaagctatacgaagattttgaagagaaggaagcggataggaagaagaagagaaaggggaataaggaggatgaggatatggcggagggagatgatgatcaggcggaggaagaaacaaatccggaggctgaagaagaggaagacgaagaagaagaagagaagcctgatgatgcgtgtcctgttggtgattcggttaatgttacgggtaaaggaaaagggaaaagaactcatttcaaccaatttgcttatgatggtaacacttatgatctggaggttccggtgttgctggttcctgaggacaaaagtcaaaaaccatatgttgcaattattaaggatattacccaaactaaagatggaagcatgatgattctgggacagtggttttatcgccccgaagaagcagagaaaaggggtggtggaaactggcaatcaagtgatacacgagaacttttctacagtttccatcgtgatgaagtgccagcagaatctgtgatgcacagatgtgttgtttattttgtcccggcccataaacaacttccaaaacgcaaaaataaccctggatttattgtacgaaaggtctatgataccgttgaaaagaagctgtggaagctgactgacaaagactatgaagactcaaaacaacgtgaaatcgatgttcttgtcaaaaagaccatgaacgtattgggtgatctcccggaccttgaatctgaggatatgcttgttgaccaggaaaatgtgttgaaggccaaaagatcttttcggaaagtaaacataagtcctgtggatgttagaagggaggaagacgcctctttaaaggctgaaactcctggaagtggtgcgggtatttcatcagagcattatgctatcttagagaagtttgattcactaacaggtgatgctcatcgtgacaagtgtttggggaagcttctggaggcagtccagcacatatgttatatccctgagaacaaacaggctggcgacgaagcaaaggtgggttcagatgcatctcatcttgaacaggatgagaaagacacaaagccggaaaatggaaaggatgagaaatttctctggccagatgctgctgttcctcaagtgtgtgctcttgagaatgcttcacatgcttctcttgcatcggattttcagaaatataaccaaaagatgaggacactggttttcaatctcaagaacactgcactgctggctagacgactgctcaatggcgagttagagcctgcaacgattttgaacatgtcacccactgagttaaaggagggtctaactgctgacgagacaacaaagaaggagcctgatgatgctgatcgaatgcagatgacttctgtaagatgctcgagatgcagtcaattgacggttggcctgagggatatcatccaagctgggcatggagatcgatatcagttggagtgtgttgactgtggctattcctggtatgcctcaagggatgaggtatcaactctgacaatagtcacagataaacctgcccaaggcacagagaaggaggatattgagaagaatttgaccagtcctcgtgaaactaataaaccaaaagacgaagccttgaagaccaatgactcgaacgctgacaacaatcctgaagcctccaagaaaccagagtaaagggtttccaactttttaaccttatgtttagagtttcgggtctgaattcgaactgggtttcacttttaacagttggttaaccgtatagttaagtcggataaagcttgtcatgacaaaaaaaaactaagactttggttatgggcaatgtatcaactgtctctttctcttatggaactttattttagtgcaccatctttatc

SEQ ID NO: 8158 - protein, 603 aa, Arabidopsis thaliana
KQIKRSNFLIILEEEAMVLSRRFAQVSSDEEDDVPITRSKGRNSASPEESLGKRRKRKTVKLYEDFEEKEADRKKKRKGNKEDEDMAEGDDDQAEEETNPEAEEEEDEEEEEKPDDACPVGDSVNVTGKGKGKRTHFNQFAYDGNTYDLEVPVLLVPEDKSQKPYVAIIKDITQTKDGSMMILGQWFYRPEEAEKRGGGNWQSSDTRELFYSFHRDEVPAESVMHRCVVYFVPAHKQLPKRKNNPGFIVRKVYDTVEKKLWKLTDKDYEDSKQREIDVLVKKTMNVLGDLPDLESEDMLVDQENVLKAKRSFRKVNISPVDVRREEDASLKAETPGSGAGISSEHYAILEKFDSLTGDAHRDKCLGKLLEAVQHICYIPENKQAGDEAKVGSDASHLEQDEKDTKPENGKDEKFLWPDAAVPQVCALENASHASLASDFQKYNQKMRTLVFNLKNTALLARRLLNGELEPATILNMSPTELKEGLTADETTKKEPDDADRMQMTSVRCSRCSQLTVGLRDIIQAGHGDRYQLECVDCGYSWYASRDEVSTLTIVTDKPAQGTEKEDIEKNLTSPRETNKPKDEALKTNDSNADNNPEASKKPE

SEQ ID NO: 8159 - protein, 587 aa, Arabidopsis thaliana
MVLSRRFAQVSSDEEDDVPITRSKGRNSASPEESLGKRRKRKTVKLYEDFEEKEADRKKKRKGNKEDEDMAEGDDDQAEEETNPEAEEEEDEEEEEKPDDACPVGDSVNVTGKGKGKRTHFNQFAYDGNTYDLEVPVLLVPEDKSQKPYVAIIKDITQTKDGSMMILGQWFYRPEEAEKRGGGNWQSSDTRELFYSFHRDEVPAESVMHRCVVYFVPAHKQLPKRKNNPGFIVRKVYDTVEKKLWKLTDKDYEDSKQREIDVLVKKTMNVLGDLPDLESEDMLVDQENVLKAKRSFRKVNISPVDVRREEDASLKAETPGSGAGISSEHYAILEKFDSLTGDAHRDKCLGKLLEAVQHICYIPENKQAGDEAKVGSDASHLEQDEKDTKPENGKDEKFLWPDAAVPQVCALENASHASLASDFQKYNQKMRTLVFNLKNTALLARRLLNGELEPATILNMSPTELKEGLTADETTKKEPDDADRMQMTSVRCSRCSQLTVGLRDIIQAGHGDRYQLECVDCGYSWYASRDEVSTLTIVTDKPAQGTEKEDIEKNLTSPRETNKPKDEALKTNDSNADNNPEASKKPE

SEQ ID NO: 8160 - protein, 518 aa, Arabidopsis thaliana
MAEGDDDQAEEETNPEAEEEEDEEEEEKPDDACPVGDSVNVTGKGKGKRTHFNQFAYDGNTYDLEVPVLLVPEDKSQKPYVAIIKDITQTKDGSMMILGQWFYRPEEAEKRGGGNWQSSDTRELFYSFHRDEVPAESVMHRCVVYFVPAHKQLPKRKNNPGFIVRKVYDTVEKKLWKLTDKDYEDSKQREIDVLVKKTMNVLGDLPDLESEDMLVDQENVLKAKRSFRKVNISPVDVRREEDASLKAETPGSGAGISSEHYAILEKFDSLTGDAHRDKCLGKLLEAVQHICYIPENKQAGDEAKVGSDASHLEQDEKDTKPENGKDEKFLWPDAAVPQVCALENASHASLASDFQKYNQKMRTLVFNLKNTALLARRLLNGELEPATILNMSPTELKEGLTADETTKKEPDDADRMQMTSVRCSRCSQLTVGLRDIIQAGHGDRYQLECVDCGYSWYASRDEVSTLTIVTDKPAQGTEKEDIEKNLTSPRETNKPKDEALKTNDSNADNNPEASKKPE

SEQ ID NO: 8161 - DNA, 1572 bp, Arabidopsis thaliana
atgattgttcaaattgggctttgtttgggcttagttgataggcccgttagaatttatgttcttggttcatctacgagattctggaaaaggggttttggttttccgagaagagctgtatcatcttctaaaagaagcgagcttattcgcatcatttctgttgctactgctacttctggaattttatatgctagtactaatccagatgcaagaactcgagtatcgcttgctatacctgaatctgttcgagaatctttgtcgttactgccttggcagatttcaccgggtttgattcatcgtcctgagcaaagcttattcggaaatttcgtgttttcttcgagagttagtccgaaatcagaagcacctataaatgatgagaagggagtttctgttgaagcttcggatagtagttcgaaaccaagtaatggctacttagggagagatactatagccaatgcggctgctagaattggaccagcggttgtcaatctttcggttcctcagggtttccatgggatatctatggggaaaagtatcggttctggaacgatcattgatgctgatggcacgatactgacttgcgctcatgttgtagttgattttcagaacattcgtcattcttctaaagggagggtagatgtgacgttgcaagatggtaggacgtttgagggtgtggtggtgaacgctgatttacaatccgacattgcattagtgaagataaagtcaaagacgccattgccaactgctaaacttggtttttcgagtaagcttcgtcctggagactgggtaatagcggtaggttgtcctctgtctctccagaacacagtaactgctggtattgtcagttgtgttgatcgcaaaagcagtgatttgggtttaggaggcaaacatagagagtatctccaaacagactgctcgatcaatgcgggaaactctggtgggcctcttgtaaatttggatggggaagtgattggtgttaatatcatgaaagttttagctgcagatggtcttggattttccgtgccaattgactcggtatctaaaatcatcgagcatttcaagaagagtggtagagttattcggccatggattgggctcaaaatggtcgaactcaataacttgatcgttgctcagctaaaagaacgagacccaatgtttcctgatgtcgaaagaggcgttcttgttcctacggtgattccgggatcaccggctgatcgagctggcttcaaaccaggagatgttgttgtgagatttgatgggaagccggtgatagagataatggacgacagagttgggaagaggatgcaagtagttgtggaaagatcaaataaagaaagggtcacactagaagtcattcctgaggaggcaggctttccaccaaatctaaccttgtccagttggttgtgtactggtttaggcctctacacttcaggacaagagttcgactcgtatttggtaccaagtcgtgccatctctttctctctctctctttcgccttcacaatccaatatccatgtcgatgttgttgtattgaacttaaagagaggtaataaaaattaccttttttttgaataa

SEQ ID NO: 8162 - protein, 523 aa, Arabidopsis thaliana
MIVQIGLCLGLVDRPVRIYVLGSSTRFWKRGFGFPRRAVSSSKRSELIRIISVATATSGILYASTNPDARTRVSLAIPESVRESLSLLPWQISPGLIHRPEQSLFGNFVFSSRVSPKSEAPINDEKGVSVEASDSSSKPSNGYLGRDTIANAAARIGPAVVNLSVPQGFHGISMGKSIGSGTIIDADGTILTCAHVVVDFQNIRHSSKGRVDVTLQDGRTFEGVVVNADLQSDIALVKIKSKTPLPTAKLGFSSKLRPGDWVIAVGCPLSLQNTVTAGIVSCVDRKSSDLGLGGKHREYLQTDCSINAGNSGGPLVNLDGEVIGVNIMKVLAADGLGFSVPIDSVSKIIEHFKKSGRVIRPWIGLKMVELNNLIVAQLKERDPMFPDVERGVLVPTVIPGSPADRAGFKPGDVVVRFDGKPVIEIMDDRVGKRMQVVVERSNKERVTLEVIPEEAGFPPNLTLSSWLCTGLGLYTSGQEFDSYLVPSRAISFSLSLSPSQSNIHVDVVVLNLKRGNKNYLFFE

SEQ ID NO: 8163 - protein, 350 aa, Arabidopsis thaliana
MGKSIGSGTIIDADGTILTCAHVVVDFQNIRHSSKGRVDVTLQDGRTFEGVVVNADLQSDIALVKIKSKTPLPTAKLGFSSKLRPGDWVIAVGCPLSLQNTVTAGIVSCVDRKSSDLGLGGKHREYLQTDCSINAGNSGGPLVNLDGEVIGVNIMKVLAADGLGFSVPIDSVSKIIEHFKKSGRVIRPWIGLKMVELNNLIVAQLKERDPMFPDVERGVLVPTVIPGSPADRAGFKPGDVVVRFDGKPVIEIMDDRVGKRMQVVVERSNKERVTLEVIPEEAGFPPNLTLSSWLCTGLGLYTSGQEFDSYLVPSRAISFSLSLSPSQSNIHVDVVVLNLKRGNKNYLFFE

SEQ ID NO: 8164 - DNA, 784 bp, Arabidopsis thaliana
ttttttttcggttttcacggtaaggctcggaggaaaacctaattcgtccggagaatctccacctcactctcgccaaacgcatctctgttgtagcttgtgatggatccaacacagaacacaagtgcagggattggtgggagcaatggtacaatcagatatcaaaccaatgatgggacttcaactgtgaccgttgctgatgattcaaaggagaatctttcccaagtcataaactctattgagaaaactttaggagtccttcatcagttacaccttaccgtcacttctttcacacccgcgtctcaactccatctcctccagcgccttaactctcttgtgatggagctagataacatgactaagttgtctgagaaatgcaacattcaaatccccatggaggttcttaacttgattgatgatgggaagaacccggatgagtttacgaaagatgttcttaatagctgcatagctagaaatcaagttactaagggcaagactgatgcttttaaggatttgagaaaacatattctggaggagcttgaacagacttttcctgatgaagtcgatatgtatagagaaatccgtgctagttctgctgctgaagcgaaacggttggcgcaatcgcaaagtgtgttaccaaatggggatgcaaaggtcaagaatgagctataagagccaagtttcctttttatctttaccttgtagaatataatgactgagtcgatgaatgtgatgtaacacgaacaatcccaagtgtaatttctaataatatctgttggttctcttc

SEQ ID NO: 8165 - protein, 189 aa, Arabidopsis thaliana
MDPTQNTSAGIGGSNGTIRYQTNDGTSTVTVADDSKENLSQVINSIEKTLGVLHQLHLTVTSFTPASQLHLLQRLNSLVMELDNMTKLSEKCNIQIPMEVLNLIDDGKNPDEFTKDVLNSCIARNQVTKGKTDAFKDLRKHILEELEQTFPDEVDMYREIRASSAAEAKRLAQSQSVLPNGDAKVKNEL

SEQ ID NO: 8166 - protein, 110 aa, Arabidopsis thaliana
MELDNMTKLSEKCNIQIPMEVLNLIDDGKNPDEFTKDVLNSCIARNQVTKGKTDAFKDLRKHILEELEQTFPDEVDMYREIRASSAAEAKRLAQSQSVLPNGDAKVKNEL

SEQ ID NO: 8167 - protein, 105 aa, Arabidopsis thaliana
MTKLSEKCNIQIPMEVLNLIDDGKNPDEFTKDVLNSCIARNQVTKGKTDAFKDLRKHILEELEQTFPDEVDMYREIRASSAAEAKRLAQSQSVLPNGDAKVKNEL

SEQ ID NO: 8168 - DNA, 621 bp, Arabidopsis thaliana
atattttcatcatcacgttcttcttctcttttaaataaccctaaagcctcaccaaacccaaaccctcactcactattttcacattcttcttctctctcgatatcatctaaatctctctcttgatctcaatttcgcaaaatggctgacaagaagatcagaatcggaatcaacggtttcggaagaatcggtcgtttggttgctagagttgttcttcagagggatgatgttgagctcgtcgctgttaacgatcctttcatcaccaccgagtacatgacatacatgtttaagtatgacagtgttcacggtcagtggaagcaccatgagcttaaggtgaaggatgacaaaactcttctcttcggtgagaagccagtcactgttttcggcatcaggaaccctgaggacatcccatggggtgaggctggagctgactttgttgttgagtctactggtgtcttcactgacaaagacaaggctgctgctcacttgaagggtggtgctaaaaaggttgtcatctctgccccaagcaaagatgcgcccatgttcgttgttggtgtcaacgagcacgagtacaagtctgaccttgacattgtttccaacgctagttgcaccactaactgcctt

SEQ ID NO: 8169 - protein, 161 aa, Arabidopsis thaliana
MADKKIRIGINGFGRIGRLVARVVLQRDDVELVAVNDPFITTEYMTYMFKYDSVHGQWKHHELKVKDDKTLLFGEKPVTVFGIRNPEDIPWGEAGADFVVESTGVFTDKDKAAAHLKGGAKKVVISAPSKDAPMFVVGVNEHEYKSDLDIVSNASCTTNCL

SEQ ID NO: 8170 - protein, 117 aa, Arabidopsis thaliana
MTYMFKYDSVHGQWKHHELKVKDDKTLLFGEKPVTVFGIRNPEDIPWGEAGADFVVESTGVFTDKDKAAAHLKGGAKKVVISAPSKDAPMFVVGVNEHEYKSDLDIVSNASCTTNCL

SEQ ID NO: 8171 - protein, 114 aa, Arabidopsis thaliana
MFKYDSVHGQWKHHELKVKDDKTLLFGEKPVTVFGIRNPEDIPWGEAGADFVVESTGVFTDKDKAAAHLKGGAKKVVISAPSKDAPMFVVGVNEHEYKSDLDIVSNASCTTNCL

SEQ ID NO: 8172 - DNA, 1370 bp, Arabidopsis thaliana
aaaactatattatataaacacatttttcgtttcttcacattcacaaaacatctctctctttcttctcccattcactcactatcttgctcctagaaaaagatggcgagaatgagtttgatgatcatgatgattatggttgctgtgaccatgattaacattgctaagagtgatcccattgcaccatgttacttcatatttggtgactctttggttgataatggcaacaataatcagcttcagtcattagctagagctaattactttccttacggtattgactttgctgccggtccaaccggtcggtttagcaacggcttaaccactgtcgatgttatcgctcagcttttgggtttcgaggactacattacaccttacgcttctgcaagaggacaagacattctccgaggagttaactatgcttccgctgctgccggaatccgagacgaaaccggcagacaattgggaggtcgaatagcatttgcagggcaagtagcaaatcacgtgaacactgtgtcacaagtagtgaacatacttggtgatcaaaacgaagcctcgaattacctcagcaaatgcatttactctatcggattaggcagtaacgattatcttaacaactacttcatgcctactttttactctaccggtaaccagttctcccccgaatcctatgccgacgatctcgttgcccgttacaccgaacaactcagggtactgtataccaatggagcgaggaagtttgcgttgataggagtcggggcaatcggttgcagcccgaacgagctagctcaaaacagcagagacggaagaacgtgtgacgaaagaatcaactcagcgaacagaatctttaacagcaaactcatatctatagtcgacgcttttaaccagaacacaccagatgcaaaattcacttacatcaacgcttatggcatcttccaagacattattacaaaccctgctcgctacgggtttagagtgacaaatgcaggatgttgtggagttgggaggaacaatggacagataacttgtcttccaggtcaagcaccatgtctaaataggaatgagtatgtgttttgggatgcgtttcatcccggtgaagctgcgaatattgttattggaagacgatcttttaagcgagaagctgcttctgatgctcatccttatgatattcagcagctagcatctctctaaagagagaaagatcttttggttgtctaagtattttgatagttcttcaatggcagctgagttttggactcaagaagaagtgatttggtttgtgttgtgtgatgtcataactgtttatgtaatgatttggagttactgtttatctctttttctcttaacagttttataaatttgattctttcact

SEQ ID NO: 8173 - protein, 362 aa, Arabidopsis thaliana
MARMSLMIMMIMVAVTMINIAKSDPIAPCYFIFGDSLVDNGNNNQLQSLARANYFPYGIDFAAGPTGRFSNGLTTVDVIAQLLGFEDYITPYASARGQDILRGVNYASAAAGIRDETGRQLGGRIAFAGQVANHVNTVSQVVNILGDQNEASNYLSKCIYSIGLGSNDYLNNYFMPTFYSTGNQFSPESYADDLVARYTEQLRVLYTNGARKFALIGVGAIGCSPNELAQNSRDGRTCDERINSANRIFNSKLISIVDAFNQNTPDAKFTYINAYGIFQDIITNPARYGFRVTNAGCCGVGRNNGQITCLPGQAPCLNRNEYVFWDAFHPGEAANIVIGRRSFKREAASDAHPYDIQQLASL

SEQ ID NO: 8174 - protein, 359 aa, Arabidopsis thaliana
MSLMIMMIMVAVTMINIAKSDPIAPCYFIFGDSLVDNGNNNQLQSLARANYFPYGIDFAAGPTGRFSNGLTTVDVIAQLLGFEDYITPYASARGQDILRGVNYASAAAGIRDETGRQLGGRIAFAGQVANHVNTVSQVVNILGDQNEASNYLSKCIYSIGLGSNDYLNNYFMPTFYSTGNQFSPESYADDLVARYTEQLRVLYTNGARKFALIGVGAIGCSPNELAQNSRDGRTCDERINSANRIFNSKLISIVDAFNQNTPDAKFTYINAYGIFQDIITNPARYGFRVTNAGCCGVGRNNGQITCLPGQAPCLNRNEYVFWDAFHPGEAANIVIGRRSFKREAASDAHPYDIQQLASL

SEQ ID NO: 8175 - protein, 356 aa, Arabidopsis thaliana
MIMMIMVAVTMINIAKSDPIAPCYFIFGDSLVDNGNNNQLQSLARANYFPYGIDFAAGPTGRFSNGLTTVDVIAQLLGFEDYITPYASARGQDILRGVNYASAAAGIRDETGRQLGGRIAFAGQVANHVNTVSQVVNILGDQNEASNYLSKCIYSIGLGSNDYLNNYFMPTFYSTGNQFSPESYADDLVARYTEQLRVLYTNGARKFALIGVGAIGCSPNELAQNSRDGRTCDERINSANRIFNSKLISIVDAFNQNTPDAKFTYINAYGIFQDIITNPARYGFRVTNAGCCGVGRNNGQITCLPGQAPCLNRNEYVFWDAFHPGEAANIVIGRRSFKREAASDAHPYDIQQLASL

SEQ ID NO: 8176 - DNA, 469 bp, Arabidopsis thaliana
aatctctgtgctaccgactactttcagtgttctcttcttctccactaattcagatcacattcaagaatcttcttcactcacatctctgaaaaaatggcgagcaacatggaagttttctgcgagatcttaatcgcgatccttcttccacctcttggagtttgtctcaaacgtggctgttgcactgtagagttcttgatttgcttggtgctgacaatcttaggatacatcccagggataatttatgcactatacgtgatcgtgtttcaaaaccgtgaaggctctaccgaacttggagctccacttaactcagcttgatctgttttggtccattacacggatcaatatgttgttgaaactgttttacttatcatgtaccaaataataagttgctttgcaatttttatgtattgaagatttgagaacattgtcgcgttattgatacattgcttatctttttgatgtataactt

SEQ ID NO: 8177 - protein, 73 aa, Arabidopsis thaliana
MASNMEVFCEILIAILLPPLGVCLKRGCCTVEFLICLVLTILGYIPGIIYALYVIVFQNREGSTELGAPLNSA

SEQ ID NO: 8178 - protein, 69 aa, Arabidopsis thaliana
MEVFCEILIAILLPPLGVCLKRGCCTVEFLICLVLTILGYIPGIIYALYVIVFQNREGSTELGAPLNSA

SEQ ID NO: 8179 - protein, 42 aa, Arabidopsis thaliana
ISVLPTTFSVLFFSTNSDHIQESSSLTSLKKWRATWKFSARS

SEQ ID NO: 8180 - DNA, 633 bp, Arabidopsis thaliana
aaaaaaatcaaaccgaagaaaaagccaagaatcaagaaagttaacacaacagctaagaatggatttggagtttggaaggtttccaatattttcaatcctcgaagacatgcttgaagcccctgaagaacaaaccgagaagactcgtaacaacccttcaagagcttacatgcgagacgcaaaggcaatggctgctacaccagctgacgttatcgagcacccggatgcgtacgttttcgccgtggacatgcctggaatcaaaggagatgagattcaggtccagatagagaacgagaacgtgcttgtggtgagtggcaaaagacagagggacaacaaggagaatgaaggtgtgaagtttgtgaggatggagaggaggatggggaagtttatgaggaagtttcagttacctgataatgcagatttggagaagatctctgcggcttgtaatgacggtgtgttgaaagtgactattccgaaacttcctcctcctgagccaaagaaaccaaagactatacaagttcaagtcgcttgagtttgtttgtgatcgtgtttttgtgttttaatgaatgtaatcgataagcaactacctcttggtgttcgttgtaaaatgaaataaaaatagttttctctgttcat

SEQ ID NO: 8181 - protein, 175 aa, Arabidopsis thaliana
KKSNRRKSQESRKLTQQLRMDLEFGRFPIFSILEDMLEAPEEQTEKTRNNPSRAYMRDAKAMAATPADVIEHPDAYVFAVDMPGIKGDEIQVQIENENVLVVSGKRQRDNKENEGVKFVRMERRMGKFMRKFQLPDNADLEKISAACNDGVLKVTIPKLPPPEPKKPKTIQVQVA

SEQ ID NO: 8182 - protein, 156 aa, Arabidopsis thaliana
MDLEFGRFPIFSILEDMLEAPEEQTEKTRNNPSRAYMRDAKAMAATPADVIEHPDAYVFAVDMPGIKGDEIQVQIENENVLVVSGKRQRDNKENEGVKFVRMERRMGKFMRKFQLPDNADLEKISAACNDGVLKVTIPKLPPPEPKKPKTIQVQVA

SEQ ID NO: 8183 - protein, 140 aa, Arabidopsis thaliana
MLEAPEEQTEKTRNNPSRAYMRDAKAMAATPADVIEHPDAYVFAVDMPGIKGDEIQVQIENENVLVVSGKRQRDNKENEGVKFVRMERRMGKFMRKFQLPDNADLEKISAACNDGVLKVTIPKLPPPEPKKPKTIQVQVA

SEQ ID NO: 8184 - DNA, 1237 bp, Arabidopsis thaliana
aaaaattaagagcaaaagtcatttaactttcctaaaacaatggctttaaaacatatgcaaatctttctcttcgtcgctatattttcatcattctgtttctccatcactctttctcgtccactcgacaatgaactcatcatgcaaaagaggcacatcgagtggatgactaaacacggccgtgtctacgcggatgtgaaggaggaaaacaatcgctacgttgtgttcaaaaacaacgtcgaacgcattgaacatttaaatagcattcctgccggaagaactttcaaacttgcggtaaatcagtttgctgatttaaccaatgacgaatttcgttccatgtacactggtttcaaaggtgtctcggcattatctagccaaagccaaactaaaatgtcgccgtttaggtaccaaaacgtttcttctggtgctttgccggtttctgttgactggaggaagaaaggagctgtgacccctatcaagaatcaaggcagctgcggatgttgttgggcgttttcagcggttgcggctattgaaggagcaacacaaataaagaaagggaaacttatatctttgtcagaacaacagcttgttgattgcgacacaaacgattttggctgcgaaggcggtttaatggatactgcgtttgagcatataaaagcgactggcggcttgacaactgagtcaaattatccttacaaaggcgaagacgctacttgcaattccaaaaagaccaatccaaaagcaacttctattacaggttatgaggatgtcccggttaatgatgagcaagcactgatgaaggcagtggcacaccaaccggttagcgttggaattgaaggaggtggttttgatttccaattctattcgtctggtgtgttcactggagagtgcactacgtatcttgatcatgcagtaactgcgattggatacggcgaatctactaacggatcaaagtattggatcatcaagaattcatggggaacaaaatggggagaaagtggatatatgaggattcaaaaagatgtcaaggataaacaaggactatgtggtcttgccatgaaagcttcttacccaactatatgaattcaaaaccgtgttaagcttttaattgtgtatgtttgtgtgggattgatgtctaaaaataatttgaattgttttatgtaaaaaaattgtatttagactgttgtatgcattttatgaaattgtaagcttatgtaatgcaaaggattgataattttcg

SEQ ID NO: 8185 - protein, 346 aa, Arabidopsis thaliana
MALKHMQIFLFVAIFSSFCFSITLSRPLDNELIMQKRHIEWMTKHGRVYADVKEENNRYVVFKNNVERIEHLNSIPAGRTFKLAVNQFADLTNDEFRSMYTGFKGVSALSSQSQTKMSPFRYQNVSSGALPVSVDWRKKGAVTPIKNQGSCGCCWAFSAVAAIEGATQIKKGKLISLSEQQLVDCDTNDFGCEGGLMDTAFEHIKATGGLTTESNYPYKGEDATCNSKKTNPKATSITGYEDVPVNDEQALMKAVAHQPVSVGIEGGGFDFQFYSSGVFTGECTTYLDHAVTAIGYGESTNGSKYWIIKNSWGTKWGESGYMRIQKDVKDKQGLCGLAMKASYPTI

SEQ ID NO: 8186 - protein, 341 aa, Arabidopsis thaliana
MQIFLFVAIFSSFCFSITLSRPLDNELIMQKRHIEWMTKHGRVYADVKEENNRYVVFKNNVERIEHLNSIPAGRTFKLAVNQFADLTNDEFRSMYTGFKGVSALSSQSQTKMSPFRYQNVSSGALPVSVDWRKKGAVTPIKNQGSCGCCWAFSAVAAIEGATQIKKGKLISLSEQQLVDCDTNDFGCEGGLMDTAFEHIKATGGLTTESNYPYKGEDATCNSKKTNPKATSITGYEDVPVNDEQALMKAVAHQPVSVGIEGGGFDFQFYSSGVFTGECTTYLDHAVTAIGYGESTNGSKYWIIKNSWGTKWGESGYMRIQKDVKDKQGLCGLAMKASYPTI

SEQ ID NO: 8187 - protein, 313 aa, Arabidopsis thaliana
MQKRHIEWMTKHGRVYADVKEENNRYVVFKNNVERIEHLNSIPAGRTFKLAVNQFADLTNDEFRSMYTGFKGVSALSSQSQTKMSPFRYQNVSSGALPVSVDWRKKGAVTPIKNQGSCGCCWAFSAVAAIEGATQIKKGKLISLSEQQLVDCDTNDFGCEGGLMDTAFEHIKATGGLTTESNYPYKGEDATCNSKKTNPKATSITGYEDVPVNDEQALMKAVAHQPVSVGIEGGGFDFQFYSSGVFTGECTTYLDHAVTAIGYGESTNGSKYWIIKNSWGTKWGESGYMRIQKDVKDKQGLCGLAMKASYPTI

SEQ ID NO: 8188 - DNA, 723 bp, Arabidopsis thaliana
actcaccagttctttcttccatataaattttgaatacattatatataacaaaaatagtattttaagagatcgtcgcctacgatggcttcaaaagcattgctttttttaagtctcattgttgttcttcttatagcttctgaggtggtagccagagacctcgctgagaaatcggcagagcagaaaaacaatgaaagagacgaagtaaagcaaacggagcagtttggcgggtttccaggaggagggtatggagggttcccgggaggagggtatggaggaaaccctggtggaggatatggaaaccgtggtggtggatatagaaaccgtgatggaggatatggaaaccgcggtggaggatatggaaaccgaggaggaggatattgtcgctatggttgctgctacagaggctactacggtggctgcttcaggtgttgtgcttatgctggtcaggctgttcaaactcagccacagagtactgagccgggtcactaaaagtcgtaaaatgatgcatatatatcaatgattcctcaggctgtataaagggaacaattaagatatagtaattactagggttgaaaaagtcattacaaagataagagattggtttgtactctattgcttatgttttatttttaagtttgtgttgtaacaaagggaaaatgtcaaaaaaagcctcaactttcaaatttgggatgaaaaaagcatgaacttttaaaatgtcatttt

SEQ ID NO: 8189 - protein, 135 aa, Arabidopsis thaliana
MASKALLFLSLIVVLLIASEVVARDLAEKSAEQKNNERDEVKQTEQFGGFPGGGYGGFPGGGYGGNPGGGYGNRGGGYRNRDGGYGNRGGGYGNRGGGYCRYGCCYRGYYGGCFRCCAYAGQAVQTQPQSTEPGH

SEQ ID NO: 8190 - protein, 91 aa, Arabidopsis thaliana
MEGSREEGMEETLVEDMETVVVDIETVMEDMETAVEDMETEEEDIVAMVAATEATTVAASGVVLMLVRLFKLSHRVLSRVTKSRKMMHIYQ

SEQ ID NO: 8191 - protein, 83 aa, Arabidopsis thaliana
MEETLVEDMETVVVDIETVMEDMETAVEDMETEEEDIVAMVAATEATTVAASGVVLMLVRLFKLSHRVLSRVTKSRKMMHIYQ

SEQ ID NO: 8192 - DNA, 1571 bp, Arabidopsis thaliana
gacaaggaagaagacgaagacggcgatgaattcgttaaccgttgaacaagtattgaaagagaagaagaccaatgacccagattccgtcaaggaacttaatctcggccataaagctctcaccgacgtgtcttgtttgagcaagttcaaaaacttggaaaagcttgatcttcgtttcaacaatctaacagatcttcagggactcaagtcttgtgtgaacttgaaatggctttcagttgtggaaaacaaattgcaaagcttaaatggaattgaagcactcactaagcttacggtgcttaatgctggaaagaataagctcaaatccatgaatgagatctcttctcttgtcaatttacgggccttgatcttgaatgacaatgaaatctcctccatttgcaagcttgatttactcaaagacttgaacagtctcgttctttctaggaacccaatcagtgaaataggtgactcactttcaaagttgaaaaacctctccaaaatttctttgtctgactgcagaataaaagctattggctcttctctcaagtcatgctctgatttgaaagagctgcggctcgcgaacaatgaaatcaaggctctcccagcagaactagcagtcaacaaaagactactcaatttggatgtgggaaacaatgtgattacgcaactctctggtttagaggttttgggtacactatcttgcttgcgaaatctgaatattcgaggaaacccgatttctgataacgataagtcagctaagaaggtgagaacgttgcttctcccttcagtgaatgtattcaacgctcaacccttagaaaaaagctcaaggaatgcaaagcatattcggcttgataccgatgatgaaacctttgatgcctatcacaataaatcagcagaagaggaacaatctaaagaagatcgaaaacgcaagaagagctctaagagaaataagtcagaagaagaagaagtcaacaatgaggatcacaaaagcaagaagaagaagtctaagagcaacacaaatgtagatcaagttgaaacaaaaaagaaagaagaacataaagagaagacaatcccaagtaacaatgatgatgatgatgatgctgagaagaaacagaaaagggctactccaaaggaggaactcgatgctatagatgatgctgaaacctctttcgcagaaatcttttcccgggaaaatgtgccaaagggttctgaagacggtattgagaagaagaagaaaagcagcgtccaagagacaggtttagtaaaagtgatagatactaaagctaacaagaagaagaagaagagtgaaaagaagcaaagcaagagtgtagtgattgatcttcccatggaggttgagatcgggttaggaggagagtctaagtgggagtaaactgcaacagagggagtgttttactctttaaaagaagggacagttatgtctgtaacatccaacggctagggagtattttgatatggttaaagaacataggagaggaagaaagtggtttcgatcttctttataaattgttttctgcactgttgagaagctatatctaattttataaaatgtttgtggc

SEQ ID NO: 8193 - protein, 460 aa, Arabidopsis thaliana
TRKKTKTAMNSLTVEQVLKEKKTNDPDSVKELNLGHKALTDVSCLSKFKNLEKLDLRFNNLTDLQGLKSCVNLKWLSVVENKLQSLNGIEALTKLTVLNAGKNKLKSMNEISSLVNLRALILNDNEISSICKLDLLKDLNSLVLSRNPISEIGDSLSKLKNLSKISLSDCRIKAIGSSLKSCSDLKELRLANNEIKALPAELAVNKRLLNLDVGNNVITQLSGLEVLGTLSCLRNLNIRGNPISDNDKSAKKVRTLLLPSVNVFNAQPLEKSSRNAKHIRLDTDDETFDAYHNKSAEEEQSKEDRKRKKSSKRNKSEEEEVNNEDHKSKKKKSKSNTNVDQVETKKKEEHKEKTIPSNNDDDDDAEKKQKRATPKEELDAIDDAETSFAEIFSRENVPKGSEDGIEKKKKSSVQETGLVKVIDTKANKKKKKSEKKQSKSVVIDLPMEVEIGLGGESKWE

SEQ ID NO: 8194 - protein, 452 aa, Arabidopsis thaliana
MNSLTVEQVLKEKKTNDPDSVKELNLGHKALTDVSCLSKFKNLEKLDLRFNNLTDLQGLKSCVNLKWLSVVENKLQSLNGIEALTKLTVLNAGKNKLKSMNEISSLVNLRALILNDNEISSICKLDLLKDLNSLVLSRNPISEIGDSLSKLKNLSKISLSDCRIKAIGSSLKSCSDLKELRLANNEIKALPAELAVNKRLLNLDVGNNVITQLSGLEVLGTLSCLRNLNIRGNPISDNDKSAKKVRTLLLPSVNVFNAQPLEKSSRNAKHIRLDTDDETFDAYHNKSAEEEQSKEDRKRKKSSKRNKSEEEEVNNEDHKSKKKKSKSNTNVDQVETKKKEEHKEKTIPSNNDDDDDAEKKQKRATPKEELDAIDDAETSFAEIFSRENVPKGSEDGIEKKKKSSVQETGLVKVIDTKANKKKKKSEKKQSKSVVIDLPMEVEIGLGGESKWE

SEQ ID NO: 8195 - protein, 353 aa, Arabidopsis thaliana
MNEISSLVNLRALILNDNEISSICKLDLLKDLNSLVLSRNPISEIGDSLSKLKNLSKISLSDCRIKAIGSSLKSCSDLKELRLANNEIKALPAELAVNKRLLNLDVGNNVITQLSGLEVLGTLSCLRNLNIRGNPISDNDKSAKKVRTLLLPSVNVFNAQPLEKSSRNAKHIRLDTDDETFDAYHNKSAEEEQSKEDRKRKKSSKRNKSEEEEVNNEDHKSKKKKSKSNTNVDQVETKKKEEHKEKTIPSNNDDDDDAEKKQKRATPKEELDAIDDAETSFAEIFSRENVPKGSEDGIEKKKKSSVQETGLVKVIDTKANKKKKKSEKKQSKSVVIDLPMEVEIGLGGESKWE

SEQ ID NO: 8196 - DNA, 1304 bp, Arabidopsis thaliana
aaaaggaagtatacgtttgtttctttgctctgaggtatcttcgtttgatacaaggcgaaatcgatcttcttcttcttcttcttcatccccttgcgttttccatctccatcgtctgctgaaaccatttgatcgatctctcaggttacttagaatggcacaagaagccgatgggatcagattggaccaaagacatgggaaggctcgagtgagagttggaagagtttggcgtcatgctcatgatggatctcatcactttgttgaatggaatgttagcatcagtcttctctctcactgtctctcttcttaccgtcttgatgataactctgatattgtcgccacagataccattaaaaacactgtttatgtgaaagccaaggaatgtggagatcggctctcggtggaggaatttgccatacttattgggaaacacttttgctcattttatccacaggtttttactgctatcgtgaatatcattgagaagccctgggagcgtgtctccatcgatggaaaaccacatttacatggttttaagcttgggtcagagaaccatactacagaggcaagagtagaaaagtctggtgcattaaacttaacttccggtattggaggactagctctactgaagacaacccagtcaggatttgagaggtttgtcagagacaaatacaccattctgcctgaaactcgtgagcgaatgctggccacagaggttaatgcatcttggaggtactcgtatgagtcagttgcaagcattccaacaaaaggactctactttagcgagaagttcatggacgttaagaaagttctgatggatactttctttggtccaccagaaactggtgtgtatagcccttctgtccaacgcactctctacctcatgggaagcgccgtactgaaaaggttcgctgatgtatcatcgattcacctaaaaatgccaaatattcattttctaccagtaaatctttcaacgaaggaaaacccttcaatggtgaagtttaaagatgatgtgtacctgccaaccgatgaacctcatggatctatagaagcaactctaagccgtataacctcgaaactatgaggttttaagacaatacatcatacatggaaatatcaaacacaatttcacaggttctgcaacttttggcgtttgcctcgtttatgaaataacaatttaaatgaagtgtgtaaggtcaacttttggcttttgttgcaagaataatactgtaactgcaaacagtttcacataaaaatgtagcttacatatattatcactgattcgcagtcatgttacatttttaccc

SEQ ID NO: 8197 - protein, 359 aa, Arabidopsis thaliana
KGSIRLFLCSEVSSFDTRRNRSSSSSSSSPCVFHLHRLLKPFDRSLRLLRMAQEADGIRLDQRHGKARVRVGRVWRHAHDGSHHFVEWNVSISLLSHCLSSYRLDDNSDIVATDTIKNTVYVKAKECGDRLSVEEFAILIGKHFCSFYPQVFTAIVNIIEKPWERVSIDGKPHLHGFKLGSENHTTEARVEKSGALNLTSGIGGLALLKTTQSGFERFVRDKYTILPETRERMLATEVNASWRYSYESVASIPTKGLYFSEKFMDVKKVLMDTFFGPPETGVYSPSVQRTLYLMGSAVLKRFADVSSIHLKMPNIHFLPVNLSTKENPSMVKFKDDVYLPTDEPHGSIEATLSRITSKL

SEQ ID NO: 8198 - protein, 309 aa, Arabidopsis thaliana
MAQEADGIRLDQRHGKARVRVGRVWRHAHDGSHHFVEWNVSISLLSHCLSSYRLDDNSDIVATDTIKNTVYVKAKECGDRLSVEEFAILIGKHFCSFYPQVFTAIVNIIEKPWERVSIDGKPHLHGFKLGSENHTTEARVEKSGALNLTSGIGGLALLKTTQSGFERFVRDKYTILPETRERMLATEVNASWRYSYESVASIPTKGLYFSEKFMDVKKVLMDTFFGPPETGVYSPSVQRTLYLMGSAVLKRFADVSSIHLKMPNIHFLPVNLSTKENPSMVKFKDDVYLPTDEPHGSIEATLSRITSKL

SEQ ID NO: 8199 - DNA, 902 bp, Arabidopsis thaliana
atagcgaaatctctaattacttaatctctgaatgcttaagataataactataatctaagagtaattaattaaacgataagtggttaaatttgttgaggttaaaagtgaagcttcaatggcaagaggtcgaaagctgacgatgagccagagcgagaggtacctaggaagcaactatagttacggtgacagtaacggaaactccgccaccgacgaatcagagctcacggaggaggacatctggtcacacgccgtcgatcacagcccggagatgctggaatctcatggagcgtggaacacacgcgatgctgtggtgaggaatgggcgcgtgggtggtggtttgtcgctggcgtttgaggacgcgtcatcttcgccgaggatcgtgcaccagatacgtggcggaggagaaggaggaggaggtggtggaggaggaggaagagttgagaggcagttggcgtcgtcggctccggtgaacgtgccggattggagtaagatatacccgagtcaactcggttgagtcgatacacgagtctgatgaagaggaggaggaagattccgggatgatgatgcccgccgcatgagtacttggcgaagagccaacagcgacggagcagaaaatctggcggcggtggctcggtgtttgaaggagttggaagaactcttaaaggacgagaattaaggcgcgttcgagacgcgatttggagccaaacagggttctacggctaagttagtaatataaaatttgaaagaaaaaaaaaacaatataaaacttcaacataaaaactttggaaaatattttgcttattttgtcagtttagagttaattttgcaactttcttgaatcccaagcttgagatgtataagatttatatattgcttcccatgcaaacgctttttcttttctt

SEQ ID NO: 8200 - protein, 132 aa, Arabidopsis thaliana
MARGRKLTMSQSERYLGSNYSYGDSNGNSATDESELTEEDIWSHAVDHSPEMLESHGAWNTRDAVVRNGRVGGGLSLAFEDASSSPRIVHQIRGGGEGGGGGGGGGRVERQLASSAPVNVPDWSKIYPSQLG

SEQ ID NO: 8201 - protein, 124 aa, Arabidopsis thaliana
MSQSERYLGSNYSYGDSNGNSATDESELTEEDIWSHAVDHSPEMLESHGAWNTRDAVVRNGRVGGGLSLAFEDASSSPRIVHQIRGGGEGGGGGGGGGRVERQLASSAPVNVPDWSKIYPSQLG

SEQ ID NO: 8202 - protein, 81 aa, Arabidopsis thaliana
MLESHGAWNTRDAVVRNGRVGGGLSLAFEDASSSPRIVHQIRGGGEGGGGGGGGGRVERQLASSAPVNVPDWSKIYPSQLG

SEQ ID NO: 8203 - DNA, 664 bp, Arabidopsis thaliana
taatcgaaaaagagcttctagaaaattaattcagcaacaaaatggattctttacacgttcttagaccctttcttcttattttcattgtttttattcatcttcctcgcacaactacatcaaagtcagaaccaaaagtcattaccatcgatgtaagccaagctcagaaccttcttgattctggctacacgtttcttgatgtcagaactgttgaagagttcaagaaatgccgtgttgattcagaaaatgtcttcaatgttccttactggttatatactccacaagttcaagagattaaccctaatttcttgaaacatgtttcatctctctgtaaccaaaccgatcatcttgtcgtgggatgtaaatctggagttagatcattacatgctaccaaatttcttgtttcttccggcttcaagactgtaagaaacatggacggtggttacattgcttgggtcaacaatagatttccagttaaagtggaactcaaggaactcaaatatgatgagctttgattcaaattcttcaaatacaagcatgttaatgtaattttttgctttaaatatatgtagaatgtgtaaatgttatcacttatcattgcaataacacataaagtttgaagtccaaaaaaaaaaaaaaaaaagcttatcgataccgtcgaccctcg

SEQ ID NO: 8204 - protein, 156 aa, Arabidopsis thaliana
MDSLHVLRPFLLIFIVFIHLPRTTTSKSEPKVITIDVSQAQNLLDSGYTFLDVRTVEEFKKCRVDSENVFNVPYWLYTPQVQEINPNFLKHVSSLCNQTDHLVVGCKSGVRSLHATKFLVSSGFKTVRNMDGGYIAWVNNRFPVKVELKELKYDEL

SEQ ID NO: 8205 - DNA, 1281 bp, Arabidopsis thaliana
acctcatcattcttccttctggttaactgaaaatggagtgtagttcagtgagtgtactaggaatattactggtatttcctctccttcataaccttgtcaccatctccgggcagaatcttccggcggtgggtttgttcactttcggagattccaacttcgacgctggaaataaaaagttcctcacaagtgctccacttcctcaaaacttttggccttacggtaaatctcgagatgaccctaagggcaagttttctgatggcaaaattgtcccggactttattgcaaaattcatggggataccacacgatttaccgccggcgctaaaacccggcaccgatgtgtcacgaggagccagcttcgccgtcgggtccgcttccattcttggatctccaaaagattctttggctctgaatcaacaagtgaggaaattcaatcagatgatatcaaattggaaagtggattacattcagaaatcagtgtttatgattagcattggtatggaagattactacaactttaccaaaaacaatcctaatgctgaagtttctgctcaacaagctttcgttacttctgtcactaaccggtttaagagtgatatcaacttgttgtattcatctggagctagtaaattcgtcgtacacttgctagcgccattaggttgtttaccgatcgcaagacaagaatttaaaaccggtaacaattgttacgagaaactcaatgatttggccaaacaacacaacgctaaaattggaccgattttgaacgaaatggcggaaactaaaccggatttccaattcaccgttttcgatttctacaacgttattcttcgcaggacacaaagaaacatgaactaccggttttccgtgacgaatatatcgtgttgcggtgttgggacgcattatgcatatggttgtggtttacctaacgtgcactcgaagttatgcgaatatcaaagatcctacctttacttcgacgcacgtcataacacagagaaagcacaagaagcgtttgctcatcttatctttggagctgacccaaatgttatccaacctatgaatgttcgtgagctcatggtgtatcctgttaatgagcctatgcgtgagttttgggaggatccaatggatgagaagttatcgttagtccaatactagtggatctgtctacctcgtttagttcttgagctcactattttctatctctagatcacgtacgagctcttggaatttgtaatgtattgttcttaattagttgcgaagtaaaataattaatactgtttaaacc

SEQ ID NO: 8206 - protein, 372 aa, Arabidopsis thaliana
MECSSVSVLGILLVFPLLHNLVTISGQNLPAVGLFTFGDSNFDAGNKKFLTSAPLPQNFWPYGKSRDDPKGKFSDGKIVPDFIAKFMGIPHDLPPALKPGTDVSRGASFAVGSASILGSPKDSLALNQQVRKFNQMISNWKVDYIQKSVFMISIGMEDYYNFTKNNPNAEVSAQQAFVTSVTNRFKSDINLLYSSGASKFVVHLLAPLGCLPIARQEFKTGNNCYEKLNDLAKQHNAKIGPILNEMAETKPDFQFTVFDFYNVILRRTQRNMNYRFSVTNISCCGVGTHYAYGCGLPNVHSKLCEYQRSYLYFDARHNTEKAQEAFAHLIFGADPNVIQPMNVRELMVYPVNEPMREFWEDPMDEKLSLVQY

SEQ ID NO: 8207 - protein, 286 aa, Arabidopsis thaliana
MGIPHDLPPALKPGTDVSRGASFAVGSASILGSPKDSLALNQQVRKFNQMISNWKVDYIQKSVFMISIGMEDYYNFTKNNPNAEVSAQQAFVTSVTNRFKSDINLLYSSGASKFVVHLLAPLGCLPIARQEFKTGNNCYEKLNDLAKQHNAKIGPILNEMAETKPDFQFTVFDFYNVILRRTQRNMNYRFSVTNISCCGVGTHYAYGCGLPNVHSKLCEYQRSYLYFDARHNTEKAQEAFAHLIFGADPNVIQPMNVRELMVYPVNEPMREFWEDPMDEKLSLVQY

SEQ ID NO: 8208 - protein, 237 aa, Arabidopsis thaliana
MISNWKVDYIQKSVFMISIGMEDYYNFTKNNPNAEVSAQQAFVTSVTNRFKSDINLLYSSGASKFVVHLLAPLGCLPIARQEFKTGNNCYEKLNDLAKQHNAKIGPILNEMAETKPDFQFTVFDFYNVILRRTQRNMNYRFSVTNISCCGVGTHYAYGCGLPNVHSKLCEYQRSYLYFDARHNTEKAQEAFAHLIFGADPNVIQPMNVRELMVYPVNEPMREFWEDPMDEKLSLVQY

SEQ ID NO: 8209 - DNA, 1376 bp, Arabidopsis thaliana
aaaacgaatttttttaaagaaaataaaaatcaagtctttctcttcgtctatctctctctctgctcagactctctggtgttgaagactaatcactgaagcagatctattatacggaggacgaagaagatgtatgagcagcagcaacatttcatggatttgcaaagcgattctgggtttggggacgatagctcctggctcgccggcgatgacgatcttcgtctctctcctcaccaatctgccgccggtacgaactccggcaatgagaatctagatcgtcgtctcttaaaagatctcgtcgagatggttccccttatcgagcattacatggaacataaagaaaggagttcgtttaagcggcgtggttccatgatctacactaagatgccttcaaaagaatccttgtcccgaaggggaagaaatgcttctcaaacagtcccaggaagaaagaagagagaccaagagggaaatgacgatgttatgaacaattctagggaagatgatgaaaacgcaaaggctttggctggtgcagaaaaggaagaaatgagtagactaagagagcaagtgaatgacttgcagacaaaattatcggagaaagaagaggttttaaagtcaatggagatgtcaaagaatcaggtaaacgagatacaagaaaagcttgaagcaacaaatcgattggttgctgagaaggatatgttgatcaagtctatgcagttacaattatcggacacaaagatcaaacttgctgacaagcaagcagcccttgagaagactcaatgggaagcaaagacaacaggaacaagagcaatcaagcttcaagaacagctagatgctgttgaaggagacatctctacattcacacgggtgttcgaaactttggcaaaaactgattccaagaaacccgatagggattatgatgcagtcccatatgaatttgatcatcttccatatttagacgatgtagatgaaactgacctgaggaaaatggaagaagcaagattagcttatgtagcagcagtgaataccgcaaaggaacgagaagatgaagaatctctggtcatggctgctcaagctcgagcttacctgcaatcactagcctttacatattaatcatcttcaggtacttacttctttataggatatttctctccttgggttgttttaggagtatgtagatttgtaccatgaagaaattggagaagaaaagcttatgtgagaaacataaagttatggttttcccctaaaccaatgaacgcaactctgagtttttgtttcttcatttgagcatgtatgtatctatatgatcttctacattattgggaacataaaatcagattgtataatgcatctgttcaatagtttactttagatatactctt

SEQ ID NO: 8210 - protein, 326 aa, Arabidopsis thaliana
MYEQQQHFMDLQSDSGFGDDSSWLAGDDDLRLSPHQSAAGTNSGNENLDRRLLKDLVEMVPLIEHYMEHKERSSFKRRGSMIYTKMPSKESLSRRGRNASQTVPGRKKRDQEGNDDVMNNSREDDENAKALAGAEKEEMSRLREQVNDLQTKLSEKEEVLKSMEMSKNQVNEIQEKLEATNRLVAEKDMLIKSMQLQLSDTKIKLADKQAALEKTQWEAKTTGTRAIKLQEQLDAVEGDISTFTRVFETLAKTDSKKPDRDYDAVPYEFDHLPYLDDVDETDLRKMEEARLAYVAAVNTAKEREDEESLVMAAQARAYLQSLAFTY

SEQ ID NO: 8211 - protein, 318 aa, Arabidopsis thaliana
MDLQSDSGFGDDSSWLAGDDDLRLSPHQSAAGTNSGNENLDRRLLKDLVEMVPLIEHYMEHKERSSFKRRGSMIYTKMPSKESLSRRGRNASQTVPGRKKRDQEGNDDVMNNSREDDENAKALAGAEKEEMSRLREQVNDLQTKLSEKEEVLKSMEMSKNQVNEIQEKLEATNRLVAEKDMLIKSMQLQLSDTKIKLADKQAALEKTQWEAKTTGTRAIKLQEQLDAVEGDISTFTRVFETLAKTDSKKPDRDYDAVPYEFDHLPYLDDVDETDLRKMEEARLAYVAAVNTAKEREDEESLVMAAQARAYLQSLAFTY

SEQ ID NO: 8212 - protein, 268 aa, Arabidopsis thaliana
MVPLIEHYMEHKERSSFKRRGSMIYTKMPSKESLSRRGRNASQTVPGRKKRDQEGNDDVMNNSREDDENAKALAGAEKEEMSRLREQVNDLQTKLSEKEEVLKSMEMSKNQVNEIQEKLEATNRLVAEKDMLIKSMQLQLSDTKIKLADKQAALEKTQWEAKTTGTRAIKLQEQLDAVEGDISTFTRVFETLAKTDSKKPDRDYDAVPYEFDHLPYLDDVDETDLRKMEEARLAYVAAVNTAKEREDEESLVMAAQARAYLQSLAFTY

SEQ ID NO: 8213 - DNA, 1387 bp, Arabidopsis thaliana
ggaggagacgaaaccgagagaaacaatgggagacgctgcgatccgtaccgtcgtcgaagccattcactcatctccgacgcaggccgtcgtctatctttgcggcggtgcctctctggctttaggttggttgatgtcggttcctggagcgtcgaacacgcttctcgagtccgtggttccttattcgagagtatctatggttcaattactcggcagggttccgagccaacactgtagccaagcattggccaaggagatggccttgttagcctacaatcgggcgcttaagctctctaaaccaggatatccggttctcggtgtcgggtttacgggatcattggtaacttctcgtcctaagcgtggagatcacaggttctttttgtctatgagagcatccgaccggattttggaatcttcagtcactctaactaagaacttacggagccgagaagaagaagataaggtgtcaagctgtgcactgatccaggctatggccaaggcatgccaagtttctgggacacttgactctggcttgaccgagtctgaggtgccttatgagtctgaaacccactttactgaagaacaagaactagagcagcttataaatgggcacttgtgctgtaagatttatccattttctggggaagcacacgggtctgatgaagacagaaagattatactacctggctcttttaacccattacatgaaggtcatctcaagctgttagaagttgctatgagtgtttgtgggggcggctacccatgttttgaaatatccgcaataaatgccgacaaaccaccgcttacaattgcacagattaaagatcgtgtcaagcaatttgaagtagttggaaagacgataatagtttcaaatcagccatacttctacaagaaagctgaactcttcccaggaagcagttttgtaattggcgctgacactgcagcgaggcttgtcaatccaaagtactatgaaggaagcatcaaaaggatgttggagatacttggtgattgcaaacggacaggttgcactttccttgttggtggccgcaatgtagatggtgtatttaaggttcttgaagatgttgatattccagaggaaataatcgacatgtttatttcaattccagcagatatattccggatggatatatcctctacagagataagaaaaaaacaagggggtggtacgaactaatgacttctcaacccgcttgaaagtcttggctcgcaagacaatttatttagtgcagttactttttgatttgatatgtattgtgttgcattctgttcttattatggaatccggatcaatggtatgagcatttgcacatgacatcgaaagagcattgcagagttgcatgggaaacgtttaaagagtgcgaatatttgc

SEQ ID NO: 8214 - protein, 396 aa, Arabidopsis thaliana
EETKPRETMGDAAIRTVVEAIHSSPTQAVVYLCGGASLALGWLMSVPGASNTLLESVVPYSRVSMVQLLGRVPSQHCSQALAKEMALLAYNRALKLSKPGYPVLGVGFTGSLVTSRPKRGDHRFFLSMRASDRILESSVTLTKNLRSREEEDKVSSCALIQAMAKACQVSGTLDSGLTESEVPYESETHFTEEQELEQLINGHLCCKIYPFSGEAHGSDEDRKIILPGSFNPLHEGHLKLLEVAMSVCGGGYPCFEISAINADKPPLTIAQIKDRVKQFEVVGKTIIVSNQPYFYKKAELFPGSSFVIGADTAARLVNPKYYEGSIKRMLEILGDCKRTGCTFLVGGRNVDGVFKVLEDVDIPEEIIDMFISIPADIFRMDISSTEIRKKQGGGTN

SEQ ID NO: 8215 - protein, 388 aa, Arabidopsis thaliana
MGDAAIRTVVEAIHSSPTQAVVYLCGGASLALGWLMSVPGASNTLLESVVPYSRVSMVQLLGRVPSQHCSQALAKEMALLAYNRALKLSKPGYPVLGVGFTGSLVTSRPKRGDHRFFLSMRASDRILESSVTLTKNLRSREEEDKVSSCALIQAMAKACQVSGTLDSGLTESEVPYESETHFTEEQELEQLINGHLCCKIYPFSGEAHGSDEDRKIILPGSFNPLHEGHLKLLEVAMSVCGGGYPCFEISAINADKPPLTIAQIKDRVKQFEVVGKTIIVSNQPYFYKKAELFPGSSFVIGADTAARLVNPKYYEGSIKRMLEILGDCKRTGCTFLVGGRNVDGVFKVLEDVDIPEEIIDMFISIPADIFRMDISSTEIRKKQGGGTN

SEQ ID NO: 8216 - protein, 353 aa, Arabidopsis thaliana
MSVPGASNTLLESVVPYSRVSMVQLLGRVPSQHCSQALAKEMALLAYNRALKLSKPGYPVLGVGFTGSLVTSRPKRGDHRFFLSMRASDRILESSVTLTKNLRSREEEDKVSSCALIQAMAKACQVSGTLDSGLTESEVPYESETHFTEEQELEQLINGHLCCKIYPFSGEAHGSDEDRKIILPGSFNPLHEGHLKLLEVAMSVCGGGYPCFEISAINADKPPLTIAQIKDRVKQFEVVGKTIIVSNQPYFYKKAELFPGSSFVIGADTAARLVNPKYYEGSIKRMLEILGDCKRTGCTFLVGGRNVDGVFKVLEDVDIPEEIIDMFISIPADIFRMDISSTEIRKKQGGGTN

SEQ ID NO: 8217 - DNA, 1665 bp, Arabidopsis thaliana
aagagcgggcaaaacaaacagagagcgagtcacgcgccgagttttcctcacttgttctcaataaatctctctctctttcttctctatcgctttcatttttctcctccagatctcgattccaatctctctccctctctacttccttcaacagaaatggaaacgttcctatttacctctgaatccgtcaatgaaggacacccagacaagctttgtgaccagatttctgatgcgatccttgatgcttgcttagagcaagatcctgaaagcaaagtggcgtgtgagacatgcaccaagaccaacatggtgatggtgtttggtgagatcactaccgctgcgaaagttgactatgagaagattgttagatccacttgcagggagattggttttatctctgctgatgttggtcttgacgctgacaaatgcaatgttttggttaacattgagcaacagagccctgacattgctcagggtgttcatggtcatttgaccaagaagcctgaagatattggtgctggtgatcagggacatatgtttgggtatgctactgatgagactcctgagctcatgccgttgactcatgtcctagccaccaagcttggtgctaagcttactgaagtgaggaagaacaagacttgcccatggttgaggcctgatggtaagacacaagtcacagtggagtacaagaacgatggtggagctatgattccgattagagtccacactgttcttatctcaactcaacatgacgaaactgtcaccaatgatgagattgctgctgacttgaaggagcatgtgatcaagcctgttatccctgctaagtaccttgacgataacaccatctttcacttgaacccatctggtcgttttgtcatcggagggcctcatggtgatgctggacttacagggaggaagatcatcattgacacttatggtggttggggtgctcatggtggaggtgccttctcaggaaaggacccaaccaaggttgacagaagcggtgcctatatcgtgaggcaggctgcaaagagcgtggtagcagcaggactcgcacgccgttgtatcgtgcaggtatcatacgccattggtgtccctgagccgctctcagtgtttgttgacacctacaagaccgggaccatcccagacaaggatatccttgtgttgatcaaggaagcatttgacttcaggccgggaatgatggccattaaccttgaccttaagaggggaggtaacttcaggttccagaaaaccgctgcgtatggccatttcgggcgtgatgaccctgacttcacttgggaggttgtcaagccgctcaagccaaaggcctagacagaaacaaagctggcaattgcaagaactgagttgagtcactccccaactactgggaacttatcattataccattattattgcaaatgactgaataaagaaagcttctgcattgtcaccattcacatttgttttcgcgaacacaggccagcggttcatatatctggtaatcgaagattgcaaatgaaagatttgagttttatgttttgaatttttgcctcttttttatttttctttttcttttccctcttaatctcttgtattgtaattttgattgtgtaaccaagaaatccatcctcgtgatgttttttttttataagaaaatatcatgcaagttag

SEQ ID NO: 8218 - protein, 441 aa, Arabidopsis thaliana
KSGQNKQRASHAPSFPHLFSINLSLFLLYRFHFSPPDLDSNLSPSLLPSTEMETFLFTSESVNEGHPDKLCDQISDAILDACLEQDPESKVACETCTKTNMVMVFGEITTAAKVDYEKIVRSTCREIGFISADVGLDADKCNVLVNIEQQSPDIAQGVHGHLTKKPEDIGAGDQGHMFGYATDETPELMPLTHVLATKLGAKLTEVRKNKTCPWLRPDGKTQVTVEYKNDGGAMIPIRVHTVLISTQHDETVTNDEIAADLKEHVIKPVIPAKYLDDNTIFHLNPSGRFVIGGPHGDAGLTGRKIIIDTYGGWGAHGGGAFSGKDPTKVDRSGAYIVRQAAKSVVAAGLARRCIVQVSYAIGVPEPLSVFVDTYKTGTIPDKDILVLIKEAFDFRPGMMAINLDLKRGGNFRFQKTAAYGHFGRDDPDFTWEVVKPLKPKA

SEQ ID NO: 8219 - protein, 390 aa, Arabidopsis thaliana
METFLFTSESVNEGHPDKLCDQISDAILDACLEQDPESKVACETCTKTNMVMVFGEITTAAKVDYEKIVRSTCREIGFISADVGLDADKCNVLVNIEQQSPDIAQGVHGHLTKKPEDIGAGDQGHMFGYATDETPELMPLTHVLATKLGAKLTEVRKNKTCPWLRPDGKTQVTVEYKNDGGAMIPIRVHTVLISTQHDETVTNDEIAADLKEHVIKPVIPAKYLDDNTIFHLNPSGRFVIGGPHGDAGLTGRKIIIDTYGGWGAHGGGAFSGKDPTKVDRSGAYIVRQAAKSVVAAGLARRCIVQVSYAIGVPEPLSVFVDTYKTGTIPDKDILVLIKEAFDFRPGMMAINLDLKRGGNFRFQKTAAYGHFGRDDPDFTWEVVKPLKPKA

SEQ ID NO: 8220 - protein, 341 aa, Arabidopsis thaliana
MVMVFGEITTAAKVDYEKIVRSTCREIGFISADVGLDADKCNVLVNIEQQSPDIAQGVHGHLTKKPEDIGAGDQGHMFGYATDETPELMPLTHVLATKLGAKLTEVRKNKTCPWLRPDGKTQVTVEYKNDGGAMIPIRVHTVLISTQHDETVTNDEIAADLKEHVIKPVIPAKYLDDNTIFHLNPSGRFVIGGPHGDAGLTGRKIIIDTYGGWGAHGGGAFSGKDPTKVDRSGAYIVRQAAKSVVAAGLARRCIVQVSYAIGVPEPLSVFVDTYKTGTIPDKDILVLIKEAFDFRPGMMAINLDLKRGGNFRFQKTAAYGHFGRDDPDFTWEVVKPLKPKA

SEQ ID NO: 8221 - DNA, 1376 bp, Arabidopsis thaliana
gcccctttgcgtgtttcagcttcttctttatgatctaattcatgtctatgtttcgtttgattctttgttcaattctgaattgagaaaatggcgattcgagatctgtctcttcggttttttagttcgactgatttgggaatgtgaagagatcagattgatttgttgacagagtcttgggggttttcaatcttattcctctagattttcgaaattcgattcctttacatcagatttcgcttaattctctgtcctaggtacaacaagaatggaagaagagtatgagagtcgtcgattgaggagatgggaagagttggacactgacatcttagtaagaattttccagaagtttagcgtctttgagttgacttcgggattagctcatgtttgtagaggatggagagctgcttgttgcgatccgattctttggaagacggtggatttgtcaaacatgagatctagtttcatcaagatcccattagagccttatgtctatgtggaacgccgatctgatgaggccctaacccgcatcctgaaactctccatgaaccttagcggaggaagcacgaggaccttgatttttcatttcaacttgttcttgagtgatgatcagcttacttacaccgcagaaaggtgtccagggttgagacgggtcgtcctaccggcttggaacagaataaagaagactggtatatgcaaagcgataagaatctggaaagatctagagtcactaacaatgccaagcatcgcaaacccgccttatctcttaacagaaattgccaagaactgcaagaattttaaagagctgaagatcatgggtccattcgaggtcttctttgcaaacacgctcatcacttgcctcccaaacatcaaaacactcagcatcagatgctcggcgataaagcgggaagcactgatgaaaatccttgacggattaccaagccttgaagtgctcaacatatcacactctcacctagtggagtacagcggttggcagcctcagcagaaggtgattgttagagagctcgataagacgataatggagaaaacagcaaggctaaagaaattcttgacttgcatggatcacaagacgtgtgtgatgtgtcagaggactgaaaacgatgaagggattgtgagatggtacaagtatgaggaaggagactggaaggttgatgaagtgagttctcttcatctttgatgtttctgctgtgatcattctctgtgaaggacttaacttgttattgttctcatctttgactgttgaattgtttatttctttgtgttgtttgttttgatttgaatcgtattatgtgtatatatctgtaggctatgccaatgaatgtatgtagtgatcaacttttgatcaccaccaaccttgc

SEQ ID NO: 8222 - protein, 309 aa, Arabidopsis thaliana
MEEEYESRRLRRWEELDTDILVRIFQKFSVFELTSGLAHVCRGWRAACCDPILWKTVDLSNMRSSFIKIPLEPYVYVERRSDEALTRILKLSMNLSGGSTRTLIFHFNLFLSDDQLTYTAERCPGLRRVVLPAWNRIKKTGICKAIRIWKDLESLTMPSIANPPYLLTEIAKNCKNFKELKIMGPFEVFFANTLITCLPNIKTLSIRCSAIKREALMKILDGLPSLEVLNISHSHLVEYSGWQPQQKVIVRELDKTIMEKTARLKKFLTCMDHKTCVMCQRTENDEGIVRWYKYEEGDWKVDEVSSLHL

SEQ ID NO: 8223 - protein, 248 aa, Arabidopsis thaliana
MRSSFIKIPLEPYVYVERRSDEALTRILKLSMNLSGGSTRTLIFHFNLFLSDDQLTYTAERCPGLRRVVLPAWNRIKKTGICKAIRIWKDLESLTMPSIANPPYLLTEIAKNCKNFKELKIMGPFEVFFANTLITCLPNIKTLSIRCSAIKREALMKILDGLPSLEVLNISHSHLVEYSGWQPQQKVIVRELDKTIMEKTARLKKFLTCMDHKTCVMCQRTENDEGIVRWYKYEEGDWKVDEVSSLHL

SEQ ID NO: 8224 - protein, 217 aa, Arabidopsis thaliana
MNLSGGSTRTLIFHFNLFLSDDQLTYTAERCPGLRRVVLPAWNRIKKTGICKAIRIWKDLESLTMPSIANPPYLLTEIAKNCKNFKELKIMGPFEVFFANTLITCLPNIKTLSIRCSAIKREALMKILDGLPSLEVLNISHSHLVEYSGWQPQQKVIVRELDKTIMEKTARLKKFLTCMDHKTCVMCQRTENDEGIVRWYKYEEGDWKVDEVSSLHL

SEQ ID NO: 8225 - DNA, 926 bp, Arabidopsis thaliana
acaattcagatttcaatttctcaaaaatcttaaaaactttctctcaattctctctaccgtgatcaagatgcagattttcgttaagactctcaccggaaagactatcaccctcgaggtggaaagctctgacaccatcgacaacgttaaggccaagatccaggataaggaaggtattcctccggatcagcagaggcttatcttcgccggaaagcagttggaggatggccgcacgttggcggattacaatatccagaaggaatccaccctccacttggttctcaggctccgtggtggtatgcagattttcgttaaaaccctaacgggaaagacgattactcttgaggtggagagctctgacaccattgacaacgtcaaggccaagatccaagataaggagggtattcctccggaccagcagaggttgatcttcgccggaaagcagttggaggatggcagaactcttgctgactacaacatccagaaggagtctacccttcatcttgttctcaggcttcgtggtggtatgcagatctttgtcaagacgttgactggaaaaactatcacttttggagggtggagagttcttgacaccattgataacgtgaaagccaagatccaggacaaaagagggtattccaccggaccagcagcgtctcatcttcgctggaaagcagcttgaggatggacgtacattggccgactacaacatccagaaggagtctacccttcacttggtcctccgtcttcgtggaggtttctaaatctcgtctctgttatgctttaagaagttcaatgtctcgtttctgttaaaactttggtggcttgtgttttggggccttgtataatcccctgatgaataattgttccaactatgtttccattcctgttatctctttctttctaatgacaagtcgaacgtcttcttg

SEQ ID NO: 8226 - protein, 225 aa, Arabidopsis thaliana
QFRFQFLKNLKNFLSILSTVIKMQIFVKTLTGKTITLEVESSDTIDNVKAKIQDKEGIPPDQQRLIFAGKQLEDGRTLADYNIQKESTLHLVLRLRGGMQIFVKTLTGKTITLEVESSDTIDNVKAKIQDKEGIPPDQQRLIFAGKQLEDGRTLADYNIQKESTLHLVLRLRGGMQIFVKTLTGKTITFGGWRVLDTIDNVKAKIQDKRGYSTGPAASHLRWKAA

SEQ ID NO: 8227 - protein, 203 aa, Arabidopsis thaliana
MQIFVKTLTGKTITLEVESSDTIDNVKAKIQDKEGIPPDQQRLIFAGKQLEDGRTLADYNIQKESTLHLVLRLRGGMQIFVKTLTGKTITLEVESSDTIDNVKAKIQDKEGIPPDQQRLIFAGKQLEDGRTLADYNIQKESTLHLVLRLRGGMQIFVKTLTGKTITFGGWRVLDTIDNVKAKIQDKRGYSTGPAASHLRWKAA

SEQ ID NO: 8228 - protein, 127 aa, Arabidopsis thaliana
MQIFVKTLTGKTITLEVESSDTIDNVKAKIQDKEGIPPDQQRLIFAGKQLEDGRTLADYNIQKESTLHLVLRLRGGMQIFVKTLTGKTITFGGWRVLDTIDNVKAKIQDKRGYSTGPAASHLRWKAA

SEQ ID NO: 8229 - DNA, 1147 bp, Arabidopsis thaliana
attaaattcgcttttttttttcttctttgtatatttttttttttttgaccatggcggaggaatttggaagcatagatttactcggagatgaagatttcttcttcgatttcgatccttcaatcgtaattgattctcttccggcggaggattttcttcagtcttcaccggattcatggatcggagaaatcgagaatcaattgatgaacgatgagaatcatcaagaggagagttttgtggaattggatcagcaatcggtttcagatttcatagcggatctactcgttgattatccaactagcgattctggctccgttgatttggcggctgataaagttctaaccgtcgattctcccgccgccgctgatgattccgggaaggagaattcggatttggttgttgagaagaagtctaatgattctggtagcgagattcatgatgatgatgacgaagaaggagacgatgatgctgtggctaaaaaacgaagaaggagagtaagaaatagagatgcggcggttagatcgagagagaggaagaaggaatatgtacaagatttagagaagaagagtaagtatctcgaaagagaatgcttgagactaggacgtatgcttgagtgcttcgttgctgaaaaccagtctctacgttactgtttgcaaaagggtaatggcaataatactaccatgatgtcgaagcaggagtctgctgtgctcttgttggaatccctgctgttgggttccctgctttggcttctgggagtaaacttcatttgcctattcccttatatgtcccacacaaagtgttgcctcctacgtccagaaccagaaaagctggttctaaacgggctcgggagtagtagcaaaccgtcttataccggcgttagtcggagatgtaagggttcgaggcctaggatgaaataccaaatcttaacccttgcggcgtgacaacgccttttttaactgcttcttttgcgcattttgagttgtagatgagtgtcttttagttttctctctcttgttttgtatttcgctgttgaaagttttctgtctaatatcgataagttaacagtgaatgtgggtcttatggttatggatgatatctatctaataatgcttctgcctttaaaatgttgattttgaggcataacttcagg

SEQ ID NO: 8230 - protein, 295 aa, Arabidopsis thaliana
MAEEFGSIDLLGDEDFFFDFDPSIVIDSLPAEDFLQSSPDSWIGEIENQLMNDENHQEESFVELDQQSVSDFIADLLVDYPTSDSGSVDLAADKVLTVDSPAAADDSGKENSDLVVEKKSNDSGSEIHDDDDEEGDDDAVAKKRRRRVRNRDAAVRSRERKKEYVQDLEKKSKYLERECLRLGRMLECFVAENQSLRYCLQKGNGNNTTMMSKQESAVLLLESLLLGSLLWLLGVNFICLFPYMSHTKCCLLRPEPEKLVLNGLGSSSKPSYTGVSRRCKGSRPRMKYQILTLAA

SEQ ID NO: 8231 - protein, 245 aa, Arabidopsis thaliana
MNDENHQEESFVELDQQSVSDFIADLLVDYPTSDSGSVDLAADKVLTVDSPAAADDSGKENSDLVVEKKSNDSGSEIHDDDDEEGDDDAVAKKRRRRVRNRDAAVRSRERKKEYVQDLEKKSKYLERECLRLGRMLECFVAENQSLRYCLQKGNGNNTTMMSKQESAVLLLESLLLGSLLWLLGVNFICLFPYMSHTKCCLLRPEPEKLVLNGLGSSSKPSYTGVSRRCKGSRPRMKYQILTLAA

SEQ ID NO: 8232 - DNA, 1452 bp, Arabidopsis thaliana
gagtctaatcaaatgtgccttaatttacaaaaatgacttctcacgactcacgccattaaactccacgtacacctttccctttcactttcatcttcttcttccctcgattcaatgggttatctctcctgcaaagctggatccgccgtcgcaatcgccgtttcatctgccgcatcaacctccggatccacctccagcaaagcttctgctcctcccgaatctcccattgaagaccgtcctagacttcgtcgtttcctccatcgcgatctcgaatcagccacaggaggtttcgacatcaacaatctcctcggacgtggaagccatggaagcgtttacaaagctgtcatcggttcacgtcacatcgcggtcaagagaccttcgaaatctcgagaaatcagccgtgagttccacaacgaattcgagattctctccagaatccgtagccctaggtttgtgaatctcttaggttttagcgccgataactccaaagaaccacttctcgttgttgaattcatgggaaacggaagcttatacgacgtgattcactcagataccgttttaaactccggtgcgatttcgagctggagtaagagaatcaaaatcgctcttcagattgcaaaagccgtacatcttctacattctcaagagacaccgatcatacacagagatataaaatcagcaaacgtattgatggataagaatctaaacgcgaagctaggcgatttcggattagcgatcagatgcaatgttgatgatcaaaaagtgaaatcaacaccacctgcaggaacaatgggttacttagatccagattacgtaacggctgatagattaagcacgaaaactgatgtgtttagcttcgggatcttgttgttagagataatcagcggaagaaaagcaatcgacgttagatattcgccgtcgtttatagtagattgggcgattccgatgataaaaagaggcaaaatcggtgggatttatgatccgagaatcggaccaccgattgatgtaagtgtgaggaatcatttggggttagtggcggctaagtgtgtgagaacgtgtagagagaaacggccggggatggaggaagtggttgggtggctcacggggttgactaagtcggttaggtcacgacggtgggatgagttaagcattggaaacccgtgtatgatggtcgagacggtgggtggtcgacccgtggaatgattttttatttgtttaaaatcaagtgcttcgctttgaagccattgttttttctcttatgggttggtcaatttattcatttaacataataaagcatatactgtaacatcatggttgcatatggtatttgactggatcatcatattcataactaccgcttgttctaaaaacatgccatgtaaagccttttgcactagtgcataactttctcatatcacaagttttttagcatctctttgtagagttggaactttc

SEQ ID NO: 8233 - protein, 362 aa, Arabidopsis thaliana
MGYLSCKAGSAVAIAVSSAASTSGSTSSKASAPPESPIEDRPRLRRFLHRDLESATGGFDINNLLGRGSHGSVYKAVIGSRHIAVKRPSKSREISREFHNEFEILSRIRSPRFVNLLGFSADNSKEPLLVVEFMGNGSLYDVIHSDTVLNSGAISSWSKRIKIALQIAKAVHLLHSQETPIIHRDIKSANVLMDKNLNAKLGDFGLAIRCNVDDQKVKSTPPAGTMGYLDPDYVTADRLSTKTDVFSFGILLLEIISGRKAIDVRYSPSFIVDWAIPMIKRGKIGGIYDPRIGPPIDVSVRNHLGLVAAKCVRTCREKRPGMEEVVGWLTGLTKSVRSRRWDELSIGNPCMMVETVGGRPVE

SEQ ID NO: 8234 - protein, 229 aa, Arabidopsis thaliana
MGNGSLYDVIHSDTVLNSGAISSWSKRIKIALQIAKAVHLLHSQETPIIHRDIKSANVLMDKNLNAKLGDFGLAIRCNVDDQKVKSTPPAGTMGYLDPDYVTADRLSTKTDVFSFGILLLEIISGRKAIDVRYSPSFIVDWAIPMIKRGKIGGIYDPRIGPPIDVSVRNHLGLVAAKCVRTCREKRPGMEEVVGWLTGLTKSVRSRRWDELSIGNPCMMVETVGGRPVE

SEQ ID NO: 8235 - DNA, 636 bp, Arabidopsis thaliana
  misc_feature (66)..(66): n is a, c, g, or t
gaaacactatcgaacctcaaaatctctgttgccggaaattttcttcaccgaaactgaaagaagtcnaaagagagaagagaagaaattgaagcaatggagggagcagaggaagctggggctgagatagcggttgattcaaaggacttgcagcaacaaagcaaagctttcgacaagctcaccgatcgtgtcgaggatcgccagctcgattcctctcgtgttcaatcggctatggcttcgattgctgcttctagggaggctgatctgaatgctaagaggttgagggagaaagaactggcctctgtgaagatcaatcctgcagatgttgagtttattgtaaacgaacttgagatagaaaagaatgtggcggaaagaactctaagggagcacaaaggtgatgcggttgctgcgactaggcaattgctttcacgatatcctctatgatggagcaggaccattctttacttccaaggttttttgtatgtttgagaggttgagagcaagtctcctaatatttaaccgagttaaaattgtctattggtgaaccgatctctttgagaagccctgaatccagttacaatcgattttggggtggtgttttgtggttctatctgaagtttgaagttcaatcttattatc

SEQ ID NO: 8236 - protein, 115 aa, Arabidopsis thaliana
MEGAEEAGAEIAVDSKDLQQQSKAFDKLTDRVEDRQLDSSRVQSAMASIAASREADLNAKRLREKELASVKINPADVEFIVNELEIEKNVAERTLREHKGDAVAATRQLLSRYPL

SEQ ID NO: 8237 - protein, 70 aa, Arabidopsis thaliana
MASIAASREADLNAKRLREKELASVKINPADVEFIVNELEIEKNVAERTLREHKGDAVAATRQLLSRYPL

SEQ ID NO: 8238 - DNA, 1154 bp, Arabidopsis thaliana
atagaccaatacagagatacaaagcaatagaacaacaagaacaagatcacaagaacaagaaaacagagaaaaaaacaatggctgccttgtcggataagttagcggatgcataccagaacgcaaggccgagatatccgatcgattggttcacgaaacttgctgctcgaaccggtcagcacaaatcagcttgggatgttggtactggcaacggtcaagcagctattggtcttgcagagtatttcgagaaagttacagcaaccgacataaacgaagcacagttaaaacgagcggtaaaacacgaaagaatcagttaccatcacactcccacaacaatgtccgaagaccaaatgggttgctctagtcggcggagataactccgttgatctaatcgtggcagcaagccgttcactacttcgatctcgcaccattctacaacgtagcaaaacgtgttcttcgcaaagaaggaggattaatcgcaggtttttgtctacaacgacataatcatcttctcctgaagttgattccatcatgaaacttcttgtgggactccacgttcccgtttagaactcctgtaatgaatcttgctttcgacggttacaaaacgttgccgtttccgtttgaaagtatagggatgggatcagaagggaagcctataatgcttggaaattcctcataagctatcgcttaaagggtttatcggtttcttgagatcgtggcagcccgcaatgaaagctaaagaacgtggagttgagcttgtgactgaagatttgatctccaaatttgaagatgcttggggtgatgatgatgatgttaaagatattttctacaaagctcatatgattgttggaaaactttcggcttcagatatagagcggcatcgaaagagatttgatacgaactgcgtagttacaacactaaaggatcataacaactcggctgttattgcttcagtgactgctgctgcatttgctggagtggcggcttactgtgcttactctgcaaggaagaacagttagatcctttgaaggacaaagaaacggttttctgaatctagtgaatgaaatcttttttattttacatgttgacatgttgtcatgtatttatttatgtcattgatatgagatggttaagtaatatctaaagatttaagagtc

SEQ ID NO: 8239 - protein, 123 aa, Arabidopsis thaliana
RPIQRYKAIEQQEQDHKNKKTEKKTMAALSDKLADAYQNARPRYPIDWFTKLAARTGQHKSAWDVGTGNGQAAIGLAEYFEKVTATDINEAQLKRAVKHERISYHHTPTTMSEDQMGCSSRRR

SEQ ID NO: 8240 - protein, 98 aa, Arabidopsis thaliana
MAALSDKLADAYQNARPRYPIDWFTKLAARTGQHKSAWDVGTGNGQAAIGLAEYFEKVTATDINEAQLKRAVKHERISYHHTPTTMSEDQMGCSSRRR

SEQ ID NO: 8241 - protein, 96 aa, Arabidopsis thaliana
MKAKERGVELVTEDLISKFEDAWGDDDDVKDIFYKAHMIVGKLSASDIERHRKRFDTNCVVTTLKDHNNSAVIASVTAAAFAGVAAYCAYSARKNS

SEQ ID NO: 8242 - DNA, 925 bp, Arabidopsis thaliana
atctcactgctcactactctcactgtaatcccttagatcttcttttcaaatttcaatggcgtccggtgatgtagagtatcggtgcttcgttggaggtctagcatgggccactgatgacagagctcttgagactgccttcgctcaatacggcgacgttattgattccaaggtctgttacacgccgagatcggactccgagtgatatcgatgatctcatcctcgacggatctgttccgatcttgtgtttctctgttacttgattcgattactctgttactattctcgttctttgttactactactactactactgttacttgtattttcccaaatcgatcattaacgatcgtgagactggaagatcaaggggattcggattcgtcaccttcaaggatgagaaagccatgaaggatgcgattgagggaatgaacggacaagatctcgatggccgtagcatcactgttaacgaggctcagtcacgaggaagcggtggcggcggaggccaccgtggaggtggtggcggtggataccgcagcggcggtggtggagggtacttccggtggaggtggtagctacggaggtggcggcggtagacgcgagggtggaggaggatacagcggcggcggcggttactcctcaagaggtggtggtggcggaagctacggtggtggaagacgtgagggaggaggaggatacggtggtggtgaaggaggaggttacggaggaagcggtggtggtggaggatggtaattcctttaattaggtttgggattaccaatgaatgttctctctctcgcttgttatgcttctacttggttttgtgtgttctctattttgttctggttctgctttagatttgatgtaacagttcgtgattaggtattttggtatctggaaacgtaatgttaagtcacttgtcattctc

SEQ ID NO: 8243 - protein, 101 aa, Arabidopsis thaliana
MAVASLLTRLSHEEAVAAEATVEVVAVDTAAAVVEGTSGGGGSYGGGGGRREGGGGYSGGGGYSSRGGGGGSYGGGRREGGGGYGGGEGGGYGGSGGGGGW

SEQ ID NO: 8244 - protein, 66 aa, Arabidopsis thaliana
MISSSTDLFRSCVSLLLDSITLLLFSFFVTTTTTTVTCIFPNRSLTIVRLEDQGDSDSSPSRMRKP

SEQ ID NO: 8245 - protein, 55 aa, Arabidopsis thaliana
MKDAIEGMNGQDLDGRSITVNEAQSRGSGGGGGHRGGGGGGYRSGGGGGYFRWRW

SEQ ID NO: 8246 - DNA, 1248 bp, Arabidopsis thaliana
accatccatccaacttgtaactctctttctctatttcttctccattctgtttgctctgcaacatcttttagggtttattattgttggtttcttcattttctttctctaaaatatttgcagaggaagagagagagagagagagagatcatgggaatatatggagtgatgacagggaaaaaaggaaagagtgggtttggatctgcttctactgctgaagatgttactcaagccattgatgccagtcatctcactgccatcatcacaggtggaacaagtgggattggattggaggcagctagagtgttagcaatgagaggagctcatgtcatcattgccgcaagaaacccaaaagctgctaatgagtctaaagagatgattcttcagatgaaccctaatgctcgcgtcgactatctccagatcgatgtctcttccatcaaatcagtcagatccttcgttgatcagtttcttgcccttaatgttcctctcaacattctcataaacaatgcaggtgttatgttttgtcctttcaagctcaccgaagatgggattgaatcacaattcgcaacaaaccacattggtcattttctgttgacgaatctgcttctggacaaaatgaaaagtaccgcaaggagaaagtggagtccaaggaaggattgtgaatctgtcatctattgctcatacttatacttactctgaaggtatcaagttccaaggcatcaatgaccctgctggatattcggagagaagggcttatggacagtccaaactctcaaacttggttgcactccaatgcactctctcgtagactacaggaagaaggtgtgaacatcactataaattcggtgcaccctggtcttgtcaccactaatctctttcgctactccggttttagcatgaaggtcttcagggctatgactttcctcttttggaaaaatatacctcagggagcagcaacaacatgctacgttgcacttcatccagatctcgaaggcgtcaccggaaagtatttcggcgactgtaacatcgttgctccgagcaaatttgctaccaacaattctctcgccgataaactttgggatttcagtgtctttctcatcgattctatctctaaataatctatcatcatcaagacaaattcttagacattcaaaatttatttatccttcttgatattgttacattaatgccatatctttttcaccaccacatatttctttatggaataccataatttagaaatcattattc

SEQ ID NO: 8247 - protein, 231 aa, Arabidopsis thaliana
TIHPTCNSLSLFLLHSVCSATSFRVYYCWFLHFLSLKYLQRKREREREIMGIYGVMTGKKGKSGFGSASTAEDVTQAIDASHLTAIITGGTSGIGLEAARVLAMRGAHVIIAARNPKAANESKEMILQMNPNARVDYLQIDVSSIKSVRSFVDQFLALNVPLNILINNAGVMFCPFKLTEDGIESQFATNHIGHFLLTNLLLDKMKSTARRKWSPRKDCESVIYCSYLYLL

SEQ ID NO: 8248 - protein, 182 aa, Arabidopsis thaliana
MGIYGVMTGKKGKSGFGSASTAEDVTQAIDASHLTAIITGGTSGIGLEAARVLAMRGAHVIIAARNPKAANESKEMILQMNPNARVDYLQIDVSSIKSVRSFVDQFLALNVPLNILINNAGVMFCPFKLTEDGIESQFATNHIGHFLLTNLLLDKMKSTARRKWSPRKDCESVIYCSYLYLL

SEQ ID NO: 8249 - protein, 176 aa, Arabidopsis thaliana
MTGKKGKSGFGSASTAEDVTQAIDASHLTAIITGGTSGIGLEAARVLAMRGAHVIIAARNPKAANESKEMILQMNPNARVDYLQIDVSSIKSVRSFVDQFLALNVPLNILINNAGVMFCPFKLTEDGIESQFATNHIGHFLLTNLLLDKMKSTARRKWSPRKDCESVIYCSYLYLL

SEQ ID NO: 8250 - DNA, 958 bp, Arabidopsis thaliana
aattgcaaatcaaatggatcgtcttaagctttatttctccgttttcgttttgtctttctttatcgtctcggtttcgtcgtctgatgtcaacgacggcgatgatctcgtgatccgtcaggtggttggtggagccgagcctcaggttttgacctcagaggatcacttttctctctttggaaggtgctaacttcctcgctaccggcaaactcgtcagcctcagcgaacaacagctcgtcgactgtgatcacgagtgtgatcccgaggaggcagattcctgcgactctggttgcaatggtgggctaatgaacagcgcttttgaatacaccctcaaaaccggagggctcatgaaagaagaagactatccttacaccggaaaggacggcaagacctgcaagctagacaagtccaagatcgttgcctctgtctccaacttcagtgttatctccattgatgaagaacagattgctgcaaaccttgtcaagaacggacctcttgctgtagccatcaacgctggctatatgcagacttacattggaggagtctcatgcccttacatatgcaccaggaggctcaaccacggtgtcttattggttggctatggagcggcaggttacgctccggctaggttcaaggagaagccttactggatcatcaagaactcgtggggagagacttggggtgaaaatggtttctacaaaatctgcaaaggccgtaacatttgtggtgttgacagtatggtctccactgttgcagccaccgtctcaaccaccgcccattaagcatctcgtcaataagttttaattactttggtgatttgtatgagcgagctctctttgcgctgctgactctctctatttatctctgcttcttgcttgtaaataaaatgcgttctattgagcaaaaccgtacaatgctcattagcaatgagcccactttaacaagtatcagtttatggctc

SEQ ID NO: 8251 - protein, 158 aa, Arabidopsis thaliana
MNSAFEYTLKTGGLMKEEDYPYTGKDGKTCKLDKSKIVASVSNFSVISIDEEQIAANLVKNGPLAVAINAGYMQTYIGGVSCPYICTRRLNHGVLLVGYGAAGYAPARFKEKPYWIIKNSWGETWGENGFYKICKGRNICGVDSMVSTVAATVSTTAH

SEQ ID NO: 8252 - protein, 144 aa, Arabidopsis thaliana
MKEEDYPYTGKDGKTCKLDKSKIVASVSNFSVISIDEEQIAANLVKNGPLAVAINAGYMQTYIGGVSCPYICTRRLNHGVLLVGYGAAGYAPARFKEKPYWIIKNSWGETWGENGFYKICKGRNICGVDSMVSTVAATVSTTAH

SEQ ID NO: 8253 - protein, 86 aa, Arabidopsis thaliana
MQTYIGGVSCPYICTRRLNHGVLLVGYGAAGYAPARFKEKPYWIIKNSWGETWGENGFYKICKGRNICGVDSMVSTVAATVSTTAH

SEQ ID NO: 8254 - DNA, 1013 bp, Arabidopsis thaliana
  misc_feature (450)..(450): n is a, c, g, or t
  misc_feature (484)..(484): n is a, c, g, or t
  misc_feature (584)..(584): n is a, c, g, or t
  misc_feature (603)..(603): n is a, c, g, or t
  misc_feature (633)..(633): n is a, c, g, or t
  misc_feature (657)..(657): n is a, c, g, or t
  misc_feature (723)..(723): n is a, c, g, or t
  misc_feature (759)..(759): n is a, c, g, or t
  misc_feature (876)..(876): n is a, c, g, or t
  misc_feature (957)..(958): n is a, c, g, or t
  misc_feature (990)..(991): n is a, c, g, or t
acaaaatttcagctcctccatatccatcaagaaagatcaagaatcaagaactaatcaatatcgatcgatccgttaaaaaaaaatggatatgattccccaattgatggaaggctcttcagcttacggaggtgtcacaaacctcaacatcatctcaaacaactcctcctccgtcaccggagccaccggaggtgaagcaacgcaaccactgtcttcctcctcctcaccatcggcgaactcaagccgttacgagaaccacaagaggagagactggaacacgttcggacagtacttaaggaaccatcggccaccgctttcgctttcccgatgcagtggagctcacgtgctcgagtttcctccgttacttggaccaagttcggtaagacaaaagttcacacggaacatttgtcacttctatggccatcctaatcctccggcaccgtgtcgggggcntgtccgacaagcttgggggaagtcttgacgctcntatcggtcgtcttcgagctgcctttgaggaaaacggaggcaagcttgagactgaatccttttggagctcgtgccgttaggctttatctaagggaagttanagatatgcagagtacagcnagaggtgttagctacgagaagaagaagcgnaagcgtcctcttccttcgtcgtcnacgtcttcttcctccgccgtagctagccaccagcaatttcaaatgctaccgggtactagttctacntactcaattaaagtttgagaagtaagtaattatatnattaagagaaatggagtattttatgtaatctgaaatgtgaattggtctctttcttatatgttgattttaattttaggttatgtggttcagttttagttactagtgtatgctgggggnaggaaggtagggttttcaattttatttatatctaataaaagagaaattcacatgtattaatgtgtacatatttatataccnnagtatctatgtatcatgactatcatcatcatnnttatattggtcttcttttttcc

SEQ ID NO: 8255 - protein, 131 aa, Arabidopsis thaliana
  misc_feature (123)..(123): Xaa can be any naturally occurring amino acid
MDMIPQLMEGSSAYGGVTNLNIISNNSSSVTGATGGEATQPLSSSSSPSANSSRYENHKRRDWNTFGQYLRNHRPPLSLSRCSGAHVLEFPPLLGPSSVRQKFTRNICHFYGHPNPPAPCRGXVRQAWGKS

SEQ ID NO: 8256 - protein, 129 aa, Arabidopsis thaliana
  misc_feature (121)..(121): Xaa can be any naturally occurring amino acid
MIPQLMEGSSAYGGVTNLNIISNNSSSVTGATGGEATQPLSSSSSPSANSSRYENHKRRDWNTFGQYLRNHRPPLSLSRCSGAHVLEFPPLLGPSSVRQKFTRNICHFYGHPNPPAPCRGXVRQAWGKS

SEQ ID NO: 8257 - protein, 124 aa, Arabidopsis thaliana
  misc_feature (116)..(116): Xaa can be any naturally occurring amino acid
MEGSSAYGGVTNLNIISNNSSSVTGATGGEATQPLSSSSSPSANSSRYENHKRRDWNTFGQYLRNHRPPLSLSRCSGAHVLEFPPLLGPSSVRQKFTRNICHFYGHPNPPAPCRGXVRQAWGKS

SEQ ID NO: 8258 - DNA, 605 bp, Arabidopsis thaliana
atcaatcaaagctaaaagaacttattctctcacaaacttcaaatcctcatcatcctttttgaatcatcaatcatgtcgcaacaacaattcaacgccggacagaacagaggccaagctcaagagaaagctgagcaatggaccgagtctgcgaagcaaaccgcacagtccgcatgtgacaaaactgctgatttgacacaatcagcacgtgacaaggctgcagatttgacacaatcagctcgtgacaaaaccgctgatggatctcattccgctaacaaatctgcacaacataaccaggaacaagccgctggtttattcggccagaccggtgaatcagtgaagaacatggctcagggtgctcttgacggtgtgaagaacagtcttggcatgaacgagaagaaatgagaatttatacttctcaactattttatttaaaatatttatgaataatttcttgttttggaagttttgggtttctccaaattatgtttgtaataagattatttgttttgaaaggttttgtgatcatgtaatccgaaatctgagatgtaataagatgttgtaacatcacagcctttgtctattttaaaggaatgaaccaaattaac

SEQ ID NO: 8259 - protein, 109 aa, Arabidopsis thaliana
MSQQQFNAGQNRGQAQEKAEQWTESAKQTAQSACDKTADLTQSARDKAADLTQSARDKTADGSHSANKSAQHNQEQAAGLFGQTGESVKNMAQGALDGVKNSLGMNEKK

SEQ ID NO: 8260 - protein, 63 aa, Arabidopsis thaliana
SIKAKRTYSLTNFKSSSSFLNHQSCRNNNSTPDRTEAKLKRKLSNGPSLRSKPHSPHVTKLLI

SEQ ID NO: 8261 - DNA, 875 bp, Arabidopsis thaliana
aaaataccaagcaaccaatttcttgcaattttcctctcctcccaaccaaaacacaagagccaagaacaaagaaaccatggatcatgatcacatgcatggaatgcctcgaccatcatcatcatcatcatcatcaccatcatccatgatgaacaatggatccatgaacgaaggaggaggacatcaccacatgaagatgatgatgcacatgaccttcttttggggcaagaacacggaggttctcttctccggttggcccggaacaagctccggcatgtatgctctttgtcttatctttgtcttctttctcgccgtcctcaccgaatggcttgctcattcctctctcctccgtggctccaccggagattcggctaatcgtgccgccgggttaatccaaaccgccgtgtataccctccgtatcggcctcgcctatctagtcatgctcgccgtcatgtcgtttaacgccggtgtgtttctcgtcgctctggccggtcatgccgttggtttcatgttgttcggaagccaaactttccggaatacctccgatgaccggaaaactaactatgttcctccctcaggttgtgcttgttgatgataatatcaatgctttatatatatgtatggattgatccatgcttgtgattcaaattaaagatctagggtttgtagttttcttggttattttatggattgttcttgaggttcatgtgtgtgtgaatgtgaggaggaggaatatttgatattttctatcgtttgcttaattttttttgcttttgttttattctgctggctaatggtgaaagctgagtatacaatttactacttttgggctccaatttgtttttttttttctctcagaatttcatatataatttctt

SEQ ID NO: 8262 - protein, 195 aa, Arabidopsis thaliana
KYQATNFLQFSSPPNQNTRAKNKETMDHDHMHGMPRPSSSSSSSPSSMMNNGSMNEGGGHHHMKMMMHMTFFWGKNTEVLFSGWPGTSSGMYALCLIFVFFLAVLTEWLAHSSLLRGSTGDSANRAAGLIQTAVYTLRIGLAYLVMLAVMSFNAGVFLVALAGHAVGFMLFGSQTFRNTSDDRKTNYVPPSGCAC

SEQ ID NO: 8263 - protein, 170 aa, Arabidopsis thaliana
MDHDHMHGMPRPSSSSSSSPSSMMNNGSMNEGGGHHHMKMMMHMTFFWGKNTEVLFSGWPGTSSGMYALCLIFVFFLAVLTEWLAHSSLLRGSTGDSANRAAGLIQTAVYTLRIGLAYLVMLAVMSFNAGVFLVALAGHAVGFMLFGSQTFRNTSDDRKTNYVPPSGCAC

SEQ ID NO: 8264 - protein, 165 aa, Arabidopsis thaliana
MHGMPRPSSSSSSSPSSMMNNGSMNEGGGHHHMKMMMHMTFFWGKNTEVLFSGWPGTSSGMYALCLIFVFFLAVLTEWLAHSSLLRGSTGDSANRAAGLIQTAVYTLRIGLAYLVMLAVMSFNAGVFLVALAGHAVGFMLFGSQTFRNTSDDRKTNYVPPSGCAC

SEQ ID NO: 8265 - DNA, 738 bp, Arabidopsis thaliana
gtttcgtgtttggtcatcggtgttccgtgtttctcccaaacttttattacacgaacacaacaaaacaacacaagtgagagaaccctagattcttcttctattcccttcttccttcaagtcctttttatttctctaccaacctcgaaaacgaatcaagagattagcatcttatcgagatttaaaccatcaattaatcggctgccatggctgggagactacttgcaaatttgattgtgatgggttctgggatcattggtcgtgctgtctttcaagcctatcgtcaagcacttgctaatgcgtctaaatctggtgttgcgcaggaagcaatgcaaaatggagtacgtcaagcagggaaagccatcactgagcaagaggctaggcagattcttggtgtaaccgagaagacctcttgggaagagatattacagaaatatgacaaactgtttgagaataatgcgaaagcagggagcttttaccttcaatctaaagttcatcgagccaaagaatgtctagaagttgtgtacagaagccaaggcaacggtacacctagttaagaccttactctttttgttttccagactcaaaattcttgctcttaatgtaaaatcaagacgagttcatggtttctttgagatgatgtggaacttacaaaacggccatagttttcttcacacattaaattagtaataactaagacaggtttgctctgatcagttgatcagtgtcaaagaacctctg

SEQ ID NO: 8266 - protein, 116 aa, Arabidopsis thaliana
MAGRLLANLIVMGSGIIGRAVFQAYRQALANASKSGVAQEAMQNGVRQAGKAITEQEARQILGVTEKTSWEEILQKYDKLFENNAKAGSFYLQSKVHRAKECLEVVYRSQGNGTPS

SEQ ID NO: 8267 - protein, 105 aa, Arabidopsis thaliana
MGSGIIGRAVFQAYRQALANASKSGVAQEAMQNGVRQAGKAITEQEARQILGVTEKTSWEEILQKYDKLFENNAKAGSFYLQSKVHRAKECLEVVYRSQGNGTPS

SEQ ID NO: 8268 - protein, 76 aa, Arabidopsis thaliana
VSCLVIGVPCFSQTFITRTQQNNTSERTLDSSSIPFFLQVLFISLPTSKTNQEISILSRFKPSINRLPWLGDYLQI

SEQ ID NO: 8269 - DNA, 1836 bp, Arabidopsis thaliana
gtagttgcaaacaccgatcagtcacagacagtagcctctcaccatcaccaccacggcggccgtcaccgacgccgatacaccatgaaattacatttacaccctctctcacttgtcttcttctttttcttcttcttcttccgaccgacaatgtcgtcgaaccagcacgattactccgacgcactctcaaaatcaattctcttcttcgaaggccagcgctccggttacctcccaaacgaccagcgtatgacctggcgccgtaactccggtctgagcgacggttggacacacaacatcgatttaaccggcggttattacgacgccggagacaacgtcaaattcaatttcccgatggctttcaccaccacaatgctcgcctggagcgtaattgagttcggcgaattcatgccttcgtcggagctacgtaactctctcgtggctctccggtggagctctaattacctcctcaaatccgtttcacagctacctaaccggatcttcgtccaggtaggtgatccgatagcagatcataattgctgggaaagaccagaagacatggatacaccacggactgcttacgccgttaatgccccgaatccggcttctgaagttgccggagaaactacggcggccctctcagctgcttcgattgctttccgatcatcggatccaggatactctcaaacattgctccaaaatgctgtcaaaacttttcagttcgctgatatgtatcgcggtgcttatagcagcaatgacgatatcaaaaatgatgtgtgtcctttctactgcgatttcaacggatttcaggatgagttattgtggggagcagcttggctaagaaaagcgactggtgatgaaagctaccttaattacatagagagtaaccgtgaaccgtttggtgctaacgataacgtagacgaatttggctgggacaacaaagttggtggacttaatgttctcgtttcgaaggaagttattgaaggaaatatgtacaacttagaggcgtacaaggcatcagcagagagcttcatgtgtagtctggtcccggaatcttcgggaccgcatgttgagtatacttccgctggtctactttacaagcccggcggtagccagctccaacatgcgaccaccatatctttcctcctcctcgtatacgctcaatatctttcaagaagctctctctccctcaattgcggcacccttaccgtccctcctgattatctccgccgtcttgccaagaaacaggtggactatatattggggaataatccgatgggattatcgtacatggtcggatacggagagagatatccaaagaggatccatcaccgtggctcatcattgccatcgattgtggaccatccagaagccatcagatgcaaagacgggtcggtttatttcaattctaccgaaccgaacccgaacgttttgattggagcggtggtgggtgggcccggagaggacgatatgtacgatgatgatcggtccgatttccgcaagtccgagcccactacttacatcaatgctcctttcgttggcgttttggcgtactttgcagccaatcctggttctagctaagctgacgacatgggagtaaaattggaaaacattattcttaagttccaagagtatgggagttcttttttttcttacaagtctctcatcttcttgcccaagtaaagaaggaaaaagttcttacagttaaaatagtttttcttttacgcaaaattaatctgaataacttattcggattattcacctgttgatcatttgatacttctttttttatcaaatgtaattaatagtctattcatatatacatatatataagtggttgct

SEQ ID NO: 8270 - protein, 524 aa, Arabidopsis thaliana
VVANTDQSQTVASHHHHHGGRHRRRYTMKLHLHPLSLVFFFFFFFFRPTMSSNQHDYSDALSKSILFFEGQRSGYLPNDQRMTWRRNSGLSDGWTHNIDLTGGYYDAGDNVKFNFPMAFTTTMLAWSVIEFGEFMPSSELRNSLVALRWSSNYLLKSVSQLPNRIFVQVGDPIADHNCWERPEDMDTPRTAYAVNAPNPASEVAGETTAALSAASIAFRSSDPGYSQTLLQNAVKTFQFADMYRGAYSSNDDIKNDVCPFYCDFNGFQDELLWGAAWLRKATGDESYLNYIESNREPFGANDNVDEFGWDNKVGGLNVLVSKEVIEGNMYNLEAYKASAESFMCSLVPESSGPHVEYTSAGLLYKPGGSQLQHATTISFLLLVYAQYLSRSSLSLNCGTLTVPPDYLRRLAKKQVDYILGNNPMGLSYMVGYGERYPKRIHHRGSSLPSIVDHPEAIRCKDGSVYFNSTEPNPNVLIGAVVGGPGEDDMYDDDRSDFRKSEPTTYINAPFVGVLAYFAANPGSS

SEQ ID NO: 8271 - protein, 497 aa, Arabidopsis thaliana
MKLHLHPLSLVFFFFFFFFRPTMSSNQHDYSDALSKSILFFEGQRSGYLPNDQRMTWRRNSGLSDGWTHNIDLTGGYYDAGDNVKFNFPMAFTTTMLAWSVIEFGEFMPSSELRNSLVALRWSSNYLLKSVSQLPNRIFVQVGDPIADHNCWERPEDMDTPRTAYAVNAPNPASEVAGETTAALSAASIAFRSSDPGYSQTLLQNAVKTFQFADMYRGAYSSNDDIKNDVCPFYCDFNGFQDELLWGAAWLRKATGDESYLNYIESNREPFGANDNVDEFGWDNKVGGLNVLVSKEVIEGNMYNLEAYKASAESFMCSLVPESSGPHVEYTSAGLLYKPGGSQLQHATTISFLLLVYAQYLSRSSLSLNCGTLTVPPDYLRRLAKKQVDYILGNNPMGLSYMVGYGERYPKRIHHRGSSLPSIVDHPEAIRCKDGSVYFNSTEPNPNVLIGAVVGGPGEDDMYDDDRSDFRKSEPTTYINAPFVGVLAYFAANPGSS

SEQ ID NO: 8272 - protein, 475 aa, Arabidopsis thaliana
MSSNQHDYSDALSKSILFFEGQRSGYLPNDQRMTWRRNSGLSDGWTHNIDLTGGYYDAGDNVKFNFPMAFTTTMLAWSVIEFGEFMPSSELRNSLVALRWSSNYLLKSVSQLPNRIFVQVGDPIADHNCWERPEDMDTPRTAYAVNAPNPASEVAGETTAALSAASIAFRSSDPGYSQTLLQNAVKTFQFADMYRGAYSSNDDIKNDVCPFYCDFNGFQDELLWGAAWLRKATGDESYLNYIESNREPFGANDNVDEFGWDNKVGGLNVLVSKEVIEGNMYNLEAYKASAESFMCSLVPESSGPHVEYTSAGLLYKPGGSQLQHATTISFLLLVYAQYLSRSSLSLNCGTLTVPPDYLRRLAKKQVDYILGNNPMGLSYMVGYGERYPKRIHHRGSSLPSIVDHPEAIRCKDGSVYFNSTEPNPNVLIGAVVGGPGEDDMYDDDRSDFRKSEPTTYINAPFVGVLAYFAANPGSS

SEQ ID NO: 8273 - DNA, 666 bp, Arabidopsis thaliana
aagggtttcgtcagagacagaagtgagagaggaggaaaaatgccggcgggacacggagtgagggcgagaacaagagatctgttcgcgagaccattcaggaagaagggttatattccactctccacttacctcagaaccttcaaggtcggcgattacgtcgatgtcaaggttaatggagctatccacaagggtatgcctcataagttctaccatggtcgtactggtcgcatctggaatgtcactaagcgtgccgttggtgttgaagtcaacaaacagattgggaacagaatcataaggaagaggatacatgtgcgtgtggagcatgtgcaacagtcaaggtgtgctgaggagtttaaactcagaaagaagcagaacgatgtgcttaaggctgatgctaaagccagaggagagactatcagcaccaagagacagcctaaaggtcctaaaccgggtttcatggtcgaaggtatgacattggagactgtcactcccattccttacgatgttgtcaacgatctcaagggtggttattgagttttttccattttattatcattctctactcagaatttttgcacttgcttttttaatgatgtttttgtatcaaacaagagtgaattctatatggtatgagttcatattttgttaggaaagatggtttatccc

SEQ ID NO: 8274 - protein, 177 aa, Arabidopsis thaliana
KGFVRDRSERGGKMPAGHGVRARTRDLFARPFRKKGYIPLSTYLRTFKVGDYVDVKVNGAIHKGMPHKFYHGRTGRIWNVTKRAVGVEVNKQIGNRIIRKRIHVRVEHVQQSRCAEEFKLRKKQNDVLKADAKARGETISTKRQPKGPKPGFMVEGMTLETVTPIPYDVVNDLKGGY

SEQ ID NO: 8275 - protein, 164 aa, Arabidopsis thaliana
MPAGHGVRARTRDLFARPFRKKGYIPLSTYLRTFKVGDYVDVKVNGAIHKGMPHKFYHGRTGRIWNVTKRAVGVEVNKQIGNRIIRKRIHVRVEHVQQSRCAEEFKLRKKQNDVLKADAKARGETISTKRQPKGPKPGFMVEGMTLETVTPIPYDVVNDLKGGY

SEQ ID NO: 8276 - protein, 113 aa, Arabidopsis thaliana
MPHKFYHGRTGRIWNVTKRAVGVEVNKQIGNRIIRKRIHVRVEHVQQSRCAEEFKLRKKQNDVLKADAKARGETISTKRQPKGPKPGFMVEGMTLETVTPIPYDVVNDLKGGY

SEQ ID NO: 8277 - DNA, 889 bp, Arabidopsis thaliana
gtttcacgaacaaagaggcctgagtataaaaaaacaaatcggacgcttcgagtttttcttgaggaagaatccacacacacacagaagaagaatctcatcacgaattttagctatgggttggatctggattgacgattcatccgcctctaaagccggtgctgatctcaccgataaaccgctcggagattctgccgccgccgccgaaaattgctccacgaccacggtggtaagatctcagtgcaagacggaggaggtcgagcctggaaagttcgtcaggaaatgcgacaaaacagaagaaatcctccgccactgttttgggaagccctctgaagtcgttcaatccaacacagagcacacagaagaggatgtgacagaccagatggtgggaagatccgctcttccgaatcagtttgaggataaaaacccgctaaacttcccgggactccgcagagatgtagacgcgatcgaacgccatttcttgagcggaatgaagagtttctttgatgcggctgaagagatgacaagcagcttatttgatatcatgggagaccatcacccaagcaccaggagaggagggatacccattgaaaaccatcccaaggtagaggagcaccgcaatgacgaaactgcccctacacgaccacactcctctggcgagattgatctctcgggcttggccaaggacgtttgagaaaggtcgtctgcttcttcttcttcttctttttttttttcacaaaggtcgtcttgttctagcttttggcatatataatcttaaaaatgtaatgtgactttctaagaagcgtggggattgtagtctaatgttagcggcttgcacgtttttccgagtgggtgctactactatctatcaatatcatcatactactatatt

SEQ ID NO: 8278 - protein, 229 aa, Arabidopsis thaliana
FHEQRGLSIKKQIGRFEFFLRKNPHTHRRRISSRILAMGWIWIDDSSASKAGADLTDKPLGDSAAAAENCSTTTVVRSQCKTEEVEPGKFVRKCDKTEEILRHCFGKPSEVVQSNTEHTEEDVTDQMVGRSALPNQFEDKNPLNFPGLRRDVDAIERHFLSGMKSFFDAAEEMTSSLFDIMGDHHPSTRRGGIPIENHPKVEEHRNDETAPTRPHSSGEIDLSGLAKDV

SEQ ID NO: 8279 - protein, 192 aa, Arabidopsis thaliana
MGWIWIDDSSASKAGADLTDKPLGDSAAAAENCSTTTVVRSQCKTEEVEPGKFVRKCDKTEEILRHCFGKPSEVVQSNTEHTEEDVTDQMVGRSALPNQFEDKNPLNFPGLRRDVDAIERHFLSGMKSFFDAAEEMTSSLFDIMGDHHPSTRRGGIPIENHPKVEEHRNDETAPTRPHSSGEIDLSGLAKDV

SEQ ID NO: 8280 - DNA, 841 bp, Arabidopsis thaliana
ttttttccgctaggtttctgagatcttccattcgtctcgaattaagttgctacgatgaaaacagcaaaggggaaagataaagttaagaccacaaaggaagccttgaagccagttgatgacagaaaggtgggaaagaggaaggcaccggctgagaagcctactaaacgagagactcgtaaagagaagaaggctaaaaaggacccaaacaaaccaaaaagagctcctagtgccttctttgtctttctagaagattttagggtcacgttcaagaaagaaaatccaaatgtgaaggccgtctctgctgttgggaaagctggagggcagaaatggaagtcaatgtctcaagctgaaaaagctccatatgaagagaaagctgcaaaaaggaaagctgaatatgagaagcaaatggatgcatacaacaaaaacttggaggaagggagtgatgaatctgaaaagtctagatctgagataaatgatgaagatgaagccagtggggaggaagaactattagagaaggaagcggcaggtgatgatgaagaagaagaagaggaagaagatgacgatgatgatgacgacgaggaagaagactaaatcagggatagaaatcagattttgtatctcaagcttaactgcagatccttaagcagaagtaagtattttgtaatttgtgtgtcgacgagaactatagatctaaaatcgtgtgtttttttgtttttcttttcctaagaaagcgaaacagttgttagcatctctcaggatgtctgtttcagctttttgccacaacaaacaatgtaccaatgtctgcgttagtgatcatccaaaccaaaacataaactaatgt

SEQ ID NO: 8281 - protein, 178 aa, Arabidopsis thaliana
MKTAKGKDKVKTTKEALKPVDDRKVGKRKAPAEKPTKRETRKEKKAKKDPNKPKRAPSAFFVFLEDFRVTFKKENPNVKAVSAVGKAGGQKWKSMSQAEKAPYEEKAAKRKAEYEKQMDAYNKNLEEGSDESEKSRSEINDEDEASGEEELLEKEAAGDDEEEEEEEDDDDDDDEEED

SEQ ID NO: 8282 - DNA, 1355 bp, Arabidopsis thaliana
atttgtgtgttggggacagacaaaacactcaccaccctcaccaaacagtctctcttcaactctaaaatcaggtggcaaaacaaaatcaatggctctagtggtgtcaggtggcaaagcagccatgatgccgcttcatgccaattctcttcctctaagtatcaacaccaaatcaagagtactaagtgcatcagcatttccactattctcgtccactcctcacctcccttccagatccctctccatccgcctctcgccgaatgtttcccggtctctcactgtggtatcttctgttttgtcagaggacagagctactaacgttagtggctctgggacagatgcattcaagctgacttacttggagggcaatagctggctatgggaaacagctggactgaaaatcctagttgatccgattcttgtgggtaatttggactttggaatcccatggctttatgatgctgccaagagatatttgaaggccttcaagcttgatgatctccctgaagttgattgccttctcataactcaaagccttgatgatcattgtcatttgaatacccttaggccactttccgagaaatctccaggcataaaggttatagcaaccccaaatgctaagcctttgctagatcctctttttagtaacgtcacttatctggaacctggagatagctttgagctaaatgcaagaaacggttctaaggttcgagttaaagccacagctggacctgtccttggtccaccgtggcaacgccctgaaaacgggtatctccttgtatcccctgaagatcagatatctctctactatgaaccgcattgtgtatgcaacatggaacttctgaagaatgaaagagccgacattgtaatcacaccggtcatcaaacaacttctcccacgatttactcttgtttctggtcaagaagacgctgtccagcttgccaaactcttgaaagccaagtttgttgtgccgatgcaaaatggcgagcttgaagcaaagggacttttagcaagcctagtaaagaaagaaggaactattgaatcatttaaggaattattgttaaaagagctcccagaagctcaagtgttggagcctatagcaggtataccgctagagatcttggttccatcttcagacatttagaaagtaaactgtacatgagagtatacacatatgtaaatatacacatgtgaaatgaaactttttagaggagatgtaatagtggagaagaggagagatattggaggtatgactaaggacggatattttgtatatgttgatctatttaaagattatttcatttaaggttggaataattaatgtatcataataataaattagtgacatgttccagttg

SEQ ID NO: 8283 - protein, 379 aa, Arabidopsis thaliana
FVCWGQTKHSPPSPNSLSSTLKSGGKTKSMALVVSGGKAAMMPLHANSLPLSINTKSRVLSASAFPLFSSTPHLPSRSLSIRLSPNVSRSLTVVSSVLSEDRATNVSGSGTDAFKLTYLEGNSWLWETAGLKILVDPILVGNLDFGIPWLYDAAKRYLKAFKLDDLPEVDCLLITQSLDDHCHLNTLRPLSEKSPGIKVIATPNAKPLLDPLFSNVTYLEPGDSFELNARNGSKVRVKATAGPVLGPPWQRPENGYLLVSPEDQISLYYEPHCVCNMELLKNERADIVITPVIKQLLPRFTLVSGQEDAVQLAKLLKAKFVVPMQNGELEAKGLLASLVKKEGTIESFKELLLKELPEAQVLEPIAGIPLEILVPSSDI

SEQ ID NO: 8284 - protein, 350 aa, Arabidopsis thaliana
MALVVSGGKAAMMPLHANSLPLSINTKSRVLSASAFPLFSSTPHLPSRSLSIRLSPNVSRSLTVVSSVLSEDRATNVSGSGTDAFKLTYLEGNSWLWETAGLKILVDPILVGNLDFGIPWLYDAAKRYLKAFKLDDLPEVDCLLITQSLDDHCHLNTLRPLSEKSPGIKVIATPNAKPLLDPLFSNVTYLEPGDSFELNARNGSKVRVKATAGPVLGPPWQRPENGYLLVSPEDQISLYYEPHCVCNMELLKNERADIVITPVIKQLLPRFTLVSGQEDAVQLAKLLKAKFVVPMQNGELEAKGLLASLVKKEGTIESFKELLLKELPEAQVLEPIAGIPLEILVPSSDI

SEQ ID NO: 8285 - protein, 339 aa, Arabidopsis thaliana
MMPLHANSLPLSINTKSRVLSASAFPLFSSTPHLPSRSLSIRLSPNVSRSLTVVSSVLSEDRATNVSGSGTDAFKLTYLEGNSWLWETAGLKILVDPILVGNLDFGIPWLYDAAKRYLKAFKLDDLPEVDCLLITQSLDDHCHLNTLRPLSEKSPGIKVIATPNAKPLLDPLFSNVTYLEPGDSFELNARNGSKVRVKATAGPVLGPPWQRPENGYLLVSPEDQISLYYEPHCVCNMELLKNERADIVITPVIKQLLPRFTLVSGQEDAVQLAKLLKAKFVVPMQNGELEAKGLLASLVKKEGTIESFKELLLKELPEAQVLEPIAGIPLEILVPSSDI

SEQ ID NO: 8286 - DNA, 1710 bp, Arabidopsis thaliana
ggaagagcactccccagtctcagtggtgcggtgaggagagcttcgttgtcttccccattgcaattagggttttcaaaacgggtaatcgaattcggtggtgctcggctttgaaattgaggatgagatcctttccacttccttctacctgctgacaatgggcaactgcggtactagagacgaggctgccgtcttcactcctcaagctcaagcccaacagctccagaagaagcactcccgatccgtctcagatctgagcgatccatccactcctcgcttccgagacgactctcgcactcctatttcgtatgcccaagtcatcccctttactttgtttgagcttgagaccatcaccaagagcttccgcccagattatatactcggagaaggtggtttcggtaccgtctacaagggttacattgatgacaatctccgcgtcggcctcaagtctctccctgttgccgtcaaggtccttaacaaggagggactccagggtcaccgtgaatggcttacagaggtcaacttcctcggccaactccgtcatcccaacctcgtcaagcttattggttactgctgcgaggacgatcaccgattacttgtttatgagttcatgctgcgaggcagtcttgagaatcacctatttcgaaaaaccacagctccgctatcttggtctagaaggatgatgattgctcttggagctgcgaaaggccttgctttcctccacaatgctgaaagaccggttatttatagggatttcaagacttccaatatactgcttgactccgactacaccgccaagctttcagattttggcttagctaaagctggaccccagggtgatgaaacccatgtatcaactcgagttatgggtacttatggctatgctgccccagaatatgtgatgactggacacttgacggccagaagtgatgtatacagctttggagttgttcttctagagatgttgacaggaagaaaatcagtggataagacaagacctagcaaagagcagaacttggttgattgggctcggccaaagctgaatgataaaagaaaactgctgcagataattgacccaagactggagaaccaatactctgtcagggcagctcagaaggcatgcagcttggcgtattattgtcttagccagaacccgaaagctaggccattgatgagcgatgtggttgagactttggaacctttgcagtgtactggtgatgccctgatcccttgtgcaactactgcagctggagctgcatttgcaatgggaggggtgcctgattacagaatgcaccggaggtttgcaaagaacgttgggccaggtgcaatttgccggtcacccaatccaaattattcaccgggtggacctgcagcatgcagagttcggtgattagtgtcaagtgtatataatccgtttcgctgtgtctccttttccgtaatttctctcagagccaaacatctggttgctaaaaatcgtggatgcacgttgtttttgttgttgttgatgctgctgtttattgccactttactgtgttgatctgtctagagtcttgtatgattatgaatgagtgtggttcttgtttaatccgcactctgatgcagtatgcttgtagtagtcgacacttattcactccaaggtgaattttttttgtgtaagcagatatggttttctaacaaaaaaaaaaaaaaaaaaaactcgagggggggcccggt

SEQ ID NO: 8287 - protein, 410 aa, Arabidopsis thaliana
MGNCGTRDEAAVFTPQAQAQQLQKKHSRSVSDLSDPSTPRFRDDSRTPISYAQVIPFTLFELETITKSFRPDYILGEGGFGTVYKGYIDDNLRVGLKSLPVAVKVLNKEGLQGHREWLTEVNFLGQLRHPNLVKLIGYCCEDDHRLLVYEFMLRGSLENHLFRKTTAPLSWSRRMMIALGAAKGLAFLHNAERPVIYRDFKTSNILLDSDYTAKLSDFGLAKAGPQGDETHVSTRVMGTYGYAAPEYVMTGHLTARSDVYSFGVVLLEMLTGRKSVDKTRPSKEQNLVDWARPKLNDKRKLLQIIDPRLENQYSVRAAQKACSLAYYCLSQNPKARPLMSDVVETLEPLQCTGDALIPCATTAAGAAFAMGGVPDYRMHRRFAKNVGPGAICRSPNPNYSPGGPAACRVR

SEQ ID NO: 8288 - protein, 259 aa, Arabidopsis thaliana
MLRGSLENHLFRKTTAPLSWSRRMMIALGAAKGLAFLHNAERPVIYRDFKTSNILLDSDYTAKLSDFGLAKAGPQGDETHVSTRVMGTYGYAAPEYVMTGHLTARSDVYSFGVVLLEMLTGRKSVDKTRPSKEQNLVDWARPKLNDKRKLLQIIDPRLENQYSVRAAQKACSLAYYCLSQNPKARPLMSDVVETLEPLQCTGDALIPCATTAAGAAFAMGGVPDYRMHRRFAKNVGPGAICRSPNPNYSPGGPAACRVR

SEQ ID NO: 8289 - protein, 236 aa, Arabidopsis thaliana
MMIALGAAKGLAFLHNAERPVIYRDFKTSNILLDSDYTAKLSDFGLAKAGPQGDETHVSTRVMGTYGYAAPEYVMTGHLTARSDVYSFGVVLLEMLTGRKSVDKTRPSKEQNLVDWARPKLNDKRKLLQIIDPRLENQYSVRAAQKACSLAYYCLSQNPKARPLMSDVVETLEPLQCTGDALIPCATTAAGAAFAMGGVPDYRMHRRFAKNVGPGAICRSPNPNYSPGGPAACRVR

SEQ ID NO: 8290 - DNA, 1670 bp, Arabidopsis thaliana
cttgtgattcttttccaatttcgtaattttagaaaagctgtagaagatggcgagtgtgtcgtggcgggctgtggctgtagctatggtggtggtgttgctgtcaatgcagtggtttgcagaagggtacccggaagaagatttggtggtgaggctgccaggtcaaccaactgttgggttcaaacaatacgcaggttatgttgatgtcgatgtgaaagctggtcggagtctgttctattactatgtggaggctgtgaaacaacctgactcaaaaccattgaccctttggcttaatggaggtcctggttgttcttcaattgggggaggagctttcactgagttgggtccattttaccccacaggagatggccgtggcctccgagttaactccatgtcttggaacaaagcctcgaacctgctatttgtggagtcaccggctggagtaggatggtcttactctaaccgaagctctgattacaacaccggggacaaatctactgcaaacgatatgcttgtgttcttgttgagatggttcgagaagttcccaaagttgaagtctcgggatctctttcttactggcgaaagctatgcaggacattacatacctcaactggctgatgcgattctcagctacaattcacactcaagtggattcaaattcaacatcaaaggcgttgctattgggaatccacttctgaagcttgacagagacagtccagctacctacgagttcttctggtcgcatggcatgatctctgatgaactaaaactaacaatcacaagccaatgtgactttgatgattacacatttgctagcccccataatgtaagcacggcctgcaatgaagctattagtgaaactgaaaacattatcactgagtatgtcaacaactatgatgttctcctcgatgtatgttatccgtctatcgtccagcaagagctgaggctcaagaaaatggctactaaaatgagcatgggagtggatgtgtgtatgacctatgaaagacggttctactttaatcttccagaggtacaaaaggcgcttcatgcgaaccgtactcatctgccttattcatggtcaatgtgcagcggcgtgttaaactactctgacatcgatgggaacatcgatatgctaccgattctgaagagaattatacagaacaaaactcctgtttggatcttcagtggagatcaagattctgtagttccattcggaggttcaagaactctcgtaagagaacttgctcaagatctcaacttcaagacaacagttccctatggagcctggttccacaaaagccaggttggaggctgggccatagagtatggaaaactactgacgtttgcaacagtgagaggagcggctcatatggtaccgtatgcacagccctcacgagctctacatttgttcagtagctttgtaagtggccggagattacccaacaacacacattcttctactgatgaatgaaagagcagaggtatatcttttgtaagaaaaatgtagtttttgtatttaatttatctgtctcaggccttagattagtagagatagaaacatgtaaaagtttgtgttgtggtttggttggatcttcaagtgtagtttgttttagttatctcaaacgttgacaacaattctctttagtcatgtttatattgaatcgaatttatct

SEQ ID NO: 8291 - protein, 473 aa, Arabidopsis thaliana
MASVSWRAVAVAMVVVLLSMQWFAEGYPEEDLVVRLPGQPTVGFKQYAGYVDVDVKAGRSLFYYYVEAVKQPDSKPLTLWLNGGPGCSSIGGGAFTELGPFYPTGDGRGLRVNSMSWNKASNLLFVESPAGVGWSYSNRSSDYNTGDKSTANDMLVFLLRWFEKFPKLKSRDLFLTGESYAGHYIPQLADAILSYNSHSSGFKFNIKGVAIGNPLLKLDRDSPATYEFFWSHGMISDELKLTITSQCDFDDYTFASPHNVSTACNEAISETENIITEYVNNYDVLLDVCYPSIVQQELRLKKMATKMSMGVDVCMTYERRFYFNLPEVQKALHANRTHLPYSWSMCSGVLNYSDIDGNIDMLPILKRIIQNKTPVWIFSGDQDSVVPFGGSRTLVRELAQDLNFKTTVPYGAWFHKSQVGGWAIEYGKLLTFATVRGAAHMVPYAQPSRALHLFSSFVSGRRLPNNTHSSTDE

SEQ ID NO: 8292 - protein, 461 aa, Arabidopsis thaliana
MVVVLLSMQWFAEGYPEEDLVVRLPGQPTVGFKQYAGYVDVDVKAGRSLFYYYVEAVKQPDSKPLTLWLNGGPGCSSIGGGAFTELGPFYPTGDGRGLRVNSMSWNKASNLLFVESPAGVGWSYSNRSSDYNTGDKSTANDMLVFLLRWFEKFPKLKSRDLFLTGESYAGHYIPQLADAILSYNSHSSGFKFNIKGVAIGNPLLKLDRDSPATYEFFWSHGMISDELKLTITSQCDFDDYTFASPHNVSTACNEAISETENIITEYVNNYDVLLDVCYPSIVQQELRLKKMATKMSMGVDVCMTYERRFYFNLPEVQKALHANRTHLPYSWSMCSGVLNYSDIDGNIDMLPILKRIIQNKTPVWIFSGDQDSVVPFGGSRTLVRELAQDLNFKTTVPYGAWFHKSQVGGWAIEYGKLLTFATVRGAAHMVPYAQPSRALHLFSSFVSGRRLPNNTHSSTDE

SEQ ID NO: 8293 - protein, 454 aa, Arabidopsis thaliana
MQWFAEGYPEEDLVVRLPGQPTVGFKQYAGYVDVDVKAGRSLFYYYVEAVKQPDSKPLTLWLNGGPGCSSIGGGAFTELGPFYPTGDGRGLRVNSMSWNKASNLLFVESPAGVGWSYSNRSSDYNTGDKSTANDMLVFLLRWFEKFPKLKSRDLFLTGESYAGHYIPQLADAILSYNSHSSGFKFNIKGVAIGNPLLKLDRDSPATYEFFWSHGMISDELKLTITSQCDFDDYTFASPHNVSTACNEAISETENIITEYVNNYDVLLDVCYPSIVQQELRLKKMATKMSMGVDVCMTYERRFYFNLPEVQKALHANRTHLPYSWSMCSGVLNYSDIDGNIDMLPILKRIIQNKTPVWIFSGDQDSVVPFGGSRTLVRELAQDLNFKTTVPYGAWFHKSQVGGWAIEYGKLLTFATVRGAAHMVPYAQPSRALHLFSSFVSGRRLPNNTHSSTDE

SEQ ID NO: 8294 - DNA, 2127 bp, Arabidopsis thaliana
attattaagacctttaaaaaaaaatgatgggaagcatattattgttactattattcttttctctggtccaatcacgttcagacacgtcatattcaaaaattcaacttcccggcgattctctgaccctctccgttaccgatttcggtgctaccggcgatggtatcaactacgatacttctgcgattcagtcaaccattgacgcctgcaatcgtcactacacatctttttcttccatctgccgcgtcgttttcccttccggcaactatttgaccgctaagctccatctccgatctggcgtcattctcgatgtgacggagaacgccgtgcttctcggtggaccgagaatcgaggattattatccggcggagacttcgtcggattggtacgtggtggtggcgaataacgctacggatgttggaatcactggcggaggagcgattgatggccaaggatcgaagttcgtggtcagattcgacgagaagaagaacgtgatggtgagctggaaccaaaccggagcttgcttgggtgatgagtgtagacccaggcttgttggattcgttgattctataaacgttgagatctggaacatcacactacgagagcctgcgtattggtgtttgcacattgtgagatgtgagaacacatcagtccatgatgtatcgatccttggggacttcaatactccaaataacgatggaatcgacattgaagattccaacaacactgttataactcggtgtcatatcgatactggagatgatgcaatctgtcccaagacttacactggtccactttacaacttaaccgctacagactgttggatccggaccaaatcctcagccattaaactcggtagtgcgagctggtttgatttcaaaggtcttgtctttgataacatcactatttttgaatctcacagaggacttggcatgcaaatacgcgatggaggaaatgtgagtgacgttacattttcaaacataaacattagtacaagatactacgatccttcttggtggggaagagcagaaccaatctatataacaacttgccctcgtgactcatctgcaaaggaaggctcaatctcgaatctcctattcgtaaacataacaatcgattccgaaaacggagtctttttatcaggttcaccaaacggactactctcagatataaagttcaagaacatgaaccttactttcagaagatggagtaattacagtgcagggcttgtggactatagacctggatgtcaaggtctagtgaaccatagagccacgtctggaatcattatggagcatgtgaacgggtttcgcgttgagaatgttgacctgaaatggtcagatgatgatgatgtgaatgctgcttggaatgttcctctcgaatttagaccttccactgtgaataatgtctcgtttgttggtttcacttctggtctttacacgaaattgtttgagtctgattacgttatgagtttatttacgtctaatcatcaatatatcactgagagtgaaatcggaatcacaaaaatggcgtcgacgaagccattgattgtcgcagcgaagacgctccgaaaccggatccacttccgatctggatccacatctactggtccaagccggtgggcgacaccgggtcacgaagaacgacccaaaggatatttcatgaaccggactccgccgcctccaggacagtcgcgcaagtgggaagattgggagcttccatgttacatcacaagcttcctcacgattgtaatcctcggagtgggtctcaatgccaaacctgatctttcaatcgagacctgggctcaccagaaagctcttgagcgcctcgagatggagaagcttgcatctgccggagattcatctggttaatcccaaaacttgggagatatgattcaatggttgatctggtatgtatgtgttttgtttgtttttccggggatttgaggagattttcccatttatgatgatgatcacgaatactagtgacctagggtttcgttttgttcctcctctcctcttcgttagtgtcgataaatatgttcatgaaataagcgatctttaactcttgacgatggttttatgtaactcaccttaatttttgatcatgtttcaaagctctcttgcctcc

SEQ ID NO: 8295 - protein, 614 aa, Arabidopsis thaliana
MMGSILLLLLFFSLVQSRSDTSYSKIQLPGDSLTLSVTDFGATGDGINYDTSAIQSTIDACNRHYTSFSSICRVVFPSGNYLTAKLHLRSGVILDVTENAVLLGGPRIEDYYPAETSSDWYVVVANNATDVGITGGGAIDGQGSKFVVRFDEKKNVMVSWNQTGACLGDECRPRLVGFVDSINVEIWNITLREPAYWCLHIVRCENTSVHDVSILGDFNTPNNDGIDIEDSNNTVITRCHIDTGDDAICPKTYTGPLYNLTATDCWIRTKSSAIKLGSASWFDFKGLVFDNITIFESHRGLGMQIRDGGNVSDVTFSNINISTRYYDPSWWGRAEPIYITTCPRDSSAKEGSISNLLFVNITIDSENGVFLSGSPNGLLSDIKFKNMNLTFRRWSNYSAGLVDYRPGCQGLVNHRATSGIIMEHVNGFRVENVDLKWSDDDDVNAAWNVPLEFRPSTVNNVSFVGFTSGLYTKLFESDYVMSLFTSNHQYITESEIGITKMASTKPLIVAAKTLRNRIHFRSGSTSTGPSRWATPGHEERPKGYFMNRTPPPPGQSRKWEDWELPCYITSFLTIVILGVGLNAKPDLSIETWAHQKALERLEMEKLASAGDSSG

SEQ ID NO: 8296 - protein, 613 aa, Arabidopsis thaliana
MGSILLLLLFFSLVQSRSDTSYSKIQLPGDSLTLSVTDFGATGDGINYDTSAIQSTIDACNRHYTSFSSICRVVFPSGNYLTAKLHLRSGVILDVTENAVLLGGPRIEDYYPAETSSDWYVVVANNATDVGITGGGAIDGQGSKFVVRFDEKKNVMVSWNQTGACLGDECRPRLVGFVDSINVEIWNITLREPAYWCLHIVRCENTSVHDVSILGDFNTPNNDGIDIEDSNNTVITRCHIDTGDDAICPKTYTGPLYNLTATDCWIRTKSSAIKLGSASWFDFKGLVFDNITIFESHRGLGMQIRDGGNVSDVTFSNINISTRYYDPSWWGRAEPIYITTCPRDSSAKEGSISNLLFVNITIDSENGVFLSGSPNGLLSDIKFKNMNLTFRRWSNYSAGLVDYRPGCQGLVNHRATSGIIMEHVNGFRVENVDLKWSDDDDVNAAWNVPLEFRPSTVNNVSFVGFTSGLYTKLFESDYVMSLFTSNHQYITESEIGITKMASTKPLIVAAKTLRNRIHFRSGSTSTGPSRWATPGHEERPKGYFMNRTPPPPGQSRKWEDWELPCYITSFLTIVILGVGLNAKPDLSIETWAHQKALERLEMEKLASAGDSSG

SEQ ID NO: 8297 - protein, 458 aa, Arabidopsis thaliana
MVSWNQTGACLGDECRPRLVGFVDSINVEIWNITLREPAYWCLHIVRCENTSVHDVSILGDFNTPNNDGIDIEDSNNTVITRCHIDTGDDAICPKTYTGPLYNLTATDCWIRTKSSAIKLGSASWFDFKGLVFDNITIFESHRGLGMQIRDGGNVSDVTFSNINISTRYYDPSWWGRAEPIYITTCPRDSSAKEGSISNLLFVNITIDSENGVFLSGSPNGLLSDIKFKNMNLTFRRWSNYSAGLVDYRPGCQGLVNHRATSGIIMEHVNGFRVENVDLKWSDDDDVNAAWNVPLEFRPSTVNNVSFVGFTSGLYTKLFESDYVMSLFTSNHQYITESEIGITKMASTKPLIVAAKTLRNRIHFRSGSTSTGPSRWATPGHEERPKGYFMNRTPPPPGQSRKWEDWELPCYITSFLTIVILGVGLNAKPDLSIETWAHQKALERLEMEKLASAGDSSG

SEQ ID NO: 8298 - DNA, 648 bp, Arabidopsis thaliana
aaaaagcttatccactatcaaatgaaagtctgaagacaaattcttccattagaagaagaagatggctcttctctgcttcaattctctcccttctctctcttctctttcttcttcttcttcctcgcgccttcttcaatctccgtctttcgcttctccagttttgagccttaaacccaacgctgtcgagtccaagaacagagtctctctcagtgcttacagcttgaactctagccatggaagaattgtggtgaaggcggctgcttctggcgtggacggggctgagcctgagagcaaggaggaaccaaagactgttgttgctgctgttccagtggataaactaccgttggaatcgaaagaagctaaagagaaactgctcttggaattgaggctgaagatgaagctggccaaaaagattaggctacgcaggaaacgtctggttcgtaagcgtaagatgaggaagaagggtcgatggccaccttccaagatgaagaaaaacaagaatgtctaagtgactcaactgtttgctgcttttcgtattcgttttttgtaatgttctttttggtgttcaaagaccattaatgtacttcaaatgcaaccattgtttttggatttaacttcaaagctgagttctttaaagaaaccatttgt

SEQ ID NO: 8299 - protein, 148 aa, Arabidopsis thaliana
MALLCFNSLPSLSSLSSSSSSRLLQSPSFASPVLSLKPNAVESKNRVSLSAYSLNSSHGRIVVKAAASGVDGAEPESKEEPKTVVAAVPVDKLPLESKEAKEKLLLELRLKMKLAKKIRLRRKRLVRKRKMRKKGRWPPSKMKKNKNV

SEQ ID NO: 8300 - DNA, 1025 bp, Arabidopsis thaliana
atggacaggcccggtctaaagcacagacagaggaaacctttcgtccaagccatcgtcgactttaataattgttcttctcttgctcagatttcttctccgataggaaaactcccgaagcttcactcagtaaaccctaattttccgatgtcgatcttcgagtacaatggaagtgccgtcgtagctatggtagggaagaattgcttcgctatagctagtgatcggaggcttggtgtgcaattacaaaccattgctaccgattttcagagaatatctaagatccacgatcatctcttcatcggactttccggtctcgccaccgatgtccagacattgtaccagcgactcgtatttcgtcataagttatatcagcttagggaagaaagagacatgaagcctgaaactttcgctagtcttgtatcggctattctttatgagaaaagatttggcccattcttgtgccaacctgtgattgctggattgggagatgataacaaacccttcatttgcactatggattctattggagccaaggagttagctaaagattttgttgtctcgggaactgcttcagaatctctatatggtgcctgtgaagccatgttcaaaccagatatggaagctgaggaactattcgagacaatttcacaagcacttctctcttcagttgaccgcgattgtcttagtgggtggggaggacatgtctacgttgtaacaccaaaggaggtgaaggagagaatcctgaagggaaggatggattgatctgatatcacatatctgcttttgtccaagttcggtatactccttaacccggttatgtagaagctctcgtcccatagtaactatgttccttctctgaaactggatattgtggttcgttctctcggatgttttatttgctattgatagagttcaatgaaaatgaagaaatagcagttgttatcttgttccagtactcgatcattctatgtaccttgttgtttctgttttaatttcgtaccaagtgttccagatttctggtttgtcgc

SEQ ID NO: 8301 - protein, 252 aa, Arabidopsis thaliana
MDRPGLKHRQRKPFVQAIVDFNNCSSLAQISSPIGKLPKLHSVNPNFPMSIFEYNGSAVVAMVGKNCFAIASDRRLGVQLQTIATDFQRISKIHDHLFIGLSGLATDVQTLYQRLVFRHKLYQLREERDMKPETFASLVSAILYEKRFGPFLCQPVIAGLGDDNKPFICTMDSIGAKELAKDFVVSGTASESLYGACEAMFKPDMEAEELFETISQALLSSVDRDCLSGWGGHVYVVTPKEVKERILKGRMD

SEQ ID NO: 8302 - protein, 204 aa, Arabidopsis thaliana
MSIFEYNGSAVVAMVGKNCFAIASDRRLGVQLQTIATDFQRISKIHDHLFIGLSGLATDVQTLYQRLVFRHKLYQLREERDMKPETFASLVSAILYEKRFGPFLCQPVIAGLGDDNKPFICTMDSIGAKELAKDFVVSGTASESLYGACEAMFKPDMEAEELFETISQALLSSVDRDCLSGWGGHVYVVTPKEVKERILKGRMD

SEQ ID NO: 8303 - protein, 191 aa, Arabidopsis thaliana
MVGKNCFAIASDRRLGVQLQTIATDFQRISKIHDHLFIGLSGLATDVQTLYQRLVFRHKLYQLREERDMKPETFASLVSAILYEKRFGPFLCQPVIAGLGDDNKPFICTMDSIGAKELAKDFVVSGTASESLYGACEAMFKPDMEAEELFETISQALLSSVDRDCLSGWGGHVYVVTPKEVKERILKGRMD

SEQ ID NO: 8304 - DNA, 1523 bp, Arabidopsis thaliana
atgtaaatttaagtcctagctccattttcgttttcttcttctcaaaaaaaaaaaacaaaaaaaaaagtttttgatcgattgatgagttttctcatttattgatctctctagttttaacttgtgtttggtgaaaccggtactggcgaagtttaaaacacaagtgtaaacacaaatttataaaaatttcaaatcatgtaaatttcgtctctatcaatttatttcccctcaccaaaaaaaaaacaaaaaaaaattagaatttagtacttttattttaaacaaaaaccaaaaaaaaaaaccaaaaaaaaaaacgttggaaatggctccaccggaggctgaggtgggtgcggtaatggtgatggctcctccaacgccggggacaccgggaacaccgggaggaccgttgatcacggggatgagagtggattcaatgtcgtttgatcatcggaaaccaacgcctcgatgcaaatgcttgccggtgatgggatcaacttggggtcaacatgacacatgcttcaccgattttccctctcctgatgtctccctcactcgcaagcttggagccgagttcgtgggaacattcatcttgatattcaccgcgacagccggtccaatcgtgaaccagaaatacgatggagcagaaaccctaatcggtaacgctgcatgcgcaggactcgcagtgatgatcataatactctcaacaggtcatatctcaggggctcacctaaacccatcactgaccatagcattcgctgctctaaggcacttcccttgggcacacgtccctgcttacatagcggctcaagtctcagcttccatttgcgcttcattcgcacttaaaggagtgttccatccttttatgtccggtggtgtcactattccatctgttagccttggacaagcctttgctcttgagttcatcatcactttcattctcctctttgttgtaactgccgtcgctaccgacactcgtgccgttggagaattggcaggtatagccgttggagccacggtcatgctcaatattctagtcgcagggccatcgactggtggatctatgaatcctgtgagaactctaggaccagccgttgcatcaggaaactataggtcactatgggtgtatctggtggctcctacacttggtgccatatctggtgcagcggtctacacaggtgttaagcttaacgatagcgtgactgacccgcctcgtccggttaggagctttcgtcgttaagtgagtgagagacttgtttacaagtcttttgctttgtataattttactgtatgattatgtaatgatatgaaaaagctttggaagcttgtgtgaagaataaaaggcgatgtgactataagtccacgcatggcatcggtctatataaacctgatgcgaacttgtctcgtcattgtcaaattgtgtctgtgtaataatacacttttatgtgtggtttgggtttctttgttggtttgctgttgtatgttacctcggagacgaggctgtttttattaataaaatctatggcatgtgg

SEQ ID NO: 8305 - protein, 304 aa, Arabidopsis thaliana
MAPPEAEVGAVMVMAPPTPGTPGTPGGPLITGMRVDSMSFDHRKPTPRCKCLPVMGSTWGQHDTCFTDFPSPDVSLTRKLGAEFVGTFILIFTATAGPIVNQKYDGAETLIGNAACAGLAVMIIILSTGHISGAHLNPSLTIAFAALRHFPWAHVPAYIAAQVSASICASFALKGVFHPFMSGGVTIPSVSLGQAFALEFIITFILLFVVTAVATDTRAVGELAGIAVGATVMLNILVAGPSTGGSMNPVRTLGPAVASGNYRSLWVYLVAPTLGAISGAAVYTGVKLNDSVTDPPRPVRSFRR

SEQ ID NO: 8306 - protein, 293 aa, Arabidopsis thaliana
MVMAPPTPGTPGTPGGPLITGMRVDSMSFDHRKPTPRCKCLPVMGSTWGQHDTCFTDFPSPDVSLTRKLGAEFVGTFILIFTATAGPIVNQKYDGAETLIGNAACAGLAVMIIILSTGHISGAHLNPSLTIAFAALRHFPWAHVPAYIAAQVSASICASFALKGVFHPFMSGGVTIPSVSLGQAFALEFIITFILLFVVTAVATDTRAVGELAGIAVGATVMLNILVAGPSTGGSMNPVRTLGPAVASGNYRSLWVYLVAPTLGAISGAAVYTGVKLNDSVTDPPRPVRSFRR

SEQ ID NO: 8307 - protein, 291 aa, Arabidopsis thaliana
MAPPTPGTPGTPGGPLITGMRVDSMSFDHRKPTPRCKCLPVMGSTWGQHDTCFTDFPSPDVSLTRKLGAEFVGTFILIFTATAGPIVNQKYDGAETLIGNAACAGLAVMIIILSTGHISGAHLNPSLTIAFAALRHFPWAHVPAYIAAQVSASICASFALKGVFHPFMSGGVTIPSVSLGQAFALEFIITFILLFVVTAVATDTRAVGELAGIAVGATVMLNILVAGPSTGGSMNPVRTLGPAVASGNYRSLWVYLVAPTLGAISGAAVYTGVKLNDSVTDPPRPVRSFRR

SEQ ID NO: 8308 - DNA, 1287 bp, Arabidopsis thaliana
atcatctagaagcatttgtgtatatatatatatgtgtgtatattcctctctagctttaagtcaaaaccctatataaactatacaccaaagctttgaaccttcaaccaaacccaaaatccaagtgccccaccaaatgcttcaatcctcttccactacacaaaaaaaacaacttaatccctttatacccttttagccaaaaccctcgctaaaagccaatccctcaatataaaataacaagtagaattgatctgcctatatataagattttgagacgaaataagatctaaaccacaagaaagaaagtaaacataaaagtatgggaaggtcaccgtgctgtgagaaagctcacacaaacaaaggagcatggacgaaagaagaggacgagaggctcgtcgcctacattaaagctcatggagaaggctgctggagatctctccccaaagccgccggacttcttcgctgtggcaagagctgccgtctccggtggatcaactatctccggcctgaccttaagcgtggaaacttcaccgaggaagaagacgaactcatcatcaagctccatagccttcttggcaacaaatggtcgcttattgccgggagattaccgggaagaacagataacgagataaagaactattggaacacgcatatacgaagaaagcttataaacagagggattgatccaacgagtcatagaccaatccaagaatcatcagcttctcaagattctaaacctacacaactagaaccagttacgagtaataccattaatatctcattcacttctgctccaaaggtcgaaacgttccatgaaagtataagctttccgggaaaatcagagaaaatctcaatgcttacgttcaaagaagaaaaagatgagtgcccagttcaagaaaagttcccagatttgaatcttgagctcagaatcagtcttcctgatgatgttgatcgtcttcaagggcatggaaagtcaacaacgccacgttgtttcaagtgcagcttagggatgataaacggcatggagtgcagatgcggaagaatgagatgcgatgtagtcggaggtagcagcaaggggagtgacatgagcaatggatttgattttttagggttggcaaagaaagagaccacttctcttttgggctttcgaagcttggagatgaaataatattgtcaaattttaggcgtaactgtacaaaacttttgcctagataatttgaaagtatatcttcaacttgtatgagaaatttaactggtgaattataatatatagaatttgtttttttttct

SEQ ID NO: 8309 - protein, 282 aa, Arabidopsis thaliana
MGRSPCCEKAHTNKGAWTKEEDERLVAYIKAHGEGCWRSLPKAAGLLRCGKSCRLRWINYLRPDLKRGNFTEEEDELIIKLHSLLGNKWSLIAGRLPGRTDNEIKNYWNTHIRRKLINRGIDPTSHRPIQESSASQDSKPTQLEPVTSNTINISFTSAPKVETFHESISFPGKSEKISMLTFKEEKDECPVQEKFPDLNLELRISLPDDVDRLQGHGKSTTPRCFKCSLGMINGMECRCGRMRCDVVGGSSKGSDMSNGFDFLGLAKKETTSLLGFRSLEMK

SEQ ID NO: 8310 - DNA, 1400 bp, Arabidopsis thaliana
aaaattctaaagaacaaaaaaggaaaaacagagcagccatgagagcttctgtttattcattgatcctactcttcttctcgtgtttactacatctatcaaagtctcaaccgttcctcggagtaaactacggcctaaccgccgacaatcttccacctccgtcagcgagtgcaaagctccttcaatccacaactttccaaaaagtccgtctttacggatccgacccggctgtaatcaaggccctagcaaacacggggatcgagatcgtcatcggggcgtctaacggcgatgtacccggtctagcatcggacccgagtttcgcccgaagctgggtcgaaaccaacgtggtaccttattatccagcgagcaagattgttctcattgccgtgggaaatgagatcacatcattcggcgacaacagtctcatgtcgcagcttttgccggcgatgaaaaatgtccaaactgccctcgaggcggcgtctcttggtggcgggaaaatcaaagtctcgacagtacacataatgtcggttctagccgggtcagaccctccttcgaccgcggtatttaaaccggagcatgctgatatattgaagggattgctagagtttaatagtgaaaccgggtcgcctttcgcggttaacccctacccgtttttcgcttaccaagatgaccggagacccgaaacgttggcctattgcttgtttcaggccaatcctggccgtgtcgaccccaacagcaacctcaagtatatgaacatgttcgatgctcaggttgatgcggtgtattcagctttgaactcgatggggttcaaggacgtagagataatggtcgctgagactggatggccatacaagggagacccggaggaggctggtgcaacagttgagaacgctagagcttacaataaaaatctcattgctcatttaaaatctgggtccgggacgccacttatgcccgggagagtgatcgacacatacttgttcgcattgtacgacgagaatctcaagcccgggaaaggttctgaacgagccttcggtttgtttagacctgatctaaccatgacttatgatatcgggctcaccaagactaccaattataaccaaacttccatggctccattgtcaccaacaaggccacgtcttccaccagccgcggccccgacgagacaaacattaccttctcctccgcagatgattcttccttcaccagttactccctccgacaaaaactctgggcaaaccgatgttcacaattccactccgcgctctgcctctctggctcacatatgccgctctctctctatttcggcatcgatgttctttgtctccgttttgtatgcattgatcatattgttgtaaaatctcttcatcgatcttatattatgtctcttactaatttaaact

SEQ ID NO: 8311 - protein, 450 aa, Arabidopsis thaliana
NSKEQKRKNRAAMRASVYSLILLFFSCLLHLSKSQPFLGVNYGLTADNLPPPSASAKLLQSTTFQKVRLYGSDPAVIKALANTGIEIVIGASNGDVPGLASDPSFARSWVETNVVPYYPASKIVLIAVGNEITSFGDNSLMSQLLPAMKNVQTALEAASLGGGKIKVSTVHIMSVLAGSDPPSTAVFKPEHADILKGLLEFNSETGSPFAVNPYPFFAYQDDRRPETLAYCLFQANPGRVDPNSNLKYMNMFDAQVDAVYSALNSMGFKDVEIMVAETGWPYKGDPEEAGATVENARAYNKNLIAHLKSGSGTPLMPGRVIDTYLFALYDENLKPGKGSERAFGLFRPDLTMTYDIGLTKTTNYNQTSMAPLSPTRPRLPPAAAPTRQTLPSPPQMILPSPVTPSDKNSGQTDVHNSTPRSASLAHICRSLSISASMFFVSVLYALIILL

SEQ ID NO: 8312 - protein, 438 aa, Arabidopsis thaliana
MRASVYSLILLFFSCLLHLSKSQPFLGVNYGLTADNLPPPSASAKLLQSTTFQKVRLYGSDPAVIKALANTGIEIVIGASNGDVPGLASDPSFARSWVETNVVPYYPASKIVLIAVGNEITSFGDNSLMSQLLPAMKNVQTALEAASLGGGKIKVSTVHIMSVLAGSDPPSTAVFKPEHADILKGLLEFNSETGSPFAVNPYPFFAYQDDRRPETLAYCLFQANPGRVDPNSNLKYMNMFDAQVDAVYSALNSMGFKDVEIMVAETGWPYKGDPEEAGATVENARAYNKNLIAHLKSGSGTPLMPGRVIDTYLFALYDENLKPGKGSERAFGLFRPDLTMTYDIGLTKTTNYNQTSMAPLSPTRPRLPPAAAPTRQTLPSPPQMILPSPVTPSDKNSGQTDVHNSTPRSASLAHICRSLSISASMFFVSVLYALIILL

SEQ ID NO: 8313 - protein, 310 aa, Arabidopsis thaliana
MSQLLPAMKNVQTALEAASLGGGKIKVSTVHIMSVLAGSDPPSTAVFKPEHADILKGLLEFNSETGSPFAVNPYPFFAYQDDRRPETLAYCLFQANPGRVDPNSNLKYMNMFDAQVDAVYSALNSMGFKDVEIMVAETGWPYKGDPEEAGATVENARAYNKNLIAHLKSGSGTPLMPGRVIDTYLFALYDENLKPGKGSERAFGLFRPDLTMTYDIGLTKTTNYNQTSMAPLSPTRPRLPPAAAPTRQTLPSPPQMILPSPVTPSDKNSGQTDVHNSTPRSASLAHICRSLSISASMFFVSVLYALIILL

SEQ ID NO: 8314 - DNA, 878 bp, Arabidopsis thaliana
aaagcaagaaaaagagaatgtcaaaggagaaacaaggaagaagcttagcttataatcgaatctaagccgtttcgggaaattctgtttgtaggtgacaaaatcctcttatagggttattcttagctatgaatttcctctgcaatttctttttttccccgccaaaatttctcctgaagcaaatgtagctttttacttgctgaactagggttttgttcgattttgttcctctttcctcgctgattttgtcggaatttctgggtttgggaagagaaattggagtcgttattgattgaaatgaagaagcttttaggaggtccgggaactgtgtgtggtctgttactgagaatcggacaatgtgcttcagctgctgcttcaatcggcgttatggtctctgctaaagagttctctgttcacactgctttttgctacttgattgcgtcaatgggtcttcaattgttgtggagctttgggctagcatgtcttgatgtttatgctctcaggggaaagaaagatctccaaaaccctatcttggttagcttattcgtcgttggtgattgggtgacggcaatgttatctcttgcagctgcatgttcatcagcaggagttgtagtcttgtatgaaaaagatatcaagtattgcaatactcaaagccaatatccatgtcttaggtatgaagtagctgtagcgctttctttcgtcacttggatccagattgctgtttcttctcatgtcacattttggatcttagcctcggtttagttagtttcgcaaagaactcccaactttttcttcttcttggaatgttgagacatctttgtagcttttgatgacgttaacaatctgcttctaatcgaatctatcaatgtttcttgcaatcg

SEQ ID NO: 8315 - protein, 154 aa, Arabidopsis thaliana
MKKLLGGPGTVCGLLLRIGQCASAAASIGVMVSAKEFSVHTAFCYLIASMGLQLLWSFGLACLDVYALRGKKDLQNPILVSLFVVGDWVTAMLSLAAACSSAGVVVLYEKDIKYCNTQSQYPCLRYEVAVALSFVTWIQIAVSSHVTFWILASV

SEQ ID NO: 8316 - protein, 124 aa, Arabidopsis thaliana
MVSAKEFSVHTAFCYLIASMGLQLLWSFGLACLDVYALRGKKDLQNPILVSLFVVGDWVTAMLSLAAACSSAGVVVLYEKDIKYCNTQSQYPCLRYEVAVALSFVTWIQIAVSSHVTFWILASV

SEQ ID NO: 8317 - protein, 105 aa, Arabidopsis thaliana
MGLQLLWSFGLACLDVYALRGKKDLQNPILVSLFVVGDWVTAMLSLAAACSSAGVVVLYEKDIKYCNTQSQYPCLRYEVAVALSFVTWIQIAVSSHVTFWILASV

SEQ ID NO: 8318 - DNA, 1592 bp, Arabidopsis thaliana
gatttcgatcttactatcctgggtatgtctcaattcttcttcatcttcctccttcagttcgtgttctgtgtctgattgattactctcacaaaactcatcttttcattgtctaaaggtctaatctttagctataactcaaaatctgtttctaagttctgacaagtttctgaaacgaaattcaagttttttgatacatatgttcatttctcagaacagggtttaattaaacaagagatgtcaattttggcgatggttttcgtaacataaacatgagatttgattgttctgtgcagatctcatagttaatctggtttgagtctagaaatttcgagtgatgcagctcgtacgccattgttacccactgagaagatagataccatggctcaagatttcaacctgaactcaagaacttcttcttcaagaaaacgaagattgcgtcgctctagaagtgctcctcgtggtgattgtatgtacaatgatgatgtcaaaatcgacgaaccacctcctcatccgagtaaaatcccaatgttcagtgatctaaacccgaatctcaggcgagtgatcatgttcttggctttatatcttaccattggtactctctgtttctacctcgtgagagaccagatctccggtcataaaaccagtggtgtggtagatgctctctatttctgtatagtaacgatgacaactgttggatacggtgaccttgtccctaatagttccgcctcaaggctacttgcttgtgccttcgtcttctcgggaatggtcctcgttggtcacctcttaagtcgagcggcggattatctagtggagaaacaagaggctttgctcgttagggctttccatttgcgtcaaagctttggtccaacagacattctcaaggagttgcatactaacaagttgagatacaaatgctatgctacatgccttgtccttgtagtcctcttcattgttggcacgattttccttgtaatggttgagaaaatgccggttatctcagctttctactgcgtctgctccacggttacaacattgggttatggagataagagttttaactcggaagccggacgcctttttgctgtgttttggatcttgacgagcaccatatgtttttggctcagtttttcctctatgtaagctgagctaaatacagaaaacaaacagagggcgttggtgaaatgggttttaacgcgaagaatcacaaacaatgatctcgaagcagctgatctcgatgaagatggagttgttggagctgcagagtttattgtgtataaactgaaagaaatgggtaagattgatgagaaagatatttctgggataatggatgagttcgagcaacttgattacgatgaatcaggaactctcacgacttctgacatcgttttagctcagaccacgtctcagattcaaaggtaagcctcattatcatcatcatcatcatcttgcgaagacgaatcagaatctttgtttagttataccttcacacaacaaaaagccaaagagagtgaacagttttttggaaattttgtttgtttttcctgtttgtgtttgtaatgtaatgccacagtctaactctttgatcgtttctc

SEQ ID NO: 8319 - protein, 253 aa, Arabidopsis thaliana
MAQDFNLNSRTSSSRKRRLRRSRSAPRGDCMYNDDVKIDEPPPHPSKIPMFSDLNPNLRRVIMFLALYLTIGTLCFYLVRDQISGHKTSGVVDALYFCIVTMTTVGYGDLVPNSSASRLLACAFVFSGMVLVGHLLSRAADYLVEKQEALLVRAFHLRQSFGPTDILKELHTNKLRYKCYATCLVLVVLFIVGTIFLVMVEKMPVISAFYCVCSTVTTLGYGDKSFNSEAGRLFAVFWILTSTICFWLSFSSM

SEQ ID NO: 8320 - protein, 223 aa, Arabidopsis thaliana
MYNDDVKIDEPPPHPSKIPMFSDLNPNLRRVIMFLALYLTIGTLCFYLVRDQISGHKTSGVVDALYFCIVTMTTVGYGDLVPNSSASRLLACAFVFSGMVLVGHLLSRAADYLVEKQEALLVRAFHLRQSFGPTDILKELHTNKLRYKCYATCLVLVVLFIVGTIFLVMVEKMPVISAFYCVCSTVTTLGYGDKSFNSEAGRLFAVFWILTSTICFWLSFSSM

SEQ ID NO: 8321 - protein, 204 aa, Arabidopsis thaliana
MFSDLNPNLRRVIMFLALYLTIGTLCFYLVRDQISGHKTSGVVDALYFCIVTMTTVGYGDLVPNSSASRLLACAFVFSGMVLVGHLLSRAADYLVEKQEALLVRAFHLRQSFGPTDILKELHTNKLRYKCYATCLVLVVLFIVGTIFLVMVEKMPVISAFYCVCSTVTTLGYGDKSFNSEAGRLFAVFWILTSTICFWLSFSSM

SEQ ID NO: 8322 - DNA, 933 bp, Arabidopsis thaliana
gttcctttttataacttgagttcttctgctctgcttctgttttttttgtattttggcttcttttagttcatattgaaaaatggaaaatattgagtatctgaatgagatccaagccgttgcggggaagctaatccacagctatggagtcccagttatgatcacgttgttcctaagatggctcgcgtccatcgttgcagtttttcttatgatattggatcaaacgaaatggaagtactcaaacaatataatggcttcactattagctccttacctcttctctagccttcctattgttatttttcaggtcttgaggaacggggttgggaaatggatcgctctcctcaccgttattctcaggcttttttttaccaaaccattttcatgaatcgctagagatcccgggtgctacaattcttcttattgtggttacaccgagtgacataggggcaatattcagagacgacctgagatatacgggaggtgatgtgtgccttctcacgagcttttaccttatcaataaacacactaaagcttgtggtggtatcaaaaactcattcactcaaaaggacaaagtcacttacagcatttgtttgtggattctgtttgtctaccctattttgtcctcatttgctgccctcttctacttataagaacgcaacgatcttgctgatattgtgatcagtggtcttataagctggcgaaagatagatggaaccgagttcttatgccgagttttgatacagaaagcaactcccaagttcagaataatgtttttctagtaggagtaaaaaaaagaagtataccgaagtaactttgacaacccattttttcgatatcagttcatatatatgagaattaagacaggtatcttaaacctatatatatgtaatacatatcgatcttagttttcttaaacacaattttctcatttct

SEQ ID NO: 8323 - protein, 101 aa, Arabidopsis thaliana
MENIEYLNEIQAVAGKLIHSYGVPVMITLFLRWLASIVAVFLMILDQTKWKYSNNIMASLLAPYLFSSLPIVIFQVLRNGVGKWIALLTVILRLFFTKPFS

SEQ ID NO: 8324 - protein, 76 aa, Arabidopsis thaliana
MITLFLRWLASIVAVFLMILDQTKWKYSNNIMASLLAPYLFSSLPIVIFQVLRNGVGKWIALLTVILRLFFTKPFS

SEQ ID NO: 8325 - protein, 64 aa, Arabidopsis thaliana
MCAFSRAFTLSINTLKLVVVSKTHSLKRTKSLTAFVCGFCLSTLFCPHLLPSSTYKNATILLIL

SEQ ID NO: 8326 - DNA, 1566 bp, Arabidopsis thaliana
acaacagttagatattttcaattaatgacatcttcttcttctcctttcactgcaaaaccgaaagcttgagactttgagattatgtctatgtcatcttcttcttcttccatcgatcacttcatcacctttcgtcatcttgatcttattctccactgtataaaatcagcgagattttaagggattgtgaaggtaccatcttaaacacaaaatgggtacttctactacagagagtgtggtggcgtgtgaattttgcggcgagagaacggcggttctgttttgtagagccgatacggcgaagctttgtttgccttgtgaccagcacgtgcactcggcgaaccttctctcgaggaagcatgttcgttctcagatctgtgataactgtagcaaagagccggtgtccgtacgttgcttcacagataatctcgtattgtgtcaggagtgtgattgggatgttcacggaagctgttcctcctccgcgacgcatgaacgctccgccgtggaagggttttcaggttgtccttcggttttggagcttgctgctgtgtggggaatcgatttaaagggtaagaagaaagaagatgacgaagacgaattgactaagaattttgggatggggttggattcgtggggttctggatctaacatcgttcaagaactgattgttccttatgatgtgtcttgcaaaaagcaaagctttagctttgggaggtctaagcaggtagtgtttgaacagcttgagttactgaagagaggcttcgttgaaggcgaaggagagattatggttccggagggaatcaatggcggaggaagcatttctcagccatctccgacgacgtcgtttacttctttgcttatgtctcaaagtctttgtggtaatggtatgcaatggaatgctactaatcatagcactggccagaacactcagatatgggattttaacttgggacagtcgaggaaccctgatgaacctagtccagtcgaaactaaaggctctactttcacattcaacaacgttactcatctcaagaacgatacccgaaccaccaatatgaatgctttcaaagagagttaccagcaggaggattccgtccactcaacttctaccaagggacaggaaacatctaagagcaacaatattcctgctgccattcactcgcataaaagttctaacgactcctgtggcttgcattgcacggaacatattgctattactagtaatagagccacaagattggtggcggtaacgaatgctgatctagagcagatggcacagaacagagataatgctatgcagcggtacaaggaaaagaagaaaacgcggagatatgataagaccataagatatgaaacgaggaaggcgagagccgagaccaggttgcgtgttaagggcagatttgtgaaagctacagatccttagatgtctctccacgttaggttttacatttgagatcctaagttaggaactttttttgttttttctactttcaactaccttgtaaatgtaaatgatcgatcttcagctgcataatgtgtggccagatttttgtaatttttacgtttaacctt

SEQ ID NO: 8327 - protein, 402 aa, Arabidopsis thaliana
MGTSTTESVVACEFCGERTAVLFCRADTAKLCLPCDQHVHSANLLSRKHVRSQICDNCSKEPVSVRCFTDNLVLCQECDWDVHGSCSSSATHERSAVEGFSGCPSVLELAAVWGIDLKGKKKEDDEDELTKNFGMGLDSWGSGSNIVQELIVPYDVSCKKQSFSFGRSKQVVFEQLELLKRGFVEGEGEIMVPEGINGGGSISQPSPTTSFTSLLMSQSLCGNGMQWNATNHSTGQNTQIWDFNLGQSRNPDEPSPVETKGSTFTFNNVTHLKNDTRTTNMNAFKESYQQEDSVHSTSTKGQETSKSNNIPAAIHSHKSSNDSCGLHCTEHIAITSNRATRLVAVTNADLEQMAQNRDNAMQRYKEKKKTRRYDKTIRYETRKARAETRLRVKGRFVKATDP

SEQ ID NO: 8328 - protein, 268 aa, Arabidopsis thaliana
MGLDSWGSGSNIVQELIVPYDVSCKKQSFSFGRSKQVVFEQLELLKRGFVEGEGEIMVPEGINGGGSISQPSPTTSFTSLLMSQSLCGNGMQWNATNHSTGQNTQIWDFNLGQSRNPDEPSPVETKGSTFTFNNVTHLKNDTRTTNMNAFKESYQQEDSVHSTSTKGQETSKSNNIPAAIHSHKSSNDSCGLHCTEHIAITSNRATRLVAVTNADLEQMAQNRDNAMQRYKEKKKTRRYDKTIRYETRKARAETRLRVKGRFVKATDP

SEQ ID NO: 8329 - protein, 212 aa, Arabidopsis thaliana
MVPEGINGGGSISQPSPTTSFTSLLMSQSLCGNGMQWNATNHSTGQNTQIWDFNLGQSRNPDEPSPVETKGSTFTFNNVTHLKNDTRTTNMNAFKESYQQEDSVHSTSTKGQETSKSNNIPAAIHSHKSSNDSCGLHCTEHIAITSNRATRLVAVTNADLEQMAQNRDNAMQRYKEKKKTRRYDKTIRYETRKARAETRLRVKGRFVKATDP

SEQ ID NO: 8330 - DNA, 731 bp, Arabidopsis thaliana
aagagctgtgttaatcatcatcatcatctgttcacttttgctctttgttttttgtttggtttcctcaagccggaataaataatctgatcggagctccggtttaaagggaaatggatagtcacgatggatgtgggtacgggtcgggtcagagaacttacggcgttgatcggaggaaggaaatcgtgagtggtaagagaaatcagatctacgggactcgggattatcctccgtcactgccgcctccgccgggaaaagtagcggcgggaaggagcaacgcgtcgtcgtctttgcgaatcggaggtttaagcgatgcggagatgaagaggaagaagagaatcgcgaggtataaagcttatacagttgaaggtaaagttaaatcgactttgaagaatggattccgatggattaaaaacaaatgctgtcagattgtccatcgtttctgacttctgagttagaaacagcagtcttggtgcatgtccggattaaaaaccattgagagactttttttgttttggttatgttttctttgtagtcctacttaatttacttatttgattagctattgcctagtagtatatcacattgcttccgtgttacttttttcatagacgaaacagtaacggagatgatatgtacttttaaaaatgagacaaatgttttatttattggatgtcctttgtatacctcaatgacccattacagactttttatgaacacgagcctagcccatt

SEQ ID NO: 8331 - protein, 110 aa, Arabidopsis thaliana
MDSHDGCGYGSGQRTYGVDRRKEIVSGKRNQIYGTRDYPPSLPPPPGKVAAGRSNASSSLRIGGLSDAEMKRKKRIARYKAYTVEGKVKSTLKNGFRWIKNKCCQIVHRF

SEQ ID NO: 8332 - DNA, 1649 bp, Arabidopsis thaliana
gaaaaatcggttcgcggcttcttctgctttggtacgtttctctctttcgcatcgtcactctctttcgattccttgatcttcaaatctgggtttccaattttcggattcaattgtttcttcgattgattcgtcgatttcttcttagtctctgatctgatctatgaatatcgcaatgtctccaacgagctcagtttttccataaatttgatctcaatttcttctgtgtgatccataatccagccgagaccctaagcttgattcgatctaactctggcttatcaattctgatcttgtcgtttcgcaatggtggtctgcaaatgcaaaaaggctaccaggctgtattgctttgttcacaaggcccctgtttgcggcgaatgcatttgtttcccggagcatcaaacttgtgtggtccggacttattcagaatgggtgatagatggagagtatgatcagccaaagtgttgtcaatgccaagcaacatttgatgagggggcaggtcatcaagtcactcggttgggttgcttgcatgctatacatacaagttgcctggtttcgcttatcaagagttttcctcctcatactgcacctgctggttatgtgtgcccatcatgtagcacacctatatggcctcctatgatggtaaaagatgcaggatctcggcttcatgctctgttaagggaagtaattacgcagactggtcttgagaagaatttacttgggaaccatccagtttctctatccaccgaatctcgtagcccaccaccggcatttgcttcggatgcattaattaatatatcatcatcttctcatacacaagaagggaataaccttcctgatggttattcagtagctggaaatggagaatattccaaatctgcggtttcagagatagttgagatagatgttcctgcttctgctgggagttacatgaaaagctcaagccctggacttgctgctgctgctgcacggaaaggagtacccgctgtagacaggcagaactccgagactctatattatgcagacgatgaagacggcaatcgtaaaaagtactcaagaagaggtcctcttcgtcacaagtttctacgggctttactacctttctggtctagtgcattaccaactctacccgtgacagcaccacctcgtaaggatgcagcaaaggcagatgatggttctgaaggtcgtgtaaggcatcaacgatcatcaaaaatggatataaggaagatactaattttcatagctctcatagcttgtatggcaacaatggggattttatactacagactcgcactacaggcaattggtcaagaactacccgatgaggagcagcgatgaggtaatatcgtatcagacaggggaataaagctggctcaacatatatcatatacattcctgctttatccaaatcaatttgccctggtggatacccttttggacgactagaaaatgttatttacgagctgattttgagaattgtgggctgcggttgatttgttagagcgttacacatcggttctttgtgtcggtttccttgttttgtgactggtctaaagttctttgtctctctgtttctggttcaatcgacatgttttagttgtagctattgtttttggtagacgaaaacgcattttatggatgcttcgatgtgc

SEQ ID NO: 8333 - protein, 343 aa, Arabidopsis thaliana
MVVCKCKKATRLYCFVHKAPVCGECICFPEHQTCVVRTYSEWVIDGEYDQPKCCQCQATFDEGAGHQVTRLGCLHAIHTSCLVSLIKSFPPHTAPAGYVCPSCSTPIWPPMMVKDAGSRLHALLREVITQTGLEKNLLGNHPVSLSTESRSPPPAFASDALINISSSSHTQEGNNLPDGYSVAGNGEYSKSAVSEIVEIDVPASAGSYMKSSSPGLAAAAARKGVPAVDRQNSETLYYADDEDGNRKKYSRRGPLRHKFLRALLPFWSSALPTLPVTAPPRKDAAKADDGSEGRVRHQRSSKMDIRKILIFIALIACMATMGILYYRLALQAIGQELPDEEQR

SEQ ID NO: 8334 - protein, 233 aa, Arabidopsis thaliana
MMVKDAGSRLHALLREVITQTGLEKNLLGNHPVSLSTESRSPPPAFASDALINISSSSHTQEGNNLPDGYSVAGNGEYSKSAVSEIVEIDVPASAGSYMKSSSPGLAAAAARKGVPAVDRQNSETLYYADDEDGNRKKYSRRGPLRHKFLRALLPFWSSALPTLPVTAPPRKDAAKADDGSEGRVRHQRSSKMDIRKILIFIALIACMATMGILYYRLALQAIGQELPDEEQR

SEQ ID NO: 8335 - protein, 232 aa, Arabidopsis thaliana
MVKDAGSRLHALLREVITQTGLEKNLLGNHPVSLSTESRSPPPAFASDALINISSSSHTQEGNNLPDGYSVAGNGEYSKSAVSEIVEIDVPASAGSYMKSSSPGLAAAAARKGVPAVDRQNSETLYYADDEDGNRKKYSRRGPLRHKFLRALLPFWSSALPTLPVTAPPRKDAAKADDGSEGRVRHQRSSKMDIRKILIFIALIACMATMGILYYRLALQAIGQELPDEEQR

SEQ ID NO: 8336 - DNA, 2248 bp, Arabidopsis thaliana
aaccttctcctctttcttacgcaattacaacttcaacgcctctctatctcttcgccgtgaatgtcgagatagtcgtaagctctctgcttttcaaatttctctcaaattgaggtagagagagagggcacagagatagagagagaggggcataggaaacggtgattttcccagttcccggaggaacaatcggctgatttctctgtaatcgaagaatctaaacctcacccactcgaaatcagctcgtgggttttggggggtctctattaatttccaaattctggagaaaaatcttgtatttcttcaagatgtttgggtgtgattgtttttactggagcagaggaatctccgagttggattcggaatcgtccgagccaaagcccttctcacttccggctcctcttcctagttggccgcaaggtaaaggttttgccacaggaagaattagcctaggagaaatagaagtggtgaaaatcaccaagttccatcgagtttggagctctgattcatcacacgacaaatcaaaacgtgctacattttacagagccgatgacattccagaaggattccattgccttggtcactattgccagccaaccgatcagcccttgagaggttatgtacttgcagctcggactagcaaagccgtcaatgctgatgatttcccgcccttgaaaaagcctgtgagttattctttagtttggagtgcagattcagagaaaaatggtggtggttatttctggctacctaatcctccggttggttacagagcaatgggagttattgtaacccatgaaccaggtgaacctgaaacagaggaggtcagatgtgtaagagaggatcttacagagagttgtgaaacctctgagatgatacttgaggtgggttcttcgaagaagtcgaacggctctagttctccttttagtgtatggagcacccgaccttgcgagagagggatgctgtcacaaggtgtcgctgttgggtcattcttttgctgcacgtatgatctgtcgtctgagaggacggtccctgatatcggatgcttaaagaatcttgatccgaccttacacgcgatgccaaatctcgaccaggtccatgcggttatcgaacacttcggaccaacagtctacttccacccagaagaggcttacatgccttcatctgtacaatggttctttaagaatggagctttgttgtaccggtcagggaaatcagaaggtcaaccgattaactccacgggctcgaacttgcctgctggaggatgcaatgatatggatttctggatagatcttcctgaagacgaagaagcaaagagtaatctcaagaaaggaaaccttgaaagctcggagctttacgttcatgtgaaaccagcacttggtggaactttcaccgacatcgttatgtggattttctgcccctttaatggcccagccacgctcaaaatcggcctattcacgttacctatgacccgcataggagaacatgtcggtgattgggaacatttcactttccgcatatgtaatttctctggtgagctttggcaaatgttcttttctcagcatagtggtggtggttgggttgatgcatcagatattgagtttgtgaaagataacaaaccggctgtgtactcatctaaacacggacatgcgagtttccctcatccaggaatgtacctccaaggctcgtcaaagctcgggattggagtcagaaacgatgttgcaaaaagcaagtacattgtggattcaagccaaaggtatgtgatagtagcagctgagtatttaggtaaaggagctgtgatagagccgtgctggttacagtatatgagagaatggggtccgaccattgcatatgattcagggtctgagatcaataagatcatgaatcttcttcctttggttgttaggttctctattgagaacattgttgatttgtttcccattgctctttatggagaagaaggtcccacagggccaaaggagaaagataactgggaaggagatgagatgtgctgaaagaagacaaacctctttgtgatcaagacggtttaatggaagatgaagtctcttgttgaatcggagggttttgatctctactctactagtaattgtgactaatatgtaatttacagtatactagaatagggtttgatcttggtggttgtaatttgttgatgtaagacctaaaacgctgtgtttgcggctgtaatcagctgcgacagctcatgagcaatatgaatgattgattttgttgt

SEQ ID NO: 8337 - protein, 567 aa, Arabidopsis thaliana
MFGCDCFYWSRGISELDSESSEPKPFSLPAPLPSWPQGKGFATGRISLGEIEVVKITKFHRVWSSDSSHDKSKRATFYRADDIPEGFHCLGHYCQPTDQPLRGYVLAARTSKAVNADDFPPLKKPVSYSLVWSADSEKNGGGYFWLPNPPVGYRAMGVIVTHEPGEPETEEVRCVREDLTESCETSEMILEVGSSKKSNGSSSPFSVWSTRPCERGMLSQGVAVGSFFCCTYDLSSERTVPDIGCLKNLDPTLHAMPNLDQVHAVIEHFGPTVYFHPEEAYMPSSVQWFFKNGALLYRSGKSEGQPINSTGSNLPAGGCNDMDFWIDLPEDEEAKSNLKKGNLESSELYVHVKPALGGTFTDIVMWIFCPFNGPATLKIGLFTLPMTRIGEHVGDWEHFTFRICNFSGELWQMFFSQHSGGGWVDASDIEFVKDNKPAVYSSKHGHASFPHPGMYLQGSSKLGIGVRNDVAKSKYIVDSSQRYVIVAAEYLGKGAVIEPCWLQYMREWGPTIAYDSGSEINKIMNLLPLVVRFSIENIVDLFPIALYGEEGPTGPKEKDNWEGDEMC

SEQ ID NO: 8338 - protein, 412 aa, Arabidopsis thaliana
MGVIVTHEPGEPETEEVRCVREDLTESCETSEMILEVGSSKKSNGSSSPFSVWSTRPCERGMLSQGVAVGSFFCCTYDLSSERTVPDIGCLKNLDPTLHAMPNLDQVHAVIEHFGPTVYFHPEEAYMPSSVQWFFKNGALLYRSGKSEGQPINSTGSNLPAGGCNDMDFWIDLPEDEEAKSNLKKGNLESSELYVHVKPALGGTFTDIVMWIFCPFNGPATLKIGLFTLPMTRIGEHVGDWEHFTFRICNFSGELWQMFFSQHSGGGWVDASDIEFVKDNKPAVYSSKHGHASFPHPGMYLQGSSKLGIGVRNDVAKSKYIVDSSQRYVIVAAEYLGKGAVIEPCWLQYMREWGPTIAYDSGSEINKIMNLLPLVVRFSIENIVDLFPIALYGEEGPTGPKEKDNWEGDEMC

SEQ ID NO: 8339 - protein, 380 aa, Arabidopsis thaliana
MILEVGSSKKSNGSSSPFSVWSTRPCERGMLSQGVAVGSFFCCTYDLSSERTVPDIGCLKNLDPTLHAMPNLDQVHAVIEHFGPTVYFHPEEAYMPSSVQWFFKNGALLYRSGKSEGQPINSTGSNLPAGGCNDMDFWIDLPEDEEAKSNLKKGNLESSELYVHVKPALGGTFTDIVMWIFCPFNGPATLKIGLFTLPMTRIGEHVGDWEHFTFRICNFSGELWQMFFSQHSGGGWVDASDIEFVKDNKPAVYSSKHGHASFPHPGMYLQGSSKLGIGVRNDVAKSKYIVDSSQRYVIVAAEYLGKGAVIEPCWLQYMREWGPTIAYDSGSEINKIMNLLPLVVRFSIENIVDLFPIALYGEEGPTGPKEKDNWEGDEMC

SEQ ID NO: 8340 - DNA, 637 bp, Arabidopsis thaliana
agaaccccacgtctcttcctaatcatcatcaacattcttaagtacccttcagatttgacgttatttaccatactaccctttctaacattactccatctccataacctctctctcaccttgtatcctttttcttctaacccttgaccgtacaacaatggcgagaggctcttcccaatcccaacaatcaacctccaccggttcttcaaccgcccggcccggtctggccgctcctcgtggttccgccgccgctactgccggcatgcgtcgccgcaggctcggtggcggtggtggcgtatcctcaggcggcggatctggagttggatcaggatcgagcaacatgctgagattctacacagatgatgctccggggttgaagatctcaccgacggttgttctgatcatgagtctctgtttcatcggcttcgtcactgctcttcacgtctttggaaaactctacctccacaaatccggatcccaagcttagatccggatcaggacctggatcgtttaatcggtgatcgctgtttttttttttttttttagtatgtttccttgtgttttgtttcccttttttagtcttttcgatgagaaccatgtaaatcgctaagcgttgaataaaatacgtcacctttgaaac

SEQ ID NO: 8341 - protein, 109 aa, Arabidopsis thaliana
MARGSSQSQQSTSTGSSTARPGLAAPRGSAAATAGMRRRRLGGGGGVSSGGGSGVGSGSSNMLRFYTDDAPGLKISPTVVLIMSLCFIGFVTALHVFGKLYLHKSGSQA

SEQ ID NO: 8342 - protein, 74 aa, Arabidopsis thaliana
MRRRRLGGGGGVSSGGGSGVGSGSSNMLRFYTDDAPGLKISPTVVLIMSLCFIGFVTALHVFGKLYLHKSGSQA

SEQ ID NO: 8343 - DNA, 1979 bp, Arabidopsis thaliana
gaaagcacaaaagaaaaaaacacaagtttcctgattcctctcttctctgcgattttagctctagggatcgatttcggcgtcaaacgtcgtcgttttcgaccatctcctacttactactactcagctgcttctgccttctagggttctttctccgttcaccctccgccgcacgagttgtccagctccgccgcattcttctgtctcccagatcaccggctttaagcaaatccggctgcttttcactctaattcgtaaaccacttgtgggatttgagcatcttttacattctccaaaatctctgctttctagggttttgtgagttttggtgggatgagtagtgtgttcagtgatcagatcctgattgataagctcgctaagctcaatagcagtcaacagtctatcgaaactctgtcacattggtgtatattcaatcggagcaaagcagaattgatcgttacgacatgggagaaacagtttcacagtacagagatggatcagaaagtccctcttttgtatttggctaatgatattcttcagaacagtaagcgtcaaggtaatgagtttgtgcaagagttctggaatgttcttcctaaggctcttaaagacattgtttctcaaggagatgataatggcaaaagcgctgtcgcacgtgtgatcaagatatgggaagaaagaagagtgtttggatcacgttcaaagagtcttaaagatgtaatgcttggagaagatgttcctctgccacttgatatcagcaaaaagcggcctcgcggatccaaatcttcaaaacgggagtcaaaatcgtccagaacgaaattagcatcaagtggtggtgtggctgagaagatagcatcagcatatcatttggttgttgcagaaaactcaaatgaagaagctgagatgaataaatgtaagtctgcagttaaacgaatccggaagatggagaaagatgttgaagaagcctgctctactgacaacccgaagagaaaatctttggcgaaagaattggaagaagaagaataccttttgagacaatgtattgagaaacttaaatctgttcaaggaagtagaagttcccttgtgaaccagcttaaagatgcactacgtgaacaggaatccgaactggacaatcttaaagctcagattcaggtagctaaagaacaaacagaggaagcccaaaacatgcagaaacggcttaatgatgaggattacacatcaaaacaaacaactgctgccactacgataaccgagacaaatgacaacaccaaatctggtcaagcatcaaaaatgacgcctgcatctattgctgcaatgctcacagcgtcaacctcatcacatatgataatgcagtctgttctatcttcattcgcagctgaagcaacaaagacttctggtctatccaaatcagagagcacagttccggtctcagacactaatgcttcattcccttcttacaacaactcccagaatcagacacctaccacacaaggtcagtaccatgtaatacctaatccaccaccaccacagttcctaaaaccaccggtaatgaataacccttacgcctttggcaacattccgttaatgccacctgggcttccgccaccaccaccaccaccacatttgataggtaatcaacagcctcaaattcctcagtcgaactcagctcagcaatctcaacaaggtccaactttccagccaccagggataatgtattacggagctccacaccattcttaaaatagaaatgatgttagttaatagctttagatagttctgaccctttttatctgctcgaatgcggtttcgatgttacattgttgggtcaaatcaaagtagaactactgttcctctggttgtagaatcctcaccttttcccgttacagatatttgtaccacaagtttctacaacataatgtaataatttctcctgttcactctctatctccttcctgtatgtatgtatacttctataccttaagaac

SEQ ID NO: 8344 - protein, 467 aa, Arabidopsis thaliana
MSSVFSDQILIDKLAKLNSSQQSIETLSHWCIFNRSKAELIVTTWEKQFHSTEMDQKVPLLYLANDILQNSKRQGNEFVQEFWNVLPKALKDIVSQGDDNGKSAVARVIKIWEERRVFGSRSKSLKDVMLGEDVPLPLDISKKRPRGSKSSKRESKSSRTKLASSGGVAEKIASAYHLVVAENSNEEAEMNKCKSAVKRIRKMEKDVEEACSTDNPKRKSLAKELEEEEYLLRQCIEKLKSVQGSRSSLVNQLKDALREQESELDNLKAQIQVAKEQTEEAQNMQKRLNDEDYTSKQTTAATTITETNDNTKSGQASKMTPASIAAMLTASTSSHMIMQSVLSSFAAEATKTSGLSKSESTVPVSDTNASFPSYNNSQNQTPTTQGQYHVIPNPPPPQFLKPPVMNNPYAFGNIPLMPPGLPPPPPPPHLIGNQQPQIPQSNSAQQSQQGPTFQPPGIMYYGAPHHS

SEQ ID NO: 8345 - protein, 414 aa, Arabidopsis thaliana
MDQKVPLLYLANDILQNSKRQGNEFVQEFWNVLPKALKDIVSQGDDNGKSAVARVIKIWEERRVFGSRSKSLKDVMLGEDVPLPLDISKKRPRGSKSSKRESKSSRTKLASSGGVAEKIASAYHLVVAENSNEEAEMNKCKSAVKRIRKMEKDVEEACSTDNPKRKSLAKELEEEEYLLRQCIEKLKSVQGSRSSLVNQLKDALREQESELDNLKAQIQVAKEQTEEAQNMQKRLNDEDYTSKQTTAATTITETNDNTKSGQASKMTPASIAAMLTASTSSHMIMQSVLSSFAAEATKTSGLSKSESTVPVSDTNASFPSYNNSQNQTPTTQGQYHVIPNPPPPQFLKPPVMNNPYAFGNIPLMPPGLPPPPPPPHLIGNQQPQIPQSNSAQQSQQGPTFQPPGIMYYGAPHHS

SEQ ID NO: 8346 - protein, 339 aa, Arabidopsis thaliana
MLGEDVPLPLDISKKRPRGSKSSKRESKSSRTKLASSGGVAEKIASAYHLVVAENSNEEAEMNKCKSAVKRIRKMEKDVEEACSTDNPKRKSLAKELEEEEYLLRQCIEKLKSVQGSRSSLVNQLKDALREQESELDNLKAQIQVAKEQTEEAQNMQKRLNDEDYTSKQTTAATTITETNDNTKSGQASKMTPASIAAMLTASTSSHMIMQSVLSSFAAEATKTSGLSKSESTVPVSDTNASFPSYNNSQNQTPTTQGQYHVIPNPPPPQFLKPPVMNNPYAFGNIPLMPPGLPPPPPPPHLIGNQQPQIPQSNSAQQSQQGPTFQPPGIMYYGAPHHS

SEQ ID NO: 8347 - DNA, 2565 bp, Arabidopsis thaliana
aaaaaattctgaaaattaacaattagagaaaaagaaaagaaaaggaaaaaaaaaaaagatttctagtagaaagagagaagggcgtgaattcctgagcgagagattcttcgccggagtaatctctttgcgtgatcttaccggctgcttaattcgtcttcgcctgattcgttggtttcaaaattcgtctctctctttcaatcggaggttaattgtttttctgtttgggggtcaaagcgaagatggtgaacgctatggtggagagagcgacgagcgagatgctgatcgggcctgattgggctatgaacctcgagatctgtgatatgctcaatagcgatccagcgcaagcaaaagatgttgtgaaaggcattaaaaaacggattggtagcaggaatccaaaagctcagcttcttgccttaactctgcttgagacaatagtgaagaactgtggtgacatggttcatatgcatgtggctgagaaaggtgttattcatgagatggtccggatagttaagaagaagccggacttccatgtcaaagagaagattctggtccttatcgatacatggcaagaggcctttggtggccctagggcaagatatccacaatactatgcaggataccaggaattgttgcgtgctggtgctgttttccctcagagatcagagagatcagctcctgtgttcacacctcctcaaacacagcctttgacatcttaccctccaaatcttcgtaacgctggacctggtaatgatgtgcctgaaccttcagcagagccagaatttccgactctaagtttgtcggagattcaaaatgcaaaaggtatcatggatgtgcttgcggagatgctgagtgcattagagcccggaaacaaggaggatctcaaacaagaggttatggtcgatctggtggagcagtgtcgtacatacaaacaaagagtggtgcacctcgtcaactcgacttcggacgagtctttgttatgtcaaggtctggctttgaatgatgacttgcagcgtgtcttaaccaattatgaagcaattgcttctggattacctggaacttcttctcagatcgagaagcccaagtccgagacaggaaaatcccttgttgatgttgatggtccacttattgatacaggggacagcagtaatcaggcgaacggagctacatcgagctctggtaacggggttctaaatcagttggccctccctgcaccacctgtaactaatggttcagccaattccaaaatagacctcctcagtggcgatgatcttgcccttgttcctgttggacctcctcaccagcaagtccggttgcatcagatcaaaatgcactcgcccttatcgacatgttctcagataatactaataatccaagtcctgcaactgcaccaagtggcaatccagctcagaatattcctttgaatcctcaagggcaccaacaaccaaatagtcaagctggagaagctggattacaacaatccaatggatttgcgcctcaagtgggttattcgcagtttgagcagccatcatacgggcaaggagtctcttctccctggagcagtcagcctgcacagcaaccagtccagccatcttatggtgcccaagacagtacggcatttccacctcccccatgggaagctcagctccaagactatagtccctctgcggagtcaggaagtccgttttctcctggaatgcatccaactcagactgccttcacacatgctcaaccagttaacaacaacaatccatatcctcaaattccccaaaccgggccaccagtcaacaataacagtccatatgctcaaatgccccaaacaggtcaagcagttgccaacatcagtccatatcctcaaattccacaaaacggcgtgtacatgccaaaccaaccaaatcaggctcttgggtcaggctatcaaccacagcaacaacagcagcagcagatgatgatggctcagtactatgcccaacagcaacagctacagcaacaacaacagcaacaggcgtatggaaaccagatgggaggatacggatatggctataatcaacagcaacaaggaagcagcccatatctggaccagcaaatgtacggtttatccatgagagaccagacatcgcatcaggtagcatcatcatcatctaccacatcttatctgcctccaatgaaacctaagaataaaccagaggacaagctatttggggatcttgtggacatctccaaattcaagcctacaaaaccgacttccggaagagctggtaccatgtgaaaattcctccatccattcatcatttaccagtattcatctcctctatcctcctcagctaactctctttcttctctttgttaagcttttttcatcattgattttattaccctcttgggagataacatagatatacatatgtgttatgttcttccttataatttaccgttggttatgggtttgtatatttcttgtagagaaaagaaaactggaaaatcttttgttgagaactcagcgatttggggtttgtctcgagattctattttaggacattttaatctctcatttgtattttcagacct

SEQ ID NO: 8348 - protein, 393 aa, Arabidopsis thaliana
MVNAMVERATSEMLIGPDWAMNLEICDMLNSDPAQAKDVVKGIKKRIGSRNPKAQLLALTLLETIVKNCGDMVHMHVAEKGVIHEMVRIVKKKPDFHVKEKILVLIDTWQEAFGGPRARYPQYYAGYQELLRAGAVFPQRSERSAPVFTPPQTQPLTSYPPNLRNAGPGNDVPEPSAEPEFPTLSLSEIQNAKGIMDVLAEMLSALEPGNKEDLKQEVMVDLVEQCRTYKQRVVHLVNSTSDESLLCQGLALNDDLQRVLTNYEAIASGLPGTSSQIEKPKSETGKSLVDVDGPLIDTGDSSNQANGATSSSGNGVLNQLALPAPPVTNGSANSKIDLLSGDDLALVPVGPPHQQVRLHQIKMHSPLSTCSQIILIIQVLQLHQVAIQLRIFL

SEQ ID NO: 8349 - protein, 389 aa, Arabidopsis thaliana
MVERATSEMLIGPDWAMNLEICDMLNSDPAQAKDVVKGIKKRIGSRNPKAQLLALTLLETIVKNCGDMVHMHVAEKGVIHEMVRIVKKKPDFHVKEKILVLIDTWQEAFGGPRARYPQYYAGYQELLRAGAVFPQRSERSAPVFTPPQTQPLTSYPPNLRNAGPGNDVPEPSAEPEFPTLSLSEIQNAKGIMDVLAEMLSALEPGNKEDLKQEVMVDLVEQCRTYKQRVVHLVNSTSDESLLCQGLALNDDLQRVLTNYEAIASGLPGTSSQIEKPKSETGKSLVDVDGPLIDTGDSSNQANGATSSSGNGVLNQLALPAPPVTNGSANSKIDLLSGDDLALVPVGPPHQQVRLHQIKMHSPLSTCSQIILIIQVLQLHQVAIQLRIFL

SEQ ID NO: 8350 - protein, 381 aa, Arabidopsis thaliana
MLIGPDWAMNLEICDMLNSDPAQAKDVVKGIKKRIGSRNPKAQLLALTLLETIVKNCGDMVHMHVAEKGVIHEMVRIVKKKPDFHVKEKILVLIDTWQEAFGGPRARYPQYYAGYQELLRAGAVFPQRSERSAPVFTPPQTQPLTSYPPNLRNAGPGNDVPEPSAEPEFPTLSLSEIQNAKGIMDVLAEMLSALEPGNKEDLKQEVMVDLVEQCRTYKQRVVHLVNSTSDESLLCQGLALNDDLQRVLTNYEAIASGLPGTSSQIEKPKSETGKSLVDVDGPLIDTGDSSNQANGATSSSGNGVLNQLALPAPPVTNGSANSKIDLLSGDDLALVPVGPPHQQVRLHQIKMHSPLSTCSQIILIIQVLQLHQVAIQLRIFL

SEQ ID NO: 8351 - DNA, 1688 bp, Arabidopsis thaliana
catcctaatcaaaaaatacaatcgtcttcttcatcattttctcttcttcttctccaagaaaacactgaagaagaaatggggttccttaagccaaccatggcgattctttttctagcgatggtcgccgtttcatcagccgtggacatgtcaatcatctcctacgacgagaaacatggcgtctccaccaccggtggccgtagcgaagccgaggttatgagtatctacgaggcatggttggtgaaacacggcaaggctcagagccagaactctcttgttgagaaagatcgacggttcgagatctttaaagacaatcttcgtttcgtcgatgaacataacgagaagaatcttagttatagattgggtttgactcgttttgcggatcttactaacgatgagtatagatccaagtatcttggagctaagatggagaagaaaggtgagagaaggactagcctacggtacgaggctcgtgtcggtgatgagctaccggagtctattgactggaggaagaaaggagccgtggctgaggtcaaagatcagggtggttgcgggagttgttgggcgttttcaaccattggagcagtggagggaataaaccagatcgtaaccggagacctaataaccttgtctgaacaagagttggtcgattgtgacacttcatacaacgaaggttgtaacggaggtcttatggactatgcttttgagttcattatcaagaatggtggaatcgatacagacaaagattatccttacaagggtgttgatggaacttgtgaccagatcaggaaaaacgctaaagttgtcactatcgattcatatgaggatgttccaacttacagcgaggaatcgttgaagaaagcagttgctcatcaacccattagcattgccattgaggctggtggtcgtgcgttccagctctatgattcgggtatatttgatggaagttgtggaacacaactagaccacggagttgtggcggttggatacggaactgagaacggcaaagattactggattgtgagaaactcatggggtaaaagctggggagagagtggatacctaaggatggcgcgtaacattgcgtcttcatcaggaaaatgtggaatcgcgattgaaccttcatacccgataaagaatggcgaaaacccgccaaacccgggaccttcacctccatctcccatcaagcctccaacccaatgtgacagttactacacttgtcctgagagcaacacttgttgttgtctgtttgagtatggcaagtattgctttgcttggggatgttgcccactagaagcagccacttgctgtgatgacaactatagttgctgccctcacgagtacccggtttgtgaccttgatcaaggaacctgtttattgagcaagaacagtccatttagtgttaaggccttaaagcgtaaacccgcaacgccattctggtcacaaggcagaaagaacattgcctaaacattgcttcttcaagaggactctggctcatgagagaagagatctctctgaagggatttatcagatgctttttaatgttgttgtttatgccataactagatacataaaaaatgcagctgttgggtttcgtgtatataaaaaaaggaccctatgtttcattcagtttcatagttgggtttcattgatacagtacatttattgttaattcaagaaaattgaatatt

SEQ ID NO: 8352 - protein, 487 aa, Arabidopsis thaliana
HPNQKIQSSSSSFSLLLLQENTEEEMGFLKPTMAILFLAMVAVSSAVDMSIISYDEKHGVSTTGGRSEAEVMSIYEAWLVKHGKAQSQNSLVEKDRRFEIFKDNLRFVDEHNEKNLSYRLGLTRFADLTNDEYRSKYLGAKMEKKGERRTSLRYEARVGDELPESIDWRKKGAVAEVKDQGGCGSCWAFSTIGAVEGINQIVTGDLITLSEQELVDCDTSYNEGCNGGLMDYAFEFIIKNGGIDTDKDYPYKGVDGTCDQIRKNAKVVTIDSYEDVPTYSEESLKKAVAHQPISIAIEAGGRAFQLYDSGIFDGSCGTQLDHGVVAVGYGTENGKDYWIVRNSWGKSWGESGYLRMARNIASSSGKCGIAIEPSYPIKNGENPPNPGPSPPSPIKPPTQCDSYYTCPESNTCCCLFEYGKYCFAWGCCPLEAATCCDDNYSCCPHEYPVCDLDQGTCLLSKNSPFSVKALKRKPATPFWSQGRKNIA

SEQ ID NO: 8353 - protein, 462 aa, Arabidopsis thaliana
MGFLKPTMAILFLAMVAVSSAVDMSIISYDEKHGVSTTGGRSEAEVMSIYEAWLVKHGKAQSQNSLVEKDRRFEIFKDNLRFVDEHNEKNLSYRLGLTRFADLTNDEYRSKYLGAKMEKKGERRTSLRYEARVGDELPESIDWRKKGAVAEVKDQGGCGSCWAFSTIGAVEGINQIVTGDLITLSEQELVDCDTSYNEGCNGGLMDYAFEFIIKNGGIDTDKDYPYKGVDGTCDQIRKNAKVVTIDSYEDVPTYSEESLKKAVAHQPISIAIEAGGRAFQLYDSGIFDGSCGTQLDHGVVAVGYGTENGKDYWIVRNSWGKSWGESGYLRMARNIASSSGKCGIAIEPSYPIKNGENPPNPGPSPPSPIKPPTQCDSYYTCPESNTCCCLFEYGKYCFAWGCCPLEAATCCDDNYSCCPHEYPVCDLDQGTCLLSKNSPFSVKALKRKPATPFWSQGRKNIA

SEQ ID NO: 8354 - protein, 455 aa, Arabidopsis thaliana
MAILFLAMVAVSSAVDMSIISYDEKHGVSTTGGRSEAEVMSIYEAWLVKHGKAQSQNSLVEKDRRFEIFKDNLRFVDEHNEKNLSYRLGLTRFADLTNDEYRSKYLGAKMEKKGERRTSLRYEARVGDELPESIDWRKKGAVAEVKDQGGCGSCWAFSTIGAVEGINQIVTGDLITLSEQELVDCDTSYNEGCNGGLMDYAFEFIIKNGGIDTDKDYPYKGVDGTCDQIRKNAKVVTIDSYEDVPTYSEESLKKAVAHQPISIAIEAGGRAFQLYDSGIFDGSCGTQLDHGVVAVGYGTENGKDYWIVRNSWGKSWGESGYLRMARNIASSSGKCGIAIEPSYPIKNGENPPNPGPSPPSPIKPPTQCDSYYTCPESNTCCCLFEYGKYCFAWGCCPLEAATCCDDNYSCCPHEYPVCDLDQGTCLLSKNSPFSVKALKRKPATPFWSQGRKNIA

SEQ ID NO: 8355 - DNA, 1982 bp, Arabidopsis thaliana
aggttacttgttagatctcaacaaccaggtcgcacacactaaaatggcgttccgcgttttgctcctcttctcactcaccgcacttctcatcttctccgccgtttctccttctttcgccgcttcttcctccgacgacgttgacgatgaggatctcagcttcctcgaagatctcaaagaagacgacgttcccggcgctgactcactctcttcctcaactggatttgacgaattcgaaggaggagaagaagaagatcccgatatgtacaacgacgatgacgatgaagaaggagatttttccgatctaggtaatccggattccgatccgttaccgacgccggagattgatgagaaagacgttgtggttatcaaggagcgtaacttcactgatgtgattgagaataatcaatacgttttggttgagttttatgctccgtggtgtggtcattgtcagtctcttgctcctgagtatgctgctgctgccacggagcttaaggaagatggtgttgttttggctaagattgatgcgacggaggagaatgagttagctcaggagtatcgtgttcagggctttccgacgcttcttttcttcgttgatggtgagcacaagccttacactggaggaaggactaaagaaacaattgtgacatgggtgaagaagaagattggtcctggtgtgtataatctaactacattagatgatgctgagaaagtgttgacttctgggaacaaagttgttttgggatacttgaactccttggtgggtgttgagcacgatcagcttaatgctgcttccaaagctgaagacgatgtgaacttttatcaaacagtgaatcctgatgttgcaaagatgtttcaccttgatccggagtctaaaaggcctgctcttgtcctagttaagaaggaagaggagaaaattagccattttgatggagaatttgttaagtctgctctagttagttttgtgtctgccaacaagcttgctttggtctctgttttcaccagagagactgctccggaaatttttgagagtgcaatcaagaaacagttgttgttgtttgtaaccaaaaatgaatctgaaaaggttcttacggaatttcaagaagcagcgaaatcattcaaaggaaagctcatctttgtatctgtggatctggataatgaggattatgggaagccagtcgctgaatactttggtgtgtctggaaatggtcctaaacttattggctacacagggaatgaagaccctaaaaaatactttttcgatggcgagatccagtcagataaaattaagatatttggggaggatttcctgaacgacaagttaaagcctttctataagtcagaccccattcctgaaaagaacgatgaagatgtgaaaatagtggttggagataactttgatgaaattgttctggacgattctaaagatgtgcttctcgaggtctacgcaccatggtgtggccattgccaagcccttgagccaatgtataacaaacttgccaagcatttacgaagtattgattctctcgtcataaccaagatggatggaacaaccaatgaacatcccaaggcaaaggctgaggggttccctaccattctcttcttccctgcgggcaacaagacttcagagccgattactgtagatacagaccgcactgtggttgcattttacaagttcttaaggaaacacgcaacgatcccattcaaactggagaaacctgcatcaaccgaatcacctaaaactgcagagtccacaccaaaagtagaaactaccgagaccaaagaatcacccgatagcacgacaaagagtagccaaagtgactcgaaggacgaattgtgatcagaaaagggtataatatatattacatgtctccttaagttgttatatgtatgatcagaattgtcacatcatgagtttggactagataaagatgggaattaaagtaattttagttttgagaaagacaatttcttttgatttggtc

SEQ ID NO: 8356 - protein, 611 aa, Arabidopsis thaliana
GYLLDLNNQVAHTKMAFRVLLLFSLTALLIFSAVSPSFAASSSDDVDDEDLSFLEDLKEDDVPGADSLSSSTGFDEFEGGEEEDPDMYNDDDDEEGDFSDLGNPDSDPLPTPEIDEKDVVVIKERNFTDVIENNQYVLVEFYAPWCGHCQSLAPEYAAAATELKEDGVVLAKIDATEENELAQEYRVQGFPTLLFFVDGEHKPYTGGRTKETIVTWVKKKIGPGVYNLTTLDDAEKVLTSGNKVVLGYLNSLVGVEHDQLNAASKAEDDVNFYQTVNPDVAKMFHLDPESKRPALVLVKKEEEKISHFDGEFVKSALVSFVSANKLALVSVFTRETAPEIFESAIKKQLLLFVTKNESEKVLTEFQEAAKSFKGKLIFVSVDLDNEDYGKPVAEYFGVSGNGPKLIGYTGNEDPKKYFFDGEIQSDKIKIFGEDFLNDKLKPFYKSDPIPEKNDEDVKIVVGDNFDEIVLDDSKDVLLEVYAPWCGHCQALEPMYNKLAKHLRSIDSLVITKMDGTTNEHPKAKAEGFPTILFFPAGNKTSEPITVDTDRTVVAFYKFLRKHATIPFKLEKPASTESPKTAESTPKVETTETKESPDSTTKSSQSDSKDEL

SEQ ID NO: 8357 - protein, 597 aa, Arabidopsis thaliana
MAFRVLLLFSLTALLIFSAVSPSFAASSSDDVDDEDLSFLEDLKEDDVPGADSLSSSTGFDEFEGGEEEDPDMYNDDDDEEGDFSDLGNPDSDPLPTPEIDEKDVVVIKERNFTDVIENNQYVLVEFYAPWCGHCQSLAPEYAAAATELKEDGVVLAKIDATEENELAQEYRVQGFPTLLFFVDGEHKPYTGGRTKETIVTWVKKKIGPGVYNLTTLDDAEKVLTSGNKVVLGYLNSLVGVEHDQLNAASKAEDDVNFYQTVNPDVAKMFHLDPESKRPALVLVKKEEEKISHFDGEFVKSALVSFVSANKLALVSVFTRETAPEIFESAIKKQLLLFVTKNESEKVLTEFQEAAKSFKGKLIFVSVDLDNEDYGKPVAEYFGVSGNGPKLIGYTGNEDPKKYFFDGEIQSDKIKIFGEDFLNDKLKPFYKSDPIPEKNDEDVKIVVGDNFDEIVLDDSKDVLLEVYAPWCGHCQALEPMYNKLAKHLRSIDSLVITKMDGTTNEHPKAKAEGFPTILFFPAGNKTSEPITVDTDRTVVAFYKFLRKHATIPFKLEKPASTESPKTAESTPKVETTETKESPDSTTKSSQSDSKDEL

SEQ ID NO: 8358 - protein, 525 aa, Arabidopsis thaliana
MYNDDDDEEGDFSDLGNPDSDPLPTPEIDEKDVVVIKERNFTDVIENNQYVLVEFYAPWCGHCQSLAPEYAAAATELKEDGVVLAKIDATEENELAQEYRVQGFPTLLFFVDGEHKPYTGGRTKETIVTWVKKKIGPGVYNLTTLDDAEKVLTSGNKVVLGYLNSLVGVEHDQLNAASKAEDDVNFYQTVNPDVAKMFHLDPESKRPALVLVKKEEEKISHFDGEFVKSALVSFVSANKLALVSVFTRETAPEIFESAIKKQLLLFVTKNESEKVLTEFQEAAKSFKGKLIFVSVDLDNEDYGKPVAEYFGVSGNGPKLIGYTGNEDPKKYFFDGEIQSDKIKIFGEDFLNDKLKPFYKSDPIPEKNDEDVKIVVGDNFDEIVLDDSKDVLLEVYAPWCGHCQALEPMYNKLAKHLRSIDSLVITKMDGTTNEHPKAKAEGFPTILFFPAGNKTSEPITVDTDRTVVAFYKFLRKHATIPFKLEKPASTESPKTAESTPKVETTETKESPDSTTKSSQSDSKDEL

SEQ ID NO: 8359 - DNA, 1762 bp, Arabidopsis thaliana
aagtccaagcccgaaaacaagggttcttgctccgacacgacaacaaatccagattttgagcttagggaaacttgagaaggagaaaaaaatgtcgaacatagacatagaagggatcttgaaggagctacctaatgatgggaggatcccaaagacgaagatagtttgcacattaggaccagcttctcgcactgtttccatgatcgaaaagcttttgaaagccggtatgaatgtggctcgcttcaacttctcacatggaagccatgaataccatcaagagacactcgacaacctccgctctgctatgcataataccggcattctcgctgctgtcatgcttgatactaaggggcctgagattcgtactggtttcttgaaagatgggaaccctatacaactgaaggaaggtcaagagattactataaccactgattatgacattcaaggagacgaatcaacgatatccatgagctataaaaagctgcctttggatgtgaagcccggaaacaccatactctgtgcagatggaagcataagtctagctgtcttgtcatgtgatcctgagtctggaactgttaggtgccggtgtgaaaactcggcgatgcttggtgaaagaaagaatgtgaatcttcctggcgttgttgttgatcttcccactttgacagataaggatattgaagatattctcggttggggtgttccgaacagcattgatatgattgctctttcgtttgtccgtaaaggttcggatcttgttaatgtccgcaaggttcttggatctcatgctaaaagcataatgctcatgtcaaaggttgagaaccaggaaggtgtgattaactttgatgagatcttgcgtgaaacagatgcgttcatggttgcccgtggtgatctcgggatggagattccgatagagaagatcttcttggctcaaaagttgatgatctacaagtgtaaccttgcgggtaaaccggtggtcacagccactcagatgctggagtcaatgatcaaatcacctcggccaacccgagctgaagccacagatgttgcaaatgctgttcttgatggtactgactgtgtgatgcttagcggtgagagtgcagcaggagcttatccggaaatagctgtgaaagtcatggctaagatctgcattgaagccgaatcctcgcttgattacaacacaatctttaaagagatgatccgagcaactccacttccaatgagcccactcgagagtcttgcatcatccgctgtacggactgctaacaaagcgagggcaaaactcatcattgtgttgacacgtggaggttcaactgctaatctcgtggctaaatacagaccggctgttccgattctgtcagtggttgtcccggttatgaccactgattcctttgactggtcttgtagtgacgagtcacctgcaaggcatagtctgatatacagaggtctaatccctatgttggctgaaggatctgcaaaggcaacagatagtgaagccaccgaagttatcattgaagctgctctgaagtcggctactcagagaggactgtgcaaccgtggtgatgcaatcgtggcgctgcaccgtattggagctgcctcagttattaagatctgtgtggttaagtgagattacagacttctttcaatacctcaaatcttggattgttggtaatcgtaactgagattttgctttgtagcatgaaataaagaaaacaggtcacaatagttcctgaaactctgttacttttaagatatctctctctctttt

SEQ ID NO: 8360 - protein, 539 aa, Arabidopsis thaliana
SPSPKTRVLAPTRQQIQILSLGKLEKEKKMSNIDIEGILKELPNDGRIPKTKIVCTLGPASRTVSMIEKLLKAGMNVARFNFSHGSHEYHQETLDNLRSAMHNTGILAAVMLDTKGPEIRTGFLKDGNPIQLKEGQEITITTDYDIQGDESTISMSYKKLPLDVKPGNTILCADGSISLAVLSCDPESGTVRCRCENSAMLGERKNVNLPGVVVDLPTLTDKDIEDILGWGVPNSIDMIALSFVRKGSDLVNVRKVLGSHAKSIMLMSKVENQEGVINFDEILRETDAFMVARGDLGMEIPIEKIFLAQKLMIYKCNLAGKPVVTATQMLESMIKSPRPTRAEATDVANAVLDGTDCVMLSGESAAGAYPEIAVKVMAKICIEAESSLDYNTIFKEMIRATPLPMSPLESLASSAVRTANKARAKLIIVLTRGGSTANLVAKYRPAVPILSVVVPVMTTDSFDWSCSDESPARHSLIYRGLIPMLAEGSAKATDSEATEVIIEAALKSATQRGLCNRGDAIVALHRIGAASVIKICVVK

SEQ ID NO: 8361 - protein, 510 aa, Arabidopsis thaliana
MSNIDIEGILKELPNDGRIPKTKIVCTLGPASRTVSMIEKLLKAGMNVARFNFSHGSHEYHQETLDNLRSAMHNTGILAAVMLDTKGPEIRTGFLKDGNPIQLKEGQEITITTDYDIQGDESTISMSYKKLPLDVKPGNTILCADGSISLAVLSCDPESGTVRCRCENSAMLGERKNVNLPGVVVDLPTLTDKDIEDILGWGVPNSIDMIALSFVRKGSDLVNVRKVLGSHAKSIMLMSKVENQEGVINFDEILRETDAFMVARGDLGMEIPIEKIFLAQKLMIYKCNLAGKPVVTATQMLESMIKSPRPTRAEATDVANAVLDGTDCVMLSGESAAGAYPEIAVKVMAKICIEAESSLDYNTIFKEMIRATPLPMSPLESLASSAVRTANKARAKLIIVLTRGGSTANLVAKYRPAVPILSVVVPVMTTDSFDWSCSDESPARHSLIYRGLIPMLAEGSAKATDSEATEVIIEAALKSATQRGLCNRGDAIVALHRIGAASVIKICVVK

SEQ ID NO: 8362 - protein, 474 aa, Arabidopsis thaliana
MIEKLLKAGMNVARFNFSHGSHEYHQETLDNLRSAMHNTGILAAVMLDTKGPEIRTGFLKDGNPIQLKEGQEITITTDYDIQGDESTISMSYKKLPLDVKPGNTILCADGSISLAVLSCDPESGTVRCRCENSAMLGERKNVNLPGVVVDLPTLTDKDIEDILGWGVPNSIDMIALSFVRKGSDLVNVRKVLGSHAKSIMLMSKVENQEGVINFDEILRETDAFMVARGDLGMEIPIEKIFLAQKLMIYKCNLAGKPVVTATQMLESMIKSPRPTRAEATDVANAVLDGTDCVMLSGESAAGAYPEIAVKVMAKICIEAESSLDYNTIFKEMIRATPLPMSPLESLASSAVRTANKARAKLIIVLTRGGSTANLVAKYRPAVPILSVVVPVMTTDSFDWSCSDESPARHSLIYRGLIPMLAEGSAKATDSEATEVIIEAALKSATQRGLCNRGDAIVALHRIGAASVIKICVVK

SEQ ID NO: 8363 - DNA, 1376 bp, Arabidopsis thaliana
  misc_feature (421)..(421): n is a, c, g, or t
acgccgctcatttttagggtttcagatataggcagattctcacatttgcaaacatgacgactcagatcagcaagaagagaaagtttgtagcggacggtgtgttctacgctgaattgaatgaggttcttacaagagagctagcagaggatggttactctggtgttgaggttagggttactcctatgaggactgagattatcatcagagctacacgtactcagaatgttctcggtgagaaggggaggagaattagggaattgacttcccttgttcagaagagattcaagtttccagttgacagtgttgagctttatgccgagaaggttaacaacagaggtctctgtgccatcgctcaggctgagtctttacgttacaagcttcttggcataaagctcaacactgtcaactggaaacttgaatntcttctgaacaagggatctcaaaaccctaatatctgaacttcgccgtcgagagcatccatgggtcgtgtcatcagagctcaacgtaagggtgcgggttccgtcttcaaatcccacactcaccaccgcaaaggtccggctaagttccgtagcctcgatttcggcgagagaaatggttacctcaagggcgtcgtgacggagatcatccacgatcctggtcgtggtgctcctcttgctcgtgtcactttccgtcatcctttccgtttcaagaaacaaaaggagctcttcgtcgccgccgaaggtatgtacaccggtcagttcttgtactgcggtaagaaagctactctcgtcgttggaaatgttctccctcttagatctattcctgaaggagctgttgtctgcaacgtcgagcatcacgtcggtgatcgtggtgtcctcgctagagcttctggtgattacgccattgttatcgctcacaaccctgacagcgacactactaggattaagttgccatcgggttcgaagaagattgtcccaagtggatgcagggctatgattggacaagttgctggaggtggaagaactgagaagccgatgctcaaggcaggaaacgcgtaccacaagtaccgtgtgaagaggaactcatggcctaaggttcgtggtgtggctatgaatccagtggagcatcctcatggaggaggtaaccatcagcacattggtcacgccagtactgttaggcgtgatgcacctcctggacagaaggttggtcttattgctgcaaggaggactggtcgtctcagaggtcaagctgctgcttcagctgccaaggcagactagagttaaaagagataaactttgtttctcttgttttctatgtttcaagttttgttgtctgtgtttccttttgaacctcattctgaaatcctaaaagatttttatgataaacctttctctctt

SEQ ID NO: 8364 - protein, 258 aa, Arabidopsis thaliana [sequence omitted]

SEQ ID NO: 8365 - protein, 177 aa, Arabidopsis thaliana
MYTGQFLYCGKKATLVVGNVLPLRSIPEGAVVCNVEHHVGDRGVLARASGDYAIVIAHNPDSDTTRIKLPSGSKKIVPSGCRAMIGQVAGGGRTEKPMLKAGNAYHKYRVKRNSWPKVRGVAMNPVEHPHGGGNHQHIGHASTVRRDAPPGQKVGLIAARRTGRLRGQAAASAAKAD

SEQ ID NO: 8366 - protein, 134 aa, Arabidopsis thaliana
  misc_feature (123)..(123): Xaa can be any naturally occurring amino acid
MTTQISKKRKFVADGVFYAELNEVLTRELAEDGYSGVEVRVTPMRTEIIIRATRTQNVLGEKGRRIRELTSLVQKRFKFPVDSVELYAEKVNNRGLCAIAQAESLRYKLLGIKLNTVNWKLEXLLNKGSQNPNI

SEQ ID NO: 8367 - DNA, 1374 bp, Arabidopsis thaliana
agggcagttcactggtgcatgggtttgtggaagagaagttgtgcggctgttatatatatcagagaagcgccttcaacaaccgcctcttagggcgtataaaatcagaaacagaaacgagacaagaattaattctctcgtccaaatttcttctgggcagaaaccaacatttatccttatccgattcttctagggtttcggaagatctaaccagaaccttcgcaacaagatggataagtatcagagagttgagaagccgaaggcggatacgccgattgctgagaatgagattcgtatcaccagtatgggtagggcacggaactacatcacctatgcgatggctcttcttcaggaaaacaaatcgaatgaagttatcttcaaggctatgggaagagctatcaacaagagtgtgaccatagttgagctgattaagagaaggattcctggtcttcatcagatcacatctattggatcaacggacattacagatacctgggaacctacagaggaaggccttcaaacaattgagaccacgaggcatgtgtcgatgataaccataacactttccaaggagcagttgaacacatcctcagttgggtaccagtgtccgattcctattgagatggtgaagccattggctgagattgactacgaagggcaagacggatctcctagaggcagaggaggaagaagaggtagaggaggaagaggaaggggaaggggaagaggtggtagaggaaatggacctgcgaatgttgagtatgatgatggaggaaggggaagaggtggcagaggaaacggatatgtgaacaatgagtatgatgatggaggaaggggaagaggcggcagaggaagtggatatgggaatgtgaacaatgagtataatgatggaggtatggagcaggaccggtcatatggcagaggacgcgggcgtgggagaggaggtggacgtggtggtcgaggaagaggaggttacaatggccccccaccaccttactatgaagctcaacaagatggaggagactatggatacaacaatgttgctcctccagcagaccatggatatgatggtcctccgcctcagggacgtggacgtggccgtggaaggggaggtcgtggaagaggaggaggccgtggtggattcaacagatcaaatggagcacctatccaggctgctgcatgagcgaccagggtcattgaatgaagttggatctttcttacattctcatgtttttgtctctgttcttcaaagcaacttgttgccgtagaataatctttcgttcatgtcgctttaggttatatatatcctcatttattttatcatggatcttggattttcaagtttttattccttcaagagttttctagttttgtcat

SEQ ID NO: 8368 - protein, 317 aa, Arabidopsis thaliana
MDKYQRVEKPKADTPIAENEIRITSMGRARNYITYAMALLQENKSNEVIFKAMGRAINKSVTIVELIKRRIPGLHQITSIGSTDITDTWEPTEEGLQTIETTRHVSMITITLSKEQLNTSSVGYQCPIPIEMVKPLAEIDYEGQDGSPRGRGGRRGRGGRGRGRGRGGRGNGPANVEYDDGGRGRGGRGNGYVNNEYDDGGRGRGGRGSGYGNVNNEYNDGGMEQDRSYGRGRGRGRGGGRGGRGRGGYNGPPPPYYEAQQDGGDYGYNNVAPPADHGYDGPPPQGRGRGRGRGGRGRGGGRGGFNRSNGAPIQAAA

SEQ ID NO: 8369 - protein, 292 aa, Arabidopsis thaliana
MGRARNYITYAMALLQENKSNEVIFKAMGRAINKSVTIVELIKRRIPGLHQITSIGSTDITDTWEPTEEGLQTIETTRHVSMITITLSKEQLNTSSVGYQCPIPIEMVKPLAEIDYEGQDGSPRGRGGRRGRGGRGRGRGRGGRGNGPANVEYDDGGRGRGGRGNGYVNNEYDDGGRGRGGRGSGYGNVNNEYNDGGMEQDRSYGRGRGRGRGGGRGGRGRGGYNGPPPPYYEAQQDGGDYGYNNVAPPADHGYDGPPPQGRGRGRGRGGRGRGGGRGGFNRSNGAPIQAAA

SEQ ID NO: 8370 - protein, 281 aa, Arabidopsis thaliana
MALLQENKSNEVIFKAMGRAINKSVTIVELIKRRIPGLHQITSIGSTDITDTWEPTEEGLQTIETTRHVSMITITLSKEQLNTSSVGYQCPIPIEMVKPLAEIDYEGQDGSPRGRGGRRGRGGRGRGRGRGGRGNGPANVEYDDGGRGRGGRGNGYVNNEYDDGGRGRGGRGSGYGNVNNEYNDGGMEQDRSYGRGRGRGRGGGRGGRGRGGYNGPPPPYYEAQQDGGDYGYNNVAPPADHGYDGPPPQGRGRGRGRGGRGRGGGRGGFNRSNGAPIQAAA

SEQ ID NO: 8371 - DNA, 1624 bp, Arabidopsis thaliana
aaaaacgaaaaacctctcttttgtcgttcctctgctttcttcgatttgcttctgctttcttcgatttgcttctgctttcatcgcggttcaggtcactcttttctcagccatggcgattcctttcatggaaaccgtcgtgggttttatgatagtgatgtacatttttgagacgtatttggatctgaggcaactcactgctctcaagcttccaactctcccgaaaaccttggttggtgtaattagccaagagaagtttgagaaatcacgagcatacagtcttgacaaaagctattttcactttgttcatgagtttgtaactatacttatggactctgcaattttgttctttgggatcttgccttggttttggaagatgtctggagctgttttaccgaggttgggccttgatccagagaatgaaatactgcatactctttcattcttggctggtgttatgacatggtcacagatcactgatttgccattttctttgtactcaactttcgtgatcgagtctcggcatgggttcaacaaacaaacaatatggatgttcattagggacatgatcaaaggaacattcctctctgtcatactaggcccacccattgttgctgcgataattttcatagtccagaaaggaggtccttatcttgccatctatctgtgggcattcatgtttatcctgtctctagtgatgatgactatatacccggtcttgatagcaccgctcttcaacaagttcactcctcttccagatggagacctccgggagaagattgagaaacttgcttcttctctaaagtttcctttgaagaagctgtttgttgtcgatggatctacaaggtcaagccatagcaatgcttacatgtatggtttctttaagaacaaaaggattgttctttatgatacgttgattcagcagtgcaagaatgaggatgaaattgtggcggttattgcacacgagcttggacattggaaactgaatcacactacatactcgttcattgcagttcaaatccttgccttcttacaatttggaggatacactcttgtcagaaactccactgatctcttcaggagtttcggatttgatacacagcctgttctcattggtttgatcatatttcagcacactgtaataccactgcaacatctagtaagctttggcctgaacctcgttagtcgagcgtttgagtttcaggctgatgcttttgctgtgaagcttggctatgcaaaagatcttcgtcctgctctagtgaaactacaggaagagaacttatcagcaatgaacactgatccattgtactcagcttatcactactcacatcctcctcttgttgaaaggcttcgagccattgatggagaagacaagaagacagattaagtccgcttaactcgtctcttgtacgggttgatgtcttttaggtgacaggtcgaaacaaaacaaaaaaaagtgtaaaaccatataggcagaggcctcttttgtttgttttttacttttacagtgggttttgcctagttactactagtttttgagtttcttaaaagtggaatcactcgcacggttcgatatgatcatttctgattcgtcttcttttattaaaatgaggagaatctaacgtgt

SEQ ID NO: 8372 - protein, 460 aa, Arabidopsis thaliana
KTKNLSFVVPLLSSICFCFLRFASAFIAVQVTLFSAMAIPFMETVVGFMIVMYIFETYLDLRQLTALKLPTLPKTLVGVISQEKFEKSRAYSLDKSYFHFVHEFVTILMDSAILFFGILPWFWKMSGAVLPRLGLDPENEILHTLSFLAGVMTWSQITDLPFSLYSTFVIESRHGFNKQTIWMFIRDMIKGTFLSVILGPPIVAAIIFIVQKGGPYLAIYLWAFMFILSLVMMTIYPVLIAPLFNKFTPLPDGDLREKIEKLASSLKFPLKKLFVVDGSTRSSHSNAYMYGFFKNKRIVLYDTLIQQCKNEDEIVAVIAHELGHWKLNHTTYSFIAVQILAFLQFGGYTLVRNSTDLFRSFGFDTQPVLIGLIIFQHTVIPLQHLVSFGLNLVSRAFEFQADAFAVKLGYAKDLRPALVKLQEENLSAMNTDPLYSAYHYSHPPLVERLRAIDGEDKKTD

SEQ ID NO: 8373 - protein, 424 aa, Arabidopsis thaliana
MAIPFMETVVGFMIVMYIFETYLDLRQLTALKLPTLPKTLVGVISQEKFEKSRAYSLDKSYFHFVHEFVTILMDSAILFFGILPWFWKMSGAVLPRLGLDPENEILHTLSFLAGVMTWSQITDLPFSLYSTFVIESRHGFNKQTIWMFIRDMIKGTFLSVILGPPIVAAIIFIVQKGGPYLAIYLWAFMFILSLVMMTIYPVLIAPLFNKFTPLPDGDLREKIEKLASSLKFPLKKLFVVDGSTRSSHSNAYMYGFFKNKRIVLYDTLIQQCKNEDEIVAVIAHELGHWKLNHTTYSFIAVQILAFLQFGGYTLVRNSTDLFRSFGFDTQPVLIGLIIFQHTVIPLQHLVSFGLNLVSRAFEFQADAFAVKLGYAKDLRPALVKLQEENLSAMNTDPLYSAYHYSHPPLVERLRAIDGEDKKTD

SEQ ID NO: 8374 - protein, 419 aa, Arabidopsis thaliana
METVVGFMIVMYIFETYLDLRQLTALKLPTLPKTLVGVISQEKFEKSRAYSLDKSYFHFVHEFVTILMDSAILFFGILPWFWKMSGAVLPRLGLDPENEILHTLSFLAGVMTWSQITDLPFSLYSTFVIESRHGFNKQTIWMFIRDMIKGTFLSVILGPPIVAAIIFIVQKGGPYLAIYLWAFMFILSLVMMTIYPVLIAPLFNKFTPLPDGDLREKIEKLASSLKFPLKKLFVVDGSTRSSHSNAYMYGFFKNKRIVLYDTLIQQCKNEDEIVAVIAHELGHWKLNHTTYSFIAVQILAFLQFGGYTLVRNSTDLFRSFGFDTQPVLIGLIIFQHTVIPLQHLVSFGLNLVSRAFEFQADAFAVKLGYAKDLRPALVKLQEENLSAMNTDPLYSAYHYSHPPLVERLRAIDGEDKKTD

SEQ ID NO: 8375 - DNA, 1290 bp, Arabidopsis thaliana
aagcaaataattacgagattagcctcgcactgaacttcaattctctctttccttttttccgttcgatgagagcttaagctctgccgcgttttcgttctccgatctttttccatttttatcagtttcttctcttccaaattagggtttttcttttcagtctttgggaatgattttgatgcggtgaaaaagttttttttttttgagggggaaggatttctgggtttgctcttagggttttgtcttttcaatcgccggagcctgaaataatccggcagatatggcgtctgaattgccgatgagccctcatttggagcagattcacggagaaatccgtgaccatttccgagccctcgcgaatggcttccagaggttggataagatcaaggattctagtagacaaagcaagcaactcgaagaacttgctgagaagatgagagactgtaaaaggttggttaaggagtttgatcgtgaactcaaagatggggaagctcgaaattctcctcaagtaaataagcaattgaatgatgagaaacaatctatgattaaggaactcaactcttatgttgcactaagaaaaacgtacttgaatacactcggcaacaagaaagttgaactttttgatactggagctggagtcagcggtgaacccacagctgaagaaaacgtccaaatggcttcaacaatgtcaaaccaagagcttgtcgatgctggaatgaaaaggatggacgagactgaccaggctattgaacgttctaaacaggttgtgcatcagacactcgaagttggcactcaaactgcatctaacttaaagggacagacggatcaaatgggccgcgttgtaaacgacctagacacaattcagttctctcttaagaaagcttcgcagctggtgaaagagataggaagacaggtagctacagataaatgcataatggcgttcctgtttctgattgtctgtggtgttatagctataatcattgtgaagatcgtgaacccaaacaacaaagacatcagagacatccctggactagctcctccagcgcaatcgagaaagctcttgtacttcagagaatagccttttggcagggccgagagggaaggtttggtgcatattacacttgctgttgcgtgtgtgttcattctttcatgaaagagggcttgtttatgtcatttaaatttgagctttcattagagttttgtatcatatatcatcattctttaacttatgaccacatgttgtataattttataccaagttcaatatattttataagatccgttttattgtcc

SEQ ID NO: 8376 - protein, 265 aa, Arabidopsis thaliana
MASELPMSPHLEQIHGEIRDHFRALANGFQRLDKIKDSSRQSKQLEELAEKMRDCKRLVKEFDRELKDGEARNSPQVNKQLNDEKQSMIKELNSYVALRKTYLNTLGNKKVELFDTGAGVSGEPTAEENVQMASTMSNQELVDAGMKRMDETDQAIERSKQVVHQTLEVGTQTASNLKGQTDQMGRVVNDLDTIQFSLKKASQLVKEIGRQVATDKCIMAFLFLIVCGVIAIIIVKIVNPNNKDIRDIPGLAPPAQSRKLLYFRE

SEQ ID NO: 8377 - protein, 259 aa, Arabidopsis thaliana
MSPHLEQIHGEIRDHFRALANGFQRLDKIKDSSRQSKQLEELAEKMRDCKRLVKEFDRELKDGEARNSPQVNKQLNDEKQSMIKELNSYVALRKTYLNTLGNKKVELFDTGAGVSGEPTAEENVQMASTMSNQELVDAGMKRMDETDQAIERSKQVVHQTLEVGTQTASNLKGQTDQMGRVVNDLDTIQFSLKKASQLVKEIGRQVATDKCIMAFLFLIVCGVIAIIIVKIVNPNNKDIRDIPGLAPPAQSRKLLYFRE

SEQ ID NO: 8378 - protein, 214 aa, Arabidopsis thaliana
MRDCKRLVKEFDRELKDGEARNSPQVNKQLNDEKQSMIKELNSYVALRKTYLNTLGNKKVELFDTGAGVSGEPTAEENVQMASTMSNQELVDAGMKRMDETDQAIERSKQVVHQTLEVGTQTASNLKGQTDQMGRVVNDLDTIQFSLKKASQLVKEIGRQVATDKCIMAFLFLIVCGVIAIIIVKIVNPNNKDIRDIPGLAPPAQSRKLLYFRE

SEQ ID NO: 8379 - DNA, 2134 bp, Arabidopsis thaliana
aagagactctctcctcttcacttcgcgaactcagaaaaatcaaatctttctctctctctctctcgttgaaaacccatttctgtattgtgttgaagctacgttactactaagaagaagtgaagcaaaaacagaggtttttgaaaatggagaaaaaacaaggctttttctctgctctcagacacgaagttgtgagaggtctttcgccgtcacgatccagagcaaggtctcgttccgttagtcccgctaggtctagttcacccatgtcagctctcacttggggaagaaagaacttaactggaggaggcggtggtggtggtggcggaggttactatttagcgcaaccagagcagttaattgggagatccggaagtttgagacctgtaatggaaggtcctgatccagatgaaggaggaggaggtggtaatataggagaatctaaacgactcgggtcgggtttaggtcactgggttaaagggcagctgtctcgtgctccgtctgttgctgcgacggcggcttatcggagaaatgatctgagacttcttcttggtgtaatgggagctcctcttgctcctattcatgtctcttcctctgatcctttgcctcatcttagtatcaaaaacactccaatcgaaacatcatctgctcagtatattcttcaacagtacactgcagcttctggtggtcagaagctacaaaactccattaaaaacgcttatgcgatggggaagctcaagatgattacttcagagcttgaaactgctacaagaaccgttaggaatcgaaacccatctaaggctgagactggaggttttgttctttggcagatgaatccagacatgtggtatgttgagcttgctgttgggggtagtaaggttcgtgctggctgcaatggcaagcttgtatggagacacactccttggctcggatctcatactgctaaaggacctgtcagacctctccgccgtggacttcagggactagatccgagaacaactgctgcaatgtttgcggaagcgaagtgtataggagagaagaaggtgaatggtgaagattgcttcattttgaagttatgcactgaccctgaaacactaaaagcgaggagcgaaggaccggctgagatcattaggcatgtcctctttggctacttcagtcagaaaacagggctcttggttcacattgaggattcacatttgacccggattcaatctaacggtggagagactgttttctgggagaccacatacaactcgtccctagacgattaccgtcaggtcgaaggaatcatgattgctcactcgggacattcagttgtgacactattcagatttggggaagtggcgacgagccatacgaggacaaagatggaagaaagctggacgattgaggaagttgcgtttaacgttcctggtctgtctctcgattgctttataccaccagctgatcttaagaccggttctttaaccgaatcctgcgagtacccacaagaggaaagaggcaagaacaacacactcgcattgtctgcagctcacagggccaaagttgcagccttggagaacgggagcttggaagatcaccgcccggtttggcatactgatgtctaacgcttaaagagagagcttatgactaaaaacaacctttgaaggtagcattagccaaggatgattctcaaagatcagatgcaatgtgtttatatgccggtaactcaagctaaccccttttagcagctttatcgattaggaatcaggttcgttagcttaaccgatgatttgcgggttcaaacagaactcaaatgaatcatcctttttactcaaaatctcaggagaatgagatggagtttggatttggtttttacttaatctttcagtttgggtttatttttttaattctcaccttcaatatttttgagtaaggtgaaggcaagagaaggagaattgccctgcttttacttatatagtttctagcattttaagtgtttgtgttttaatcaaccctctaactacgaatcttgaattgttccatctttctttttcaatctatggagatatgtttggcttttttaccttttcttatcttcaaatcttttgttaatgcctttggtctctctgccatgatctaatccaataatcctcttggc

SEQ ID NO: 8380 - protein, 485 aa, Arabidopsis thaliana
MEKKQGFFSALRHEVVRGLSPSRSRARSRSVSPARSSSPMSALTWGRKNLTGGGGGGGGGGYYLAQPEQLIGRSGSLRPVMEGPDPDEGGGGGNIGESKRLGSGLGHWVKGQLSRAPSVAATAAYRRNDLRLLLGVMGAPLAPIHVSSSDPLPHLSIKNTPIETSSAQYILQQYTAASGGQKLQNSIKNAYAMGKLKMITSELETATRTVRNRNPSKAETGGFVLWQMNPDMWYVELAVGGSKVRAGCNGKLVWRHTPWLGSHTAKGPVRPLRRGLQGLDPRTTAAMFAEAKCIGEKKVNGEDCFILKLCTDPETLKARSEGPAEIIRHVLFGYFSQKTGLLVHIEDSHLTRIQSNGGETVFWETTYNSSLDDYRQVEGIMIAHSGHSVVTLFRFGEVATSHTRTKMEESWTIEEVAFNVPGLSLDCFIPPADLKTGSLTESCEYPQEERGKNNTLALSAAHRAKVAALENGSLEDHRPVWHTDV

SEQ ID NO: 8381 - protein, 446 aa, Arabidopsis thaliana
MSALTWGRKNLTGGGGGGGGGGYYLAQPEQLIGRSGSLRPVMEGPDPDEGGGGGNIGESKRLGSGLGHWVKGQLSRAPSVAATAAYRRNDLRLLLGVMGAPLAPIHVSSSDPLPHLSIKNTPIETSSAQYILQQYTAASGGQKLQNSIKNAYAMGKLKMITSELETATRTVRNRNPSKAETGGFVLWQMNPDMWYVELAVGGSKVRAGCNGKLVWRHTPWLGSHTAKGPVRPLRRGLQGLDPRTTAAMFAEAKCIGEKKVNGEDCFILKLCTDPETLKARSEGPAEIIRHVLFGYFSQKTGLLVHIEDSHLTRIQSNGGETVFWETTYNSSLDDYRQVEGIMIAHSGHSVVTLFRFGEVATSHTRTKMEESWTIEEVAFNVPGLSLDCFIPPADLKTGSLTESCEYPQEERGKNNTLALSAAHRAKVAALENGSLEDHRPVWHTDV

SEQ ID NO: 8382 - protein, 405 aa, Arabidopsis thaliana
MEGPDPDEGGGGGNIGESKRLGSGLGHWVKGQLSRAPSVAATAAYRRNDLRLLLGVMGAPLAPIHVSSSDPLPHLSIKNTPIETSSAQYILQQYTAASGGQKLQNSIKNAYAMGKLKMITSELETATRTVRNRNPSKAETGGFVLWQMNPDMWYVELAVGGSKVRAGCNGKLVWRHTPWLGSHTAKGPVRPLRRGLQGLDPRTTAAMFAEAKCIGEKKVNGEDCFILKLCTDPETLKARSEGPAEIIRHVLFGYFSQKTGLLVHIEDSHLTRIQSNGGETVFWETTYNSSLDDYRQVEGIMIAHSGHSVVTLFRFGEVATSHTRTKMEESWTIEEVAFNVPGLSLDCFIPPADLKTGSLTESCEYPQEERGKNNTLALSAAHRAKVAALENGSLEDHRPVWHTDV

SEQ ID NO: 8383 - DNA, 1981 bp, Arabidopsis thaliana
aacaacgtgtttgtgactttgtgattggattctccactcactgctccagatttgaataaacacaacctaaacaaatcgagagagtcagatatggcggcaacgaagtggcgtgacatcgatgatcttcccaagattccggccaactacacggcgttgactccgctttggttccttgatagggctgccgtggttcatccgaccagaaaatctgtgattcacggatcgcgagagtacacgtggcgccagacttatgaccggtgtcgccgactcgcctccgctctcgccgatcgatcaatcggtcccggttcaacggtggctattattgcacctaacatcccagcaatgtacgaagctcatttcggagtaccaatgtgtggagctgttctgaattgtgtcaacatccgtctcaatgccccaacagtcgcttttcttcttagtcactcgcagagctctgttataatggtggatcaggagttctttactctggctgaggattctttgagacttatggaggagaaagctggaagtagcttcaaacgcccgcttttaatcgtcattggtgatcacacctgtgctcctgagtcacttaaccgggctttgtcgaagggagctatagaatatgaggattttcttgcaaccggagatccaaattatccgtggcagccaccagctgatgagtggcagagcatcgctcttggttatacctcgggaacaactgctagtccgaaaggagtggtgcttcatcatcgaggtgcgtatataatggctttgagcaatcctctcatttgggggatgcaagatggtgctgtttacttgtggactctccctatgtttcattgcaacggttggtgtttcccttggtcccttgctgtgctctctggtacaagcatctgtctccgtcaggttacggcgaaggaagtgtattcaatgatagccaaatacaaggtaactcatttctgtgcagctcctgtggtcctcaacgctattgtcaatgctcctaaagaagacactatccttcctcttccccatacagtccatgtcatgacagcaggagctgctcctccaccttctgttctcttctccatgaaccagaagggcttccgagtcgctcacacctatgggctttccgagacttatggtccttccaccgtatgcgcttggaaacccgagtgggattccctccctcctgagacgcaggccaagctcaatgctcgccaaggtgtccgctatactggcatggagcagcttgatgtcattgacactcagaccggaaaacctgttcctgcagatggaaaaaccgcaggagaaattgttttccgagggaatatggtgatgaaaggctatctaaagaatccggaagcgaacaaagagacatttgctggtgggtggttccactcgggggatattgcagtgaaacacccagacaactatatcgagatcaaggacaggtcaaaggacgttataatctctgggggcgagaatatcagcagtgtcgaagtcgaaaacgtagtgtaccatcaccccgcggttcttgaagcctctgttgtggccaggccagacgagcggtggcaagaatctccgtgtgcgtttgtgacacttaagagcgattacgagaagcatgaccagaataagttggctcaggatataatgaaattctgccgggagaagcttccggcatattgggtcccaaagtcagtggtgtttgggccgttaccaaagacagcaactggaaaaattcagaagcatattctgaggaccaaggccaaagagatgggaccagtaccaagaagcaggttataggaagtgataaagctttaagaacaacattttgaaaataatgtgttgtatgtttttgcggaactttgccttgtgtgtaaactttcaaatgataacagaaaatattctctttattttcaacgctttcattgtgtttataaatcgtttactcttgattaataacagcgataaagattgacatacc

SEQ ID NO: 8384 - protein, 569 aa, Arabidopsis thaliana
MAATKWRDIDDLPKIPANYTALTPLWFLDRAAVVHPTRKSVIHGSREYTWRQTYDRCRRLASALADRSIGPGSTVAIIAPNIPAMYEAHFGVPMCGAVLNCVNIRLNAPTVAFLLSHSQSSVIMVDQEFFTLAEDSLRLMEEKAGSSFKRPLLIVIGDHTCAPESLNRALSKGAIEYEDFLATGDPNYPWQPPADEWQSIALGYTSGTTASPKGVVLHHRGAYIMALSNPLIWGMQDGAVYLWTLPMFHCNGWCFPWSLAVLSGTSICLRQVTAKEVYSMIAKYKVTHFCAAPVVLNAIVNAPKEDTILPLPHTVHVMTAGAAPPPSVLFSMNQKGFRVAHTYGLSETYGPSTVCAWKPEWDSLPPETQAKLNARQGVRYTGMEQLDVIDTQTGKPVPADGKTAGEIVFRGNMVMKGYLKNPEANKETFAGGWFHSGDIAVKHPDNYIEIKDRSKDVIISGGENISSVEVENVVYHHPAVLEASVVARPDERWQESPCAFVTLKSDYEKHDQNKLAQDIMKFCREKLPAYWVPKSVVFGPLPKTATGKIQKHILRTKAKEMGPVPRSRL

SEQ ID NO: 8385 - protein, 485 aa, Arabidopsis thaliana
MYEAHFGVPMCGAVLNCVNIRLNAPTVAFLLSHSQSSVIMVDQEFFTLAEDSLRLMEEKAGSSFKRPLLIVIGDHTCAPESLNRALSKGAIEYEDFLATGDPNYPWQPPADEWQSIALGYTSGTTASPKGVVLHHRGAYIMALSNPLIWGMQDGAVYLWTLPMFHCNGWCFPWSLAVLSGTSICLRQVTAKEVYSMIAKYKVTHFCAAPVVLNAIVNAPKEDTILPLPHTVHVMTAGAAPPPSVLFSMNQKGFRVAHTYGLSETYGPSTVCAWKPEWDSLPPETQAKLNARQGVRYTGMEQLDVIDTQTGKPVPADGKTAGEIVFRGNMVMKGYLKNPEANKETFAGGWFHSGDIAVKHPDNYIEIKDRSKDVIISGGENISSVEVENVVYHHPAVLEASVVARPDERWQESPCAFVTLKSDYEKHDQNKLAQDIMKFCREKLPAYWVPKSVVFGPLPKTATGKIQKHILRTKAKEMGPVPRSRL

SEQ ID NO: 8386 - protein, 476 aa, Arabidopsis thaliana
MCGAVLNCVNIRLNAPTVAFLLSHSQSSVIMVDQEFFTLAEDSLRLMEEKAGSSFKRPLLIVIGDHTCAPESLNRALSKGAIEYEDFLATGDPNYPWQPPADEWQSIALGYTSGTTASPKGVVLHHRGAYIMALSNPLIWGMQDGAVYLWTLPMFHCNGWCFPWSLAVLSGTSICLRQVTAKEVYSMIAKYKVTHFCAAPVVLNAIVNAPKEDTILPLPHTVHVMTAGAAPPPSVLFSMNQKGFRVAHTYGLSETYGPSTVCAWKPEWDSLPPETQAKLNARQGVRYTGMEQLDVIDTQTGKPVPADGKTAGEIVFRGNMVMKGYLKNPEANKETFAGGWFHSGDIAVKHPDNYIEIKDRSKDVIISGGENISSVEVENVVYHHPAVLEASVVARPDERWQESPCAFVTLKSDYEKHDQNKLAQDIMKFCREKLPAYWVPKSVVFGPLPKTATGKIQKHILRTKAKEMGPVPRSRL

SEQ ID NO: 8387 - DNA, 1398 bp, Arabidopsis thaliana
atagagaagtgaagagacagagatagttgtgacagagagattcatggcggaagcttgcggagtgagaaggatgaagctgggaagccaaggccttgaggtatctgcgcaaggccttggttgcatgggcctctccgctttctacggtgctcccaagccggaaaatgaagccatcgctctcatccaccacgctattcactccggcgttactctccttgacacctccgatatctacggccctgagaccaatgaagttctcctcggaaaggctctcaaggatggggtgagagaaaaagtggaacttgcgaccaaatttggaatcagttatgcagaggggaaaagagaggtcagaggagatcctgaatatgtaagggctgcttgtgaggcaagtttaaagaggctagatattgcctgcatcgatctctattatcagcatcgtgtcgatactcgtgtccctatcgaaatcactatgggagaactgaagaagctggttgaagagggtaaaataaagtacattggtttgtctgaagcctctgcctcaactatcagaagagcacatgctgttcacccaattactgccgtgcagatagaatggtccttgtggacgagagatgtggaagaagaaatcattccgacctgcagggaacttgggattgggattgttgcttacagtcctctaggacgaggtttcttcgcatctggacccaagcttgttgagaacctagaaaaggatgacttcagaaaggctctaccaagattccaagaggaaaacttagaccacaacaagattgtttatgaaaaagtttgtgcaatatcggagaagaaagggtgcactcctggacaactagccctggcatgggttcatcaccagggagatgacgtttgccctatcccaggaaccactaagatcgagaacctcaaacagaacattggagctttgtcagtgaaactcactcctgaagagatgactgagcttgaggccattgcccaaccaggttttgtgaaaggagatagatacagtaacatgataccaactttcaagaacgctgagacaccaccattgtctgcttggaaagccgcttaaaaccggctgaagtttctacggttgtggtggtgcatcatgacattgaagtggtcttaactttctgtcagctagatcagtgtgttggggaataatggtgcgtcttcgagagtagagtatcattcccacggaaacccaagtatcatggttaatgccttgaagaataaataatgtagagttccccaagtgaaaacttcaattttacatttccatacattgtaaccaaactctataaataaagtgttgtgatacataccttaccaaaaaaggctatctatattgtaaaattcatcttctactcaataacttgtgcttctctc

SEQ ID NO: 8388 - protein, 345 aa, Arabidopsis thaliana
MAEACGVRRMKLGSQGLEVSAQGLGCMGLSAFYGAPKPENEAIALIHHAIHSGVTLLDTSDIYGPETNEVLLGKALKDGVREKVELATKFGISYAEGKREVRGDPEYVRAACEASLKRLDIACIDLYYQHRVDTRVPIEITMGELKKLVEEGKIKYIGLSEASASTIRRAHAVHPITAVQIEWSLWTRDVEEEIIPTCRELGIGIVAYSPLGRGFFASGPKLVENLEKDDFRKALPRFQEENLDHNKIVYEKVCAISEKKGCTPGQLALAWVHHQGDDVCPIPGTTKIENLKQNIGALSVKLTPEEMTELEAIAQPGFVKGDRYSNMIPTFKNAETPPLSAWKAA

SEQ ID NO: 8389 - protein, 336 aa, Arabidopsis thaliana
MKLGSQGLEVSAQGLGCMGLSAFYGAPKPENEAIALIHHAIHSGVTLLDTSDIYGPETNEVLLGKALKDGVREKVELATKFGISYAEGKREVRGDPEYVRAACEASLKRLDIACIDLYYQHRVDTRVPIEITMGELKKLVEEGKIKYIGLSEASASTIRRAHAVHPITAVQIEWSLWTRDVEEEIIPTCRELGIGIVAYSPLGRGFFASGPKLVENLEKDDFRKALPRFQEENLDHNKIVYEKVCAISEKKGCTPGQLALAWVHHQGDDVCPIPGTTKIENLKQNIGALSVKLTPEEMTELEAIAQPGFVKGDRYSNMIPTFKNAETPPLSAWKAA

SEQ ID NO: 8390 - protein, 319 aa, Arabidopsis thaliana
MGLSAFYGAPKPENEAIALIHHAIHSGVTLLDTSDIYGPETNEVLLGKALKDGVREKVELATKFGISYAEGKREVRGDPEYVRAACEASLKRLDIACIDLYYQHRVDTRVPIEITMGELKKLVEEGKIKYIGLSEASASTIRRAHAVHPITAVQIEWSLWTRDVEEEIIPTCRELGIGIVAYSPLGRGFFASGPKLVENLEKDDFRKALPRFQEENLDHNKIVYEKVCAISEKKGCTPGQLALAWVHHQGDDVCPIPGTTKIENLKQNIGALSVKLTPEEMTELEAIAQPGFVKGDRYSNMIPTFKNAETPPLSAWKAA

SEQ ID NO: 8391 - DNA, 1663 bp, Arabidopsis thaliana
gtctcgttgtcctcctcactttcatcagccgttttgaatctccggcgacttgacagagaagaacaaggaagaagactaagagagaaagtaagagataatccaggagattcattctccgttttgaatcttcctcaatctcatcttcttccgctctttctttccaagctcataaaaaatggctgaggctgatgatattcaaccaatcgtgtgtgacaatggtaccggtatggtgaaggctggatttgcaggagatgatgctcccagggctgtttttcccagtgttgttggtaggccaagacatcatggtgtcatggttgggatgaaccagaaggatgcatatgttggtgatgaagcacaatccaagagaggtattcttaccttgaagtatcctattgagcatggtgttgttagcaactgggatgatatggaaaagatctggcatcacactttctacaatgagcttcgtattgctcctgaagagcaccctgttcttcttaccgaggctcctcttaacccaaaggccaacagagagaagatgactcaaatcatgtttgagacctttaactctcccgctatgtatgtcgccatccaagctgttctctccttgtacgccagtggtcgtacaaccggtattgtgctggattctggtgatggtgtgtctcacactgtgccaatctacgagggtttctctcttcctcatgccatcctccgtcttgaccttgctggacgtgaccttactgattacctcatgaagatccttacagagagaggttacatgttcaccacaacagcagagcgggaaattgtaagagacatcaaggagaagctctcctttgttgctgttgactacgagcaggagatggaaacctcaaagaccagctcttccatcgagaagaactatgaattacccgatgggcaagtcatcacgattggtgctgagagattcagatgcccagaagtcttgttccagccctcgtttgtgggaatggaagctgctggaatccacgagacaacctataactcaatcatgaagtgtgatgtggatatcaggaaggatctgtacggtaacattgtgctcagtggtggaaccactatgttctcaggtatcgctgaccgtatgagcaaagaaatcacagcacttgcaccaagcagcatgaagattaaggtcgttgcaccacctgaaaggaagtacagtgtctggatcggtggttccattcttgcttccctcagcacattccagcagatgtggatctccaaggccgagtatgatgaggcaggtccaggaatcgttcacagaaaatgtttctaagctctcaagatcaaaggcttaaaaagctggggttttatgaatgggatcaaagtttctttttttcttttatatttgcttctccatttgtttgtttcatttccctttttgttttcgtttctatgatgcacttgtgtgtgacaaactctctgggtttttacttacgtctgcgtttcaaaaaaaaaaaccgctttcgttttgcgttttagtcccattgttttgtagctctgagtgatcgaattgatgcctctttattccttttgttccctataatttctttcaaaactcagaagaaaaaccttgaaactctttgcaatgttaatataagtattgtataagatttttattgatttggtc

SEQ ID NO: 8392 - protein, 377 aa, Arabidopsis thaliana
MAEADDIQPIVCDNGTGMVKAGFAGDDAPRAVFPSVVGRPRHHGVMVGMNQKDAYVGDEAQSKRGILTLKYPIEHGVVSNWDDMEKIWHHTFYNELRIAPEEHPVLLTEAPLNPKANREKMTQIMFETFNSPAMYVAIQAVLSLYASGRTTGIVLDSGDGVSHTVPIYEGFSLPHAILRLDLAGRDLTDYLMKILTERGYMFTTTAEREIVRDIKEKLSFVAVDYEQEMETSKTSSSIEKNYELPDGQVITIGAERFRCPEVLFQPSFVGMEAAGIHETTYNSIMKCDVDIRKDLYGNIVLSGGTTMFSGIADRMSKEITALAPSSMKIKVVAPPERKYSVWIGGSILASLSTFQQMWISKAEYDEAGPGIVHRKCF

SEQ ID NO: 8393 - protein, 360 aa, Arabidopsis thaliana
MVKAGFAGDDAPRAVFPSVVGRPRHHGVMVGMNQKDAYVGDEAQSKRGILTLKYPIEHGVVSNWDDMEKIWHHTFYNELRIAPEEHPVLLTEAPLNPKANREKMTQIMFETFNSPAMYVAIQAVLSLYASGRTTGIVLDSGDGVSHTVPIYEGFSLPHAILRLDLAGRDLTDYLMKILTERGYMFTTTAEREIVRDIKEKLSFVAVDYEQEMETSKTSSSIEKNYELPDGQVITIGAERFRCPEVLFQPSFVGMEAAGIHETTYNSIMKCDVDIRKDLYGNIVLSGGTTMFSGIADRMSKEITALAPSSMKIKVVAPPERKYSVWIGGSILASLSTFQQMWISKAEYDEAGPGIVHRKCF

SEQ ID NO: 8394 - protein, 332 aa, Arabidopsis thaliana
MVGMNQKDAYVGDEAQSKRGILTLKYPIEHGVVSNWDDMEKIWHHTFYNELRIAPEEHPVLLTEAPLNPKANREKMTQIMFETFNSPAMYVAIQAVLSLYASGRTTGIVLDSGDGVSHTVPIYEGFSLPHAILRLDLAGRDLTDYLMKILTERGYMFTTTAEREIVRDIKEKLSFVAVDYEQEMETSKTSSSIEKNYELPDGQVITIGAERFRCPEVLFQPSFVGMEAAGIHETTYNSIMKCDVDIRKDLYGNIVLSGGTTMFSGIADRMSKEITALAPSSMKIKVVAPPERKYSVWIGGSILASLSTFQQMWISKAEYDEAGPGIVHRKCF

SEQ ID NO: 8395 - DNA, 2307 bp, Arabidopsis thaliana
ctaacgccgttagtcgttcttctctgttctctccatcaaattcgtcagaaaccaaagaagattcatcaattctcctctaacaccaatcctgcttgctttcactttccttctccgatttcgttctcacgccttcgcattcctttttttaatttcgtttcgaaacgcgtttcaaggttacgtcgatctcaaagtaacatcgccttcagagagaaattgataaaccttgctccaattccattgttattcatggctcttagaaactttacctagattactcggattcaatcgtcaagtttatattggatcgttgtgtcgtaggaaccctaatttcgagggcctgtgcactcactcactcactcaatttgcacaacaccctcagagaccaacaagagcaacatgaacgctccgatcatagatccattgcaaggagattttcctgaggtgattgaagaatatctggaacatggtgtcattaaatgcgttgcctttaatcaccgtggttctcttctcgctgctggatgtgccgatggtggctgtgtaatctgggatttcgaaacaagaggcattgcaaaggagattcgtgataatgattgttctgctgctataacaagtgtctcctggtccaaatatgggcaccgcctgcttgtctcagctgcagataagtcattaactctttgggatgtctcaaccggagagaagattgctcgtacgattcttcagcagactccgttgcaagctcgtttaaaccctggcttaagttctccttctctctgtctggcatgcccgctctcatccgctccgatgatagttgactttgacattgattgtacaactttgcttccagtctctgtgcctgagatgcctgatgtattagctcctccgcaacgcagtaaatgtcctgaatcaaatcctcctttctctccagctgcagcgtgctttaacaagtgtggggatcttgtttatatcggtaattccaaaggagagatacttatagttgattataaaagtgttcgagttcttgctttggtttctgcgtctggtgcggcacctgtggagaacattgtgtttagcaggaatgggcagtatcttctcacaaattcacatgatcgaaccattaggatatatgaaaatcttctcccagcaaaaaatgtgcttaaatcccttgaggacctggggaagaacatagatgggcttgatggtattgagaaaatgaagacagttggatcaaaatgcttaacactcttcagggaattccaagattcagttacaaaaatgcattggaaagcgccttgtttcagtggtgatggtgagtgggtagttgggggttctgcgtgcaaaggggaacataagatctacatatgggaccgagctgggcatcttgtgaaaatattagaaggtccaaaagaagcgttgattgatctagcttggcatcctgttcatcccataatcgtttctgtttccttggcgggtctagtatatatttgggcaaaagattacacagagaactggagtgcatttgctcctgatttcaaggagcttgaggagaatgaagagtatgtggaacgcgaagatgaatttgatttgatacctgaaacagaaaaggtaaaagttttagatgttaatgaagatgaagaagttgacatagatacggtggaaaaggatgcttttagtgattcagatatgtcagtggaggaactccgctaccttccagctgaacctattccagatacaaatgaccagcaagacaatttggttgaaagcataaagttaattgaaggtcagatatctgcatctcctgcttctgaagaggctggtcagaatggacaccatgcatcaagtccacaagcagaagaaatgggtgagacacgaggaaagagaaagaggaaaccatcagagaaagccatggagctgcaggcagagaaggcaaaaccattgaaagggtcaggcaaaacagtaagagcaaaaaacagagcagcgtttgatcaagaaaccgatgacagtataaatggtggtgatgatgatgatgatgcatattattaacaaattaggtttactaacctttatgtatgcaaaaagaaaaacaaacgcagtaagctaggacatggaatgatatttgtttgaatttttcttgttgttggaggcaatgttgtgttcttcttcattacctcgacgcagctatgtgctgaatcaagttggggtatgcacaataggaaattatgtggcaagtagcttaaatttacgcataacgtcagttattaagacaactgtttagtattttggacacaaaattatgcagaaatatctttg

SEQ ID NO: 8396 - protein, 547 aa, Arabidopsis thaliana
MNAPIIDPLQGDFPEVIEEYLEHGVIKCVAFNHRGSLLAAGCADGGCVIWDFETRGIAKEIRDNDCSAAITSVSWSKYGHRLLVSAADKSLTLWDVSTGEKIARTILQQTPLQARLNPGLSSPSLCLACPLSSAPMIVDFDIDCTTLLPVSVPEMPDVLAPPQRSKCPESNPPFSPAAACFNKCGDLVYIGNSKGEILIVDYKSVRVLALVSASGAAPVENIVFSRNGQYLLTNSHDRTIRIYENLLPAKNVLKSLEDLGKNIDGLDGIEKMKTVGSKCLTLFREFQDSVTKMHWKAPCFSGDGEWVVGGSACKGEHKIYIWDRAGHLVKILEGPKEALIDLAWHPVHPIIVSVSLAGLVYIWAKDYTENWSAFAPDFKELEENEEYVEREDEFDLIPETEKVKVLDVNEDEEVDIDTVEKDAFSDSDMSVEELRYLPAEPIPDTNDQQDNLVESIKLIEGQISASPASEEAGQNGHHASSPQAEEMGETRGKRKRKPSEKAMELQAEKAKPLKGSGKTVRAKNRAAFDQETDDSINGGDDDDDAYY

SEQ ID NO: 8397 - protein, 412 aa, Arabidopsis thaliana
MIVDFDIDCTTLLPVSVPEMPDVLAPPQRSKCPESNPPFSPAAACFNKCGDLVYIGNSKGEILIVDYKSVRVLALVSASGAAPVENIVFSRNGQYLLTNSHDRTIRIYENLLPAKNVLKSLEDLGKNIDGLDGIEKMKTVGSKCLTLFREFQDSVTKMHWKAPCFSGDGEWVVGGSACKGEHKIYIWDRAGHLVKILEGPKEALIDLAWHPVHPIIVSVSLAGLVYIWAKDYTENWSAFAPDFKELEENEEYVEREDEFDLIPETEKVKVLDVNEDEEVDIDTVEKDAFSDSDMSVEELRYLPAEPIPDTNDQQDNLVESIKLIEGQISASPASEEAGQNGHHASSPQAEEMGETRGKRKRKPSEKAMELQAEKAKPLKGSGKTVRAKNRAAFDQETDDSINGGDDDDDAYY

SEQ ID NO: 8398 - protein, 393 aa, Arabidopsis thaliana
MPDVLAPPQRSKCPESNPPFSPAAACFNKCGDLVYIGNSKGEILIVDYKSVRVLALVSASGAAPVENIVFSRNGQYLLTNSHDRTIRIYENLLPAKNVLKSLEDLGKNIDGLDGIEKMKTVGSKCLTLFREFQDSVTKMHWKAPCFSGDGEWVVGGSACKGEHKIYIWDRAGHLVKILEGPKEALIDLAWHPVHPIIVSVSLAGLVYIWAKDYTENWSAFAPDFKELEENEEYVEREDEFDLIPETEKVKVLDVNEDEEVDIDTVEKDAFSDSDMSVEELRYLPAEPIPDTNDQQDNLVESIKLIEGQISASPASEEAGQNGHHASSPQAEEMGETRGKRKRKPSEKAMELQAEKAKPLKGSGKTVRAKNRAAFDQETDDSINGGDDDDDAYY

SEQ ID NO: 8399 - DNA, 1754 bp, Arabidopsis thaliana
tggaatctcacacaccgaaagttattttcgaatccactaacgaatcttccacagcaaacacttttgtgttcctctgtaatttctcagtatatatagataccaaaacaagcagtgaaaaatggctatggcgagtttatatcggcgatctcttccttctcctccggccattgacttttcttccgccgaaggcaagctaatcttcaatgaagcgcttcagaaaggaactatggaaggatttttcaggttgatttcgtattttcagacacaatccgaacctgcgtattgtggtttggctagtctctcagtggtgttgaatgctctttctatcgatcctggacgtaaatggaaagggccttggaggtggtttgatgaatcaatgttggattgctgcgaacctctggaagtagtgaaggaaaaaggcatttcatttggaaaagttgtctgtttggctcattgttcaggagcaaaagttgaggctttccgtacaagtcagagcaccattgatgatttccgcaaatttgtcgtcaaatgcacgagttctgagaattgtcatatgatctcaacatatcaccgaggtgtatttaagcagactgggactggtcacttttcacctattggtggctataatgctgagagagatatggctttgattcttgatgttgctcgtttcaagtatccccctcactgggttcctcttaaacttctttgggaagccatggacagtattgatcagtcaacagggaaacgtagagggttcatgctcatatctagaccacacagagaacccggattgctctatactctgagctgcaaggatgaaagctggatcgaaatagccaagtatttgaaggaagatgttcctcgtcttgtaagttcacagcatgtagattctgtggagaaaatcatatcagttgtgttcaagtcacttccatcaaatttcaaccaattcatcagatgggtggctgagatccgaattacagaggactcaaaccaaaatctcagcgcagaggagaagtctaggctgaaactaaagcaattggtgctgaaggaagtgcacgaaactgaactgttcaaacacatcaataagttcttatccacagtgggttatgaagacagtctgacttatgctgctgcaaaggcttgttgccaaggagctgaaatcttatccggaagcccatcaaaagagttttgttgtcgggaaacttgcgtgaaatgcatcaaaggtcctgatgactctgaaggcacggtggtgactggagttgtggtgcgtgatgggaatgaacaaaaggttgatctgttagtgccatcgacgcaaactgagtgtgaatgtggtcctgaagcaacttatccagcaggaaacgatgtgttcactgcacttctattggctttacctccacagacatggtcagggatcaaagaccaagctcttatgcatgaaatgaagcagctcatttccatggcttccctcccaactttgcttcaagaagaggtattgcatcttcgacggcaacttcagctgctaaaacgatgccaagagaacaaggaagaggatgatctcgctgctcctgcctattagttcattgtcccaaatcctctctcttccccatttgaatcccacgttctcaacacttaattgttagaaagtctctttattctctgtacgattcaaactctatttgcaatgagagatatatgtaacttgcattctataaattgttaatcacaataagttaagaatcttagaatcatatttc

SEQ ID NO: 8400 - protein, 485 aa, Arabidopsis thaliana
MAMASLYRRSLPSPPAIDFSSAEGKLIFNEALQKGTMEGFFRLISYFQTQSEPAYCGLASLSVVLNALSIDPGRKWKGPWRWFDESMLDCCEPLEVVKEKGISFGKVVCLAHCSGAKVEAFRTSQSTIDDFRKFVVKCTSSENCHMISTYHRGVFKQTGTGHFSPIGGYNAERDMALILDVARFKYPPHWVPLKLLWEAMDSIDQSTGKRRGFMLISRPHREPGLLYTLSCKDESWIEIAKYLKEDVPRLVSSQHVDSVEKIISVVFKSLPSNFNQFIRWVAEIRITEDSNQNLSAEEKSRLKLKQLVLKEVHETELFKHINKFLSTVGYEDSLTYAAAKACCQGAEILSGSPSKEFCCRETCVKCIKGPDDSEGTVVTGVVVRDGNEQKVDLLVPSTQTECECGPEATYPAGNDVFTALLLALPPQTWSGIKDQALMHEMKQLISMASLPTLLQEEVLHLRRQLQLLKRCQENKEEDDLAAPAY

SEQ ID NO: 8401 - protein, 483 aa, Arabidopsis thaliana
MASLYRRSLPSPPAIDFSSAEGKLIFNEALQKGTMEGFFRLISYFQTQSEPAYCGLASLSVVLNALSIDPGRKWKGPWRWFDESMLDCCEPLEVVKEKGISFGKVVCLAHCSGAKVEAFRTSQSTIDDFRKFVVKCTSSENCHMISTYHRGVFKQTGTGHFSPIGGYNAERDMALILDVARFKYPPHWVPLKLLWEAMDSIDQSTGKRRGFMLISRPHREPGLLYTLSCKDESWIEIAKYLKEDVPRLVSSQHVDSVEKIISVVFKSLPSNFNQFIRWVAEIRITEDSNQNLSAEEKSRLKLKQLVLKEVHETELFKHINKFLSTVGYEDSLTYAAAKACCQGAEILSGSPSKEFCCRETCVKCIKGPDDSEGTVVTGVVVRDGNEQKVDLLVPSTQTECECGPEATYPAGNDVFTALLLALPPQTWSGIKDQALMHEMKQLISMASLPTLLQEEVLHLRRQLQLLKRCQENKEEDDLAAPAY

SEQ ID NO: 8402 - protein, 449 aa, Arabidopsis thaliana
MEGFFRLISYFQTQSEPAYCGLASLSVVLNALSIDPGRKWKGPWRWFDESMLDCCEPLEVVKEKGISFGKVVCLAHCSGAKVEAFRTSQSTIDDFRKFVVKCTSSENCHMISTYHRGVFKQTGTGHFSPIGGYNAERDMALILDVARFKYPPHWVPLKLLWEAMDSIDQSTGKRRGFMLISRPHREPGLLYTLSCKDESWIEIAKYLKEDVPRLVSSQHVDSVEKIISVVFKSLPSNFNQFIRWVAEIRITEDSNQNLSAEEKSRLKLKQLVLKEVHETELFKHINKFLSTVGYEDSLTYAAAKACCQGAEILSGSPSKEFCCRETCVKCIKGPDDSEGTVVTGVVVRDGNEQKVDLLVPSTQTECECGPEATYPAGNDVFTALLLALPPQTWSGIKDQALMHEMKQLISMASLPTLLQEEVLHLRRQLQLLKRCQENKEEDDLAAPAY

SEQ ID NO: 8403 - DNA, 480 bp, Arabidopsis thaliana
tttttccgattctagggtttttctttggcaaactcgatttcgcctagcttcttctgagcatccgccgcttccgtctacagaatggattctcaaatcaaacacgccgtggtcgtgaaggtcatgggtaggactggttctcgtggtcaggtcactcaggttagagtcaaattcactgattcagaccgtttcatcatgaggaacgtgaaaggacccgtcagagaaggagatgtcctcactctcctcgagtccgagagagaagctagaagactccgttgattccaccatatcccaattctctttcaaaagtcttaccaagatttacattttgatggtctcttgtttcttggcattgtagtcaagttctcttttctttttctactgctttgttttaattacttgaggttttgttaagacaatggttgaaatctaggaatgaatcttttatgacgcaatgaaaatgttccatcagtaatttcaatc

SEQ ID NO: 8404 - protein, 64 aa, Arabidopsis thaliana [sequence omitted]

SEQ ID NO: 8405 - protein, 51 aa, Arabidopsis thaliana
MGRTGSRGQVTQVRVKFTDSDRFIMRNVKGPVREGDVLTLLESEREARRLR

SEQ ID NO: 8406 - protein, 42 aa, Arabidopsis thaliana
MSSLSSSPREKLEDSVDSTISQFSFKSLTKIYILMVSCFLAL

SEQ ID NO: 8407 - DNA, 976 bp, Arabidopsis thaliana
tgagacgtcgaagatgaagttcaacgttgcgaatccaactactggatgccagaagaagctcgagatcgacgatgaccagaaactacgtgcgttttacgacaagagaatctctcaagaagtcagtggagatgctttgggcgaggagttcaaaggatacgttttcaagatcaagggtggttgcgataagcaaggtttcccaatgaagcagggagttttgactccaggccgtgttcgccttttgcttcaccgaggaactccttgcttcagaggacatggaaggagaactggtgagaggagaagaaagtctgttcgtggttgcattgtgagccctgatctctctgttctgaaccttgtcattgtgaagaagggtgagaacgatcttcctgggcttaccgatactgagaagccaagaatgagaggaccaaagagagcctccaagatccgtaaactgtttaacctcaagaaggaagatgatgtcaggacctatgtcaacacttaccgccgcaagttcacaaacaagaagggcaaggaagttagcaaagcccctaagatccagaggcttgtgaccccattgactcttcagaggaagagagctagaattgctgacaagaagaagaaaattgctaaggctaattctgatgctgctgattaccagaagcttctcgcctcgaggttgaaggaacagcgtgacaggaggagtgagagtttggcaaagaagaggtcgagactctcttctgctgctgccaagccctctgtcacagcttaaaaaagcttgagaatcaaatcaaagatgtcacctttctagttttgttctcttttcttctccggctattaaaaagttagttcgagttcatattcagctgtttttgttccaagacatgggtacacaatcgctttgggcttgtttcatgatttatgcttttagttgaagaccattttaaactcaatttttattgcttatctttctcagtttttg

SEQ ID NO: 8408 - protein, 254 aa, Arabidopsis thaliana
ETSKMKFNVANPTTGCQKKLEIDDDQKLRAFYDKRISQEVSGDALGEEFKGYVFKIKGGCDKQGFPMKQGVLTPGRVRLLLHRGTPCFRGHGRRTGERRRKSVRGCIVSPDLSVLNLVIVKKGENDLPGLTDTEKPRMRGPKRASKIRKLFNLKKEDDVRTYVNTYRRKFTNKKGKEVSKAPKIQRLVTPLTLQRKRARIADKKKKIAKANSDAADYQKLLASRLKEQRDRRSESLAKKRSRLSSAAAKPSVTA

SEQ ID NO: 8409 - protein, 250 aa, Arabidopsis thaliana
MKFNVANPTTGCQKKLEIDDDQKLRAFYDKRISQEVSGDALGEEFKGYVFKIKGGCDKQGFPMKQGVLTPGRVRLLLHRGTPCFRGHGRRTGERRRKSVRGCIVSPDLSVLNLVIVKKGENDLPGLTDTEKPRMRGPKRASKIRKLFNLKKEDDVRTYVNTYRRKFTNKKGKEVSKAPKIQRLVTPLTLQRKRARIADKKKKIAKANSDAADYQKLLASRLKEQRDRRSESLAKKRSRLSSAAAKPSVTA

SEQ ID NO: 8410 - protein, 188 aa, Arabidopsis thaliana
MKQGVLTPGRVRLLLHRGTPCFRGHGRRTGERRRKSVRGCIVSPDLSVLNLVIVKKGENDLPGLTDTEKPRMRGPKRASKIRKLFNLKKEDDVRTYVNTYRRKFTNKKGKEVSKAPKIQRLVTPLTLQRKRARIADKKKKIAKANSDAADYQKLLASRLKEQRDRRSESLAKKRSRLSSAAAKPSVTA

SEQ ID NO: 8411 - DNA, 3198 bp, Arabidopsis thaliana
acaatcctcataatcactttcgaaattacatttacgctttcttgcaatcaaattttccgatcttaagttcagaagacgatgtcagaggtggaaatagagaacgctgctacgatcgaaggaaacaccgctgcggatgcgccggtgacggatgcggccgttgagaagaagcctgcagcgaaaggacgaaagacgaagaatgttaaggaagtgaaggagaagaagactgttgctgccgctccgaagaagagaactgtttcatctcatcctacttacgaagagatgattaaggatgcgattgttacgttgaaagagagaactggatctagccaatacgcgattcagaagttcatcgaggagaagcgtaaggagcttcctccaacattcagaaagctgttgcttctcaatctgaagagactcgttgcttctgggaagcttgtgaaggtcaaagcctcgtttaaactcccatcggcgtcggctaaagcatcatcccctaaggcggcagcggagaaatctgctcctgcgaagaagaaaccggcgactgtggcggttaccaaggcgaagagaaaggtcgctgcggcttccaaggctaagaaaacaatcgccgttaaacctaagactgctgctgctaagaaagtgaccgcgaaggctaaggctaagcccgttcctcgtgccactgctgctgcaactaagaggaaagctgttgatgcgaagcccaaggctaaggctagaccagccaaggcagccaaaacggccaaggttacatctccggctaagaaagctgttgctgccacgaagaaagttgctacggtggccacaaagaagaagactccggttaagaaggttgtgaagccaaagacggttaagtctccagcaaagagggcttcttctagggttaagaagtgaagttagggtttgtaggtagaagaatggttaacgatagtttagacttgtataattcaatcatctttatgcgactttgtttgcttttcttctttcagtgttcttgttattcacagttcctttggactacccaaaaaaaaaaaaaaaactatccagggttggatccaaccctggatagtttttttttttttttttttttttttttttaaaaagaaacttttttttttttttaccacatgattcaaaataaatttacacaattcttacatgtactttataataaattttttacaacataacctttatataaagggaacaaaccccagtttaccgtttaccaaaaatcaagtagaatccattcccatcatcaaccaaaaggccttatcagctttagatctatttcatttccatcttatgcttttctctctattgattacagaaaagcataaacaaccatagtcttgtcttcttcatctgatcattagttgtcgtgcctttacatttcagcgaatctgatggtattgtgtaatgcctcgttttggtggtagctttctcaagatgaagaggaccagagaggagggtaatatctctaccaacaggtaatatatgaagttaaggatggggtgatctaacacatcaaggtttgccccctcatcgaaagcagcaaagcacatcatgatacatctgatgaggaaacacgtaaagcatatggttgtcacgtaaccaacctcttgcagctttttgcgccgccctttagattctactggaaaccgttgcaacattaggaaaagccttccaccataaagtaaaaatccaagggcagcgaacaatgaaacacctgcaaagaacatcttagataggattaccataactcgaacaggcttccaccacaaaaccaaccatagagcaatctgaactacatatacaactgcattaattgtgaagaagcttggcctgagtccatcagtcgatactgcacgcgcctgataataaatttcagcccagaaaagaaccagaagagcataggtggtgaagaaagcaagacttggaatatcaagcaagatatgttgcagaatctctggttgcataaactgaacatttcgcctgaagacaaacaccacagcacgaactccattaacaacgaaattgagaaagtgaaagaccttttgcgtcgtccaaccatattcaggaactctcaattgtattctcacaagttgaatcacagcaacgagggaaacgattccgtagagaacagcgagaacatggaagatacgatcctgccaaatcggagattcgtttacgtctgaccaccaattcgaagcttctttgagattcaacatctccaccgccgacgaagacgacgacgacatcatctccgacgcaaatttcgtaacctcgacgccgccgattctcatctacacgagtcagattccttctcgattcagattttgaatatacataatgagaactctctggatttgaatcacctctttttatttctttctttttttgttattttccccacggttctcgagaaccgattcatctttccagctttcttcactttttcctttatataaagttagaaaaacaaaaaaaaacaaaatagttagaaaaaatctgagagaaacagaagaaacataaaaaaaatgaggccattgagcattaaaccaacatcgttagatgtagctagacatgccacatcagtagaatcatttgggaatcaccgaccgccgatatcgccgtggcactcaccggtgccgtacctattcggtggtcttgcggcgatgttaggcctcatagccttcgctttacttatcctagcctgctcttactggcgcttgtcaacctccggtgatgactccggcgaaagagtcgacgaggaaaaagagagtcggtctggagtgaaggcggctagcgcggcgtgcgaggagaaggttcttgtcataatggccggagatgacttgccgaggtttctggccacgccggcggcgaacaaatgcatgtgcggtcacgagggtagaatggtaattttcaaggaggatggtattggtgctggagaggagaaaatgggagacagagagaaagccaaagaaaatgaagaaacaacgagtcagtgagcttttttgttttcttttcttctctcagtcttgtctttttttttttgttggggaattttccttcgtgttttcacgggaaatgtaaaatttactgagagaaaattttgggttatgattaatgaatgtttgcttgtaatttcctatccccaatggtggaaaactcgtttttagtttttgt

SEQ ID NO: 8412 - protein, 274 aa, Arabidopsis thaliana; identical to SEQ ID NO: 3175

SEQ ID NO: 8413 - protein, 207 aa, Arabidopsis thaliana; identical to SEQ ID NO: 3176

SEQ ID NO: 8414 - protein, 156 aa, Arabidopsis thaliana
MRPLSIKPTSLDVARHATSVESFGNHRPPISPWHSPVPYLFGGLAAMLGLIAFALLILACSYWRLSTSGDDSGERVDEEKESRSGVKAASAACEEKVLVIMAGDDLPRFLATPAANKCMCGHEGRMVIFKEDGIGAGEEKMGDREKAKENEETTSQ

SEQ ID NO: 8415 - DNA, 1401 bp, Arabidopsis thaliana
aaaattaagatccctcgagcctctctctctctctacacactcccatagaaataaatattttcaagaaccaaaaagtttgttataagcggtttcatattattcttcttcatcgattcttgattttgcaagaagacaattcaagaaagcgatttagaagacggaggagttcttaccggagatcttatacttatggatggaatgtacaatttccattcggccggtgattattcagataagtcggttctgatgatgtcaccggagagtctcatgtttccttccgattaccaagctttgctatgttcctccgccggtgaaaatcgtgtctctgatgttttcggatccgacgagctactctcagtagccgtctccgctttgtcgtcggaggcggcttcgatcgctccggagatccgaagaaatgatgataacgtttctctaactgtcatcaaagctaaaatcgcttgtcatccttcgtatcctcgcttacttcaagcttacatcgattgccaaaagaaacaggtcggagcaccaccggagatagcgtgtttactagaggagattcaacgggagagtgatgtttataagcaagaggttgttccttcttcttgctttggagctgatcctgagcttgatgaatttatggaaacgtactgcgatatattagtgaaatacaaatcggatctagcaagaccgtttgacgaggcaacgtgtttcttgaacaagattgagatgcagctacggaacctatgtactggtgtcgagtctgccaggggagtttctgaggatggtgtaatatcatctgacgaggaactgagtggaggtgatcatgaggtagcagaggatgggagacaaagatgtgaagaccgggacctcaaagataggttgctacgcaaatttggaagccgtattagtactttaaagcttgagttctcaaagaagaagaagaaaggaaagttaccaagagaagcaagacaagctcttcttgattggtggaatctccattataagtggccttaccctactgaaggagataagatagcattagctgatgcaacggggttagaccaaaaacaaatcaacaattggtttataaaccaaaggaaacgtcattggaagccatcagagaatatgcctttcgctatgatggatgattctagtggatcattctttaccgaggaatgaatttatttatggtacttatttaacgttacttaaaaagatggatgtataattctgccttgctttgcggacaatcaaaggaaaaaagaaaagaaagagtgaagcatggacgacacatgaattaatgaatattacactcactcacatgtagtagaaggaacaagggaacaagtcaaaatgctttgtaactattattatcggtgaataaaaataacttcttttgtc

SEQ ID NO: 8416 - protein, 329 aa, Arabidopsis thaliana
MDGMYNFHSAGDYSDKSVLMMSPESLMFPSDYQALLCSSAGENRVSDVFGSDELLSVAVSALSSEAASIAPEIRRNDDNVSLTVIKAKIACHPSYPRLLQAYIDCQKKQVGAPPEIACLLEEIQRESDVYKQEVVPSSCFGADPELDEFMETYCDILVKYKSDLARPFDEATCFLNKIEMQLRNLCTGVESARGVSEDGVISSDEELSGGDHEVAEDGRQRCEDRDLKDRLLRKFGSRISTLKLEFSKKKKKGKLPREARQALLDWWNLHYKWPYPTEGDKIALADATGLDQKQINNWFINQRKRHWKPSENMPFAMMDDSSGSFFTEE

SEQ ID NO: 8417 - protein, 326 aa, Arabidopsis thaliana
MYNFHSAGDYSDKSVLMMSPESLMFPSDYQALLCSSAGENRVSDVFGSDELLSVAVSALSSEAASIAPEIRRNDDNVSLTVIKAKIACHPSYPRLLQAYIDCQKKQVGAPPEIACLLEEIQRESDVYKQEVVPSSCFGADPELDEFMETYCDILVKYKSDLARPFDEATCFLNKIEMQLRNLCTGVESARGVSEDGVISSDEELSGGDHEVAEDGRQRCEDRDLKDRLLRKFGSRISTLKLEFSKKKKKGKLPREARQALLDWWNLHYKWPYPTEGDKIALADATGLDQKQINNWFINQRKRHWKPSENMPFAMMDDSSGSFFTEE

SEQ ID NO: 8418 - protein, 310 aa, Arabidopsis thaliana
MMSPESLMFPSDYQALLCSSAGENRVSDVFGSDELLSVAVSALSSEAASIAPEIRRNDDNVSLTVIKAKIACHPSYPRLLQAYIDCQKKQVGAPPEIACLLEEIQRESDVYKQEVVPSSCFGADPELDEFMETYCDILVKYKSDLARPFDEATCFLNKIEMQLRNLCTGVESARGVSEDGVISSDEELSGGDHEVAEDGRQRCEDRDLKDRLLRKFGSRISTLKLEFSKKKKKGKLPREARQALLDWWNLHYKWPYPTEGDKIALADATGLDQKQINNWFINQRKRHWKPSENMPFAMMDDSSGSFFTEE

SEQ ID NO: 8419 - DNA, 610 bp, Arabidopsis thaliana
aatttcaattttaaagataaaagtaaatgaactggtaagccactggttttggttctgctcttaccgttatcccaacttccatatccaaactgaaagacactggttttggttttgtcgggaaaaggagaaacttcaaaaagatgcccactttgaatctcttcactaacataccagtcgacgccgtcacttgctcagacatcctcaaggacgccactaaggccgtcgctaaaatcatcggcaaacctgaatcctatgtgatgatactgcttaacagtggagtgcccattgcatttgccggtacctaggaacctgctgcatatggagaattgatatctattgggggattaggacctggcgtaaacgggaagcttagcgagacgatatctgagattctccaaattaagctctccatagacagctctcgcttttatatcaaattctacgattctccgcgacctttcttcggttacaatggatcaactttctgaaaagaggcgaattcaaccttgtaatgatatttgggttagaactgtttgcttattcatttcaaaagctgtaattctgaaccataatttataattttacctccctcaaagccaatatatttcgt

SEQ ID NO: 8420 - protein, 54 aa, Arabidopsis thaliana
ISILKIKVNELVSHWFWFCSYRYPNFHIQTERHWFWFCREKEKLQKDAHFESLH

SEQ ID NO: 8421 - protein, 54 aa, Arabidopsis thaliana
MPTLNLFTNIPVDAVTCSDILKDATKAVAKIIGKPESYVMILLNSGVPIAFAGT

SEQ ID NO: 8422 - protein, 35 aa, Arabidopsis thaliana
MDQLSEKRRIQPCNDIWVRTVCLFISKAVILNHNL

SEQ ID NO: 8423 - DNA, 1061 bp, Arabidopsis thaliana
atgtcttcatcacctcttctttaacgcctctggctctgcatttctcagtctttttgcacaagaaacaaagctcaggaaaacctcaaaaccctaagctatgagaacaagcaaccatctcataggtttagtcaacttcctcactttcctcctctcaataccaatcctcggcggtggaatatggttaagcagccgagctaactccaccgactgtttaagattccttcaatggcctctcatcgtcatcggaatctcaatcatggtcgtatctttagctggattcgctggagcttgttaccgtaacaagttccttatgtggctatacctagtagtcatgcttctcatcatcgctgctcttatcggtttcatcatcttcgcttacgcggttacagataaaggatccggtcgaaccgtacttaaccggggttatcttgactattatcttgaagattactctggttggttgaaagatcgagtttctgatgatagctattggggtaaaattagttcttgtcttagagattctggtgcttgtagaaagatcgaagaaattttaatggtgtacctgaaactgctgatatgttcttccttagaagacttagccctgttgagtccggttgttgcaagccaccaacagattgcggtttttcatatgtgaatgagaccggatgggacacgagaggagggatgataggaccgaaccaggactgtatggtgtggagcaacgaccagagcatgctctgttatcagtgtagttcttgtaaagctggtgttcttgggagtttgaagaagagttggagaaaagtatcggtgatcaacattgtggtacttatcattctagttatcttttacgttatcgcttatgcagcttataggaatgtcaagaggaacgataacgatgaaccggctggtgaagctaggatgacaaaatcacatcctagtcatttccatctttgatcaaaatttggaacagttcaaaaaaatgtatcgaggctttgatttatgtttaaaggttttagtacttttgtgtatgtttttggtatgtaacacatttttttgtgtgc

SEQ ID NO: 8424 - protein, 185 aa, Arabidopsis thaliana
MRTSNHLIGLVNFLTFLLSIPILGGGIWLSSRANSTDCLRFLQWPLIVIGISIMVVSLAGFAGACYRNKFLMWLYLVVMLLIIAALIGFIIFAYAVTDKGSGRTVLNRGYLDYYLEDYSGWLKDRVSDDSYWGKISSCLRDSGACRKIEEILMVYLKLLICSSLEDLALLSPVVASHQQIAVFHM

SEQ ID NO: 8425 - protein, 132 aa, Arabidopsis thaliana
MVVSLAGFAGACYRNKFLMWLYLVVMLLIIAALIGFIIFAYAVTDKGSGRTVLNRGYLDYYLEDYSGWLKDRVSDDSYWGKISSCLRDSGACRKIEEILMVYLKLLICSSLEDLALLSPVVASHQQIAVFHM

SEQ ID NO: 8426 - protein, 125 aa, Arabidopsis thaliana
MFFLRRLSPVESGCCKPPTDCGFSYVNETGWDTRGGMIGPNQDCMVWSNDQSMLCYQCSSCKAGVLGSLKKSWRKVSVINIVVLIILVIFYVIAYAAYRNVKRNDNDEPAGEARMTKSHPSHFHL

SEQ ID NO: 8427 - DNA, 839 bp, Arabidopsis thaliana
  misc_feature (786)..(786): n is a, c, g, or t
  misc_feature (792)..(792): n is a, c, g, or t
  misc_feature (825)..(825): n is a, c, g, or t
  misc_feature (831)..(831): n is a, c, g, or t
atcctaatcaaaaacacgtttgcgtttagtaaccgaaagaaccaaactgataaatactacttctcctatgggaatagtttttggtaaaacttacataatgggaatggttttcggtaaaatcgctgtagagactcctaaatacacggtgactaaatccggtgacggttatgagatccgtgaatacccaccagcggttgcggcggaggttacatacgatgcgtcggagttcaaaggtgataaagacggaggctttcaggttttggctaagtacataggtgtgtttggcaaaccggagaatgagaaaccggagaaaattgctatgactgcaccggtgatcactaaggaaggtgagaagattgcgatgactgctccggtgattactaaggagagtgagaagattgagatgacttctccggttgtgactaaggaaggtggtgaaggagggaagaagatggtgacgatgcagtttttgttgccgtcgatgtataagaaggcggaggaggcaccgcgtccgacggatgagagggttgtgattaaggaggaaggagggaggaagtatggtgtggttaagtttagtggtatagcgtcggagagtgtggtgagtgagaaggtgaagaagctgagtagtgatcttgagaaagatggttttaagatcaccggagatttcgttcttgctaggtataatcctccatggacgttaccaccgtttaggaccaatgaggtcatgattcctgttgaatgaatttgatccaaagtttcctgcttttggtttcaaagaacttgttnttattntgtttcactgtgtttgtagttgtaagaagcatnacaatnatgtatac

SEQ ID NO: 8428 - protein, 224 aa, Arabidopsis thaliana
MGIVFGKTYIMGMVFGKIAVETPKYTVTKSGDGYEIREYPPAVAAEVTYDASEFKGDKDGGFQVLAKYIGVFGKPENEKPEKIAMTAPVITKEGEKIAMTAPVITKESEKIEMTSPVVTKEGGEGGKKMVTMQFLLPSMYKKAEEAPRPTDERVVIKEEGGRKYGVVKFSGIASESVVSEKVKKLSSDLEKDGFKITGDFVLARYNPPWTLPPFRTNEVMIPVE

SEQ ID NO: 8429 - protein, 214 aa, Arabidopsis thaliana
MGMVFGKIAVETPKYTVTKSGDGYEIREYPPAVAAEVTYDASEFKGDKDGGFQVLAKYIGVFGKPENEKPEKIAMTAPVITKEGEKIAMTAPVITKESEKIEMTSPVVTKEGGEGGKKMVTMQFLLPSMYKKAEEAPRPTDERVVIKEEGGRKYGVVKFSGIASESVVSEKVKKLSSDLEKDGFKITGDFVLARYNPPWTLPPFRTNEVMIPVE

SEQ ID NO: 8430 - protein, 212 aa, Arabidopsis thaliana
MVFGKIAVETPKYTVTKSGDGYEIREYPPAVAAEVTYDASEFKGDKDGGFQVLAKYIGVFGKPENEKPEKIAMTAPVITKEGEKIAMTAPVITKESEKIEMTSPVVTKEGGEGGKKMVTMQFLLPSMYKKAEEAPRPTDERVVIKEEGGRKYGVVKFSGIASESVVSEKVKKLSSDLEKDGFKITGDFVLARYNPPWTLPPFRTNEVMIPVE

SEQ ID NO: 8431 - DNA, 2359 bp, Arabidopsis thaliana
tggaggcgcgatgcctcaggcgtacttcatcacgcaactatcacgagcctctctgtcgttatatacgactttcagtttttcttctgatttgggaaagaatcaaacttttgaatgtgaagttgcttctttcgtctcaagatctctctttatctctctatctgtttgattgagggtttttgttggatggcactttgtggtgtttgttcgactccaaatctgccgaatttacaagtgtttcgttctgttaggaactcgagcattggttataaacgaaaccatagtctatggcagctcagaagttcatcatttcgtgctaaatctgtgatatttcattgttcatcgtccttaagacagtcaccatctaatgtggaggagatagatgataatccttcggtatcattagaggatgaatcagcacatgtgatgcagttcaagtggtctgattttaggattcttgatcgtgttagcattggtcatggcggcagggctgatgagcttgtgtttgaagctatagttcaggttccagatagccctttgtttaaccaaggagttgttcttcggaaattgaataccactcgagctcaaagacgaggaagaagagctatagaagtttttaagaagctagttcgtcggagacttctctaccattcttactcaatgcaagttcacggttatatcaccaataacttaagcgatgatcagtactcatttacccttgtacatgggtgccatggaagtttctcgattaggcactggcttcaacaatctgattggattccaacattagaagctactcttgcattagatgaagaatcctttcgaagggtgggtgatgatactactggagggcctgcagtttcaaggcagttaagactaatccgtacactaatgagggatattttgatcggagtcaattacttgcacagccatggtctggctcacacagaactgagattggaaaatgtgcatattagccctgtggatagacatatcaaagtagggattctcggaaatgctgctgactttaacggggatgttccaagtactagcaacgcttacagtaccatggacagacgacaaatgatgatagcatttgacatgagatgtgttggattcatgatggcaaaaatggtacttcaagaattgatggatccattaatctttgcgaaattgaagtctttcctggcaaaggggaatgatccttcctcgctgcgggagttttttgtgacgacgctcaatacaaactctgaatctggaaataccggagtgcaaatacttgatagaaactggggagcaggttggcaccttttatctttgttaattgctaccagaccttctgaaagaataagttgcttggatgctcttaagcatccctttctatgtggaccaagatggcgtgttgccccatcaatggatatcatcagatggggtcttggatcaaccgcagtaaagatttcagaagaatacatttaccgcatgcctcagcgccaaagacttgcccacttcattggactgatggagatgctaaatccttatccaaagccaaactgttggttggagcttttaccgggaagatggcgtcttttatactcaactggaaagcacataggtctaactctgcgtcagccttccacacgtgccttaataggcaacgttcacttaacgataactcgagcttcagaatccataaacaacacttcactttcctttacctctgatatacgcttcactgccataaccagcaaagactggccacacaacaaaatcggagctgctgggaaattacaaacgctctctcaattcagactaatagctggaaaaagactttacctcaaagaagagaaaaagaacattggtaagttctcaatgggtgaaccagatgctgaagaaggtttagccgagaagcttgaaaccgagaaatggaaaaaagtcgtgcccttcaaggagtttccgtcgagtcttcctgtagcaaaactcgtctctggagaaatcgaagtgacgatgaacatgaatgatcatatagattcacctgggagtgtgattggagaagttagaaagcaaattccgccggaaatgttcgatctttctaagcttgtgtgtgggacttatatagacagtaggttacttgtacttaggtgtgtaaatggttcagcattgttgttcacaaggtccagcttggaccataagtctatgtagccatttggctcaggttcttatgtatataacaaatgaatcattctttttgggactaaaccgttgtagtctctgtgtatgttgtggtaatgtatgcttttggcttttaggttgtaataagagctttttagtaaaagctttatactatggtattcttttcatgatt

SEQ ID NO: 8432 - protein, 670 aa, Arabidopsis thaliana
MALCGVCSTPNLPNLQVFRSVRNSSIGYKRNHSLWQLRSSSFRAKSVIFHCSSSLRQSPSNVEEIDDNPSVSLEDESAHVMQFKWSDFRILDRVSIGHGGRADELVFEAIVQVPDSPLFNQGVVLRKLNTTRAQRRGRRAIEVFKKLVRRRLLYHSYSMQVHGYITNNLSDDQYSFTLVHGCHGSFSIRHWLQQSDWIPTLEATLALDEESFRRVGDDTTGGPAVSRQLRLIRTLMRDILIGVNYLHSHGLAHTELRLENVHISPVDRHIKVGILGNAADFNGDVPSTSNAYSTMDRRQMMIAFDMRCVGFMMAKMVLQELMDPLIFAKLKSFLAKGNDPSSLREFFVTTLNTNSESGNTGVQILDRNWGAGWHLLSLLIATRPSERISCLDALKHPFLCGPRWRVAPSMDIIRWGLGSTAVKISEEYIYRMPQRQRLAHFIGLMEMLNPYPKPNCWLELLPGRWRLLYSTGKHIGLTLRQPSTRALIGNVHLTITRASESINNTSLSFTSDIRFTAITSKDWPHNKIGAAGKLQTLSQFRLIAGKRLYLKEEKKNIGKFSMGEPDAEEGLAEKLETEKWKKVVPFKEFPSSLPVAKLVSGEIEVTMNMNDHIDSPGSVIGEVRKQIPPEMFDLSKLVCGTYIDSRLLVLRCVNGSALLFTRSSLDHKSM

SEQ ID NO: 8433 - protein, 590 aa, Arabidopsis thaliana
MQFKWSDFRILDRVSIGHGGRADELVFEAIVQVPDSPLFNQGVVLRKLNTTRAQRRGRRAIEVFKKLVRRRLLYHSYSMQVHGYITNNLSDDQYSFTLVHGCHGSFSIRHWLQQSDWIPTLEATLALDEESFRRVGDDTTGGPAVSRQLRLIRTLMRDILIGVNYLHSHGLAHTELRLENVHISPVDRHIKVGILGNAADFNGDVPSTSNAYSTMDRRQMMIAFDMRCVGFMMAKMVLQELMDPLIFAKLKSFLAKGNDPSSLREFFVTTLNTNSESGNTGVQILDRNWGAGWHLLSLLIATRPSERISCLDALKHPFLCGPRWRVAPSMDIIRWGLGSTAVKISEEYIYRMPQRQRLAHFIGLMEMLNPYPKPNCWLELLPGRWRLLYSTGKHIGLTLRQPSTRALIGNVHLTITRASESINNTSLSFTSDIRFTAITSKDWPHNKIGAAGKLQTLSQFRLIAGKRLYLKEEKKNIGKFSMGEPDAEEGLAEKLETEKWKKVVPFKEFPSSLPVAKLVSGEIEVTMNMNDHIDSPGSVIGEVRKQIPPEMFDLSKLVCGTYIDSRLLVLRCVNGSALLFTRSSLDHKSM

SEQ ID NO: 8434 - protein, 512 aa, Arabidopsis thaliana
MQVHGYITNNLSDDQYSFTLVHGCHGSFSIRHWLQQSDWIPTLEATLALDEESFRRVGDDTTGGPAVSRQLRLIRTLMRDILIGVNYLHSHGLAHTELRLENVHISPVDRHIKVGILGNAADFNGDVPSTSNAYSTMDRRQMMIAFDMRCVGFMMAKMVLQELMDPLIFAKLKSFLAKGNDPSSLREFFVTTLNTNSESGNTGVQILDRNWGAGWHLLSLLIATRPSERISCLDALKHPFLCGPRWRVAPSMDIIRWGLGSTAVKISEEYIYRMPQRQRLAHFIGLMEMLNPYPKPNCWLELLPGRWRLLYSTGKHIGLTLRQPSTRALIGNVHLTITRASESINNTSLSFTSDIRFTAITSKDWPHNKIGAAGKLQTLSQFRLIAGKRLYLKEEKKNIGKFSMGEPDAEEGLAEKLETEKWKKVVPFKEFPSSLPVAKLVSGEIEVTMNMNDHIDSPGSVIGEVRKQIPPEMFDLSKLVCGTYIDSRLLVLRCVNGSALLFTRSSLDHKSM

SEQ ID NO: 8435 - DNA, 1590 bp, Arabidopsis thaliana
aaggatgttgcaagtcggtggtcctggttacgcgactcctctcgccgctatgtctggtccatcggagaaacttatctacgtaaccgccgtctacaccggaactggaatagataaaccggattatttggcgacggtggatgtagatccaagctcgccttcgtattcaagtgttattcatagattaccaatgccttttgttggtgatgagcttcatcattctggttggaactcttgtagttcttgccatggtgatgcttctgttgatagacgttatctcgtgttaccgtctcttatatctggtcgcatttatgcgattgatactaaggaaaacccgagggctccgtctttgtataagtatgttgatcctaaagagattgctgataagactggattggcgtttcctcacacggctcattgccgcacgggcgagatcttggtgtcctgtcttggagatgaagaggggaatgctaaggggaatgggcttcttcttcttgactctgattttaacatcaagaataggtgggagaaaccagacatcagtcctttgtatgggtatcatttttggtaccaacctcggcacaagaccatgatcagcacatcttggggagcacctaaagccttctctaaaggtttcaatcttcagcacgttgctgatggcttgtatggaagtcatctacatgtttatagttggccaggaggtgaaataaaacaattaattgaccttggaccgactggtctcttacctttggagattagattcttgcatgatccatctaaagatacagggtttgttgggagtgccttgtcgagtaatatgataagatttttcaagaacagtgatgaaacatggagccatgaggttgttatatcggttaaaccgttgaaagtcgaaaactggatacttccagaaatgccggggctaatcaccgacttcttgatctccctcgatgaccgatttatttactttgtgaactggctccatggagacattcgtcagtacaacatagaggaccctaaaaaccctgtattaacagggcaaatttgggttggaggattactacaaaagggcagtcctgttaaggcggttggagaagacggaaacactttccaattcgaggttcctcagatcaaggggaaatctttacgaggtggacctcaaatgattcagctgagcctcgatgggaaacgattgtatgcaacaaactcgctgtttagcgcatgggtcgtcagtttttatcctgaaatcatggagaaaggctcacacataattcagattgatggtgatacagaaaaaggtggtctcaccataaaccctgatttctttgtggactttggtgatgaaccagacggtccttcactagcccacgagatgagatatccaggtggagactgcacttccgatatctggatttgaatttggctttgtttagagtgtgttttgtgttaagtttaaattgagttttattatttgttgtgtgtttagtagagttgaataaaaaacccactaagatgactcagacaattaacacttgtttggtacattttgactcctatgtgtcttaagtaataaaactttctacaattcgactt

SEQ ID NO: 8436 - protein, 470 aa, Arabidopsis thaliana
RMLQVGGPGYATPLAAMSGPSEKLIYVTAVYTGTGIDKPDYLATVDVDPSSPSYSSVIHRLPMPFVGDELHHSGWNSCSSCHGDASVDRRYLVLPSLISGRIYAIDTKENPRAPSLYKYVDPKEIADKTGLAFPHTAHCRTGEILVSCLGDEEGNAKGNGLLLLDSDFNIKNRWEKPDISPLYGYHFWYQPRHKTMISTSWGAPKAFSKGFNLQHVADGLYGSHLHVYSWPGGEIKQLIDLGPTGLLPLEIRFLHDPSKDTGFVGSALSSNMIRFFKNSDETWSHEVVISVKPLKVENWILPEMPGLITDFLISLDDRFIYFVNWLHGDIRQYNIEDPKNPVLTGQIWVGGLLQKGSPVKAVGEDGNTFQFEVPQIKGKSLRGGPQMIQLSLDGKRLYATNSLFSAWVVSFYPEIMEKGSHIIQIDGDTEKGGLTINPDFFVDFGDEPDGPSLAHEMRYPGGDCTSDIWI

SEQ ID NO: 8437 - protein, 469 aa, Arabidopsis thaliana
MLQVGGPGYATPLAAMSGPSEKLIYVTAVYTGTGIDKPDYLATVDVDPSSPSYSSVIHRLPMPFVGDELHHSGWNSCSSCHGDASVDRRYLVLPSLISGRIYAIDTKENPRAPSLYKYVDPKEIADKTGLAFPHTAHCRTGEILVSCLGDEEGNAKGNGLLLLDSDFNIKNRWEKPDISPLYGYHFWYQPRHKTMISTSWGAPKAFSKGFNLQHVADGLYGSHLHVYSWPGGEIKQLIDLGPTGLLPLEIRFLHDPSKDTGFVGSALSSNMIRFFKNSDETWSHEVVISVKPLKVENWILPEMPGLITDFLISLDDRFIYFVNWLHGDIRQYNIEDPKNPVLTGQIWVGGLLQKGSPVKAVGEDGNTFQFEVPQIKGKSLRGGPQMIQLSLDGKRLYATNSLFSAWVVSFYPEIMEKGSHIIQIDGDTEKGGLTINPDFFVDFGDEPDGPSLAHEMRYPGGDCTSDIWI

SEQ ID NO: 8438 - protein, 454 aa, Arabidopsis thaliana
MSGPSEKLIYVTAVYTGTGIDKPDYLATVDVDPSSPSYSSVIHRLPMPFVGDELHHSGWNSCSSCHGDASVDRRYLVLPSLISGRIYAIDTKENPRAPSLYKYVDPKEIADKTGLAFPHTAHCRTGEILVSCLGDEEGNAKGNGLLLLDSDFNIKNRWEKPDISPLYGYHFWYQPRHKTMISTSWGAPKAFSKGFNLQHVADGLYGSHLHVYSWPGGEIKQLIDLGPTGLLPLEIRFLHDPSKDTGFVGSALSSNMIRFFKNSDETWSHEVVISVKPLKVENWILPEMPGLITDFLISLDDRFIYFVNWLHGDIRQYNIEDPKNPVLTGQIWVGGLLQKGSPVKAVGEDGNTFQFEVPQIKGKSLRGGPQMIQLSLDGKRLYATNSLFSAWVVSFYPEIMEKGSHIIQIDGDTEKGGLTINPDFFVDFGDEPDGPSLAHEMRYPGGDCTSDIWI

SEQ ID NO: 8439 - DNA, 2967 bp, Arabidopsis thaliana
agagaagagaatcttccaaaaatgttaaatcttgtgaaacaaataaagcatagcaaagcaaagtccaaagtccaatgagctaaaacaaaatcaaaaaggtttctttatgttttttttttttgaagtaagaaaaaaaaagagtttataaagaaacagtgaagaaataaatagcagaacaaagagaaagatcggagaaaagaatctttttaggctctctctcgcagacttcgcactcacacactcacttccattgctccaaaaaaacattgtatctacttcacttgctgtagagatatggtatcaagatcttattcaaacctcttggatcttgcttctggtaacttccattcgttttctcgagaaaagaagaggtttccaagagtagcaactgtcactggtgtcttatctgagctagatgatgataacaacagcaacagtgtctgctctgatgctccttcttccgtcacacaagatcgaatcatcatcgttggaaaccagcttcctattaaatcacatcggaactctgctggtaaattgagttttagttgggacaatgactcgcttctcttgcagcttaaagatggtatgcgtgaagatatggaagttgtctacattggttgccttaaggaacagattgatacagttgagcaagatgatgtttctcaaaggttgcttgagaatttcaaatgtgttcctgcttatatcccacctgagctattcactaagtactatcatggattctgtaagcaacatctatggcctttgtttcactacatgcttcccttaactcctgatcttggtggtagatttgatcgttctttatggcaagcttatctttcggttaacaagatctttgctgataaagtgatggaagtgattagtcctgatgatgattttgtttgggttcatgactatcacttaatggttttgcctacatttctaaggaagaggtttaatagagtaaagcttggttttttccttcatagcccgttcccttcctctgagatttaccgtactcttccagtgagaaatgagctcttacgtgcactcctcaacgctgatttgattggctttcatacctttgactatgcaagacacttcctttcttgttgtagcaggatgcttggtttatcctatcagtccaaacgtggaaccatagggcttgagtattatggtcgaacggttagtatcaagattcttcctgtggggattcatatcagccagcttcagtcaattttaaacctcccagagactcagaccaaagttgctgagctaagagatcagttcttggatcagaaagttcttctcggtgttgatgacatggacatcttcaaaggaatcagcctcaaactcttggcaatggaacaacttctcacacagcatcccgagaagagaggtcgagttgtacttgtccagattgcaaaccctgcaagaggtcgtgggaaagacgttcaggaggttcagtctgaaactgaagccacggttaaaaggatcaatgaaatgtttggaaggccgggctaccaacccgtggttctgattgatacaccgcttcaattctttgagaggattgcttactatgtcattgcagagtgttgtcttgttacagcggtaagagatggtatgaatcttataccttatgagtacattatctgcaggcaaggtaatccgaaactcaacgagactataggccttgacccttctgctgcaaagaagagtatgcttgttgtctctgagtttattggttgttctccttctttaagcggcgccattagagtaaatccgtggaacattgatgctgtgactgaagcaatggactatgcattgatagtttcagaagcagagaagcaaatgcgtcacgagaagcatcacaaatatgttagcacacatgatgttgcttattgggcgcgtagctttatacaagatcttgaaagggcttgcggggatcatgtgaggaagaggtgttgggggattggattcgggttaggctttagagttgtggcgcttgatccgagttttaaaaagctttcgattgagcacattgtctcagcttataagagaaccaagaaccgagccattttgttggattatgatggcacaatggtgcagccaggttccattaggacaacaccaacccgcgaaacaatcgaaatcttgaacaacctgtctagtgatcccaagaatatcgtgtacctcgtcagtgggaaagacagaaggacactaactgaatggttttcttcatgtgacgatctcggtttgggtgcagagcacgggtattttataaggccaaatgatggaacagactgggaaacgtcgagtttggtatcaggttttgagtggaaacaaatagcagagccagtgatgagactttacactgagactacagatggatcaacaatagagactaaagagactgctctcgtttggaattaccaattcgcagatcctgattttggatcttgtcaagccaaagagcttatggaacacctcgaaagcgtgcttaccaatgatccagtctctgtcaagactggacaacaactcgttgaagttaaaccacagggtgtgaacaaaggtcttgtggcagagaggcttctaacaacgatgcaagaaaaagggaaacttttggatttcattctctgcgtcggtgatgatcggtctgatgaggatatgtttgaggtgataatgagtgctaaagatggtccagctttgtctcctgtggctgagatattcgcttgcaccgttggacaaaagccaagcaaagcaaaatactatttagacgatactgcggagataatcagaatgctggacggtctagccgctaccaacacaactatctctgatcaaactgattcaaccgccactgttccaactaaagatctgttttaaggatttgtgaacgaaagttttagtgggtttgttgttgtgatttgtgaatgctttttcaaatataatggattaaggtaatcaaat

SEQ ID NO: 8440 - protein, 862 aa, Arabidopsis thaliana
MVSRSYSNLLDLASGNFHSFSREKKRFPRVATVTGVLSELDDDNNSNSVCSDAPSSVTQDRIIIVGNQLPIKSHRNSAGKLSFSWDNDSLLLQLKDGMREDMEVVYIGCLKEQIDTVEQDDVSQRLLENFKCVPAYIPPELFTKYYHGFCKQHLWPLFHYMLPLTPDLGGRFDRSLWQAYLSVNKIFADKVMEVISPDDDFVWVHDYHLMVLPTFLRKRFNRVKLGFFLHSPFPSSEIYRTLPVRNELLRALLNADLIGFHTFDYARHFLSCCSRMLGLSYQSKRGTIGLEYYGRTVSIKILPVGIHISQLQSILNLPETQTKVAELRDQFLDQKVLLGVDDMDIFKGISLKLLAMEQLLTQHPEKRGRVVLVQIANPARGRGKDVQEVQSETEATVKRINEMFGRPGYQPVVLIDTPLQFFERIAYYVIAECCLVTAVRDGMNLIPYEYIICRQGNPKLNETIGLDPSAAKKSMLVVSEFIGCSPSLSGAIRVNPWNIDAVTEAMDYALIVSEAEKQMRHEKHHKYVSTHDVAYWARSFIQDLERACGDHVRKRCWGIGFGLGFRVVALDPSFKKLSIEHIVSAYKRTKNRAILLDYDGTMVQPGSIRTTPTRETIEILNNLSSDPKNIVYLVSGKDRRTLTEWFSSCDDLGLGAEHGYFIRPNDGTDWETSSLVSGFEWKQIAEPVMRLYTETTDGSTIETKETALVWNYQFADPDFGSCQAKELMEHLESVLTNDPVSVKTGQQLVEVKPQGVNKGLVAERLLTTMQEKGKLLDFILCVGDDRSDEDMFEVIMSAKDGPALSPVAEIFACTVGQKPSKAKYYLDDTAEIIRMLDGLAATNTTISDQTDSTATVPTKDLF

SEQ ID NO: 8441 - protein, 765 aa, Arabidopsis thaliana
MREDMEVVYIGCLKEQIDTVEQDDVSQRLLENFKCVPAYIPPELFTKYYHGFCKQHLWPLFHYMLPLTPDLGGRFDRSLWQAYLSVNKIFADKVMEVISPDDDFVWVHDYHLMVLPTFLRKRFNRVKLGFFLHSPFPSSEIYRTLPVRNELLRALLNADLIGFHTFDYARHFLSCCSRMLGLSYQSKRGTIGLEYYGRTVSIKILPVGIHISQLQSILNLPETQTKVAELRDQFLDQKVLLGVDDMDIFKGISLKLLAMEQLLTQHPEKRGRVVLVQIANPARGRGKDVQEVQSETEATVKRINEMFGRPGYQPVVLIDTPLQFFERIAYYVIAECCLVTAVRDGMNLIPYEYIICRQGNPKLNETIGLDPSAAKKSMLVVSEFIGCSPSLSGAIRVNPWNIDAVTEAMDYALIVSEAEKQMRHEKHHKYVSTHDVAYWARSFIQDLERACGDHVRKRCWGIGFGLGFRVVALDPSFKKLSIEHIVSAYKRTKNRAILLDYDGTMVQPGSIRTTPTRETIEILNNLSSDPKNIVYLVSGKDRRTLTEWFSSCDDLGLGAEHGYFIRPNDGTDWETSSLVSGFEWKQIAEPVMRLYTETTDGSTIETKETALVWNYQFADPDFGSCQAKELMEHLESVLTNDPVSVKTGQQLVEVKPQGVNKGLVAERLLTTMQEKGKLLDFILCVGDDRSDEDMFEVIMSAKDGPALSPVAEIFACTVGQKPSKAKYYLDDTAEIIRMLDGLAATNTTISDQTDSTATVPTKDLF

SEQ ID NO: 8442 - protein, 761 aa, Arabidopsis thaliana
MEVVYIGCLKEQIDTVEQDDVSQRLLENFKCVPAYIPPELFTKYYHGFCKQHLWPLFHYMLPLTPDLGGRFDRSLWQAYLSVNKIFADKVMEVISPDDDFVWVHDYHLMVLPTFLRKRFNRVKLGFFLHSPFPSSEIYRTLPVRNELLRALLNADLIGFHTFDYARHFLSCCSRMLGLSYQSKRGTIGLEYYGRTVSIKILPVGIHISQLQSILNLPETQTKVAELRDQFLDQKVLLGVDDMDIFKGISLKLLAMEQLLTQHPEKRGRVVLVQIANPARGRGKDVQEVQSETEATVKRINEMFGRPGYQPVVLIDTPLQFFERIAYYVIAECCLVTAVRDGMNLIPYEYIICRQGNPKLNETIGLDPSAAKKSMLVVSEFIGCSPSLSGAIRVNPWNIDAVTEAMDYALIVSEAEKQMRHEKHHKYVSTHDVAYWARSFIQDLERACGDHVRKRCWGIGFGLGFRVVALDPSFKKLSIEHIVSAYKRTKNRAILLDYDGTMVQPGSIRTTPTRETIEILNNLSSDPKNIVYLVSGKDRRTLTEWFSSCDDLGLGAEHGYFIRPNDGTDWETSSLVSGFEWKQIAEPVMRLYTETTDGSTIETKETALVWNYQFADPDFGSCQAKELMEHLESVLTNDPVSVKTGQQLVEVKPQGVNKGLVAERLLTTMQEKGKLLDFILCVGDDRSDEDMFEVIMSAKDGPALSPVAEIFACTVGQKPSKAKYYLDDTAEIIRMLDGLAATNTTISDQTDSTATVPTKDLF

SEQ ID NO: 8443 - DNA, 1380 bp, Arabidopsis thaliana
acatcctaatcgaaaaggtgtggtggttccgttaacgagcaacggcgatgaagagacctcgacctacatctcagccgtcgatctcttccaccgtcaaaccaccactgtctccgccggtcacaccgattctcaaacagaagctacacagaacaggaacacctaaatggttcccgttaaaactaacccacacggagctgacgttgccgttaacctttccacgggtcaaacattccggtggaagaaaactggagcgattcagtatagcggaacgattgggcctcacttagtctctcttagacaacgtccaggagacgacgcagtttcctactgcgtccattgtagcacaagccctaaatccgcggagcttgcgttgctcgattttctcaatgctgagatctcattagctgagctatggtctgatttctcgaaaaaagatcctcgtttcggagagctagcgagacatctccgtggcgctcgtgtgttgaggcaggatccgctcgagtgcttgatacagtttttgtgctcatcgaacaataacattgcgaggattacgaagatggtggattttgtttcgtctttagggttacatttgggtgacattgatggatttgagtttcatcagttcccatcattggatcgattatctagggtttctgaggaagattttagaaaggctggttttggttacagagccaaatacataacaggtacagtggatgctttgcaagcaaagccaggtggtggtaatgaatggcttctttctctgcgcaaagtcgaactccaagaggcagttgctgcgctgtgtacattacctggtgttggtccgaaggtagcagcttgcatagctctgttttctcttgatcagcatagtgctattccggttgacacacatgtctggcagatcgcaacaaattatctactgccagaccttgctggtgcaaaactgacacctaaactccatcgccgagttgcagaagcctttgtgagtaaatatggtgaatatgctggttgggctcaaacattgcttttcattgccgagttacctgcacaaaaaactctcttgcaatcgttttcccagcccattaacaaactggatgagtctgcagaagttaatgaaactagctgtgatacgttgaagccatgactatgtgtctacctaagctacgaggaatcgttttcacaacccattcttgatgcgtcaagtccagaaacttgaccttggaagagctaagaaaattctgaagctgatgcagtatttggctccctggcaaatgagcgtagttatttgttatgatcattgtttactaaggaaccaatcttgatatgtacttgtaactttacattcaaacttccaaattaaattctaattgtttgttccct

SEQ ID NO: 8444 - protein, 326 aa, Arabidopsis thaliana
MVPVKTNPHGADVAVNLSTGQTFRWKKTGAIQYSGTIGPHLVSLRQRPGDDAVSYCVHCSTSPKSAELALLDFLNAEISLAELWSDFSKKDPRFGELARHLRGARVLRQDPLECLIQFLCSSNNNIARITKMVDFVSSLGLHLGDIDGFEFHQFPSLDRLSRVSEEDFRKAGFGYRAKYITGTVDALQAKPGGGNEWLLSLRKVELQEAVAALCTLPGVGPKVAACIALFSLDQHSAIPVDTHVWQIATNYLLPDLAGAKLTPKLHRRVAEAFVSKYGEYAGWAQTLLFIAELPAQKTLLQSFSQPINKLDESAEVNETSCDTLKP

SEQ ID NO: 8445 - protein, 195 aa, Arabidopsis thaliana
MVDFVSSLGLHLGDIDGFEFHQFPSLDRLSRVSEEDFRKAGFGYRAKYITGTVDALQAKPGGGNEWLLSLRKVELQEAVAALCTLPGVGPKVAACIALFSLDQHSAIPVDTHVWQIATNYLLPDLAGAKLTPKLHRRVAEAFVSKYGEYAGWAQTLLFIAELPAQKTLLQSFSQPINKLDESAEVNETSCDTLKP

SEQ ID NO: 8446 - DNA, 1221 bp, Arabidopsis thaliana
cagactataacactctttatacaaacttcaaatccacaaagagtcttttttttttttctcttcgacttagcttatacatagttttattacaagatgtcattgtcagcctcggagaaggaggagaataacaagaaaatggcagcggacaaggctgagatggggaggaagaagagggcaatgtgggaaagaaagtggaagagattggacattgtgaaagcttttgcatctctctttgtccatttcctctgtctcttggcgcctttcaatttcacttggccggctttaagagtcgccctcattgtctatacggtgggtgggctcggtatcaccgtctcttaccaccgaaatttggctcaccggagcttcaaagtccctaaatggctcgagtatttcttcgcttattgcggccttcttgccattcagggagatccgattgattgggtgagcacacatcgataccatcaccagtttacagattcggatagggacccacatagtcctaacgaaggattttggttcagtcacctcctatggctatttgataccggttatcttgtagaaaagtgtggaagaaggacaaatgtggaggacttaaagaggcagtggtactataaattcctccaaagaacagtcctttaccacattctaacatttggtttcctcctctattactttggtggtttgtcttttcttacttggggaatgggtattggggtagcaatggagcatcatgtgacttgcctcataaactctctttgccatgtttggggaagccgaacttggaagactaatgacacttcccgtaacgtttggtggctatcagtattctcgtttggagagagctggcacaacaatcaccacgccttcgaatcctcggcgagacaaggcttagaatggtggcaaatcgacatttcttggtatattgtccgctttctcgagattatcggtttggctactgatgttaagttgccttccgagagtcaacgtcgtcgtatggcaatggttcgttgaagatatggaacgacgtctcgtctcatttaagcattagttaattaatgtctacgtacgttttaagtttttggtaaacgtaacacttgtaatattgtgcgatgcggtgttgttttgtgacttgtggtgtgtgtttgaaccaacttgcttaattaagataacgttcgttttgatatgagcgaaattttaaaatgcgttatgaagtttaccaag

SEQ ID NO: 8447 - protein, 305 aa, Arabidopsis thaliana
MSLSASEKEENNKKMAADKAEMGRKKRAMWERKWKRLDIVKAFASLFVHFLCLLAPFNFTWPALRVALIVYTVGGLGITVSYHRNLAHRSFKVPKWLEYFFAYCGLLAIQGDPIDWVSTHRYHHQFTDSDRDPHSPNEGFWFSHLLWLFDTGYLVEKCGRRTNVEDLKRQWYYKFLQRTVLYHILTFGFLLYYFGGLSFLTWGMGIGVAMEHHVTCLINSLCHVWGSRTWKTNDTSRNVWWLSVFSFGESWHNNHHAFESSARQGLEWWQIDISWYIVRFLEIIGLATDVKLPSESQRRRMAMVR

SEQ ID NO: 8448 - protein, 291 aa, Arabidopsis thaliana
MAADKAEMGRKKRAMWERKWKRLDIVKAFASLFVHFLCLLAPFNFTWPALRVALIVYTVGGLGITVSYHRNLAHRSFKVPKWLEYFFAYCGLLAIQGDPIDWVSTHRYHHQFTDSDRDPHSPNEGFWFSHLLWLFDTGYLVEKCGRRTNVEDLKRQWYYKFLQRTVLYHILTFGFLLYYFGGLSFLTWGMGIGVAMEHHVTCLINSLCHVWGSRTWKTNDTSRNVWWLSVFSFGESWHNNHHAFESSARQGLEWWQIDISWYIVRFLEIIGLATDVKLPSESQRRRMAMVR

SEQ ID NO: 8449 - protein, 284 aa, Arabidopsis thaliana
MGRKKRAMWERKWKRLDIVKAFASLFVHFLCLLAPFNFTWPALRVALIVYTVGGLGITVSYHRNLAHRSFKVPKWLEYFFAYCGLLAIQGDPIDWVSTHRYHHQFTDSDRDPHSPNEGFWFSHLLWLFDTGYLVEKCGRRTNVEDLKRQWYYKFLQRTVLYHILTFGFLLYYFGGLSFLTWGMGIGVAMEHHVTCLINSLCHVWGSRTWKTNDTSRNVWWLSVFSFGESWHNNHHAFESSARQGLEWWQIDISWYIVRFLEIIGLATDVKLPSESQRRRMAMVR

SEQ ID NO: 8450 - DNA, 1767 bp, Arabidopsis thaliana
ctcttcttctctcttcctcatatttattactctctctttcacaaacacacagaaaataaataaataaaattaattaatgtgagaaaatcaattcaaaaatttggacatacgtatcatctgagagaagaagggtttggtgaataccggcgggtggaaccgacggcgatggcgaagaccggtgttttcgattcggatccgacggcgattgctaaagccaaggaactgaagcgtgagatgaagaagttgctgattaagatcgatgacgaagatgatttgggtgttcagacgattgatcagttacaggacgctttgtctgcgttgagagaagcgacgatgaggaagatggcgaaatcttcctcgttagagatgctcgagactgtgtcttgtcctgaggagtttcgttgtcctctctctaatgagcttatgagggatcccgtcgttttggcttctggtcagacatacgacaagttatttatccagaaatggttgagctcagggaacagaacatgtcccaagactcagcaagttctgcctcacacggctttaacacctaatctcttaatccgtgaaatgatctcgaaatggtgcaagaagaacgggcttgagacgaagagccaatatcatcccaaccttgtaaatgaagatgaaactgtgacaagatcagatcgtgagattttcaattccttgctctgtaaagtctcttcttcgaaccttcaagatcaaaaatcagctgccaaggagctaagacttctgaccaggaaaggcactgagttccgagctctttttggcgaatctccggatgagatcaccaggttggtgaatcccttgttacacgggtcaaacccagatgagaagcttcaagaagatgtggttacaacattgttgaacatatcaatacatgatgacagcaacaagaagctcgtctgcgaaaatcctaatgtgattcctctccttatcgatgcattgaggcgtggaacagtcgccacgagaagcaatgcagctgcagcgatcttcactctgtcagctctcgattcaaacaaagtacttatagggaagtccggaatcctgaaaccgcttatcgatctcctagaagaagggaatccattagctatcaaagacgtagctgcagcgatcttcactctttgtatagcccatgagaacaggagtagagctgtgagagacggagctgttagggttttaggtaagaaaatctcgaatgggttgtacgttgatgagcttttagctatattggcaatgcttgttactcactggaaggctgtggaggaattgggtgagctcggtggggtttcatggttgctgaagataactcgagagagcgagtgcaagcgaaacaaagagaatgcgatagtgatactgcatactatatgtttcagcgacaggacaaagtggaaggagatcaaagaagaggagaatgctcatggaacgataacaaagctttcgcgtgaaggaacttcaagggcgcagaggaaagcaaacgggatattggacagactgagaaaagctatgaatctcactcatacagcctgagaaaagccttgaaatctgcaatgtaaattacctaaaatcttgtttcttttttttactttatttggctgtaagaatttttgtaaattattcatatctttaggatctgaatggttattggttttcgtatgtgagatgtaagtagaaatctgtgtgaatagtttttgcgtttgatgtttctggagaaatcaatcaataaaatcaatgttggtggctttattc

SEQ ID NO: 8451 - protein, 460 aa, Arabidopsis thaliana
MAKTGVFDSDPTAIAKAKELKREMKKLLIKIDDEDDLGVQTIDQLQDALSALREATMRKMAKSSSLEMLETVSCPEEFRCPLSNELMRDPVVLASGQTYDKLFIQKWLSSGNRTCPKTQQVLPHTALTPNLLIREMISKWCKKNGLETKSQYHPNLVNEDETVTRSDREIFNSLLCKVSSSNLQDQKSAAKELRLLTRKGTEFRALFGESPDEITRLVNPLLHGSNPDEKLQEDVVTTLLNISIHDDSNKKLVCENPNVIPLLIDALRRGTVATRSNAAAAIFTLSALDSNKVLIGKSGILKPLIDLLEEGNPLAIKDVAAAIFTLCIAHENRSRAVRDGAVRVLGKKISNGLYVDELLAILAMLVTHWKAVEELGELGGVSWLLKITRESECKRNKENAIVILHTICFSDRTKWKEIKEEENAHGTITKLSREGTSRAQRKANGILDRLRKAMNLTHTA

SEQ ID NO: 8452 - protein, 437 aa, Arabidopsis thaliana
MKKLLIKIDDEDDLGVQTIDQLQDALSALREATMRKMAKSSSLEMLETVSCPEEFRCPLSNELMRDPVVLASGQTYDKLFIQKWLSSGNRTCPKTQQVLPHTALTPNLLIREMISKWCKKNGLETKSQYHPNLVNEDETVTRSDREIFNSLLCKVSSSNLQDQKSAAKELRLLTRKGTEFRALFGESPDEITRLVNPLLHGSNPDEKLQEDVVTTLLNISIHDDSNKKLVCENPNVIPLLIDALRRGTVATRSNAAAAIFTLSALDSNKVLIGKSGILKPLIDLLEEGNPLAIKDVAAAIFTLCIAHENRSRAVRDGAVRVLGKKISNGLYVDELLAILAMLVTHWKAVEELGELGGVSWLLKITRESECKRNKENAIVILHTICFSDRTKWKEIKEEENAHGTITKLSREGTSRAQRKANGILDRLRKAMNLTHTA

SEQ ID NO: 8453 - protein, 404 aa, Arabidopsis thaliana
MRKMAKSSSLEMLETVSCPEEFRCPLSNELMRDPVVLASGQTYDKLFIQKWLSSGNRTCPKTQQVLPHTALTPNLLIREMISKWCKKNGLETKSQYHPNLVNEDETVTRSDREIFNSLLCKVSSSNLQDQKSAAKELRLLTRKGTEFRALFGESPDEITRLVNPLLHGSNPDEKLQEDVVTTLLNISIHDDSNKKLVCENPNVIPLLIDALRRGTVATRSNAAAAIFTLSALDSNKVLIGKSGILKPLIDLLEEGNPLAIKDVAAAIFTLCIAHENRSRAVRDGAVRVLGKKISNGLYVDELLAILAMLVTHWKAVEELGELGGVSWLLKITRESECKRNKENAIVILHTICFSDRTKWKEIKEEENAHGTITKLSREGTSRAQRKANGILDRLRKAMNLTHTA

SEQ ID NO: 8454 - DNA, 1801 bp, Arabidopsis thaliana
aaaaggaaaatacttaggaaagaaaagagtctcagcagcatcagctcgtccttaaatctgatccatcatcgtcactttctcccggcgaattccgttttatcgatttaagtaacgagatttgtgcaaagatgactcaggacgtggagatgaaagataataacaccccttctcaatcgattatctcttcttcgacctctactatgcagaatttgaaggagattgcagcactcatcgatactgggtcttacacgaaggaggttcgtcgtattgctcgtgctgtgcgtctcactataggccttaggcagaaactcaccggctctgtgctctcttccttcctggattttgctttggttccaggatccgaagctcactctcgcctctcttcctttgttcctaagggtgatgaacatgacatggaagttgatactgcctcatcggccacacaagctgctccttctaagcatctacctgcagagctcgagatctactgctacttcattgttcttctttttctgattgatcagaagaagtacaacgaggctaaagcttgttcttcagcaagcattgctcgtctcaagaacgtcaaccgaaggaccattgatgtgatagcatcaagactctacttttactattctttgagttatgagcaaaccggtgatcttgctgaaattcgcggtactcttcttgcgttgcatcattctgcaacgctaaggcacgatgagctgggtcaggaaacccttctgaacctgttgctacgtaactatttgcattacaacctctatgatcaggcagagaagctaagatcaaaggcacctcgctttgaggctcattcaaaccaacagttttgtaggtaccttttctatctcgggaagattcgtactattcagctcgaatatacggacgcaaaagagagccttcttcaggcggccaggaaagcccctatagcagctttgggcttcaggatccaatgtaataaatgggcaattctggttcgtctactgctgggtgagataccagagcgttctatcttcactcaaaagggtatggagaaggccctcagaccctacttcgagctaacaaatgcggttaggattggggacttggagttgtttaggacagtccaggagaagttcttggacacatttgctcaagacagaacgcacaatctcatcgtgcgactccgccacaatgtcatcaggactggactgcggaacataagtatctcctactcgagaatctctttacccgatgttgccaaaaagctgaggctcaactctgaaaaccctggctgatgcggaaagcatcgtggcaaaggccatacgcgacggagctatcgatgctacaatcgatcacaaaaacggatgcatggtctccaaagaaactggggacatctactcgacgaatgagccacaaactgcgttcaactcaagaattgctttctgcctcaacatgcataacgaagctgtcagagcattgaggtttcctcctaacactcacaaggagaaagaaagcgatgagaagaggagagagaggaagcaacaggaagaagagcttgctaagcatatggctgaggaagacgatgatgacttttagacaaaggtcatctatttcttataagagttgactctccatctgtctcactttttttatgttcacaagtttacttggtactcttctcatcgtctctaagtgtttctttattgaggatttttatcctcaggaacctttttattactctggtttcactttaggaaaagatatttatcttgttggtttcagaagatcaaattcaagttcgttt

SEQ ID NO: 8455 - protein, 387 aa, Arabidopsis thaliana
MTQDVEMKDNNTPSQSIISSSTSTMQNLKEIAALIDTGSYTKEVRRIARAVRLTIGLRQKLTGSVLSSFLDFALVPGSEAHSRLSSFVPKGDEHDMEVDTASSATQAAPSKHLPAELEIYCYFIVLLFLIDQKKYNEAKACSSASIARLKNVNRRTIDVIASRLYFYYSLSYEQTGDLAEIRGTLLALHHSATLRHDELGQETLLNLLLRNYLHYNLYDQAEKLRSKAPRFEAHSNQQFCRYLFYLGKIRTIQLEYTDAKESLLQAARKAPIAALGFRIQCNKWAILVRLLLGEIPERSIFTQKGMEKALRPYFELTNAVRIGDLELFRTVQEKFLDTFAQDRTHNLIVRLRHNVIRTGLRNISISYSRISLPDVAKKLRLNSENPG

SEQ ID NO: 8456 - protein, 381 aa, Arabidopsis thaliana
MKDNNTPSQSIISSSTSTMQNLKEIAALIDTGSYTKEVRRIARAVRLTIGLRQKLTGSVLSSFLDFALVPGSEAHSRLSSFVPKGDEHDMEVDTASSATQAAPSKHLPAELEIYCYFIVLLFLIDQKKYNEAKACSSASIARLKNVNRRTIDVIASRLYFYYSLSYEQTGDLAEIRGTLLALHHSATLRHDELGQETLLNLLLRNYLHYNLYDQAEKLRSKAPRFEAHSNQQFCRYLFYLGKIRTIQLEYTDAKESLLQAARKAPIAALGFRIQCNKWAILVRLLLGEIPERSIFTQKGMEKALRPYFELTNAVRIGDLELFRTVQEKFLDTFAQDRTHNLIVRLRHNVIRTGLRNISISYSRISLPDVAKKLRLNSENPG

SEQ ID NO: 8457 - protein, 363 aa, Arabidopsis thaliana
MQNLKEIAALIDTGSYTKEVRRIARAVRLTIGLRQKLTGSVLSSFLDFALVPGSEAHSRLSSFVPKGDEHDMEVDTASSATQAAPSKHLPAELEIYCYFIVLLFLIDQKKYNEAKACSSASIARLKNVNRRTIDVIASRLYFYYSLSYEQTGDLAEIRGTLLALHHSATLRHDELGQETLLNLLLRNYLHYNLYDQAEKLRSKAPRFEAHSNQQFCRYLFYLGKIRTIQLEYTDAKESLLQAARKAPIAALGFRIQCNKWAILVRLLLGEIPERSIFTQKGMEKALRPYFELTNAVRIGDLELFRTVQEKFLDTFAQDRTHNLIVRLRHNVIRTGLRNISISYSRISLPDVAKKLRLNSENPG

SEQ ID NO: 8458 - DNA, 1091 bp, Arabidopsis thaliana
attcattaagttaccttctaaacattcacaccatctctttctctaacaatggagatttttcaaaaggccaaagccgttcgtctacggagccatcacgacaagtacctagtcgccgatgaagacgaagaatctgtaactcaagaacgtaacggctcagcaggtgcagccaaatggaccgttgagataatcccaggctcaacaaatctcatccgtctcaaaagcgcttatggcaaatacttaacagcgtctaacaaaccgtttcttcttggagccaccggaaaaaaagttctacagactaaacctagtcgtcttgactcgtctttagcttgggaaccgattagagattctgctttggttaagctcaagactcgttatggtaacttccttcgtggtaacggtggtttacctccctggagaaactctgttactcatgatattcctcatagatcggccactcaagaatgggtactttggcatatagatgtcgttgagatcctccctgcaaacgcaaactccgatcaccaccaccagcacctgcagctgcagcaacctccgtcgccgcttcatcattctgattctcttgatttcacacctggatctccttccagatctgaccgtttctttagacaagagtcaacggattcactagcggttggatcgccgccgaaatcggaagggagagtgatatactatcatgtggcggatgatgatgatgatgttgaagatgattctgttgaggtaagttcgtttactttcaaaggaaatggtgttgaagagctgactatgagattgaaagaagagagcaatgtcgaagatgttatcgtttgtactcgtagtccgttgaacgggaagcttttcccattgcgtcttcaacttccacctaacaatgcagacatgactgttgtcttagtaccaaaatcatcaaaaatagcagaagagttcatcaagtgagatctttcttttgaagctgagctgtgaagtgaaggctttggctgcaattggtttgttgttactaaaaaggatttggattgacgtagagatactgcttgattaccaaacttatgatttataccattctttcccttttgtcc

SEQ ID NO: 8459 - protein, 300 aa, Arabidopsis thaliana
MEIFQKAKAVRLRSHHDKYLVADEDEESVTQERNGSAGAAKWTVEIIPGSTNLIRLKSAYGKYLTASNKPFLLGATGKKVLQTKPSRLDSSLAWEPIRDSALVKLKTRYGNFLRGNGGLPPWRNSVTHDIPHRSATQEWVLWHIDVVEILPANANSDHHHQHLQLQQPPSPLHHSDSLDFTPGSPSRSDRFFRQESTDSLAVGSPPKSEGRVIYYHVADDDDDVEDDSVEVSSFTFKGNGVEELTMRLKEESNVEDVIVCTRSPLNGKLFPLRLQLPPNNADMTVVLVPKSSKIAEEFIK

SEQ ID NO: 8460 - DNA, 1430 bp, Arabidopsis thaliana
atcaaaagaatacacacacacacatacacactgttgagtatctatctgagagaataagcaaaagagaaaagagatttactttgttatgataggcatcccttgagttcctgttcttcatctcttccttgaatccgtaagacacatgtatcatcaatcttctctgttgaagcagagagagagagagagctaattgttgcctctgagtcacatggataagaaagtttcatttactagctctgtggcacattcaactccaccataccttagtacttccatctcatggggacttccaaccaaatccaatggtgtgactgaatcactgagtttgaaggtggtagatgcaagaccagaacgtcttataaacacaaagaatatcagtttccaggaccaggattcatcttcaactctgtcctctgctcaatcttctaacgatgttacaagtagtggagatgataacccctcaagacaaatctcatttttagcacattcagatgtttgtaaaggatttgaagaaactcaaaggaagcgatttgcaattaaatcaggctcctccacggcaggaatcgctgatattcactcttctccttccaaggctaacttctcatttcactatgccgatccacattttggtggtttaatgcctgcggcttacctaccacaggcaacaatatggaatccccaaatgactcgagttccgctaccattcgatctcatagagaatgagcctgtctttgtcaatgcaaagcaattccatgcaattatgaggaggaggcaacagcgtgctaagctagaggcgcaaaacaaactaatcaaagcccgtaagccgtatcttcatgaatctcgacatgttcacgctcttaaacgacctagaggatctggtggaagattcctgaacaccaaaaagcttcaagaatctacagatccaaaacaagacatgccaatccaacagcaacacgcaacgggaaacatgtcaagatttgtgctttatcagttgcagaacagcaatgactgattgttcaaccacttctcgctctgacatcacatctgcttctgacagcgttaatctctttggacactctgaatttctgatatcagattgcccatctcagacaaacccaacaatgtatgttcatggtcaatcaaatgacatgcatggaggtaggaacacacaccatttctctgtccatatctgagccggtggaatctggtgatgtgtacgttcctacaaaaaaagggaagtcatccttggctgctacttcgcttattagctagttcttatttcacacgctttgtccagatatcatttgaatgaccaaaaaccttcaagcttcaactctttacttttcgtctgtcgtttgtaccatggatcatcgtgtgttaagtcagtgattggattggagtgatgaatgtaaatgtaaatctgataaccg

SEQ ID NO: 8461 - protein, 267 aa, Arabidopsis thaliana
MDKKVSFTSSVAHSTPPYLSTSISWGLPTKSNGVTESLSLKVVDARPERLINTKNISFQDQDSSSTLSSAQSSNDVTSSGDDNPSRQISFLAHSDVCKGFEETQRKRFAIKSGSSTAGIADIHSSPSKANFSFHYADPHFGGLMPAAYLPQATIWNPQMTRVPLPFDLIENEPVFVNAKQFHAIMRRRQQRAKLEAQNKLIKARKPYLHESRHVHALKRPRGSGGRFLNTKKLQESTDPKQDMPIQQQHATGNMSRFVLYQLQNSND

SEQ ID NO: 8462 - DNA, 480 bp, Arabidopsis thaliana
aaggtcaagtattgaagaactgataaatactttacaaaagcaacgcaactacttttcagtacaaacgaccaaggatataatatgaagaagacgagtttgaagttaatgaccctcgttttagggttttgcttcgtcatttatcttcttagggcctcgaggcggttcgagaaatggagatctcttgatagcacgaaagttgatatctctggaaccgattgaaacaaaaaatgcagcgagatcgttgaaagattcaatatcaacagatttagaggaagaggttgatcgtctgatggagcacgaatatccttcaccagtaaagccgaggaaaagaactccggttcacaatggcgtgcgtaatcgtcactaattgacccttgttctattgttctttcaattagtagtttaataagtttggtaaaatcataaaatggacgtatcctgtaatgctgaatattagtatattacttatacaaagacttt

SEQ ID NO: 8463 - protein, 45 aa, Arabidopsis thaliana
MKKTSLKLMTLVLGFCFVIYLLRASRRFEKWRSLDSTKVDISGTD

SEQ ID NO: 8464 - protein, 37 aa, Arabidopsis thaliana
MTLVLGFCFVIYLLRASRRFEKWRSLDSTKVDISGTD

SEQ ID NO: 8465 - DNA, 1128 bp, Arabidopsis thaliana
atcggtacgacgttctttttggttctttcttgtttctccattcatccataagaaaagataatgtagttctgcttgttcgtccattttctgattttggtatcagtttttgtatttgtgtatagtaaatctgaaggagttttccaaagacaaaccaacatggaagaccgcgtcttgatcaagaacgatgtcactgaattgataggtaacacaccaatggtgtatctaaataaaattgtggatggttgtgtggctcgtattgctgccaagcttgagatgatggagccttgctctagcatcaaagatagaatcgcatatagtatgatcaaagatgctgaagacaaaggattgattactccgggaaagagtacattgattgaggcaacgggtggtaacaccgggattggtttagccagcatcggggcttcaagaggttataaagtgatccttttgatgccttcaacaatgagtttagaaaggagaatcattctaagagcattaggtgcagaggttcatctcactgacattagcataggcattaaaggacagttggagaaagctaaagagatattaagcaaaactcccggtggttacataccacaccagtttattaatcctgaaaatccagagattcattatagaaccacgggtccggagatttggagagattcagcagggaaagtagatatcttagtcgccggtgttggaactggtggaacggttactggaacagggaagtttcttaaagaaaagaacaaagatattaaggtttgtgtggtggaaccttccgaaagtgcggtactcagcggaggaaaaccaggtccacatttgatccaaggaataggctctggtgaaattccagccaatttggacttaagcattgttgatgaaatcattcaagtgactggtgaggaagctattgaaacaaccaagcttcttgctatcaaagaaggattattggttggaatatcctctggagcctcagctgcggctgcgttaaaggttgcaaagcggcctgaaaacgtagggaaactcattgtggttatttttcctagtggaggagaacgttatttatcgactgaattgttcgagtcagtcagatatgaagctgagaatttgccagttgaatga

SEQ ID NO: 8466 - protein, 323 aa, Arabidopsis thaliana
MEDRVLIKNDVTELIGNTPMVYLNKIVDGCVARIAAKLEMMEPCSSIKDRIAYSMIKDAEDKGLITPGKSTLIEATGGNTGIGLASIGASRGYKVILLMPSTMSLERRIILRALGAEVHLTDISIGIKGQLEKAKEILSKTPGGYIPHQFINPENPEIHYRTTGPEIWRDSAGKVDILVAGVGTGGTVTGTGKFLKEKNKDIKVCVVEPSESAVLSGGKPGPHLIQGIGSGEIPANLDLSIVDEIIQVTGEEAIETTKLLAIKEGLLVGISSGASAAAALKVAKRPENVGKLIVVIFPSGGERYLSTELFESVRYEAENLPVE

SEQ ID NO: 8467 - protein, 304 aa, Arabidopsis thaliana
MVYLNKIVDGCVARIAAKLEMMEPCSSIKDRIAYSMIKDAEDKGLITPGKSTLIEATGGNTGIGLASIGASRGYKVILLMPSTMSLERRIILRALGAEVHLTDISIGIKGQLEKAKEILSKTPGGYIPHQFINPENPEIHYRTTGPEIWRDSAGKVDILVAGVGTGGTVTGTGKFLKEKNKDIKVCVVEPSESAVLSGGKPGPHLIQGIGSGEIPANLDLSIVDEIIQVTGEEAIETTKLLAIKEGLLVGISSGASAAAALKVAKRPENVGKLIVVIFPSGGERYLSTELFESVRYEAENLPVE

SEQ ID NO: 8468 - protein, 284 aa, Arabidopsis thaliana
MMEPCSSIKDRIAYSMIKDAEDKGLITPGKSTLIEATGGNTGIGLASIGASRGYKVILLMPSTMSLERRIILRALGAEVHLTDISIGIKGQLEKAKEILSKTPGGYIPHQFINPENPEIHYRTTGPEIWRDSAGKVDILVAGVGTGGTVTGTGKFLKEKNKDIKVCVVEPSESAVLSGGKPGPHLIQGIGSGEIPANLDLSIVDEIIQVTGEEAIETTKLLAIKEGLLVGISSGASAAAALKVAKRPENVGKLIVVIFPSGGERYLSTELFESVRYEAENLPVE

SEQ ID NO: 8469 - DNA, 787 bp, Arabidopsis thaliana
gggtttgtggatactctgaagcgcagcagcagccgtaagaaagaaaccgaggaagaacgatctcagtgagaggacgatcacttcgccgtcgcagtcatgggtcgaatgcatagtagaggtaagggtatctcggcatctgctttgccgtacaagcgttcatctccgagctggctcaagacaacccctcaagatgttgatgagtccatctgcaagtttgcgaagaagggtttgaccccatcgcagattggtgtcattcttcgtgactctcacggaattccacaggtgaaaagtgttactggaagcaagattctcagaattttgaaagctcatggtcttgcacctgagatccctgaggatctgtatcacttgatcaagaaagctgttgctatccgcaagcatcttgagaggaacaggaaagataaggattccaaattcaggctgattcttgtagagagcagaatccatcgtcttgctcgttactacaagaagaccaagaagctcccacccgtctggaagtacgagtctacaactgcaagcactcttgtggcttgagaagaatagagttgatcatgtccttcaagaaggaccatttcattgtctgcattgcaactcaaagctcttcttcttttgaacctatgtatctgttttcgctagttttgatgggttacaacttgctatgagattttgattttagggaacgaatttgtttatgcgaatctttccattatcgttacagcttatctttcaattaacgttaattatcgttctcagagaatttttacagact

SEQ ID NO: 8470 - protein, 151 aa, Arabidopsis thaliana
MGRMHSRGKGISASALPYKRSSPSWLKTTPQDVDESICKFAKKGLTPSQIGVILRDSHGIPQVKSVTGSKILRILKAHGLAPEIPEDLYHLIKKAVAIRKHLERNRKDKDSKFRLILVESRIHRLARYYKKTKKLPPVWKYESTTASTLVA

SEQ ID NO: 8471 - protein, 148 aa, Arabidopsis thaliana
MHSRGKGISASALPYKRSSPSWLKTTPQDVDESICKFAKKGLTPSQIGVILRDSHGIPQVKSVTGSKILRILKAHGLAPEIPEDLYHLIKKAVAIRKHLERNRKDKDSKFRLILVESRIHRLARYYKKTKKLPPVWKYESTTASTLVA

SEQ ID NO: 8472 - DNA, 490 bp, Arabidopsis thaliana
taatcaaaaatactctctttaacccattgccaattcaagatcttgtcttttttttcttcttaaaaacaagatccaaatttctgaaaaatccattcactacaaagaaagaaatgctgtctacaactcttagtggtaactatggcttccctctgtgcatctctgggatcactcagcaattaagtctgtccaaagaaatggcagatcatgacaagagaaggaaggtgatacagaggagaaggagatcagaaggtaaacatgagtacaagagccatggtgaagaagatgtggagaggcttcaagagaatgaagatgttagagatctagttgctttactacaagatctaggcttgtggagcttttcttctcacacagccaaagctgcttagtgtttttacttttattacaagatgttgtaggtttgtggagcttttcttccccacacagcaaaagctgctgcttagtgtttaagaaatccaaaagccttttcatt

SEQ ID NO: 8473 - protein, 127 aa, Arabidopsis thaliana
IKNTLFNPLPIQDLVFFFFLKTRSKFLKNPFTTKKEMLSTTLSGNYGFPLCISGITQQLSLSKEMADHDKRRKVIQRRRRSEGKHEYKSHGEEDVERLQENEDVRDLVALLQDLGLWSFSSHTAKAA

SEQ ID NO: 8474 - protein, 91 aa, Arabidopsis thaliana
MLSTTLSGNYGFPLCISGITQQLSLSKEMADHDKRRKVIQRRRRSEGKHEYKSHGEEDVERLQENEDVRDLVALLQDLGLWSFSSHTAKAA

SEQ ID NO: 8475 - protein, 63 aa, Arabidopsis thaliana
MADHDKRRKVIQRRRRSEGKHEYKSHGEEDVERLQENEDVRDLVALLQDLGLWSFSSHTAKAA

SEQ ID NO: 8476 - DNA, 1330 bp, Arabidopsis thaliana
atccaaaactctctcagtcatggctcttcttcgtcttcctggcatttccctccaaattctaggtcacaaatcaaaccagaagaaccctaatcccaatgttgccttcaccaatcactctctctctttatctactccttcactatgtcgtctccatcgtcacgcgacgtttccagactcaattccagcaaaatccagaaacctcacttcgtacttctccaccacaacacaagagccagtcctcgaatcttcttcttcttcttcttcagctcctgaggtagtagaagaagagatttctaaaaccagattgattgctcagaatgttccatggacatctacacctgaagatattagatcgttgttcgagaagtacgggagtgttatcgacattgagatgtctatgcataagaaggaaagaaatagaggtttggtgttcattgaaatggcttctcctgaagaagctgcaacagctcttaaatctcttgaatcgtgtgaatatgagggtcgtcgtttgaaggtagactatgcaaagaccaaaaagaagaagacatatgcgccgcgtgagacgccttcaccagtgcctacattcaatttgtttgttgcaaacttggcatttgaagcaagggccaagcatcttaaggagttctttgatgcagacactggtaatgttgtctccactgaagttatattccatgaaaatccaaggaggtcgagtggttacgggtttgtctctttcaaaaccaagaaacaggccgaggcagcgcttattgagttccaaggaaaggattttttgggaaggccaatccattagctaaaagcaaacagtttgtgaagttgcaagcaaaagaagggttgcagccaccagaggaggaagcagaggaggaaccatctcagtctgagacaatgacccaagagcacgaaactccggctgcataaaacttagaagtcttcgttgcaggatcattgttggagatattggaattgacgaagaagcttcgagcttttaggtctttattcttcttagtttttgaccaacaagaggagtgggtacatacaagtagtacctaccttgagtaaatggtggagaggtaagaagtacaagaccgattttgttagaactgaaaactagtaagagacaggtattaccaaacgtcagtatcagaccagatcaaatctcaagaaacaaactcatgtggctcctacgaaacttgctttgttcagttaaacacaatgcttctttgtttgtcatctactttcgattacttgtttgcgtttgttatatgcttagtgtgtaacttcatatatgaacccgtactcttaagaaagttatgtt

SEQ ID NO: 8477 - protein, 268 aa, Arabidopsis thaliana
SKTLSVMALLRLPGISLQILGHKSNQKNPNPNVAFTNHSLSLSTPSLCRLHRHATFPDSIPAKSRNLTSYFSTTTQEPVLESSSSSSSAPEVVEEEISKTRLIAQNVPWTSTPEDIRSLFEKYGSVIDIEMSMHKKERNRGLVFIEMASPEEAATALKSLESCEYEGRRLKVDYAKTKKKKTYAPRETPSPVPTFNLFVANLAFEARAKHLKEFFDADTGNVVSTEVIFHENPRRSSGYGFVSFKTKKQAEAALIEFQGKDFLGRPIH

SEQ ID NO: 8478 - protein, 262 aa, Arabidopsis thaliana
MALLRLPGISLQILGHKSNQKNPNPNVAFTNHSLSLSTPSLCRLHRHATFPDSIPAKSRNLTSYFSTTTQEPVLESSSSSSSAPEVVEEEISKTRLIAQNVPWTSTPEDIRSLFEKYGSVIDIEMSMHKKERNRGLVFIEMASPEEAATALKSLESCEYEGRRLKVDYAKTKKKKTYAPRETPSPVPTFNLFVANLAFEARAKHLKEFFDADTGNVVSTEVIFHENPRRSSGYGFVSFKTKKQAEAALIEFQGKDFLGRPIH

SEQ ID NO: 8479 - protein, 138 aa, Arabidopsis thaliana
MSMHKKERNRGLVFIEMASPEEAATALKSLESCEYEGRRLKVDYAKTKKKKTYAPRETPSPVPTFNLFVANLAFEARAKHLKEFFDADTGNVVSTEVIFHENPRRSSGYGFVSFKTKKQAEAALIEFQGKDFLGRPIH

SEQ ID NO: 8480 - DNA, 1521 bp, Arabidopsis thaliana
ccaaacaacaaaagcatcataagaagaagaagaaactaatcatttttctgattctcccacgaagatgaaccacctcgttcgtaaaagctccgtcggttactccgccttgaggtccgtttcgtacctccgtcaatctgccgttacctctccacctccgattttctccgccgccgcttcaaccgttcgccagttcacttccgccggctatccttccaacagttttcaattgacgccgccgacgaattggggaatccggatagttccggagaggaaggcgtttgtgattgagcgattcggtaaatacgctacgacgttgccgtcggggattcatttcctcattccgttcgtggatcgtattgcttatgttcattctctcaaggaagaagctatcccgattccgaatcagactgcgattactaaagacaacgttagtatccacatcgatggtgttctctacgttaagattgtggatcctaagttagcttcttatggcgttgagagtcctatctatgctgttgtacagctggctcagaccacaatgcgtagtgagcttggtaagatcactcttgataagacctttgaggaacgagacactctcaacgagaagatagtggaagccatcaatgttgctgcaaaagactggggtcttcagtgccttcgttatgagataagggatattatgccccctcatggagtgcgagctgctatggaaatgcaagctgaagctgagcgtaaaaagagagcccagattcttgagtctgaaggagaaaggcaatcccatatcaacattgctgatggtaagaaaagttctgtaatcttggcatctgaagcagcaaagatggaccaggtgaatcgagcacaaggtgaggcagaagcaatactagctagagcacaagcaactgcgaaaggcctggtcttgttatctcagtccctcaaggaaactgggggagtagaggcggcgagtttgagagttgcagagcaatacattacagccttcggtaacattgccaaggagggtacgataatgttgcttccaagtggtgcttcaaatcctgctagcatgattgctcaagctttaacaatgtacaaaagccttgtcatcaatggtccaagcaaagatcaccaagaaacacaagcacttgatgaaacagatttggaagagttggaagacatgggtgagaaacatatatcagaaggctctaataaccgatcaggctcaatatcatttgacacagagaaaccaggtcacaccggtgaaccacgattttctcttcagaaccgcaacaaggatccgcagtaggcagccgaaccggggatgagataaattctttgggcttgagaaaactggaaaccatttttcatctttcaaatatgaggcagtaaccatcttttccgtttgaatagctagaatatcatcactttgcatatagaaacgaatctgaacatctgttctccgataagaattttcctactggatttgttatgaacatggtccttgtgttcttattcacctttattccc

SEQ ID NO: 8481 - protein, 411 aa, Arabidopsis thaliana
MNHLVRKSSVGYSALRSVSYLRQSAVTSPPPIFSAAASTVRQFTSAGYPSNSFQLTPPTNWGIRIVPERKAFVIERFGKYATTLPSGIHFLIPFVDRIAYVHSLKEEAIPIPNQTAITKDNVSIHIDGVLYVKIVDPKLASYGVESPIYAVVQLAQTTMRSELGKITLDKTFEERDTLNEKIVEAINVAAKDWGLQCLRYEIRDIMPPHGVRAAMEMQAEAERKKRAQILESEGERQSHINIADGKKSSVILASEAAKMDQVNRAQGEAEAILARAQATAKGLVLLSQSLKETGGVEAASLRVAEQYITAFGNIAKEGTIMLLPSGASNPASMIAQALTMYKSLVINGPSKDHQETQALDETDLEELEDMGEKHISEGSNNRSGSISFDTEKPGHTGEPRFSLQNRNKDPQ

SEQ ID NO: 8482 - protein, 253 aa, Arabidopsis thaliana
MRSELGKITLDKTFEERDTLNEKIVEAINVAAKDWGLQCLRYEIRDIMPPHGVRAAMEMQAEAERKKRAQILESEGERQSHINIADGKKSSVILASEAAKMDQVNRAQGEAEAILARAQATAKGLVLLSQSLKETGGVEAASLRVAEQYITAFGNIAKEGTIMLLPSGASNPASMIAQALTMYKSLVINGPSKDHQETQALDETDLEELEDMGEKHISEGSNNRSGSISFDTEKPGHTGEPRFSLQNRNKDPQ

SEQ ID NO: 8483 - protein, 206 aa, Arabidopsis thaliana
MPPHGVRAAMEMQAEAERKKRAQILESEGERQSHINIADGKKSSVILASEAAKMDQVNRAQGEAEAILARAQATAKGLVLLSQSLKETGGVEAASLRVAEQYITAFGNIAKEGTIMLLPSGASNPASMIAQALTMYKSLVINGPSKDHQETQALDETDLEELEDMGEKHISEGSNNRSGSISFDTEKPGHTGEPRFSLQNRNKDPQ

SEQ ID NO: 8484 - DNA, 1557 bp, Arabidopsis thaliana
ctttcggttcggtgaaatggttcgtctgtttcttacactttctccggcgatttcccgattcaatctttatccaggaatctctattctagcgagaaataataattctctcagattacaaaaacaccataagcttaaaaccaaaaccccgactttctcgttaatctctccttcatcttcacccaattttcaaaggacacgtttttattctaccggaacaagaatttcctccttaccctatagcgaaaacccgaattttgatgataatttggttgttctgggtattgaaacgagctgcgacgacactgccgcagctgttgtgagaggtaatggtgaaattctcagtcaagtcatttcttctcaggcagaattgcttgtccaatatggaggcgtcgctcctaaacaggctgaagaagcacactcccgagttatcgataaggttgtgcaagacgcgcttgataaagccaatttgaccgagaaggatctctctgctgttgctgttaccattggacctggtttgagcctctgtctacgtgttggtgtgcgcaaggctagaagagttgctggtaacttcagtctcccaatcgttggggtgcatcacatggaggctcatactctcgttgctagattagtggaacaagaattaagcttccctttcatggcattgcttatatcaggagggcacaatcttctagttcttgcgcataagcttggtcagtacacacaacttgggactacagtagatgatgctataggtgaggcatttgacaagacagctaaatggctcggcctcgatatgcacaggagtggtggaccagctgttgaagaacttgctctggagggtgatgcaaagtctgttaagtttaatgttccaatgaaatatcataaagattgcaacttttcttatgctggtttgaagacacaagtgaggctagccattgaagccaaagaaattgatgctaaatgtcccgtctcttctgcaacaaacgaagacagaagaaaccgtgctgatattgccgcttctttccagcgagtagctgtcttgcatctggaagaaaaatgtgagcgagcaatagactgggcattagaactagagccttctattaaacatatggtaatctctggtggtgttgcttcaaacaagtatgtacgactccgacttaataacattgtcgaaaacaaaaacctgaaacttgtttgccctcctcctagcctctgcacagacaatggagtaatggtggcttggactggtctcgagcattttcgtgtaggaagatatgatccacctccacctgcaactgaacctgaggattatgtgtatgatcttcgaccgaggtagcctcttggcgaggagtatgcgaaaggaagaagcgaagctcgttctatgagaactgcacggatccatccgtcacttacttcaatcattagagcagattctcttcaacaacaaacacaaacgtagcaagaagattgtctcctgtaacttaaaaccagatatccaaatccttgtattcttttcactgaggaacaaacgcttttccggttaatttaatttcgttc

SEQ ID NO: 8485 - protein, 444 aa, Arabidopsis thaliana
FRFGEMVRLFLTLSPAISRFNLYPGISILARNNNSLRLQKHHKLKTKTPTFSLISPSSSPNFQRTRFYSTGTRISSLPYSENPNFDDNLVVLGIETSCDDTAAAVVRGNGEILSQVISSQAELLVQYGGVAPKQAEEAHSRVIDKVVQDALDKANLTEKDLSAVAVTIGPGLSLCLRVGVRKARRVAGNFSLPIVGVHHMEAHTLVARLVEQELSFPFMALLISGGHNLLVLAHKLGQYTQLGTTVDDAIGEAFDKTAKWLGLDMHRSGGPAVEELALEGDAKSVKFNVPMKYHKDCNFSYAGLKTQVRLAIEAKEIDAKCPVSSATNEDRRNRADIAASFQRVAVLHLEEKCERAIDWALELEPSIKHMVISGGVASNKYVRLRLNNIVENKNLKLVCPPPSLCTDNGVMVAWTGLEHFRVGRYDPPPPATEPEDYVYDLRPR

SEQ ID NO: 8486 - protein, 439 aa, Arabidopsis thaliana
MVRLFLTLSPAISRFNLYPGISILARNNNSLRLQKHHKLKTKTPTFSLISPSSSPNFQRTRFYSTGTRISSLPYSENPNFDDNLVVLGIETSCDDTAAAVVRGNGEILSQVISSQAELLVQYGGVAPKQAEEAHSRVIDKVVQDALDKANLTEKDLSAVAVTIGPGLSLCLRVGVRKARRVAGNFSLPIVGVHHMEAHTLVARLVEQELSFPFMALLISGGHNLLVLAHKLGQYTQLGTTVDDAIGEAFDKTAKWLGLDMHRSGGPAVEELALEGDAKSVKFNVPMKYHKDCNFSYAGLKTQVRLAIEAKEIDAKCPVSSATNEDRRNRADIAASFQRVAVLHLEEKCERAIDWALELEPSIKHMVISGGVASNKYVRLRLNNIVENKNLKLVCPPPSLCTDNGVMVAWTGLEHFRVGRYDPPPPATEPEDYVYDLRPR

SEQ ID NO: 8487 - protein, 245 aa, Arabidopsis thaliana
MEAHTLVARLVEQELSFPFMALLISGGHNLLVLAHKLGQYTQLGTTVDDAIGEAFDKTAKWLGLDMHRSGGPAVEELALEGDAKSVKFNVPMKYHKDCNFSYAGLKTQVRLAIEAKEIDAKCPVSSATNEDRRNRADIAASFQRVAVLHLEEKCERAIDWALELEPSIKHMVISGGVASNKYVRLRLNNIVENKNLKLVCPPPSLCTDNGVMVAWTGLEHFRVGRYDPPPPATEPEDYVYDLRPR

SEQ ID NO: 8488 - DNA, 1159 bp, Arabidopsis thaliana
atataaacacaaaagcctttagtatcattctcgaaaaccaccaaaaacctctttataacccaacaaacaaagtctctacttcttcttcaatcactgaaacacaacaccaaaaaagaaaaaagtatgtctcttcttccccatctcatcctctacctaacacttttgacggtggttgttactggagaaactctccgaccaagaatctacagcgagacatgccctgaagctgaatccatagtaagaagagaaatgaagaaagcatgatcaaagaagcaagaagcgtcgcttccgtcatgcgtttccaatttcacgactgtttcgtcaatggatgtgacgcatctctgttgcttgacgacacaccaaacatgcttggtgaaaaactatcactttccaacatcgattcactaagatctttcgaagtcgttgacgacattaaagaagctctagagaaagcttgtccagctactgtttcttgtgccgatatcgttatcatggccgctcgtgacgccgttgctcttacaggaggaccagattgggaagtgaagctagggaggaaagacagtttaacagcgagtcagcaagattccgacgatataatgccaagtccaagagccaacgcaactttcttgattgatctcttcgaaagattcaatctttctgtaaaagacatggttgctttatcagggtcacactcaataggtcaaggtcggtgtttttcaatcatgttcagactttataaccaatccggttctggtaaaccggatccagctcttgaaccgacttaccgtaagaagcttgacaacctttgtcctttgggtggagatgagaatgtgactggagatctagatgcaacacctcaggtttttgataatcagtatttcaaagacttggtttcagggagagggtttcttaactctgatcagactttgtacacgaatctagtgacgagagagtatgtgaagatgtttagtgaggatcaagatgagttcttcagggcttttgcagaaggcatggtgaagttgggtgatttgcaatctgggagagatggtgagattaggtttaattgtagagttgttaatagaaggcctattgatgtattgcttgtatcttgaattatcattagtaaagagaagaaatcttaattatgacttctaaattg

SEQ ID NO: 8489 - protein, 283 aa, Arabidopsis thaliana
MIKEARSVASVMRFQFHDCFVNGCDASLLLDDTPNMLGEKLSLSNIDSLRSFEVVDDIKEALEKACPATVSCADIVIMAARDAVALTGGPDWEVKLGRKDSLTASQQDSDDIMPSPRANATFLIDLFERFNLSVKDMVALSGSHSIGQGRCFSIMFRLYNQSGSGKPDPALEPTYRKKLDNLCPLGGDENVTGDLDATPQVFDNQYFKDLVSGRGFLNSDQTLYTNLVTREYVKMFSEDQDEFFRAFAEGMVKLGDLQSGRDGEIRFNCRVVNRRPIDVLLVS

SEQ ID NO: 8490 - protein, 272 aa, Arabidopsis thaliana
MRFQFHDCFVNGCDASLLLDDTPNMLGEKLSLSNIDSLRSFEVVDDIKEALEKACPATVSCADIVIMAARDAVALTGGPDWEVKLGRKDSLTASQQDSDDIMPSPRANATFLIDLFERFNLSVKDMVALSGSHSIGQGRCFSIMFRLYNQSGSGKPDPALEPTYRKKLDNLCPLGGDENVTGDLDATPQVFDNQYFKDLVSGRGFLNSDQTLYTNLVTREYVKMFSEDQDEFFRAFAEGMVKLGDLQSGRDGEIRFNCRVVNRRPIDVLLVS

SEQ ID NO: 8491 - protein, 248 aa, Arabidopsis thaliana
MLGEKLSLSNIDSLRSFEVVDDIKEALEKACPATVSCADIVIMAARDAVALTGGPDWEVKLGRKDSLTASQQDSDDIMPSPRANATFLIDLFERFNLSVKDMVALSGSHSIGQGRCFSIMFRLYNQSGSGKPDPALEPTYRKKLDNLCPLGGDENVTGDLDATPQVFDNQYFKDLVSGRGFLNSDQTLYTNLVTREYVKMFSEDQDEFFRAFAEGMVKLGDLQSGRDGEIRFNCRVVNRRPIDVLLVS

SEQ ID NO: 8492 - DNA, 1027 bp, Arabidopsis thaliana
gattacacaacacacgttcgtttctttcttcttctaacacactctgagtcttgaaggtcaacaacgtcgagaataatggcatcatctctttgtgcttcttctgccatcgctgccatttcttctccaagtttcttgggctaagaaactgaggctgaagaagaagttgactgttccagctgtgtccaggccagatgcgtcggtgcgcgccgtcgcagctgatccagatagaccaatctggttcccgggaagcactcctccagagtggctagacggtagcctccctggtgacttcggatttgatcctcttggtctttcatcggacccggacagtctaaaatggaacgtacaagccgagatagtccactgccgatgggctatgctaggagccgccgggatattcatcccagagttcctaacgaagatcggaatcctcaacactccgtcatggtacacggcgggagagcaagagtatttcacggacaaaaccacactctttgtcgttgagctcatcttgatcggatgggcagaaggacgtagatgggccgatatcatcaagcccggtagcgtcaacactgacccagtcttcccaaacaacaaactgacgggcacagacgttggttacccaggtgggttatggttcgacccgttgggttggggatccggtagcccggctaaactcaaggagttgaggaccaaggagatcaagaacggaaggttggctatgttggcagtgatgggtgcttggttccaacacatctacacgggcactggtcctattgataacctttttgcacatcttgctgatcctggtcacgccacaatcttcgctgctttcacacccaagtgagacaacgaaaaagggttatggggaggtgaatgcgtttgtgtgtgatcatgtttgtacaaatatcattttgaacttaaaattattatgtactttatataaattgtggtcgaatgcaaattaaggttccccgtaacactctcttttcctaactcaatgatcataagatgcttttacattgtc

SEQ ID NO: 8493 - protein, 156 aa, Arabidopsis thaliana
MLGAAGIFIPEFLTKIGILNTPSWYTAGEQEYFTDKTTLFVVELILIGWAEGRRWADIIKPGSVNTDPVFPNNKLTGTDVGYPGGLWFDPLGWGSGSPAKLKELRTKEIKNGRLAMLAVMGAWFQHIYTGTGPIDNLFAHLADPGHATIFAAFTPK

SEQ ID NO: 8494 - DNA, 2536 bp, Arabidopsis thaliana
acagagaggagtgagcaataataaaagctcactcactcacacttttattcatttctctgaaaacccttaaatctccggatttcgattcccgaggctcgaaaaaaccctaaatctcttctccgttcactcatccaaccgaagatgcgtgagattcttcacatccagggtggtcaatgcggtaaccagatcggcgccaagttctgggaagtggtttgcgccgagcacggcatcgatccaaccggaaggtacaccggagactcagatctgcaacttgagcgcatcaacgtttactacaatgaagcgagttgcggtagattcgttcctcgtgcagtgctcatggatttggagcctgggactatggatagtctcagatctggaccgtacggtcagacctttcgacctgataacttcgtctttggccaatccggtgctggtaacaactgggccaagggacactacacggaaggagctgaactaatcgattccgttctcgatgttgttcgtaaggaagctgagaactgtgactgtctccaagggttccaggtttgtcactcgttgggaggaggaactggatctggtatgggaacattgttgatctctaagatccgtgaagagtacccagatcgcatgatgcttaccttctcggtgttcccttcaccaaaggtttctgatactgtggttgagccttacaacgctactctgtctgtccatcagcttgttgagaatgctgatgagtgcatggttcttgataatgaggccttgtacgatatttgcttcaggactctcaaactcactacccccagctttggtgatttgaaccacttgatttctgctactatgtctggtgtgacttgctgtctgaggttccctggtcaactcaactctgacctccgaaagcttgctgtgaatctcatcccattcccccgtcttcacttcttcatggtgggttttgctcctctcacctcaagaggttctcagcagtaccgttccctcacagtccctgagctcacccagcaaatgtgggactccaagaacatgatgtgtgctgcagacccaaggcacggacgctacctcacagcctctgccatgttccgtggcaagatgagcacaaaggaagttgacgagcagatgctgaatgtgcagaacaagaactcgtcctactttgtggagtggatccccaacaacgtgaaatcgacagtctgtgacatcccacctactggtctgaagatggcatcaactttcattggaaactcaacatcaatccaagagatgttcaggcgagtgagtgagcagttcacagctatgttcaggagaaaggctttcttgcattggtacacaggtgagggaatggacgagatggaattcacagaagcggagagcaacatgaacgatcttgtgtcagagtaccagcaataccaagatgcaactgcggatgaagaaggtgactacgaggatgaggaagaaggtgaatatcaacaggaggaagagtactgagaataatttagttataactgctttaaaaacaaaaacaatttagtcgtttgctacttttcttttttttaaaaggaacacctcaactaccagttgtagtttttttctctgcttgtatttgacatatctggttgatgtttctgtacttttgttcttaatcttgttattgcctgtgatgtttctattaatattttccagttgtactgtcaaaaaaaaaaaaaaaacaagaagaagaagaaacaacaaaaatggcttctcagagttcttcactttttctggttatcttcttcatcttcatctacgcttcttcaattccatcctctattctcgccagagcacatgaacatgacggagatgaagagatcagaagcgttgggcgtagattccttctaggtttcaaagaaactccaaaaggaagtaatatcaccttcgcttgttctccttcaggtccttgtgtctcttgcaattcctccgaaaagagaaaagagaagtatcgttgcagtgaaactggttatcgtattcctttcaaatgtaaagaggttagagaagaagtggatgcacataagaaaaatggagaagaagaaacacaaaatgatcaatcgaataacaatgacgaagaagcgaaaacaaggaatctgttggatgattcatcaccggcgacgaaagtgaagtctcagtcttacaaaacttatagaagctgtgtgccatctgcagacgaagagaagttatcagttcttggttttgagtcgattatgctaggactgtttctgttaagcggagctgctatttacatcagaaagagacagacggtaccgatgcttggggtatcatcaagtggaagattgcaaggcaattctcggttttgaaagaaccatttctcggtatgtaaaagctttcatctgctcactcagaaacagatttaacatttgtcattgtctgttgaaagatgagatatgtttgagtgtatagaatagctttagggggacttcatataattgggactacttgtttcatatatggcaaccatgtttggctttgatgatgt

SEQ ID NO: 8495 - protein, 450 aa, Arabidopsis thaliana
MREILHIQGGQCGNQIGAKFWEVVCAEHGIDPTGRYTGDSDLQLERINVYYNEASCGRFVPRAVLMDLEPGTMDSLRSGPYGQTFRPDNFVFGQSGAGNNWAKGHYTEGAELIDSVLDVVRKEAENCDCLQGFQVCHSLGGGTGSGMGTLLISKIREEYPDRMMLTFSVFPSPKVSDTVVEPYNATLSVHQLVENADECMVLDNEALYDICFRTLKLTTPSFGDLNHLISATMSGVTCCLRFPGQLNSDLRKLAVNLIPFPRLHFFMVGFAPLTSRGSQQYRSLTVPELTQQMWDSKNMMCAADPRHGRYLTASAMFRGKMSTKEVDEQMLNVQNKNSSYFVEWIPNNVKSTVCDIPPTGLKMASTFIGNSTSIQEMFRRVSEQFTAMFRRKAFLHWYTGEGMDEMEFTEAESNMNDLVSEYQQYQDATADEEGDYEDEEEGEYQQEEEY

SEQ ID NO: 8496 - protein, 385 aa, Arabidopsis thaliana
MDLEPGTMDSLRSGPYGQTFRPDNFVFGQSGAGNNWAKGHYTEGAELIDSVLDVVRKEAENCDCLQGFQVCHSLGGGTGSGMGTLLISKIREEYPDRMMLTFSVFPSPKVSDTVVEPYNATLSVHQLVENADECMVLDNEALYDICFRTLKLTTPSFGDLNHLISATMSGVTCCLRFPGQLNSDLRKLAVNLIPFPRLHFFMVGFAPLTSRGSQQYRSLTVPELTQQMWDSKNMMCAADPRHGRYLTASAMFRGKMSTKEVDEQMLNVQNKNSSYFVEWIPNNVKSTVCDIPPTGLKMASTFIGNSTSIQEMFRRVSEQFTAMFRRKAFLHWYTGEGMDEMEFTEAESNMNDLVSEYQQYQDATADEEGDYEDEEEGEYQQEEEY

SEQ ID NO: 8497 - protein, 378 aa, Arabidopsis thaliana
MDSLRSGPYGQTFRPDNFVFGQSGAGNNWAKGHYTEGAELIDSVLDVVRKEAENCDCLQGFQVCHSLGGGTGSGMGTLLISKIREEYPDRMMLTFSVFPSPKVSDTVVEPYNATLSVHQLVENADECMVLDNEALYDICFRTLKLTTPSFGDLNHLISATMSGVTCCLRFPGQLNSDLRKLAVNLIPFPRLHFFMVGFAPLTSRGSQQYRSLTVPELTQQMWDSKNMMCAADPRHGRYLTASAMFRGKMSTKEVDEQMLNVQNKNSSYFVEWIPNNVKSTVCDIPPTGLKMASTFIGNSTSIQEMFRRVSEQFTAMFRRKAFLHWYTGEGMDEMEFTEAESNMNDLVSEYQQYQDATADEEGDYEDEEEGEYQQEEEY

SEQ ID NO: 8498 - DNA, 1158 bp, Arabidopsis thaliana
aaaaaagtgttgtttctgcagagctctctctctctctctctcgttctctttccacacattctttgatctccactatttaagtagacaagaatcataaagaaaatagtgagatgatgatgttagagtcaagaaacagtatgagagcttcaaactcagtcccagatctgtctcttcagatcagtcttcctaactatcacgccggaaaacctcttcacggcggtgaccggagctccacaagcagtgattctggaagcagcctcagtgacctgagccatgagaacaacttcttcaacaaacctctcttgagcttaggatttgaccatcatcatcaaaggcgctcaaacatgttccaacctcaaatctacggtcgagatttcaagagaagctcatcatcaatggttggtcttaaacgaagcattcgtgctccaagaatgagatggacttctactcttcatgctcacttcgtccatgctgttcaacttcttggcggccatgaaagagcaacgcctaaatcagtgttggagctcatgaatgtgaaggatctaaccctagctcatgtcaagagtcacttgcagatgtatagaacagtgaaatgcactgataaaggatcacaggagaaggaaaggtagagaaagaggcagagcagaggataggggacaataataataatgaagaagctgatgaaggaactgacacaaattcgccaaactcatcatctgtgcaaaagacccaaagagcttcatggtcatcgacaaaggaagtatctaggagcatatctacacaagcatattctcacttgggaacaactcatcacactaaggacaatgaagagaaagaggataccaacattcatctcaatttggatttcacattggggcggcctagttgggggatggaatatgcggaaccctccagtgatttaacccttctcaagtgctaattgccttaagctacaacaaataagtcagcttaggttaccagttttaacataattttaacttgttttgatcatatgagctttggaagaatcatattatcatcacatatgaacttctttccaagaatgttctatgagttttttgatatgtataatcaagagaatcgtttgaagtagtaagtattgttgtagtgggatgagaagggagtacaagttcaagt

SEQ ID NO: 8499 - protein, 172 aa, Arabidopsis thaliana
MMMLESRNSMRASNSVPDLSLQISLPNYHAGKPLHGGDRSSTSSDSGSSLSDLSHENNFFNKPLLSLGFDHHHQRRSNMFQPQIYGRDFKRSSSSMVGLKRSIRAPRMRWTSTLHAHFVHAVQLLGGHERATPKSVLELMNVKDLTLAHVKSHLQMYRTVKCTDKGSQEKER

SEQ ID NO: 8500 - protein, 171 aa, Arabidopsis thaliana
MMLESRNSMRASNSVPDLSLQISLPNYHAGKPLHGGDRSSTSSDSGSSLSDLSHENNFFNKPLLSLGFDHHHQRRSNMFQPQIYGRDFKRSSSSMVGLKRSIRAPRMRWTSTLHAHFVHAVQLLGGHERATPKSVLELMNVKDLTLAHVKSHLQMYRTVKCTDKGSQEKER

SEQ ID NO: 8501 - protein, 170 aa, Arabidopsis thaliana
MLESRNSMRASNSVPDLSLQISLPNYHAGKPLHGGDRSSTSSDSGSSLSDLSHENNFFNKPLLSLGFDHHHQRRSNMFQPQIYGRDFKRSSSSMVGLKRSIRAPRMRWTSTLHAHFVHAVQLLGGHERATPKSVLELMNVKDLTLAHVKSHLQMYRTVKCTDKGSQEKER

SEQ ID NO: 8502 - DNA, 735 bp, Arabidopsis thaliana
ttgccgcttagcttcgtctgaaaaaagggggatcagttccgtcgccgcttcttcgatttttgacgccgccgcttcttcttcttcctcgcagcaggtaagtcacacaggtaactgaaagatggggcgtgttagaaccaagactgtgaagaaatcttctcgtcaagtcatcgagaagtactactctcgcatgactcttgacttccacactaacaagaaaatccttgaagaggttgccatcatcccttcaaagagactccgcaacaagattgctggattctccacccacttgatgaaacgtatccagaagggaccagtccgtggaatctcactcaagcttcaggaagaggagcgtgaacgccgcatggactttgttcccgatgagtctgccatcaagactgatgagatcaaggtggacaaagagactcttgagatgcttgcttctctaggaatgtctgacactcccggcatctctgcagtcgagccacaacaagctatggcaccaatcgctgctttcggtggtggcagggcacccagaagatactgagatggctttgttatcatcagccaatcaaggcaaacgactggctctcttttttcacagttagggataagaaagacatgtgtgttcttggaaagtttattgtttcttttgattcaagtttttatgtcttaaactcagagtgagactctttcgtattaatgggttttgagttatgtggaaccaaaattggagtt

SEQ ID NO: 8503 - protein, 141 aa, Arabidopsis thaliana [sequence omitted]

SEQ ID NO: 8504 - protein, 118 aa, Arabidopsis thaliana
MTLDFHTNKKILEEVAIIPSKRLRNKIAGFSTHLMKRIQKGPVRGISLKLQEEERERRMDFVPDESAIKTDEIKVDKETLEMLASLGMSDTPGISAVEPQQAMAPIAAFGGGRAPRRY

SEQ ID NO: 8505 - protein, 84 aa, Arabidopsis thaliana
MKRIQKGPVRGISLKLQEEERERRMDFVPDESAIKTDEIKVDKETLEMLASLGMSDTPGISAVEPQQAMAPIAAFGGGRAPRRY

SEQ ID NO: 8506 - DNA, 2397 bp, Arabidopsis thaliana
acaatcacatggccttttcaaaaaatcaatcttttagttctctatcgatgcgtaggcttgaagcatgatgacgacagtcgccgccgatctccaccgttatcttttcctgattaccgtttttcttttcttcctctgcgacaaaacctctcttgctctgaccacagacggtgttcttcttctctctttccgttactcaatcgttgacgatcctctttacgtttttcggagctggagattcgacgacgagactccttgctcttggcgtggtgtcacgtgcgatgcatcttcccggcacgtgactgttctgtcacttccaagctcgaaccttaccggcacactaccttcaaatttgggttcactcaattcacttcaaagacttgatctttccaacaattccatcaatgggtctttcccggtttcgcttctcaacgcgacggagcttcgatttcttgatctgtccgataatcacatctccggtgcactaccggcgagttttggcgcgctttcgaacctccaagtgttgaatctctccgataattccttcgtcggcgaattaccgaacacattaggatggaaccggaacttaacggagatttcacttcagaaaaactatttatccggcgggattccgggaggttttaagtcgacggagtatcttgatctctcgtcaaatttgatcaaaggctcgttgccgtcacatttcagagggaatcgtctacgctatttcaacgcttcgtacaacagaatctccggcgagattccgtcaggtttcgccgacgaaatcccggaagacgccaccgttgatctctcattcaaccaacttacaggtcaaatcccgggttttcgggttctcgataaccaagaatccaactctttctccggtaacccgggtctctgcggatccgaccatgcaaaacacccttgtcgtgacggtgaagcaacctctccacctccatcgccgactccaaattctcctcctgcattagctgctataccaaatactattggcttaaccaatcacccaattagctccaaaaccggtccgaaatcaaaatgggatcataaaccggtgcttatcattggcattgttgtcggtgacttagccggtttagcaatcctcgggattgtgtttttctacatttaccagtcgagaaaacggaagaccgtaacggctacgtcaaaatggtccacgtcatcaacagattccaaggtctcaaaatggtactgtttacgcaaatccgtttacgttgacggtgactgcgaagaagaagaagaggaatctgagacatcggaatccgaatccgacgaagagaacccggtcggaccaaatcgacggtcaggattagacgatcaagaaaaaaagggaacgttagtgaatctcgattcagagaaagagcttgaaatcgaaacgcttctcaaagcatcagcttatattttgggagccaccggttcgagcataatgtataaagcggtgcttcaagacggaacagctgtggcggttcgacgaatagctgaatgcggtttagaccggtttagagatttcgaagctcaggttcgagccatggctaagttaatacatccaaacctggtacgaattcgcggtttctattggggatccgacgagaaacttgtcatttacgattttgtccctaacggcagcctcgctaacgcccgttaccggaaagtgggctcctctccttgtcatttaccttgggacgctcggctcaagatagcaaaaggcatagctcgcgggctaacatacgtacacgacaaaaagtacgtgcatggtaacctcaagcctagcaatatccttttgggcttatggagcctaaagttgcggatttcggtcttgagaagcttttgattggggacatgagttatagaaccggtggatcggctccaatattcggaagcaagagatccacaacgtctcttgagtttgggccgagtccaagcccaagtccaagttcagtcgggttaccctacaatgctccagaatctcttcggagtattaagccgaattcgaaatgggatgtgtactcgttcggagttattctgcttgagctactaacgggaaagatcgtggtggtcgacgagcttggacaggttaatgggcttgtgattgatgacggtgagcgggcaattcggatggcggactctgctatacgggctgagttagaaggcaaagaagaagctgtgttggcatgtttgaaaatgggcctagcttgtgcgtctccaataccacagagaaggcccaatatcaaagaggctttgcaagttctcgagagattccctgttcattctagtcaacagtaatgataataattaagaccaagaaagagttaaataacttgactgtgtgtacttagagttagattgataggcaagtttgatctt

SEQ ID NO: 8507 - protein, 599 aa, Arabidopsis thaliana
MMTTVAADLHRYLFLITVFLFFLCDKTSLALTTDGVLLLSFRYSIVDDPLYVFRSWRFDDETPCSWRGVTCDASSRHVTVLSLPSSNLTGTLPSNLGSLNSLQRLDLSNNSINGSFPVSLLNATELRFLDLSDNHISGALPASFGALSNLQVLNLSDNSFVGELPNTLGWNRNLTEISLQKNYLSGGIPGGFKSTEYLDLSSNLIKGSLPSHFRGNRLRYFNASYNRISGEIPSGFADEIPEDATVDLSFNQLTGQIPGFRVLDNQESNSFSGNPGLCGSDHAKHPCRDGEATSPPPSPTPNSPPALAAIPNTIGLTNHPISSKTGPKSKWDHKPVLIIGIVVGDLAGLAILGIVFFYIYQSRKRKTVTATSKWSTSSTDSKVSKWYCLRKSVYVDGDCEEEEEESETSESESDEENPVGPNRRSGLDDQEKKGTLVNLDSEKELEIETLLKASAYILGATGSSIMYKAVLQDGTAVAVRRIAECGLDRFRDFEAQVRAMAKLIHPNLVRIRGFYWGSDEKLVIYDFVPNGSLANARYRKVGSSPCHLPWDARLKIAKGIARGLTYVHDKKYVHGNLKPSNILLGLWSLKLRISVLRSF

SEQ ID NO: 8508 - protein, 598 aa, Arabidopsis thaliana
MTTVAADLHRYLFLITVFLFFLCDKTSLALTTDGVLLLSFRYSIVDDPLYVFRSWRFDDETPCSWRGVTCDASSRHVTVLSLPSSNLTGTLPSNLGSLNSLQRLDLSNNSINGSFPVSLLNATELRFLDLSDNHISGALPASFGALSNLQVLNLSDNSFVGELPNTLGWNRNLTEISLQKNYLSGGIPGGFKSTEYLDLSSNLIKGSLPSHFRGNRLRYFNASYNRISGEIPSGFADEIPEDATVDLSFNQLTGQIPGFRVLDNQESNSFSGNPGLCGSDHAKHPCRDGEATSPPPSPTPNSPPALAAIPNTIGLTNHPISSKTGPKSKWDHKPVLIIGIVVGDLAGLAILGIVFFYIYQSRKRKTVTATSKWSTSSTDSKVSKWYCLRKSVYVDGDCEEEEEESETSESESDEENPVGPNRRSGLDDQEKKGTLVNLDSEKELEIETLLKASAYILGATGSSIMYKAVLQDGTAVAVRRIAECGLDRFRDFEAQVRAMAKLIHPNLVRIRGFYWGSDEKLVIYDFVPNGSLANARYRKVGSSPCHLPWDARLKIAKGIARGLTYVHDKKYVHGNLKPSNILLGLWSLKLRISVLRSF

SEQ ID NO: 8509 - DNA, 1278 bp, Arabidopsis thaliana
gtctctgtttctatcttcttcttttttttcccggtaacagggagctcgcacgggcggctacgaaatcgctgtattttcaaatcgtctatcagtttccatgacttcagatgctcttactataccatctgagcttgaatctgcgttgcggctcaggactgtacaatactttattacaaaaaggccttggcttgatctttatggagtccatgtgaggcctgtgccaccattcggaagtacaagccgtaaaccccattatgatccagctttgattcatcgttgcttgcctgatgagcttcttttcgaggtgtttgctcggatgatgccttatgacttaggtagagcagcttgtgtatgcagaaagtggaggtacactgttcgaaaccctgtgttctggcgtaatgcctgtttgaaagcttggcagactgctggggttatcgaaaactataagatcttgcagtctaaatatgatggatcatggaggaaaatgtggcttcttagatccagagttcgtactgatggtctttatgtgagtaggaatacttacattcgagctggaattgcagagtggaagattacaaatccagttcacattgtttgttactaccgctacataaggttctacccttctggcagatttctttacaagaactcttcacagaaattgaaggatgttgccaagtacatgaactttaaggcttctaaatctgaaaatctttacaaaggcacttatacactgtcaatgtcggatgataagatcgaagcagctgttctgtacccagggacacgccctactgtcttaaggattcgtttaaggttaagaggaacagctatttgagcgaataacaggatggatttgctgtcacttgtgacaagtggtgtgaacgatgaggaaataagcagcacagaagaagacattcttgggttagttgaaggttgggaagacgatgaaactcacaacccggatatacctgccgtctcacacaagaggggtatgactgcattcgtcttcgttcctttcgaagaggttgacgaatcggttctgaacttgccaccgaagaaaatggattactatgtcactggctaaagagacacatcgaagtttctgtacaaaaatgtatcatagaataatgttttcacgttatatttattgttacgacaaacattagtgtttgtttgttgctgtcgaattgtgaaaaacatacattttgggatttttgtttgtttacagagattacttgaaacaagctttactattgtaagataatgttttcaagtttt

SEQ ID NO: 8510 - protein, 245 aa, Arabidopsis thaliana
MTSDALTIPSELESALRLRTVQYFITKRPWLDLYGVHVRPVPPFGSTSRKPHYDPALIHRCLPDELLFEVFARMMPYDLGRAACVCRKWRYTVRNPVFWRNACLKAWQTAGVIENYKILQSKYDGSWRKMWLLRSRVRTDGLYVSRNTYIRAGIAEWKITNPVHIVCYYRYIRFYPSGRFLYKNSSQKLKDVAKYMNFKASKSENLYKGTYTLSMSDDKIEAAVLYPGTRPTVLRIRLRLRGTAI

SEQ ID NO: 8511 - protein, 172 aa, Arabidopsis thaliana
MMPYDLGRAACVCRKWRYTVRNPVFWRNACLKAWQTAGVIENYKILQSKYDGSWRKMWLLRSRVRTDGLYVSRNTYIRAGIAEWKITNPVHIVCYYRYIRFYPSGRFLYKNSSQKLKDVAKYMNFKASKSENLYKGTYTLSMSDDKIEAAVLYPGTRPTVLRIRLRLRGTAI

SEQ ID NO: 8512 - protein, 171 aa, Arabidopsis thaliana
MPYDLGRAACVCRKWRYTVRNPVFWRNACLKAWQTAGVIENYKILQSKYDGSWRKMWLLRSRVRTDGLYVSRNTYIRAGIAEWKITNPVHIVCYYRYIRFYPSGRFLYKNSSQKLKDVAKYMNFKASKSENLYKGTYTLSMSDDKIEAAVLYPGTRPTVLRIRLRLRGTAI

SEQ ID NO: 8513 - DNA, 639 bp, Arabidopsis thaliana
aacatcttcttcttcttcatcaaatctcacaaatcttcatcacttattcacaaatctcaaagcttcggatactaaatggctcgtaccaagcaaaccgcaaggaaatccaccggaggaaaagccccaaggaaacaactcgcaacaaaggcggcgaggaaatcagctccggcgaccggaggagtgaagaagccacacagattccgtcctggaactgttgccctaagagaaatcaggaagtatcagaagagcactgagcttctgattcgcaagcttccgttccagcgtttggttcgtgagatcgctcaggatttcaaaacagatctgcgtttccagagcagcgccgtcgcagcacttcaggaagcggctgaagcatacctcgttggattgtttgaagacaccaatctttgcgcgattcatgctaagagagtcactatcatgcctaaggatattcaattggcgaggagaattagaggcgagagggcttaagaaggagattgaagtactctagactgtgatcgttatgcttatgtatatttttcgttttccctaatttcgtgttttagggttggattaggttttgcgtttatgttgttcgatgaaatgcctcaatgaatcttaattaagtctgttttcgaattt

SEQ ID NO: 8514 - protein, 136 aa, Arabidopsis thaliana; identical to SEQ ID NO: 2313

SEQ ID NO: 8515 - protein, 83 aa, Arabidopsis thaliana
HLLLLHQISQIFITYSQISKLRILNGSYQANRKEIHRRKSPKETTRNKGGEEISSGDRRSEEATQIPSWNCCPKRNQEVSEEH

SEQ ID NO: 8516 - DNA, 1574 bp, Arabidopsis thaliana
gaattggctgtgtctctctccatcgcctccttcttctctgacaaactctcctccgttggtcggagtttgtttcttcgctcgttcatcacaagcttcgtgtactggtaattgttccattttttctagctatttcggaaaattggatggaagaagcatctgaaatacgcgtgtaaatgtcgctgattgtgtcgttgaggcagagccattgttgattcttagagaaaatttgctcctttatttctccagtttgttaaactctcgattacgcccttgaaatgcattcgaccgggaagagaaatttcttagctgttatcagattattgtttactagttcgagcttggtcagaaaggctggttgtagaaatctcatttctgctacctttaccaccaggtgttcgacgttatgcctgaatgaatctgaagaatgcattgaggattctgatctatcgtctaggagaaaaaaatttgattatgttggagaagttggtgaaaaagagaaagtgagagatattactagtagtcctttacaagttttacgaagatggggttgtgatgatgatgaaatatccaagctttttactcgtaggcctgctttgcagagagccaatgttgctcagttagagtttaagttaagccttcttaagccactgggaatcacgtcttcagaccttgtgaagattcttaactgtcgtcctaggttctttagttgccgtcttgtccttgatgaaaggatcaactacttcatggagattttggggtcaaaagaggtgttgcgcagagtcattatccggaatccgtcactcatgttgtatgacctcgatgacaagatcaaacccgcgatagaatactacaaagggttgggctttagccaacaggatcttgtcgcaatgttgatatcgcgacccacgttgattccaagaacaaactttaacaatgagaagtttgaatacattgagaaaactggagtcaccagagaatccaagatgtttaaatatgttgcagtcatcatcggggtctcgaggatggagacaatcgaagagaaagttagaaactttgaaaagtttgggttctcggaagaagagatttggcacctgtatggaaaatgcccaatccttctctctctctctgttgagaaagttcagagaaacatgactttcgtcatagcctcgatgaaacttccagctcattccgtggttaagcacccttgtttgcttctcctcaacctcgagtctcgtctaaaacctcgtgcggatctcgttaagagagtcttggaaatgcgtctaaagccattgataaaagaagtgagcattttcagagcggtaaggatgagcgagaaacggttcttgaaggtttatgtaatgtgtcatccacaagatattgcaaccgagctgatggagttttacgagaaatccaaaaacatgaaacgtttagctgagaaatccaagaaatacatccgtaaaggattccccttttgaatctctttttcatcttttgtttctttggatatgttcattaaagatgtaacattgtgtagaattttccagctttatcaatggatacttttgaatcggtcc

SEQ ID NO: 8517 - protein, 399 aa, Arabidopsis thaliana
MHSTGKRNFLAVIRLLFTSSSLVRKAGCRNLISATFTTRCSTLCLNESEECIEDSDLSSRRKKFDYVGEVGEKEKVRDITSSPLQVLRRWGCDDDEISKLFTRRPALQRANVAQLEFKLSLLKPLGITSSDLVKILNCRPRFFSCRLVLDERINYFMEILGSKEVLRRVIIRNPSLMLYDLDDKIKPAIEYYKGLGFSQQDLVAMLISRPTLIPRTNFNNEKFEYIEKTGVTRESKMFKYVAVIIGVSRMETIEEKVRNFEKFGFSEEEIWHLYGKCPILLSLSVEKVQRNMTFVIASMKLPAHSVVKHPCLLLLNLESRLKPRADLVKRVLEMRLKPLIKEVSIFRAVRMSEKRFLKVYVMCHPQDIATELMEFYEKSKNMKRLAEKSKKYIRKGFPF

SEQ ID NO: 8518 - protein, 243 aa, Arabidopsis thaliana
MEILGSKEVLRRVIIRNPSLMLYDLDDKIKPAIEYYKGLGFSQQDLVAMLISRPTLIPRTNFNNEKFEYIEKTGVTRESKMFKYVAVIIGVSRMETIEEKVRNFEKFGFSEEEIWHLYGKCPILLSLSVEKVQRNMTFVIASMKLPAHSVVKHPCLLLLNLESRLKPRADLVKRVLEMRLKPLIKEVSIFRAVRMSEKRFLKVYVMCHPQDIATELMEFYEKSKNMKRLAEKSKKYIRKGFPF

SEQ ID NO: 8519 - protein, 223 aa, Arabidopsis thaliana
MLYDLDDKIKPAIEYYKGLGFSQQDLVAMLISRPTLIPRTNFNNEKFEYIEKTGVTRESKMFKYVAVIIGVSRMETIEEKVRNFEKFGFSEEEIWHLYGKCPILLSLSVEKVQRNMTFVIASMKLPAHSVVKHPCLLLLNLESRLKPRADLVKRVLEMRLKPLIKEVSIFRAVRMSEKRFLKVYVMCHPQDIATELMEFYEKSKNMKRLAEKSKKYIRKGFPF

SEQ ID NO: 8520 - DNA, 1905 bp, Arabidopsis thaliana
aaaccaaaacacaattaagctaaaaaaaaaaccaaaggatgtctcagaaactcatgttcttgttcacccttgcctgcctctcctcgttaccatctccttttatctccgcccaaataccggccattggaaatgccacttcaccgtcaaatatatgtagattcgcgccggatccatcttattgtagatcggttcttccaaaccagcccggagatatatattcctacggacgtttgtctctacgaagatccctctccagcccgccggttcatttcgatgatcgacgctgaacttgaccggaaaggcaaagtggctgctaaatccacagtaggggctctcgaagactgcaaattcctagccagcctgactatggactacctccttagtagctcacagacggctgattccaccaaaacactgtcgttatctagggccgaggatgttcatacatttctgagtgctgccatcaccaatgagcagacttgtcttgaaggacttaaatcaacggcgtccgaaaatggtctttccggtgatcttttcaacgatacaaaactctatggggtgtctcttgcccttttctccaaaggttgggtgccaagaaggcaaagatcgagaccgatttggcaaccacaagccaggttcaaaaagttttttggtttccgtaacggtaaattaccgttaaagatgacggaaagggcacgtgccgtttacaacaccgtgactagaagaaagcttctccaatcggatgcagacgccgttcaggtgagcgacattgtgacggtgatccagaacgggacgggaaacttcacgaccataaacgccgccattgcagctgcaccaaataaaactgacggtagtaacggttacttcttgatctacgtaacggcgggattgtacgaggaatacgtggaagttcccaagaacaagagatatgtgatgatgatcggtgacggcatcaaccagaccgttatcaccggaaacaggagtgtcgttgatggatggacaactttcaattcagccacatttattctatcaggtcccaactttattggtgtaaacataacaatccgcaatacggcaggaccaaccaaaggccaagctgtggcattgaggagtggtggggacttgtctgttttctacagttgtagttttgaagcctatcaagacacgttatacacacattctctcagacagttttatcgtgaatgtgatgtctatggtactgttgattttatatttggtaacgctgcagtggtattacaaaactgtaatttgtatccacgtcaacctcgcaaaggtcaatcgaacgaggttacggctcaaggtcgtactgatccgaaccaaaacactgggacggcaattcatggttgtactataagaccggcagatgatttggctacgagcaactatacagtgaagacttatcttggtcgaccatggaaggaatattctagaaccgttgtcatgcaaacttacatagacgggtttctagaaccgagtggttggaatgcatggtctggtgattttgcattgagcacactttactacgcggaatataataataccggacctggttctgacacgacaaaccgagtcacttggcctggttatcacgtcatcaacgcaactgatgcttccaatttcacggtcaccaatttccttgttggtgaaggttggattggacaaaccggagtgcctttcgtgggtggactgatcgcataatcaaccaaccttatactatatatgatatgttaattagttaaattatttaatcattcatgtgttgtttttttaatcaaataattatttagtggtgcctgattcaatacgatttgtaataactttaacttactattgtacaaccgaatggttttcttcgaaatctaataataatgaacgggtaatcag

SEQ ID NO: 8521 - protein, 529 aa, Arabidopsis thaliana
MPLHRQIYVDSRRIHLIVDRFFQTSPEIYIPTDVCLYEDPSPARRFISMIDAELDRKGKVAAKSTVGALEDCKFLASLTMDYLLSSSQTADSTKTLSLSRAEDVHTFLSAAITNEQTCLEGLKSTASENGLSGDLFNDTKLYGVSLALFSKGWVPRRQRSRPIWQPQARFKKFFGFRNGKLPLKMTERARAVYNTVTRRKLLQSDADAVQVSDIVTVIQNGTGNFTTINAAIAAAPNKTDGSNGYFLIYVTAGLYEEYVEVPKNKRYVMMIGDGINQTVITGNRSVVDGWTTFNSATFILSGPNFIGVNITIRNTAGPTKGQAVALRSGGDLSVFYSCSFEAYQDTLYTHSLRQFYRECDVYGTVDFIFGNAAVVLQNCNLYPRQPRKGQSNEVTAQGRTDPNQNTGTAIHGCTIRPADDLATSNYTVKTYLGRPWKEYSRTVVMQTYIDGFLEPSGWNAWSGDFALSTLYYAEYNNTGPGSDTTNRVTWPGYHVINATDASNFTVTNFLVGEGWIGQTGVPFVGGLIA

SEQ ID NO: 8522 - protein, 481 aa, Arabidopsis thaliana
MIDAELDRKGKVAAKSTVGALEDCKFLASLTMDYLLSSSQTADSTKTLSLSRAEDVHTFLSAAITNEQTCLEGLKSTASENGLSGDLFNDTKLYGVSLALFSKGWVPRRQRSRPIWQPQARFKKFFGFRNGKLPLKMTERARAVYNTVTRRKLLQSDADAVQVSDIVTVIQNGTGNFTTINAAIAAAPNKTDGSNGYFLIYVTAGLYEEYVEVPKNKRYVMMIGDGINQTVITGNRSVVDGWTTFNSATFILSGPNFIGVNITIRNTAGPTKGQAVALRSGGDLSVFYSCSFEAYQDTLYTHSLRQFYRECDVYGTVDFIFGNAAVVLQNCNLYPRQPRKGQSNEVTAQGRTDPNQNTGTAIHGCTIRPADDLATSNYTVKTYLGRPWKEYSRTVVMQTYIDGFLEPSGWNAWSGDFALSTLYYAEYNNTGPGSDTTNRVTWPGYHVINATDASNFTVTNFLVGEGWIGQTGVPFVGGLIA

SEQ ID NO: 8523 - protein, 450 aa, Arabidopsis thaliana
MDYLLSSSQTADSTKTLSLSRAEDVHTFLSAAITNEQTCLEGLKSTASENGLSGDLFNDTKLYGVSLALFSKGWVPRRQRSRPIWQPQARFKKFFGFRNGKLPLKMTERARAVYNTVTRRKLLQSDADAVQVSDIVTVIQNGTGNFTTINAAIAAAPNKTDGSNGYFLIYVTAGLYEEYVEVPKNKRYVMMIGDGINQTVITGNRSVVDGWTTFNSATFILSGPNFIGVNITIRNTAGPTKGQAVALRSGGDLSVFYSCSFEAYQDTLYTHSLRQFYRECDVYGTVDFIFGNAAVVLQNCNLYPRQPRKGQSNEVTAQGRTDPNQNTGTAIHGCTIRPADDLATSNYTVKTYLGRPWKEYSRTVVMQTYIDGFLEPSGWNAWSGDFALSTLYYAEYNNTGPGSDTTNRVTWPGYHVINATDASNFTVTNFLVGEGWIGQTGVPFVGGLIA

SEQ ID NO: 8524 - DNA, 1309 bp, Arabidopsis thaliana
gattaagaatcaaaccatttttgaagaaccctaaaagttctcttcttcccccaaattttaatctgttcttgcaatcggattcgaaatccgaaagtcttagtctcgaatttgagctcaacagtttcttatggctccgaagaagtctgaaggaatcgctttgctttccgtttacagtgatgaagatgacgaagagatggaagacgccgaggaagaggaagaagaagatgagaagcagagaaatcagtaagagagtgaaaaaataattgaagaagatcaggtagaagaagcgaattatatggatgaagaagagaaaggaagaggaggagaagattctagaacgccgaggctattagatggtgttggagcttcttctagtgctcatgggactcctcgttcacttgataacgatgaatcatcgagacctgattggagtaatcgaatgattggtgagtctggagttgcggatggtgagagaggtgatgatgcttcaggggaaagtagtgatacgttattggatcagtttcttccgccaagaccgagagagaggtgctctgaggagctgcaaaggaaaatagataagtttctgagcttgaaaaagatggggaagagtttcaattcagaagtgaggaataggaaggaatacaggaatcctgacttcctattgcatgctgtatcttaccaagacattgaccagattggttcgtgtttcagtaaagatgtatttgatcccagtggatatgacccaagtgacttctgtgatgcaatagaaatcgacatgaagaatgagagggaaaggaaggaacaagaaagcaagaagaaccagaagcttgactttgtttctgctggtactcaacctggggcggttttcgctgctcaaaagcctaacatccccattccaggtattccagctttagctactagtggattgccttccataccaaccgaaattgctgctcgtgatggtagaccgaacaagaaatccaaatgggataaggttgatggggacgtaaagaatcctcctctagcagctggaactcaggattctatatcctcaatccggtctaatgcagctcttgtatctgctacaagtgctggttctggatactcagcttttgcgcaacaacggagacgagaggtggaaggaagaagatcttccgagaggaaattggagagaagaagttgagagacataaccagaacgaagcttttctatgttgtgattcatgtagcaagagtttctaaagaggttctagttcaatgtttcataacgagtacaaacttaaaatcaatgatatacagtaccttcattc

SEQ ID NO: 8525 - protein, 295 aa, Arabidopsis thaliana
MDEEEKGRGGEDSRTPRLLDGVGASSSAHGTPRSLDNDESSRPDWSNRMIGESGVADGERGDDASGESSDTLLDQFLPPRPRERCSEELQRKIDKFLSLKKMGKSFNSEVRNRKEYRNPDFLLHAVSYQDIDQIGSCFSKDVFDPSGYDPSDFCDAIEIDMKNERERKEQESKKNQKLDFVSAGTQPGAVFAAQKPNIPIPGIPALATSGLPSIPTEIAARDGRPNKKSKWDKVDGDVKNPPLAAGTQDSISSIRSNAALVSATSAGSGYSAFAQQRRREVEGRRSSERKLERRS

SEQ ID NO: 8526 - protein, 247 aa, Arabidopsis thaliana
MIGESGVADGERGDDASGESSDTLLDQFLPPRPRERCSEELQRKIDKFLSLKKMGKSFNSEVRNRKEYRNPDFLLHAVSYQDIDQIGSCFSKDVFDPSGYDPSDFCDAIEIDMKNERERKEQESKKNQKLDFVSAGTQPGAVFAAQKPNIPIPGIPALATSGLPSIPTEIAARDGRPNKKSKWDKVDGDVKNPPLAAGTQDSISSIRSNAALVSATSAGSGYSAFAQQRRREVEGRRSSERKLERRS

SEQ ID NO: 8527 - protein, 194 aa, Arabidopsis thaliana
MGKSFNSEVRNRKEYRNPDFLLHAVSYQDIDQIGSCFSKDVFDPSGYDPSDFCDAIEIDMKNERERKEQESKKNQKLDFVSAGTQPGAVFAAQKPNIPIPGIPALATSGLPSIPTEIAARDGRPNKKSKWDKVDGDVKNPPLAAGTQDSISSIRSNAALVSATSAGSGYSAFAQQRRREVEGRRSSERKLERRS

SEQ ID NO: 8528 - DNA, 843 bp, Arabidopsis thaliana
aaaaacttgtgcgtgattcatcgtcacatcgccttgatcatggaaactcctatcgatgctccgaataaggacgaacatgaatgccctaggtggaagaaatcaactgtagtttttgtgttgggtggtcctggaagtggaaaaggtactcagtgtgctaatgttgtgaagcactttagctatacccattttagtgctggtgatcttctcagagcagaaattaagtccggttctgaatttggagccatgatccaaagtatgattgcagaggggagaatagtgccgtctgagatcacagtgaaacttttgtgtaaagctatggaggaaagtggtaatgataagttccttattgatggcttccctcgcaatgaagaaaatcgaaacgtattcgaaaatgttgctagaatcgagcctgcttttgttctattctttgattgtccagaagaagaactagaaagacgcattatgagcaggaaccagggaagagaagacgataatatagagaccataaagaagcgatttaaagtgtttgttgaatctaccctcccaattattagctactacgaatcgaaagggaaacttcgaaagatcaatgctgcaaaatccagcgaagaggttttcgaggctgtcagagttctatttgcatctgaaacttgacaagcatcaaggacttggattcaccgaacagaacaaaacagagactccaaagtcaatgatgtgccttgtcgtatacgtaactaagtttacagattcatgctttatttgtatatgtaattatctctacattttacatgttctcatcatacgatatagccaaactttcgtcgcaataaccatatttttagc

SEQ ID NO: 8529 - protein, 217 aa, Arabidopsis thaliana
KNLCVIHRHIALIMETPIDAPNKDEHECPRWKKSTVVFVLGGPGSGKGTQCANVVKHFSYTHFSAGDLLRAEIKSGSEFGAMIQSMIAEGRIVPSEITVKLLCKAMEESGNDKFLIDGFPRNEENRNVFENVARIEPAFVLFFDCPEEELERRIMSRNQGREDDNIETIKKRFKVFVESTLPIISYYESKGKLRKINAAKSSEEVFEAVRVLFASET

SEQ ID NO: 8530 - protein, 204 aa, Arabidopsis thaliana
METPIDAPNKDEHECPRWKKSTVVFVLGGPGSGKGTQCANVVKHFSYTHFSAGDLLRAEIKSGSEFGAMIQSMIAEGRIVPSEITVKLLCKAMEESGNDKFLIDGFPRNEENRNVFENVARIEPAFVLFFDCPEEELERRIMSRNQGREDDNIETIKKRFKVFVESTLPIISYYESKGKLRKINAAKSSEEVFEAVRVLFASET

SEQ ID NO: 8531 - protein, 136 aa, Arabidopsis thaliana
MIQSMIAEGRIVPSEITVKLLCKAMEESGNDKFLIDGFPRNEENRNVFENVARIEPAFVLFFDCPEEELERRIMSRNQGREDDNIETIKKRFKVFVESTLPIISYYESKGKLRKINAAKSSEEVFEAVRVLFASET

SEQ ID NO: 8532 - DNA, 1475 bp, Arabidopsis thaliana
gagtataaaatactctgatatcacttatacaaagttctacgaaactcattaaagatttgagagtgtacaagggacaaaaggtgctataaatatctcttaaaagagagctaaaagttaaggaaacacttaaccaagcaaacaacaaatggctctttcaatcgttcttcttcccttcattctcattctcataccgacttttctcagttcggttttcgccgtttcaccactcaaaactgatacgttaaaaccggggcagcagctcagagactgggagcagttgatctctgcggatggtatcttcactctcggattctttacacctaaagactcatctacttccgaactcgggtcagctggtcttagatatcttggtatttggcctcaaagtattccaataaatctagtttgggtgggtaacccaaccgaatcagtttctgattcatctggttctctatccattgacaccaatggggttctaaagataacacaggcaaacgctattccaatcttggtgaaccaaagaccagccgcgcagctttcattggtcgggaatgtgtctgccattttactcgataccgggaactttgtggtccgagagatcaggccaggaggagttccgggtcgtgttctatggcaaagctttgaccatcccacaaacacattacttcccgggatgaagattgggtttaacctaagaaccaagaaagaagtatcagttacgtcttggataactgaccaagtcccagtcccaggagcattcagactaggactagacccatcaggagctaaccagttactcgtctggcgccgcggggaaatctactggtccagtggaatcttgacgaacaatggaagctctcatttgaacttagaagtatccagacactacattgattatgaattcaagttcgattcaaataagtacatgaagtacttcagctactcaatcaagaaagctaatagttcggtcttttccagctggttcttggatactctaggccaaatcactgtaaccttttctctcagcagtaacaatagcagcacctggatttccgaaagcagtgaaccctgcaagacggatttaaagaacagttcagcaatctgcatcacggagaagccaacggcttgtaggaaagggtcagagtatttcgaacccagaagaggatacatgatggaaaataataccggttattatccattttactatgacgatagtttgagcgctggtcttagcgactgtcatggaacctgctggagaaactgttcttgcatagctttccaagcctttcctgatggatgccaatattgggaaaaaggatcaaagtttgttccttatgatagcttcaactccaatttagtaacttatgttcttgattctgtaaagtgatgtgtggttgtaacttgaacgagcaattatgtaaccagactagtatcagtaaaggggtttattaagaaactaaagaatcaagcagttc

SEQ ID NO: 8533 - protein, 413 aa, Arabidopsis thaliana
MALSIVLLPFILILIPTFLSSVFAVSPLKTDTLKPGQQLRDWEQLISADGIFTLGFFTPKDSSTSELGSAGLRYLGIWPQSIPINLVWVGNPTESVSDSSGSLSIDTNGVLKITQANAIPILVNQRPAAQLSLVGNVSAILLDTGNFVVREIRPGGVPGRVLWQSFDHPTNTLLPGMKIGFNLRTKKEVSVTSWITDQVPVPGAFRLGLDPSGANQLLVWRRGEIYWSSGILTNNGSSHLNLEVSRHYIDYEFKFDSNKYMKYFSYSIKKANSSVFSSWFLDTLGQITVTFSLSSNNSSTWISESSEPCKTDLKNSSAICITEKPTACRKGSEYFEPRRGYMMENNTGYYPFYYDDSLSAGLSDCHGTCWRNCSCIAFQAFPDGCQYWEKGSKFVPYDSFNSNLVTYVLDSVK

SEQ ID NO: 8534 - protein, 237 aa, Arabidopsis thaliana
MKIGFNLRTKKEVSVTSWITDQVPVPGAFRLGLDPSGANQLLVWRRGEIYWSSGILTNNGSSHLNLEVSRHYIDYEFKFDSNKYMKYFSYSIKKANSSVFSSWFLDTLGQITVTFSLSSNNSSTWISESSEPCKTDLKNSSAICITEKPTACRKGSEYFEPRRGYMMENNTGYYPFYYDDSLSAGLSDCHGTCWRNCSCIAFQAFPDGCQYWEKGSKFVPYDSFNSNLVTYVLDSVK

SEQ ID NO: 8535 - DNA, 1708 bp, Arabidopsis thaliana
aaccgattcatatctttcttcttcttcctctacagcttcttcataaatctctctctcttctcctctcttctcaaagatcgaacctttcgatttcagtctcttcagagttctttcgttttcatcgaaacaatggcgaagaacgttgggatttaggctatgaatatctatttccctcccacctgtgttcaacaggaagctttggaagcacatgatggagcaagcaaagggaaatacactattggacttggccaagattgcttagctttttgcactgagcttgaagatgttatctctatgagtttcaatgcggtgacatcactttttgagaagtataagattgaccctaaccaaatcgggcgtcttgaagtaggaagtgagactgttattgacaaaagcaagtccatcaagaccttcttgatgcagctctttgagaaatgtggaaacactgatgtcgaaggtgttgactcgaccaatgcttgctatggtggaactgcagcttgttaaactgtgtcaattgggttgagagtaactcttgggatggacgttatggcctcgtcatttgtactgacagcgcggtttatgcagaaggacccgcaaggcccactggaggagctgcagcgattgctatgttgataggacctgatgctcctatcgttttcgaaagcaaattgagagcaagccacatggctcatgtctatgacttttacaagcccaatcttgctagcgagtacccggttgttgatggtaagctttcacagacttgctacctcatggctcttgactcctgctataaacatttatgcaacaagttcgagaagatcgagggcaaagagttctccataaatgatgctgattacattgttttccattctccatacaataaacttgtacagaaaagctttgccctctcttgtacaacgacttcttgagaaacgcaagctccattgacgaggctgccaaagaaaagttcaccccttattcatctttgacccttgacgagagttaccaaagccgtgatcttgaaaaggtgtcacaacaaatttcgaaaccgttttatgatgctaaagtgcaaccaacgactttaataccaaaggaagtcggtaacatgtacactgcttctctctacgctgcatttgcttccctcatccacaataaacacaatgatttggcgggaaagcgggtggttatgttctcttatggaagtggctccaccgcaacaatgttctcattacgcctcaacgacaataagcctcctttcagcatttcaaacattgcatctgtaatggatgttggcggtaaattgaaagctagacatgagtatgcacctgagaagtttgtggagacaatgaagctaatggaacataggtatggagcaaaggactttgtgacaaccaaggagggtattatagatcttttggcaccgggaacttattatctgaaagaggttgattccttgtaccggagattctatggcaagaaaggtgaagatggatctgtagccaatggacactgattcttgaaaaggaacaaatcataaaaagtcacctgaaaatgttatgttttacttgcaccattttaatcgttttataagtttgttattactttgatttagggacaaagaaggaatgtattctctgtttttatttactgtttgatttactctctcatgcaaatgataatttggaacttattggaatctctattttgc

SEQ ID NO: 8536 - protein, 135 aa, Arabidopsis thaliana
MYTASLYAAFASLIHNKHNDLAGKRVVMFSYGSGSTATMFSLRLNDNKPPFSISNIASVMDVGGKLKARHEYAPEKFVETMKLMEHRYGAKDFVTTKEGIIDLLAPGTYYLKEVDSLYRRFYGKKGEDGSVANGH

SEQ ID NO: 8537 - protein, 115 aa, Arabidopsis thaliana
MNIYFPPTCVQQEALEAHDGASKGKYTIGLGQDCLAFCTELEDVISMSFNAVTSLFEKYKIDPNQIGRLEVGSETVIDKSKSIKTFLMQLFEKCGNTDVEGVDSTNACYGGTAAC

SEQ ID NO: 8538 - protein, 108 aa, Arabidopsis thaliana
MFSYGSGSTATMFSLRLNDNKPPFSISNIASVMDVGGKLKARHEYAPEKFVETMKLMEHRYGAKDFVTTKEGIIDLLAPGTYYLKEVDSLYRRFYGKKGEDGSVANGH

SEQ ID NO: 8539 - DNA, 1234 bp, Arabidopsis thaliana
tcttcaatctcccacgtctgagattgaaaagtttgggagaagataaacaaactcaaaatacctcagctttagatcaaaatctaaaaacaagagtttcgtgcagtggtttcttagagatctagtagattagagaatttggatttgttgaagaaaagtggatttggtacgattctataggtttccttcttctctgaagctactatagagagaatctgcgagctcaatttcgtagtaaattagggttcgtgtttcttggtaaagatagaatcaatggcggaggttgttctgcacatatacgatgtgacgaacagtggatcagagaagactaacaacaccatagttcagatcaataggttcttcaaagacgggatcggtcttggcggtatattccacagcgctattcaggtatatggaaacgatgaatggtcttatgggtattgtgaacaaggaactggtgtgttcagctgtcctagtggcaagaatccaatgtacacatatcgtgagaaaattgttcttgggaagacagattgtacaatcttcatggtaaatcagatcttgcgtgagctcagcagggaatggccaggacacacttatgatttgctgtccaaaaattgcaatcacttctgcgatgtattatgtgaccgccttggtgtgccaaagatcccaggttgggtgaatcgttttgctcatgctggcgacacagccttggaagtagcaggaaacacagcaatgcgggtaaagcaagccaaaactgaacttgtttcagccagtaaagtggcttatcgcttcctttcgaatgttacctcaaacataaccaatggttcaaatggctccagtggctctccacagcggccaggaactctcaacaattcagacaatgggagctttagattgcaaggtagttggttgaaaggtatacttaacactgccaaaccctccacaagtacagagatagggaacaaagaggaagatacaaatcatacaatcaccaatcagaaaaagcagaaccgtgactctgatgttctactatttcagtagcaactgtactgatccaccccaatgtattcacttactgtatatccacctatccaaaatttattcgtttgtatccattactttgtatcacgattcgaacacacctctctttttttttccccttttcacagcagaacgtgtgattttgttaagaagatattttcaacacgttactggcaaagaccaagcaagtcttagc

SEQ ID NO: 8540 - protein, 255 aa, Arabidopsis thaliana
MAEVVLHIYDVTNSGSEKTNNTIVQINRFFKDGIGLGGIFHSAIQVYGNDEWSYGYCEQGTGVFSCPSGKNPMYTYREKIVLGKTDCTIFMVNQILRELSREWPGHTYDLLSKNCNHFCDVLCDRLGVPKIPGWVNRFAHAGDTALEVAGNTAMRVKQAKTELVSASKVAYRFLSNVTSNITNGSNGSSGSPQRPGTLNNSDNGSFRLQGSWLKGILNTAKPSTSTEIGNKEEDTNHTITNQKKQNRDSDVLLFQ

SEQ ID NO: 8541 - protein, 183 aa, Arabidopsis thaliana
MYTYREKIVLGKTDCTIFMVNQILRELSREWPGHTYDLLSKNCNHFCDVLCDRLGVPKIPGWVNRFAHAGDTALEVAGNTAMRVKQAKTELVSASKVAYRFLSNVTSNITNGSNGSSGSPQRPGTLNNSDNGSFRLQGSWLKGILNTAKPSTSTEIGNKEEDTNHTITNQKKQNRDSDVLLFQ

SEQ ID NO: 8542 - protein, 165 aa, Arabidopsis thaliana
MVNQILRELSREWPGHTYDLLSKNCNHFCDVLCDRLGVPKIPGWVNRFAHAGDTALEVAGNTAMRVKQAKTELVSASKVAYRFLSNVTSNITNGSNGSSGSPQRPGTLNNSDNGSFRLQGSWLKGILNTAKPSTSTEIGNKEEDTNHTITNQKKQNRDSDVLLFQ

SEQ ID NO: 8543 - DNA, 840 bp, Arabidopsis thaliana
acattcaagaacactataaacgacaactaaaaatataatttacaaaagaagaacaaaaaaatgtcgaaaacattcaaagccataagagaccggacatattcaggcgtaggagacctcatcaagctcctcccgaccggaaccgtcttcttgttccaatttttaaaccctgtcctaaccaaaatggacattgcctcctcatcaacaaatacttaaccggagttctcatcgttatttgtgccttctcttgttgcttcacttgcttcaccgatagttaccgaacaagagacggttacgttcattatggagttgccaccgtgaagggtctttggccagattcaccttcagtggatttgtcttcgaaaaggcttagagttggagatttcgttcacgctttcttctctcttatcgtgttcagtgttatttccttgttggatgcaaacaccgtgaattgtttctatcctggctttggctccgctgggaagatctttctcatggttttgcctccggtgatcggagttatctccggtgctgttttcacggtgttccctagtagacgtcacggaattgggaatccctcggaccacagtgaggatgatgcttccgagatgaaatgatagtatatgattttatactatttatatgcataaaacattaaaatgtaatggcatgtgtttattcgtggaatggtaaatacgaaagttgtataattgtgatctttttttgtgtgtgatttttatttatgtatttgagtgctgatcatatgttgtgtgtttgttttttggtattttttccatatgtttgttgataaactcaaaaataataacatatctctttttatgc

SEQ ID NO: 8544 - protein, 50 aa, Arabidopsis thaliana
MSKTFKAIRDRTYSGVGDLIKLLPTGTVFLFQFLNPVLTKMDIASSSTNT

SEQ ID NO: 8545 - protein, 40 aa, Arabidopsis thaliana
MVLPPVIGVISGAVFTVFPSRRHGIGNPSDHSEDDASEMK

SEQ ID NO: 8546 - DNA, 865 bp, Arabidopsis thaliana
aattccaaaaacactccccaaatataatttcccgagaaaatcctcagccgctcgagctcagagtcgaaaatggtgtcaggatcagggatattctcgaagcgcgttgtcgtcgacgcgcgccaccacatgcttggccgtcttgcgtcgatcaccgccaaagagcttctcaatggccagaaagttgtcattgtccggtgcgaagagatttgcctctccggtggactcgttcgtcagaaaatgaagtacatgaggtttcttcgcaaacgtatgaacactaaaccttctcatggtcctattcacttccgtgctccttccaaaatcttctggcgtaccgttcgcggtatgattccacacaagacgaagcgtggagctgctgcactagcacgtttgaaggtatatgaaggtgttcctactccatatgacaagatcaagaggatgggtcatccctgatgctctcaaggtgttgaggcttcaagctggtcacaaatactgtctgttgggccgtctttcttctgaagttgggtggaaccattacgacaccatcaaggagctggagacaaagaggaaggagagagcccacgtggtttacgagcgaaagaagcaacttaacaaacttagagttaaggccgagaaggtcgctgaagagaagctcggagcacagctcgatattcttgcgccagttaagtactgagcttgtcagtagtagttttttttttttggtaaggagcttgtcagtagtagtttgtctttgcatgttttgagccaacccaatacctttttactttttatcttttacttaggtcttgtatcgaaatttgtactcctaacattttattcttgagttttatttattatattgcgtggc

SEQ ID NO: 8547 - protein, 126 aa, Arabidopsis thaliana
MVSGSGIFSKRVVVDARHHMLGRLASITAKELLNGQKVVIVRCEEICLSGGLVRQKMKYMRFLRKRMNTKPSHGPIHFRAPSKIFWRTVRGMIPHKTKRGAAALARLKVYEGVPTPYDKIKRMGHP

SEQ ID NO: 8548 - protein, 107 aa, Arabidopsis thaliana
MLGRLASITAKELLNGQKVVIVRCEEICLSGGLVRQKMKYMRFLRKRMNTKPSHGPIHFRAPSKIFWRTVRGMIPHKTKRGAAALARLKVYEGVPTPYDKIKRMGHP

SEQ ID NO: 8549 - protein, 97 aa, Arabidopsis thaliana
MKVFLLHMTRSRGWVIPDALKVLRLQAGHKYCLLGRLSSEVGWNHYDTIKELETKRKERAHVVYERKKQLNKLRVKAEKVAEEKLGAQLDILAPVKY

SEQ ID NO: 8550 - DNA, 1685 bp, Arabidopsis thaliana
gttgtagagtcgagaaacgaaagataaacacgtgaaaaacaaaaatttcgtctctacacttccccccaccaacgacacgtatgcgtttctaagagagtttaaaaatctaaaattagacccgagtctaaagatttattttgtttttgattttattttttggacactttggcatttagactcctctttgcatcccccgttggaggtggtcttaggtgttagtgtctcttgtttctggaatggctcagtgtgtgaggtcaactctaaatcctgtgagaacaccccagagctttactaggaaagcgtatgtgaaaagcccagcttttgcatcagtctcgttccttcgagcagtaccggagttcaacaaatacccaaaaccttgttcattggttatgtcttgccagggcaaggctcaaaaccagcaggaggagcgaccacaactgtctcttgacgatttagtcacgagtaaccggaaaggggaggttcttggcacaatcaaagactcgctttctaattgtctctctgagactaatcttcttgccactgttcctggtctgaaatctagaatcaagggaaaggtcagagatatttatgatgctgtgattatctggttcttattacaactgatcggttgagtgcattcgacagaaaccttgcttcaattcccttcaaaggccaggttcttaatgagacaagtttgtggtggttcaataacacacagcacataactccaaatgcaatcgtttcatctcctgatagaaatgttgttatcgcaaagaaatgctcggtttttcccatagagtttgtggttagaggatatgtgactggaagtactgacacatctttatggacggtgtacaataaaggtgttcggaactactgtgggaatgagctctcagatggattagttaaaaaccataagcttccagctaatatacttacaccaacaactaaggctgcggatcatgatgtgcccatctctccaaatgagatagttgaaggtggattcatgactcaagctgaatttgatgaagcaagtatgaaagctttgagcttgtttgagtttgggcagggggtggccaagaaacatggactgatattggtggacacaaagtatgagtttggaagaagtagtgatggctcaatcttattgattgatgagattcatacacccgattccagcagatactggcttgcgggttcatatgaagagcgcttccaaaaaggcctggagcctgaaaatgttgataaggagttcctaagattgtggttcaaagagaactgcaatccgtatgaggacgaggtccttcctgctgctccagcagaactcgtgactgaattagcttggcggtacattttcttgtatgaaactatcactggatcaagaattgacattattccgactcaggaaccaatacatgaccgaatctcaaggaacacaagccaagcactttcatctctccgtcaactttgatctttaatgtaacctttagccaaggatgcagagagcataagtctgtttctttttgcattcatatgtgttctattgttgtcttcatggattatgaatcaaagacaacttaagttctaattgagcaacaaacgaataaacatgaaaaaaactaattgacacaggcttggtgaattagaatatatagttgatcagatgagaaaggatcagttttgtt

SEQ ID NO: 8551 - protein, 154 aa, Arabidopsis thaliana
MTQAEFDEASMKALSLFEFGQGVAKKHGLILVDTKYEFGRSSDGSILLIDEIHTPDSSRYWLAGSYEERFQKGLEPENVDKEFLRLWFKENCNPYEDEVLPAAPAELVTELAWRYIFLYETITGSRIDIIPTQEPIHDRISRNTSQALSSLRQL

SEQ ID NO: 8552 - protein, 144 aa, Arabidopsis thaliana
MKALSLFEFGQGVAKKHGLILVDTKYEFGRSSDGSILLIDEIHTPDSSRYWLAGSYEERFQKGLEPENVDKEFLRLWFKENCNPYEDEVLPAAPAELVTELAWRYIFLYETITGSRIDIIPTQEPIHDRISRNTSQALSSLRQL

SEQ ID NO: 8553 - protein, 131 aa, Arabidopsis thaliana
MAQCVRSTLNPVRTPQSFTRKAYVKSPAFASVSFLRAVPEFNKYPKPCSLVMSCQGKAQNQQEERPQLSLDDLVTSNRKGEVLGTIKDSLSNCLSETNLLATVPGLKSRIKGKVRDIYDAVIIWFLLQLIG

SEQ ID NO: 8554 - DNA, 1973 bp, Arabidopsis thaliana
aaaaaaagaaaaaagtttcactctttggaggttggaacttaattccttgattaagaaaccccagaaaaaccctaaacccttgaagcgtctccttctctagttctttgcaagcggaaatgtatcgagtgctatcaaagttatcttcttcaattggctcgtctacttccaggaaactggtttctgggcggattataagtagcagaaactatgcggccaaggatatcagtttcgggatcggagctcgggcagctatggtgcagggtgtatccgaggttgcagaagctgtgaaagtcactatgggaccaaagggaagaaatgtgataattgagagcagttatggtggaccaaagatcacaaaggatggtgtcaccgtggcaaaaagcatatcatttcaagctaaagctaagaacattggtgccgaactcgtcaaacaggttgcaagtgccactaacaaggttgctggagatggtaccacttgtgccactgttttgactcaggcgatactcatcgaaggctgcaagtcggtggctgcaggtgtaaatgtgatggatttgcgtgttggaattaatatggcaattgctgcagttgtctctgatttgaaaagcagagctgttatgattagcaccccagaagagatcacacaggttgccactatatctgcaaatggggagcgtgaaataggggaactaattgcaagagccatggagaaagttggaaaggaaggggttatcactgttgctgatggtaacactttagataacgagctggaagtagtggaaggaatgaagctagccagaggttacatttctccttattttatcacggatgagaagacccagaaatgcgagcttgaaaatcccatcatcctcattcatgagaagaagatttcagacattaactctttgttgaaagttttagaagcggctgtgaaaagtagtagaccacttcttattgtagcagaagatgttgagagtgatgcattagctatgcttattctcaataagcatcatggtgggcttaaggtatgtgctatcaaggctccggggtttggtgacaacaggaaagcaagcttggatgatcttgcagttcttactggtgcagaggttatctctgaggagcgtgggctatctctagaaaaaattcgccctgaattgcttggaactgcgaagaaggttaccgttacccgtgatgacactattatcctacatggtggtggtgataaaaagctaattgaagaaagatgtgaagagttaagatcagccaatgaaaagagtacatccacttttgataaagagaaaacgcaagaaagactctcaaagctatcaggtggtgttgcagtcttcaaggtgggaggggcaagtgaatctgaagttggagagagaaaagacagagtcactgatgctttaaacgccacaagagcagctgtagaagaaggcatcataccgggtggtggtgtggctctattatatgcgacaaaggctttagacaaccttcaaactgaaaacgaggatcaaagaagaggtgttcagattgttcagaatgctctcaaggctcctgcatttacaatagctgcaaatgccggttacgatggttctttagtggttggcaagttattagagcaagacgattgcaattttggtttcgatgcagccaaaggtaaatatgtggatatggtgaaagctggaatcatagacccagtcaaggtgatcagaaccgccttaacatgctgctagcgtttctttgcttttgacaacaacagaggcctcagtgcttgtgaaggcagacgagaacactccaaaccatgtccctgatatggccagcatgggcatgtgatcttgtaacctctacaaaaaaagaaacattcaaatttttatttttctctactaaagttagaaacttttctcgattttaatttggttgtctggttctatatatattgttacagtgaatttttaatgaattttgttgaatcc

SEQ ID NO: 8555 - protein, 538 aa, Arabidopsis thaliana
MYRVLSKLSSSIGSSTSRKLVSGRIISSRNYAAKDISFGIGARAAMVQGVSEVAEAVKVTMGPKGRNVIIESSYGGPKITKDGVTVAKSISFQAKAKNIGAELVKQVASATNKVAGDGTTCATVLTQAILIEGCKSVAAGVNVMDLRVGINMAIAAVVSDLKSRAVMISTPEEITQVATISANGEREIGELIARAMEKVGKEGVITVADGNTLDNELEVVEGMKLARGYISPYFITDEKTQKCELENPIILIHEKKISDINSLLKVLEAAVKSSRPLLIVAEDVESDALAMLILNKHHGGLKVCAIKAPGFGDNRKASLDDLAVLTGAEVISEERGLSLEKIRPELLGTAKKVTVTRDDTIILHGGGDKKLIEERCEELRSANEKSTSTFDKEKTQERLSKLSGGVAVFKVGGASESEVGERKDRVTDALNATRAAVEEGIIPGGGVALLYATKALDNLQTENEDQRRGVQIVQNALKAPAFTIAANAGYDGSLVVGKLLEQDDCNFGFDAAKGKYVDMVKAGIIDPVKVIRTALTCC

SEQ ID NO: 8556 - protein, 493 aa, Arabidopsis thaliana
MVQGVSEVAEAVKVTMGPKGRNVIIESSYGGPKITKDGVTVAKSISFQAKAKNIGAELVKQVASATNKVAGDGTTCATVLTQAILIEGCKSVAAGVNVMDLRVGINMAIAAVVSDLKSRAVMISTPEEITQVATISANGEREIGELIARAMEKVGKEGVITVADGNTLDNELEVVEGMKLARGYISPYFITDEKTQKCELENPIILIHEKKISDINSLLKVLEAAVKSSRPLLIVAEDVESDALAMLILNKHHGGLKVCAIKAPGFGDNRKASLDDLAVLTGAEVISEERGLSLEKIRPELLGTAKKVTVTRDDTIILHGGGDKKLIEERCEELRSANEKSTSTFDKEKTQERLSKLSGGVAVFKVGGASESEVGERKDRVTDALNATRAAVEEGIIPGGGVALLYATKALDNLQTENEDQRRGVQIVQNALKAPAFTIAANAGYDGSLVVGKLLEQDDCNFGFDAAKGKYVDMVKAGIIDPVKVIRTALTCC

SEQ ID NO: 8557 - protein, 478 aa, Arabidopsis thaliana
MGPKGRNVIIESSYGGPKITKDGVTVAKSISFQAKAKNIGAELVKQVASATNKVAGDGTTCATVLTQAILIEGCKSVAAGVNVMDLRVGINMAIAAVVSDLKSRAVMISTPEEITQVATISANGEREIGELIARAMEKVGKEGVITVADGNTLDNELEVVEGMKLARGYISPYFITDEKTQKCELENPIILIHEKKISDINSLLKVLEAAVKSSRPLLIVAEDVESDALAMLILNKHHGGLKVCAIKAPGFGDNRKASLDDLAVLTGAEVISEERGLSLEKIRPELLGTAKKVTVTRDDTIILHGGGDKKLIEERCEELRSANEKSTSTFDKEKTQERLSKLSGGVAVFKVGGASESEVGERKDRVTDALNATRAAVEEGIIPGGGVALLYATKALDNLQTENEDQRRGVQIVQNALKAPAFTIAANAGYDGSLVVGKLLEQDDCNFGFDAAKGKYVDMVKAGIIDPVKVIRTALTCC

SEQ ID NO: 8558 - DNA, 1650 bp, Arabidopsis thaliana
aaccctactgctactcatgacacgtcatctctcctcgtaatcggagattttctctccttctcttttcagccgccaatcgccgccgcaatcttcttcatcggcctccgttctacatcgacggtgtttgccgtaacttctgtcaaactctcagaatttgcttaagtataccacctaactcgagacgctatgaccgttttctcagttcagtccactatcttcagtcgagcctccgtagctcttctctcgagcaatggcttcaaacgattttcattcgtttcttcgttttcttcctccgccgcttactctccacctaaaatgaggaagcgtcgctacccaatcgtctctgctgttgatattggtggcgtcgcaatagctagaaatgatgtggtgagagaggatgatccaacaaataatgtaccagattcgattttctctaaactaggaatgcagctacacagaagagataagcatccgattggtatcttaaaaaacgctatctacgattactttgattccaattactcaaacaagtttgagaagttcgaagacctttccccaattgttaccacaaagcaaaactttgatgatgtgctagtccctgctgatcatgtaagcagaagtcttaatgacacgtactatgtagactcacaaactgttttgagatgtcatacgagtgctcaccaagctgagctgttgaggaaaggtcatagtcgtttccttgtaaccggggatgtttaccgaagagattctattgactctactcattatccggttttccatcagatggaaggtttttgtgttttctctcctgaggactggaacgggtctggcaaggattccactttgtatgctgctgaggatttgaagaaatgtcttgagggattggcacgccacttatttggttcggtggagatgagatgggttgatacatatttcccatttaccaatccatcttttgagcttgagatatattttaaggaagactggttggaggttttgggctgtggggtgaccgagcaagtaattctgaaacaaagtggattagaaaataatgttgcttgggccttcggacttggacttgagagacttgctatggttttgtttgacatacctgatatacgatttttctggtcatccgatgaacgattcacgtcccagtttggaaaaggagaacttggagtgaaattcaagccatattcaaagtatcctccttgttacaaggacatcagtttctggataagtgatttgttcacagagaataatttttgtgaagttgttagaggaattgctggggatcttgttgaagaggtgaagttaattgaccaattcaccaataagaagaaagggctgacgagtcattgttacagaatcgtgttccgttccatggagcggtctcttacggacgaggaggtcaatgatctgcagagtaaagtgcgtgatgaggtgcagaagaagctaaatgtcgaattaaggtgagaattttgaaaagagtagcgttgttgcagacagtgatgaatattgaaggtttggcattgttattcctacataaactttatttacttctggcagaattgcattaccctcaaaaaaatatatgtacattggtttcgttattctaaaggaatgaaaaataaggtgtccgttttatgc

SEQ ID NO: 8559 - protein, 429 aa, Arabidopsis thaliana
MTVFSVQSTIFSRASVALLSSNGFKRFSFVSSFSSSAAYSPPKMRKRRYPIVSAVDIGGVAIARNDVVREDDPTNNVPDSIFSKLGMQLHRRDKHPIGILKNAIYDYFDSNYSNKFEKFEDLSPIVTTKQNFDDVLVPADHVSRSLNDTYYVDSQTVLRCHTSAHQAELLRKGHSRFLVTGDVYRRDSIDSTHYPVFHQMEGFCVFSPEDWNGSGKDSTLYAAEDLKKCLEGLARHLFGSVEMRWVDTYFPFTNPSFELEIYFKEDWLEVLGCGVTEQVILKQSGLENNVAWAFGLGLERLAMVLFDIPDIRFFWSSDERFTSQFGKGELGVKFKPYSKYPPCYKDISFWISDLFTENNFCEVVRGIAGDLVEEVKLIDQFTNKKKGLTSHCYRIVFRSMERSLTDEEVNDLQSKVRDEVQKKLNVELR

SEQ ID NO: 8560 - protein, 386 aa, Arabidopsis thaliana
MRKRRYPIVSAVDIGGVAIARNDVVREDDPTNNVPDSIFSKLGMQLHRRDKHPIGILKNAIYDYFDSNYSNKFEKFEDLSPIVTTKQNFDDVLVPADHVSRSLNDTYYVDSQTVLRCHTSAHQAELLRKGHSRFLVTGDVYRRDSIDSTHYPVFHQMEGFCVFSPEDWNGSGKDSTLYAAEDLKKCLEGLARHLFGSVEMRWVDTYFPFTNPSFELEIYFKEDWLEVLGCGVTEQVILKQSGLENNVAWAFGLGLERLAMVLFDIPDIRFFWSSDERFTSQFGKGELGVKFKPYSKYPPCYKDISFWISDLFTENNFCEVVRGIAGDLVEEVKLIDQFTNKKKGLTSHCYRIVFRSMERSLTDEEVNDLQSKVRDEVQKKLNVELR

SEQ ID NO: 8561 - protein, 343 aa, Arabidopsis thaliana
MQLHRRDKHPIGILKNAIYDYFDSNYSNKFEKFEDLSPIVTTKQNFDDVLVPADHVSRSLNDTYYVDSQTVLRCHTSAHQAELLRKGHSRFLVTGDVYRRDSIDSTHYPVFHQMEGFCVFSPEDWNGSGKDSTLYAAEDLKKCLEGLARHLFGSVEMRWVDTYFPFTNPSFELEIYFKEDWLEVLGCGVTEQVILKQSGLENNVAWAFGLGLERLAMVLFDIPDIRFFWSSDERFTSQFGKGELGVKFKPYSKYPPCYKDISFWISDLFTENNFCEVVRGIAGDLVEEVKLIDQFTNKKKGLTSHCYRIVFRSMERSLTDEEVNDLQSKVRDEVQKKLNVELR

SEQ ID NO: 8562 - DNA, 799 bp, Arabidopsis thaliana
gatcttttcgaagagcggaagctaaggagaggcgaattcgaatcgagaagatggtgtctggctcagggatatgttcaaagcgtgtcgttgttgacgcacgtcaccatatgtgtggtcgtcttgcttcgatcatagctaaagagttgctcaatggatagagtgttgtccgatgtgaggagatttgtttgtctggtggtttggttcgtcagaagatgaagtacatgaggtttcttaggaaacgcatgaacactaaaccttctcatggtcctattcatttccgtgctccgtctaagatcttctggcgtaccgttcgtgggatgattccacacaagaccaagcgtggtgctgctgctcttgcacgtttgaaggtgtttgagggagtaccacctccttatgacaaggtcaagagaatggtcattcctgatgctctcaaggtgttgaggcttcaggctggtcacaagtactgcttgttgggacgtttgtcttctgaagttgtctggaaccattacgataccatcaaggagcttgaggtgaagagaaaggagaggtcacaagctttgtatgagcgtaagaagcaactcaccaagctcagggcaaaggccgagaaggttgcagaggagaaacttggatcccagctcgatgttcttgcatcgatcaagtactgaagaaaatcagcatctatcttttggtttaactcttgttttggtttttatctattcagattttgttttcttccttgtatcactgttgaagtttatcacctcatttcagttttatttatcagttgatacttcaatcc

SEQ ID NO: 8563 - protein, 150 aa, Arabidopsis thaliana
MKYMRFLRKRMNTKPSHGPIHFRAPSKIFWRTVRGMIPHKTKRGAAALARLKVFEGVPPPYDKVKRMVIPDALKVLRLQAGHKYCLLGRLSSEVVWNHYDTIKELEVKRKERSQALYERKKQLTKLRAKAEKVAEEKLGSQLDVLASIKY

SEQ ID NO: 8564 - protein, 147 aa, Arabidopsis thaliana
MRFLRKRMNTKPSHGPIHFRAPSKIFWRTVRGMIPHKTKRGAAALARLKVFEGVPPPYDKVKRMVIPDALKVLRLQAGHKYCLLGRLSSEVVWNHYDTIKELEVKRKERSQALYERKKQLTKLRAKAEKVAEEKLGSQLDVLASIKY

SEQ ID NO: 8565 - protein, 140 aa, Arabidopsis thaliana
MNTKPSHGPIHFRAPSKIFWRTVRGMIPHKTKRGAAALARLKVFEGVPPPYDKVKRMVIPDALKVLRLQAGHKYCLLGRLSSEVVWNHYDTIKELEVKRKERSQALYERKKQLTKLRAKAEKVAEEKLGSQLDVLASIKY

SEQ ID NO: 8566 - DNA, 1435 bp, Arabidopsis thaliana
atccaccattcaaagctctttctctctgcaaatcttccatcatttccatagctttcttcttcttgtcatttcctttaaatctttttggttggatattttgtattttaacacttcataaagtagtcatcactaaacaacatatatacacatacaaagagatggatgctgaaaagaagagtgcccattttcgccaaatctcatcttataaaccacaattacttgtcctctcctcaatccacgaaaacccttcttcaaaaatctcagaaaaagccaatatcaaagctgacaatgacgccgagattggagttttcggagcagaaaagtacttcagcatgaagctagatcatgttgattccacggcggatatcaccaagcaacatgaaaaggaaaacacacatgatcatcctaatgctaatcctaatcctaatcctaatcctcatcctcatcctcatccccagttgacgaaaacgacgtcgtcaagatcaaaaacaagccgacatggaacgccaagtgtaagatccgagtcaagttgcaacagtcaaacctttctcatgaggattaacaaccacaatgaaaataagcaacggaaaatgaacgatacgagcatctcttttggtgggtttagatgttacggtccctgctctggggtcaaaaccgtccataccgacccaaaaaactcctgtaaaagtagaaattccgatcgggattttgttgcttacgacgcaagaaagcacaacgacaaaccaagactccattttgaagccaagaaagcggattttcatgcgcaagagaagatttcattacctattcaaaggtccgatatcgccatgaacctcgagagaaagctctctctgcttacatgggacgcaataccaaaccaactctctaccaagaacaacaatcacaacaataatggtaataactcttcaatgagtagcaacacgcaagaggaagagacagcaagtgtagcaagttctgatttgttcgagattgagaacataacgagcagtgtctatgagccgagtgaggccagcattggatggagtgtggtaacgggaagtatggcagatcaatcggtgatttcggatttcgatatgatgaagagggtcacgagaaatggtccggtggttaaaaccaaaccggtgattggtgagaaagtccggtcggctgggtttttgtcgggttgtaagagtcacaaagctgtctcggttgttgatagttctagaaaagtgaaagaaacagccaaggttgatcatcacgagatgtctcatcagaagaagtttaaaactgagattaggattcaagacttgagctttctttaataaacaatgtttgtgtatgtgtgtgttcttaattagttttcatcaaatatttttgtaatatttcttcgtgagtatgctaatgattttgataattttagtcacttggtttatat

SEQ ID NO: 8567 - protein, 439 aa, Arabidopsis thaliana
PPFKALSLCKSSIISIAFFFLSFPLNLFGWIFCILTLHKVVITKQHIYTYKEMDAEKKSAHFRQISSYKPQLLVLSSIHENPSSKISEKANIKADNDAEIGVFGAEKYFSMKLDHVDSTADITKQHEKENTHDHPNANPNPNPNPHPHPHPQLTKTTSSRSKTSRHGTPSVRSESSCNSQTFLMRINNHNENKQRKMNDTSISFGGFRCYGPCSGVKTVHTDPKNSCKSRNSDRDFVAYDARKHNDKPRLHFEAKKADFHAQEKISLPIQRSDIAMNLERKLSLLTWDAIPNQLSTKNNNHNNNGNNSSMSSNTQEEETASVASSDLFEIENITSSVYEPSEASIGWSVVTGSMADQSVISDFDMMKRVTRNGPVVKTKPVIGEKVRSAGFLSGCKSHKAVSVVDSSRKVKETAKVDHHEMSHQKKFKTEIRIQDLSFL

SEQ ID NO: 8568 - protein, 387 aa, Arabidopsis thaliana
MDAEKKSAHFRQISSYKPQLLVLSSIHENPSSKISEKANIKADNDAEIGVFGAEKYFSMKLDHVDSTADITKQHEKENTHDHPNANPNPNPNPHPHPHPQLTKTTSSRSKTSRHGTPSVRSESSCNSQTFLMRINNHNENKQRKMNDTSISFGGFRCYGPCSGVKTVHTDPKNSCKSRNSDRDFVAYDARKHNDKPRLHFEAKKADFHAQEKISLPIQRSDIAMNLERKLSLLTWDAIPNQLSTKNNNHNNNGNNSSMSSNTQEEETASVASSDLFEIENITSSVYEPSEASIGWSVVTGSMADQSVISDFDMMKRVTRNGPVVKTKPVIGEKVRSAGFLSGCKSHKAVSVVDSSRKVKETAKVDHHEMSHQKKFKTEIRIQDLSFL

SEQ ID NO: 8569 - protein, 329 aa, Arabidopsis thaliana
MKLDHVDSTADITKQHEKENTHDHPNANPNPNPNPHPHPHPQLTKTTSSRSKTSRHGTPSVRSESSCNSQTFLMRINNHNENKQRKMNDTSISFGGFRCYGPCSGVKTVHTDPKNSCKSRNSDRDFVAYDARKHNDKPRLHFEAKKADFHAQEKISLPIQRSDIAMNLERKLSLLTWDAIPNQLSTKNNNHNNNGNNSSMSSNTQEEETASVASSDLFEIENITSSVYEPSEASIGWSVVTGSMADQSVISDFDMMKRVTRNGPVVKTKPVIGEKVRSAGFLSGCKSHKAVSVVDSSRKVKETAKVDHHEMSHQKKFKTEIRIQDLSFL

SEQ ID NO: 8570 - DNA, 1294 bp, Arabidopsis thaliana
aaaaagaaaatatatatggtttcacaaacaccattaccataactacaacgagaagaggatcttttttaaggagaaaagcagagagagaagagacgagtgtgtgaagtttttttgtcttttgtttcttttattacacacaaatagatgaaacgaggaaagctacttcttttgctacttccataaaaaggttcttcctttcgcagagaatcaactttgatcatcttcttccttctctttctttcttcttctccctccagtaatgcttatatagtctcctcctatatctctacctatacatacacaaaccctttatcctcgaaagcttcctcctggttaggtttttatcaaacccttttagccaatcgggaaattaactaaagaagaagatatggtgaggggcaaaactcagatgaagagaatagagaatgcaacaagcagacaagtgactttctccaaaagaaggaatggtttgttgaagaaagcctttgagctctcagtgctttgtgatgctgaagtttctcttatcatcttctctcctaaaggcaaactttatgaattcgccagctccaatatgcaagataccatagatcgttatctgaggcatactaaggatcgagtcagcaccaaaccggtttctgaagaaaatatgcagcatttgaaatatgaagcagcaaacatgatgaagaaaattgaacaactcgaagcttctaaacgtaaactcttgggagaaggcataggaacatgctcaatcgaggagctgcaacagattgagcaacagcttgagaaaagtgtcaaatgtattcgagcaagaaagactcaagtgtttaaggaacaaattgagcagctcaagcaaaaggagaaagctctagctgcagaaaacgagaagctctctgaaaagtggggatctcatgaaagcgaagtttggtcaaataagaatcaagaaagtactggaagaggtgatgaagagagtagcccaagttctgaagtagagacgcaattgttcattgggttaccttgttcttcaagaaagtgatctccactcaacaaaaaaaacaaaaaaacaaactaagtaaaaacaggtttagcagtactgagagtgtataaggacaagtaacaaaactctaaagctgcttctctcttgttgtcttatttctctctcactctctctctctcagtcacttctttaatgattctgaactgcttgtgttatgtatctatgttcttacacttgcctctctagaatgtaattttgattatgttttgttttcatgtatcaatttagctttcttccccc

SEQ ID NO: 8571 - protein, 214 aa, Arabidopsis thaliana
MVRGKTQMKRIENATSRQVTFSKRRNGLLKKAFELSVLCDAEVSLIIFSPKGKLYEFASSNMQDTIDRYLRHTKDRVSTKPVSEENMQHLKYEAANMMKKIEQLEASKRKLLGEGIGTCSIEELQQIEQQLEKSVKCIRARKTQVFKEQIEQLKQKEKALAAENEKLSEKWGSHESEVWSNKNQESTGRGDEESSPSSEVETQLFIGLPCSSRK

SEQ ID NO: 8572 - protein, 207 aa, Arabidopsis thaliana
MKRIENATSRQVTFSKRRNGLLKKAFELSVLCDAEVSLIIFSPKGKLYEFASSNMQDTIDRYLRHTKDRVSTKPVSEENMQHLKYEAANMMKKIEQLEASKRKLLGEGIGTCSIEELQQIEQQLEKSVKCIRARKTQVFKEQIEQLKQKEKALAAENEKLSEKWGSHESEVWSNKNQESTGRGDEESSPSSEVETQLFIGLPCSSRK

SEQ ID NO: 8573 - protein, 153 aa, Arabidopsis thaliana
MQDTIDRYLRHTKDRVSTKPVSEENMQHLKYEAANMMKKIEQLEASKRKLLGEGIGTCSIEELQQIEQQLEKSVKCIRARKTQVFKEQIEQLKQKEKALAAENEKLSEKWGSHESEVWSNKNQESTGRGDEESSPSSEVETQLFIGLPCSSRK

SEQ ID NO: 8574 - DNA, 2055 bp, Arabidopsis thaliana
gccaccaaagctccatttttatccccacacagaagaagcttggggaatgagaagataagagctctcaaaattccccgaatttcgaatatgattgtaacactaaaccctaagattctccatttctccaaaatccatcctttttctcgaccttcttcgtatctctgtagaactcgaaatgtgtctctgataaccaattgcaagcttcagaagcctcaagatggtaatcagagaagtagtagtaacagaaatctcacgaagaccatttcactttccgattcagcaccgccggttacggaggagaccggcgatggaattgttaagggaggtggtaatggtggaggaggaggaggagacggaagaggaggattagggtttttgaagattttaccaagaaaggttttgtcagttttgtcgaatttgccacttgctattacagaaatgttcaccattgctgctctcatggctcttgggactgtgattgaacaaggtgaaacccctgatttctatttccaaaagtatccagaggataatcctgtactagggttcttcacttggagatggatttccacacttggattggatcatatgtactctgctcctatttttcttgggatgttggttcttttagcagcttcacttatggcctgtacttatactactcagatacctttggttaaggttgcaagaagatggagttttatgaagtcagatgaggcaattaaaaagcaggagtttgcagatactcttcctagagcttccattcaagacttgggaatgattttgatgggtgatggatttgaggtgtttatgaagggtccttcattgtatgcttttaaaggtttggctggtcgatttgcacctattggagtacatatagcaatgcttctgattatggtgggtggaactcttagtgctaccgggagctttagaggctcggtcacagttcctcaaggactaaattttgtcatgggagatgtcttagcaccaattgggtttttctcaattccaacagatgcttttaataccgaagttcatgttaatcgattcaccatggattattatgacagtggagaagtctcacagtttcactctgatctttcactacgtgaccttaatgggaaagaggttttgagaaaaacaattagcgttaatgatcccttgagatatggtggggtcaccgtataccagacagattggagtttctcagccttgcaggtgacaaaggatggtgaaggaccattcaacttggctatggcaccaattaagatcaatggagacaagaaattatatgggaccttcttacctgttggtgatactaatgctcccaatgtcaaaggaatatctatgctagctcgggatctacaatccattgttgtgtacgatttggacggaaaattcgctggaataaggagaccaagctcgaagcttcccattgagatcaatggtatgaagattgttattgaagatgcaattggaagcactggccttgagttaaagactgacccaggagtaccagtggtctatgctggttttggtgctctaatgctcacaacctgtatcagttacttatctcattcacagatatgggcactacaaaacggaacagcattggtcgtagggggaaaaacaaacagagccaagaaccaattccctgatgacatgaatcgtttgctcgatcaagttccggagttaatcaagaagaatacttcagttgtctctgagcaatcttgattagctcttcgactctgatacatttcaaaccaatatagttgtacagaattatggaacaggtatagttttggagaacacatacacactctacatgttgctaatcatatgggaagagagagtcagagaggagctataaaaactgaaacttcaaattgatttgtatggaagttttgtttgaagagtcttagcttccttgtttgtcaagttatttgatctgtatctgtaacttcagtttcctatgtttttagtcgtagttcaaaatttagaagaaaaaataataataatttgctgacaaaattaataaaataatgccaaaccgacgac

SEQ ID NO: 8575 - protein, 576 aa, Arabidopsis thaliana
ATKAPFLSPHRRSLGNEKIRALKIPRISNMIVTLNPKILHFSKIHPFSRPSSYLCRTRNVSLITNCKLQKPQDGNQRSSSNRNLTKTISLSDSAPPVTEETGDGIVKGGGNGGGGGGDGRGGLGFLKILPRKVLSVLSNLPLAITEMFTIAALMALGTVIEQGETPDFYFQKYPEDNPVLGFFTWRWISTLGLDHMYSAPIFLGMLVLLAASLMACTYTTQIPLVKVARRWSFMKSDEAIKKQEFADTLPRASIQDLGMILMGDGFEVFMKGPSLYAFKGLAGRFAPIGVHIAMLLIMVGGTLSATGSFRGSVTVPQGLNFVMGDVLAPIGFFSIPTDAFNTEVHVNRFTMDYYDSGEVSQFHSDLSLRDLNGKEVLRKTISVNDPLRYGGVTVYQTDWSFSALQVTKDGEGPFNLAMAPIKINGDKKLYGTFLPVGDTNAPNVKGISMLARDLQSIVVYDLDGKFAGIRRPSSKLPIEINGMKIVIEDAIGSTGLELKTDPGVPVVYAGFGALMLTTCISYLSHSQIWALQNGTALVVGGKTNRAKNQFPDDMNRLLDQVPELIKKNTSVVSEQS

SEQ ID NO: 8576 - protein, 547 aa, Arabidopsis thaliana
MIVTLNPKILHFSKIHPFSRPSSYLCRTRNVSLITNCKLQKPQDGNQRSSSNRNLTKTISLSDSAPPVTEETGDGIVKGGGNGGGGGGDGRGGLGFLKILPRKVLSVLSNLPLAITEMFTIAALMALGTVIEQGETPDFYFQKYPEDNPVLGFFTWRWISTLGLDHMYSAPIFLGMLVLLAASLMACTYTTQIPLVKVARRWSFMKSDEAIKKQEFADTLPRASIQDLGMILMGDGFEVFMKGPSLYAFKGLAGRFAPIGVHIAMLLIMVGGTLSATGSFRGSVTVPQGLNFVMGDVLAPIGFFSIPTDAFNTEVHVNRFTMDYYDSGEVSQFHSDLSLRDLNGKEVLRKTISVNDPLRYGGVTVYQTDWSFSALQVTKDGEGPFNLAMAPIKINGDKKLYGTFLPVGDTNAPNVKGISMLARDLQSIVVYDLDGKFAGIRRPSSKLPIEINGMKIVIEDAIGSTGLELKTDPGVPVVYAGFGALMLTTCISYLSHSQIWALQNGTALVVGGKTNRAKNQFPDDMNRLLDQVPELIKKNTSVVSEQS

SEQ ID NO: 8577 - protein, 430 aa, Arabidopsis thaliana
MFTIAALMALGTVIEQGETPDFYFQKYPEDNPVLGFFTWRWISTLGLDHMYSAPIFLGMLVLLAASLMACTYTTQIPLVKVARRWSFMKSDEAIKKQEFADTLPRASIQDLGMILMGDGFEVFMKGPSLYAFKGLAGRFAPIGVHIAMLLIMVGGTLSATGSFRGSVTVPQGLNFVMGDVLAPIGFFSIPTDAFNTEVHVNRFTMDYYDSGEVSQFHSDLSLRDLNGKEVLRKTISVNDPLRYGGVTVYQTDWSFSALQVTKDGEGPFNLAMAPIKINGDKKLYGTFLPVGDTNAPNVKGISMLARDLQSIVVYDLDGKFAGIRRPSSKLPIEINGMKIVIEDAIGSTGLELKTDPGVPVVYAGFGALMLTTCISYLSHSQIWALQNGTALVVGGKTNRAKNQFPDDMNRLLDQVPELIKKNTSVVSEQS

SEQ ID NO: 8578 - DNA, 1953 bp, Arabidopsis thaliana
gttttttagcttacgtttttcttcttcttctccttatgagttcaatatctgcaaatccacaaatctggattcacacctgagacgtttgttaatcggtacatctctatatttttgcaatcggagatggagatcgaatccgtcgcagctggttcttgttccaaggagaatcaaatgatctacaaggaatggttcgaattctccgattcagacggcgatggccgtattactggtaacgatgcgatcaagttcttcactatgtcgaatttgcctcgtccggaattgaagcagatctgggctattgcagattcaaagagacaagggtatcttggtttcaaagagtttattgttgccatgcagcttgtttcgttggctcaaactggacatgaaatatcgcatgaagttcttattagcgatgttgatttcaaaaatatcaatcctcctaccatggaaggtctgggtgtattaatggcgaaaaagaagcattcatcaaagtcgagtgatcctaatatgaatggtagccctgccgcagacacctcacttacagctcactggttctcttcaaaatcttcaaaaaagatttctctgtcctccgtaacatctatagtggatggcctgaagaggttgtacattcagaagctgaagccacttgaagtagcatatcggtttaacgattttgtatcccctttgttgactaacagtgatttcgatgcaaaacctatggtaatgcttctgggtcaatactccacaggaaaaacaacattcattaagcatttgcttaaatctacttatccaggagctcatattggaccagagccgactactgacagatttgttgttgtcatgtctggacctgatgaaagaagcattccggggaacacagtagcagttcaagcagatatgccattcagtggtcttacaacttttgggactgcctttttgtcaaagtttgaatgctctcagatgcctcaccctctgctggagcatgtaacatttgtcgacacccctggagttttatcaggggaaaaacaaagaacacagcgagcatatgatttcactggtgttacatcatggtttgcctctaagtgtgatcttatcctcctcctatttgacccacacaagctggatgtaagtgatgagttcaagcgtgtaatttcatctttacgcggtcatgatgacaagatccgcgttgttctgaataaggctgaccaagtggacactcagcagctaatgagggtatatggagctctcatgtggtcacttgggaaagttctcaatactcctgaggtctctcgtgtctacattggttccttcagtgataaacccataaacgaagctgcaactggtccaattgggagagagttgtttgaaaaggagcaagatgaccttcttgctgatttgaaagacattcctaagaaagcttgtgatcgtcgaataaatgagtttgtgaaacgggcaagagcagcaaagatacatgcgtacatcatcagccatttgaagaaggagatgccagcgataatggggaaagccaaagctcaacagaaactgatagataacttggaagacgagtttggaaaggtacaaagagagcatcacttacctaaaggagatttcccaaatgtggatcatttcagggaggtgctaagtggttacaacatcgacaagtttgagaagctaaagccgaaaatgttgcagactgttgatgatatgttggggtatgacatcccagagctcttgaaaaatttcaaaaacccttatgattaatatttctatccctcttatcttctgcggttgctgtataatccaaaactatacattcacttttggcctagcccttgtgacttgtgagcgttaatgcatatttgtattcttacaagccttgtagacaatagagacaaacataaagagtgctgacttgataatttgcttatatcacaaaccaaaagtattattgtt

SEQ ID NO: 8579 - protein, 545 aa, Arabidopsis thaliana
MEIESVAAGSCSKENQMIYKEWFEFSDSDGDGRITGNDAIKFFTMSNLPRPELKQIWAIADSKRQGYLGFKEFIVAMQLVSLAQTGHEISHEVLISDVDFKNINPPTMEGLGVLMAKKKHSSKSSDPNMNGSPAADTSLTAHWFSSKSSKKISLSSVTSIVDGLKRLYIQKLKPLEVAYRFNDFVSPLLTNSDFDAKPMVMLLGQYSTGKTTFIKHLLKSTYPGAHIGPEPTTDRFVVVMSGPDERSIPGNTVAVQADMPFSGLTTFGTAFLSKFECSQMPHPLLEHVTFVDTPGVLSGEKQRTQRAYDFTGVTSWFASKCDLILLLFDPHKLDVSDEFKRVISSLRGHDDKIRVVLNKADQVDTQQLMRVYGALMWSLGKVLNTPEVSRVYIGSFSDKPINEAATGPIGRELFEKEQDDLLADLKDIPKKACDRRINEFVKRARAAKIHAYIISHLKKEMPAIMGKAKAQQKLIDNLEDEFGKVQREHHLPKGDFPNVDHFREVLSGYNIDKFEKLKPKMLQTVDDMLGYDIPELLKNFKNPYD

SEQ ID NO: 8580 - protein, 529 aa, Arabidopsis thaliana
MIYKEWFEFSDSDGDGRITGNDAIKFFTMSNLPRPELKQIWAIADSKRQGYLGFKEFIVAMQLVSLAQTGHEISHEVLISDVDFKNINPPTMEGLGVLMAKKKHSSKSSDPNMNGSPAADTSLTAHWFSSKSSKKISLSSVTSIVDGLKRLYIQKLKPLEVAYRFNDFVSPLLTNSDFDAKPMVMLLGQYSTGKTTFIKHLLKSTYPGAHIGPEPTTDRFVVVMSGPDERSIPGNTVAVQADMPFSGLTTFGTAFLSKFECSQMPHPLLEHVTFVDTPGVLSGEKQRTQRAYDFTGVTSWFASKCDLILLLFDPHKLDVSDEFKRVISSLRGHDDKIRVVLNKADQVDTQQLMRVYGALMWSLGKVLNTPEVSRVYIGSFSDKPINEAATGPIGRELFEKEQDDLLADLKDIPKKACDRRINEFVKRARAAKIHAYIISHLKKEMPAIMGKAKAQQKLIDNLEDEFGKVQREHHLPKGDFPNVDHFREVLSGYNIDKFEKLKPKMLQTVDDMLGYDIPELLKNFKNPYD

SEQ ID NO: 8581 - protein, 501 aa, Arabidopsis thaliana
MSNLPRPELKQIWAIADSKRQGYLGFKEFIVAMQLVSLAQTGHEISHEVLISDVDFKNINPPTMEGLGVLMAKKKHSSKSSDPNMNGSPAADTSLTAHWFSSKSSKKISLSSVTSIVDGLKRLYIQKLKPLEVAYRFNDFVSPLLTNSDFDAKPMVMLLGQYSTGKTTFIKHLLKSTYPGAHIGPEPTTDRFVVVMSGPDERSIPGNTVAVQADMPFSGLTTFGTAFLSKFECSQMPHPLLEHVTFVDTPGVLSGEKQRTQRAYDFTGVTSWFASKCDLILLLFDPHKLDVSDEFKRVISSLRGHDDKIRVVLNKADQVDTQQLMRVYGALMWSLGKVLNTPEVSRVYIGSFSDKPINEAATGPIGRELFEKEQDDLLADLKDIPKKACDRRINEFVKRARAAKIHAYIISHLKKEMPAIMGKAKAQQKLIDNLEDEFGKVQREHHLPKGDFPNVDHFREVLSGYNIDKFEKLKPKMLQTVDDMLGYDIPELLKNFKNPYD

SEQ ID NO: 8582 - DNA, 844 bp, Arabidopsis thaliana
ttccttgccaaccacccatataataatactccccaacaccaaaaacacaacacaaacttagaaaaatggaagaagaaaagagattggagctaaggctagctcctccttgtcaccaattcacttccaacaacaacatcaatggatctaaacaaaaaagctcgaccaaagaaacatcattcctttccaataacagggttgaggtagctccagtggtgggatggccgccggtgagatcatcccggagaaacctaacggcacaactaaaggaggagatgaagaagaaggagagtgatgaagagaaggaattgtacgttaagatcaacatggaaggagttccaataggaagaaaagtcaacctttcagcttataacaactaccaacagctttcacatgccgttgaccaactcttctctaagaaagattcgtgggatctaaacagacaatacactttggtctacgaagacactgaaggagataaagttctggtcggggatgttccttgggagatgtttgtatctactgtaaagaggttgcatgttttaaagacctcccacgccttctcactctcacctagaaaacatggcaaggaatagagagaggttggccaaaatcatcagttcgatggtttgtttttaatgtaatttttgtggaaactaatggggtttggctttgatttactggttttctttttcacttatgtactaggtttttgcttgctatgttatttcttgttttggttgtaaatatgctgttcgtttaagaaatcgggggttagtatgttatcgtgtgtataaaaatagtgtaagcacgtaagttgattacaatgcctgatatgattcatgcc

SEQ ID NO: 8583 - protein, 175 aa, Arabidopsis thaliana
MEEEKRLELRLAPPCHQFTSNNNINGSKQKSSTKETSFLSNNRVEVAPVVGWPPVRSSRRNLTAQLKEEMKKKESDEEKELYVKINMEGVPIGRKVNLSAYNNYQQLSHAVDQLFSKKDSWDLNRQYTLVYEDTEGDKVLVGDVPWEMFVSTVKRLHVLKTSHAFSLSPRKHGKE

SEQ ID NO: 8584 - protein, 106 aa, Arabidopsis thaliana
MKKKESDEEKELYVKINMEGVPIGRKVNLSAYNNYQQLSHAVDQLFSKKDSWDLNRQYTLVYEDTEGDKVLVGDVPWEMFVSTVKRLHVLKTSHAFSLSPRKHGKE

SEQ ID NO: 8585 - protein, 89 aa, Arabidopsis thaliana
MEGVPIGRKVNLSAYNNYQQLSHAVDQLFSKKDSWDLNRQYTLVYEDTEGDKVLVGDVPWEMFVSTVKRLHVLKTSHAFSLSPRKHGKE

SEQ ID NO: 8586 - DNA, 690 bp, Arabidopsis thaliana
ttggagaaaataaatatagaagaaagcctctctgctcgttttgcgtttccgagcaacaatgtcggtaactttgcacacgaacctgggtgacatcaagtgcgaaatcttctgtgacgaggttcccaagagtgctgagaactttttggcgttgtgtgctagtggctactacgatggtactatctttcatagaaatatcaaagggttcatgattcaaggaggagaccccaaggggaccggaaaaggaggaactagcatctggggcaagaaattcaatgatgagatccgagactcccttaagcacaatgcaagagggatgctgtcaatggcaaacagcggtccaaacaccaacggaagccagttcttcataacctatgcaaaacaaccacatctcaatggattatacaccatctttggcaaagtcattcatggcttcgaagtgcttgacattatggaaaagactcaaacaggaccaggagataggccgcttgctgagataaggctaaaccgtgtgacgatccacgccaatccacttgctggttaagtctaatgtggcagaaccgagccaagccaaaagtgttgttctctttatttgtttcgatagagctgacatgtacactcagaaactgaactaagaccactgtttcacccaattaaaaagtttgtactggaggatttaccaattactgtctt

SEQ ID NO: 8587 - protein, 160 aa, Arabidopsis thaliana
MSVTLHTNLGDIKCEIFCDEVPKSAENFLALCASGYYDGTIFHRNIKGFMIQGGDPKGTGKGGTSIWGKKFNDEIRDSLKHNARGMLSMANSGPNTNGSQFFITYAKQPHLNGLYTIFGKVIHGFEVLDIMEKTQTGPGDRPLAEIRLNRVTIHANPLAG

SEQ ID NO: 8588 - protein, 111 aa, Arabidopsis thaliana
MIQGGDPKGTGKGGTSIWGKKFNDEIRDSLKHNARGMLSMANSGPNTNGSQFFITYAKQPHLNGLYTIFGKVIHGFEVLDIMEKTQTGPGDRPLAEIRLNRVTIHANPLAG

SEQ ID NO: 8589 - DNA, 713 bp, Arabidopsis thaliana
ttacccctagacatcctaatcaaaaacttagggttcatagcagccagagagagagacaagtgagagggatctaccaaacgaagcaacaatggtgaagttcttgaagcagaacaaggccgtgatccttcttcaaggacgttacgccggaaagaaagccgtcatcatcaaatccttcgacgacggtaaccgtgatcgtccttacggacactgcctcgtcgccggactcaagaagtacccgagcaaagtcatccgcaaagactcagctaagaagacagctaagaaatctagggttaagtgtttcatcaagcttgttaattaccagcatctgatgcctactcgttacacactcgacgtggatctcaaggaagtggcgactcttgatgctcttcagagtaaggataagaaggttgctgctcttaaggaagctaaggctaagcttgaggagaggttcaaaaccggtaagaacagatggttctttaccaagctcaggttctgaagaaattttctatttcgtgaggaattcattttgagcgttttgttatcgtgttttttagtttctagggttcatttcccatggtgaaaaatgtggatcctgttttggattgtggaagatgttttgttgaagtttggattatggatttgatcttttattttgattctcaaaaaaaaaaaaaaaaaagcttatcgataccgtcgacctcgagggggggcct

SEQ ID NO: 8590 - protein, 135 aa, Arabidopsis thaliana
MVKFLKQNKAVILLQGRYAGKKAVIIKSFDDGNRDRPYGHCLVAGLKKYPSKVIRKDSAKKTAKKSRVKCFIKLVNYQHLMPTRYTLDVDLKEVATLDALQSKDKKVAALKEAKAKLEERFKTGKNRWFFTKLRF

SEQ ID NO: 8591 - DNA, 1460 bp, Arabidopsis thaliana
aaatcattgggctgggctaaagaagtgcactacgaggagtcgttcaaaagacacgacttgacccgaccgatccgacccggtaagaggttagcccaccacgcaacgtccgtcggggaagataccacgcgacggaaacgacgaacacgaacagcggaaatcgtcaattcaatctctcagatcagttttggaatcacatataacaatgtcggcggttctcacagccggcggaggcttaactgccggggatcgcagcattattacggcgattaacaccggcgcttcgagtctctcattcgtcggctcagccttcatcgttctctgctactgcctcttcaaagaacttcgaaaattctctttcaagctcgtcttctaccttgctctctctgatatgctttgcagtttcttcctaatcgttggggatccttcaaaggggttcatttgttacgcacaaggctacactactcatttcttctgcgttgcttcgttcttgtggacaactacaattgctttcactcttcatcgtactgttgtcaagcataaaactgatgtggaggatttggaagcaatgtttcatttgtatgtatgggggacttccttggttgtgactgtcatacgttcttttggtaacaaccactcacatttggggccatggtgctggacgcaaactggtcttaagggaaaggctgttcattttttaactttctacgctcctctttggggagccattctttacaatgggtttacttacttccaagtgatacggatgctaagaaatgctagacgtatggcagttggaatgtcagaccgagtcgatcaatttgataatagagcagagttaaaggtgttgaacagatggggatactatccactcattctaataggatcatgggcattcggcactattaaccgtatccatgatttcatcgagccagggcataagatcttctggctctcagttcttgacgttgggacagctgcactaatgggcttgttcaattcaatagcctatggtttcaacagctcagtgcgtcgagcaatccatgagagactggagctattcttgccagaacggctatatcgatggcttccaagcaatttcagaccaaaaaaccatctgattctacatcagcaacaacaacagcgaagcgaaatggtatcactcaagaccgaggaccagcaatgacactaactttcaactaatacattggaccgataacaagaaggcggcgatgataatagcgtttggatggagagattgatatggtgaaggggggtgcacaacaggttgtcaatgtatatgaaacattctttgggaacacgaacttaacaatttatttatttttgtatgaacttttttattgtgaggtcttctgatcttgatttgaaattaacgaacttggagttcttggacgacaatgttgaagagttttgttacgtaagtcatatgaaaatactatcac

SEQ ID NO: 8592 - protein, 326 aa, Arabidopsis thaliana
MSAVLTAGGGLTAGDRSIITAINTGASSLSFVGSAFIVLCYCLFKELRKFSFKLVFYLALSDMLCSFFLIVGDPSKGFICYAQGYTTHFFCVASFLWTTTIAFTLHRTVVKHKTDVEDLEAMFHLYVWGTSLVVTVIRSFGNNHSHLGPWCWTQTGLKGKAVHFLTFYAPLWGAILYNGFTYFQVIRMLRNARRMAVGMSDRVDQFDNRAELKVLNRWGYYPLILIGSWAFGTINRIHDFIEPGHKIFWLSVLDVGTAALMGLFNSIAYGFNSSVRRAIHERLELFLPERLYRWLPSNFRPKNHLILHQQQQQRSEMVSLKTEDQQ

SEQ ID NO: 8593 - protein, 264 aa, Arabidopsis thaliana
MLCSFFLIVGDPSKGFICYAQGYTTHFFCVASFLWTTTIAFTLHRTVVKHKTDVEDLEAMFHLYVWGTSLVVTVIRSFGNNHSHLGPWCWTQTGLKGKAVHFLTFYAPLWGAILYNGFTYFQVIRMLRNARRMAVGMSDRVDQFDNRAELKVLNRWGYYPLILIGSWAFGTINRIHDFIEPGHKIFWLSVLDVGTAALMGLFNSIAYGFNSSVRRAIHERLELFLPERLYRWLPSNFRPKNHLILHQQQQQRSEMVSLKTEDQQ

SEQ ID NO: 8594 - protein, 205 aa, Arabidopsis thaliana
MFHLYVWGTSLVVTVIRSFGNNHSHLGPWCWTQTGLKGKAVHFLTFYAPLWGAILYNGFTYFQVIRMLRNARRMAVGMSDRVDQFDNRAELKVLNRWGYYPLILIGSWAFGTINRIHDFIEPGHKIFWLSVLDVGTAALMGLFNSIAYGFNSSVRRAIHERLELFLPERLYRWLPSNFRPKNHLILHQQQQQRSEMVSLKTEDQQ

SEQ ID NO: 8595 - DNA, 2821 bp, Arabidopsis thaliana
aaaattcttcaattctcttctcgtttttttttttttatcaattccaatgatctgtcacgttttagtaattttcactattctcgtttccgccgtcgtcgacgcaacggcgtcgtatgagcccactgatgtctttctcatcaattgcggcgatacctccaacaacatggactacagtggccggaactggacgacggagaatccgaaatttatgtcatcgaatgcagttgacgacgcgtcgttcacttcatctgcgtcataccaagaatcagggattcctcaagtgccgtacttgaaagctaggattttccgatatgatttcacttacagttttccagtctctcccggctggaaattcctccggttatacttttatccgacccgttacggatccgatttcgacgccgttaaatccttcttctccgtcaacgtcaaccgtttcactctcttgcataacttcagtgtaaaagcttccataccggagtcaagttctctaatcaaagagtttatcgttccggttaaccaaactcttgatctcacgttcacgccctctccgaattcattagctttcgttaacggaatcgagattatctccatgcctgaccggttttactcaaagggaggatttgacgacgttgtaagaaacgttggtagggacgttgacttcgagatagacaactccacggctttcgagaccgtttatcgggtaaacgtaggtggaaaagtggtgggcgacgtcggagattcgggaatgttccggcgttggctttccgatgaaggtttcttactcggtattaattcgggagccattccgaatataacaggtgtaaagatcaactacacggataaaactcccgcgtacgttgcgccggaagatgtatacacgacgtgtcgcctgatggggaacaaagacagtcctgagctaaacctgaatttcaacctgacgtggctctttgaagtcgatgccgggtttgcctatatagtgaggcttcatttctgtgagacgcaaccggaagtcaacaaaacgggtgaccgcgtcttctccatcttcttcggatatcaactggccatgcgtgaaatggacgtgtttcggctgagtggtggttttcggctaccgatgtatctagatttcaaggtacttgtcgacgccgacggaactagccagagacctagtcttcgagttgacttgacaccttacaaagaggactatccaacctattacgacgctattttgagtggtgtagagattctcaagctgagtaattctgatggtaatcttgcggggcttaatccaattcctcaactaagtccaccaccacaatctataacgccactaaaaggaaaaggcaagtcatcacatgttttgccaataataattgcagtggttggttctgcagttgcgctagcgttttttgttcttgttgttgtcctcgttgttatgaagagaaagaagaagagcaacgagtctagtgtagataccacgaacaagccttctacgaactcgtcatggggtcctcttctgcacgggacaggctctacaaatacaaaatctgcctcatctcttccatcagatctctgccgtcgattctccatctacgaaatcaaatccgccacaaatgatttcgaggaaaaactaatcataggagtaggcgggtttggttctgtctacaaaggacgaatagacggtggagccacacttgttgcggttaaacggctggaaattacatcgaaccaaggtgctaaagagttcgatacagagctcgagatgctttcaaagcttcgacatgtacacctcgtctctctaatcggatattgcgatgacgacaacgagatggtacttgtctatgagtatttgccacatggtacacttaaagatcatcttttcaggagagacaaggcctctgatcctccattgtcatggaaacgaaggctagagatttgcattggagcagctcgtggattacagtatcttcatactggagccaagtacacgatcatacatagagacatcaaaaccacaaacatacttctcgatgagaacttcgtcgctaaagtatctgactttggtttatcaagagttggtcctactagtgcttctcaaacgcatgtctccaccgtcgttaaaggaacgtttggttacttggatcccgagtactatcgccgtcaaatcttgaccgaaaaatccgacgtgtactcttttggagttgttctgttggaggttttgtgctgtagaccgatcagaatgcaaagtgttccaccggaacaagcagatttgatccgatgggtgaagtcaaatttcaataaaagaaccgttgatcagatcattgactcagatttaaccgctgatatcacttcgacctcgatggagaagttttgtgagatagccattagatgtgttcaagaccgtggtatggaacggccaccgatgaacgacgttgtttgggcgcttgagtttgctcttcagcttcacgagactgctaagaagaagaatgacaacgtggagtctctggatctaatgccaagtggtgaagttggtacgaccacggacggagaagatgacttgtttagtaggactacaggacacgttgggaaatcgaccacgaccgatgactctgttctagttgttggtgatgagaggagtggttcgagttggggagtattttcggagatcaatgaacctaaagcacggtagatttgatggcttggtaaacaagtatcacattctggttagggttgatatatatttgtgtatgtataattgttgaataaacacattattgtatttaaattacattttgatgattatttagcagcttaaatttag

SEQ ID NO: 8596 - protein, 895 aa, Arabidopsis thaliana
KFFNSLLVFFFLSIPMICHVLVIFTILVSAVVDATASYEPTDVFLINCGDTSNNMDYSGRNWTTENPKFMSSNAVDDASFTSSASYQESGIPQVPYLKARIFRYDFTYSFPVSPGWKFLRLYFYPTRYGSDFDAVKSFFSVNVNRFTLLHNFSVKASIPESSSLIKEFIVPVNQTLDLTFTPSPNSLAFVNGIEIISMPDRFYSKGGFDDVVRNVGRDVDFEIDNSTAFETVYRVNVGGKVVGDVGDSGMFRRWLSDEGFLLGINSGAIPNITGVKINYTDKTPAYVAPEDVYTTCRLMGNKDSPELNLNFNLTWLFEVDAGFAYIVRLHFCETQPEVNKTGDRVFSIFFGYQLAMREMDVFRLSGGFRLPMYLDFKVLVDADGTSQRPSLRVDLTPYKEDYPTYYDAILSGVEILKLSNSDGNLAGLNPIPQLSPPPQSITPLKGKGKSSHVLPIIIAVVGSAVALAFFVLVVVLVVMKRKKKSNESSVDTTNKPSTNSSWGPLLHGTGSTNTKSASSLPSDLCRRFSIYEIKSATNDFEEKLIIGVGGFGSVYKGRIDGGATLVAVKRLEITSNQGAKEFDTELEMLSKLRHVHLVSLIGYCDDDNEMVLVYEYLPHGTLKDHLFRRDKASDPPLSWKRRLEICIGAARGLQYLHTGAKYTIIHRDIKTTNILLDENFVAKVSDFGLSRVGPTSASQTHVSTVVKGTFGYLDPEYYRRQILTEKSDVYSFGVVLLEVLCCRPIRMQSVPPEQADLIRWVKSNFNKRTVDQIIDSDLTADITSTSMEKFCEIAIRCVQDRGMERPPMNDVVWALEFALQLHETAKKKNDNVESLDLMPSGEVGTTTDGEDDLFSRTTGHVGKSTTTDDSVLVVGDERSGSSWGVFSEINEPKAR

SEQ ID NO: 8597 - protein, 880 aa, Arabidopsis thaliana
MICHVLVIFTILVSAVVDATASYEPTDVFLINCGDTSNNMDYSGRNWTTENPKFMSSNAVDDASFTSSASYQESGIPQVPYLKARIFRYDFTYSFPVSPGWKFLRLYFYPTRYGSDFDAVKSFFSVNVNRFTLLHNFSVKASIPESSSLIKEFIVPVNQTLDLTFTPSPNSLAFVNGIEIISMPDRFYSKGGFDDVVRNVGRDVDFEIDNSTAFETVYRVNVGGKVVGDVGDSGMFRRWLSDEGFLLGINSGAIPNITGVKINYTDKTPAYVAPEDVYTTCRLMGNKDSPELNLNFNLTWLFEVDAGFAYIVRLHFCETQPEVNKTGDRVFSIFFGYQLAMREMDVFRLSGGFRLPMYLDFKVLVDADGTSQRPSLRVDLTPYKEDYPTYYDAILSGVEILKLSNSDGNLAGLNPIPQLSPPPQSITPLKGKGKSSHVLPIIIAVVGSAVALAFFVLVVVLVVMKRKKKSNESSVDTTNKPSTNSSWGPLLHGTGSTNTKSASSLPSDLCRRFSIYEIKSATNDFEEKLIIGVGGFGSVYKGRIDGGATLVAVKRLEITSNQGAKEFDTELEMLSKLRHVHLVSLIGYCDDDNEMVLVYEYLPHGTLKDHLFRRDKASDPPLSWKRRLEICIGAARGLQYLHTGAKYTIIHRDIKTTNILLDENFVAKVSDFGLSRVGPTSASQTHVSTVVKGTFGYLDPEYYRRQILTEKSDVYSFGVVLLEVLCCRPIRMQSVPPEQADLIRWVKSNFNKRTVDQIIDSDLTADITSTSMEKFCEIAIRCVQDRGMERPPMNDVVWALEFALQLHETAKKKNDNVESLDLMPSGEVGTTTDGEDDLFSRTTGHVGKSTTTDDSVLVVGDERSGSSWGVFSEINEPKAR

SEQ ID NO: 8598 - protein, 841 aa, Arabidopsis thaliana
MDYSGRNWTTENPKFMSSNAVDDASFTSSASYQESGIPQVPYLKARIFRYDFTYSFPVSPGWKFLRLYFYPTRYGSDFDAVKSFFSVNVNRFTLLHNFSVKASIPESSSLIKEFIVPVNQTLDLTFTPSPNSLAFVNGIEIISMPDRFYSKGGFDDVVRNVGRDVDFEIDNSTAFETVYRVNVGGKVVGDVGDSGMFRRWLSDEGFLLGINSGAIPNITGVKINYTDKTPAYVAPEDVYTTCRLMGNKDSPELNLNFNLTWLFEVDAGFAYIVRLHFCETQPEVNKTGDRVFSIFFGYQLAMREMDVFRLSGGFRLPMYLDFKVLVDADGTSQRPSLRVDLTPYKEDYPTYYDAILSGVEILKLSNSDGNLAGLNPIPQLSPPPQSITPLKGKGKSSHVLPIIIAVVGSAVALAFFVLVVVLVVMKRKKKSNESSVDTTNKPSTNSSWGPLLHGTGSTNTKSASSLPSDLCRRFSIYEIKSATNDFEEKLIIGVGGFGSVYKGRIDGGATLVAVKRLEITSNQGAKEFDTELEMLSKLRHVHLVSLIGYCDDDNEMVLVYEYLPHGTLKDHLFRRDKASDPPLSWKRRLEICIGAARGLQYLHTGAKYTIIHRDIKTTNILLDENFVAKVSDFGLSRVGPTSASQTHVSTVVKGTFGYLDPEYYRRQILTEKSDVYSFGVVLLEVLCCRPIRMQSVPPEQADLIRWVKSNFNKRTVDQIIDSDLTADITSTSMEKFCEIAIRCVQDRGMERPPMNDVVWALEFALQLHETAKKKNDNVESLDLMPSGEVGTTTDGEDDLFSRTTGHVGKSTTTDDSVLVVGDERSGSSWGVFSEINEPKAR

SEQ ID NO: 8599 - DNA, 935 bp, Arabidopsis thaliana
ctctttcgctttctctcttctctcccattaccctctctctcgttttctcatactctcaactaaatatgccgtcggaaccaaaccaaacccgacccaccagagttcagccctcaacggcggcttacccaccgccaaatctggctgagccacttccttgtcctcgctgcaactccaccaccaccaagttctgttactacaacaactacaacctcgctcagcctcgttactactgcaaatcttgccgccgttactggactcaaggtggtacactccgtgacgtccccgtcggtggtggaactcgtcgtagctcctcaaaacgtcaccgctctttctccaccaccgtaacttcctcttcctcatcttcttccgtcatcacctccacgacacaagaaccagccacgactgaagcgagtcagattaaggttagtaatgtaacttcaggtcatggaagctttgcttctctgttgggtttaggaagtggaaatggtgggctggattacgggtttgggtacgggtacgggcttgaggatatgagtattgggtatcttggagattcttccgtaggagagattccggtggttgatggttgtggttgacacgtggcagattggggagattgaaggtaaaagtggaggagacagtttgatatggcctggtcttgagatctcaatgcaaaccaacgatgttaagtgaaaatgaaaccgtttctgatttcttgcctttgtcttcttttgttggtgtctttttggaaatttctgtttgttttcttttttgtcctagaaagaagagcaaaagaaaccaaattgaagcaagaatgtttttatttattttagtttttgaggtccaacaattctggtgtataaatcctctgtttatgtgacgaacatattggaatggatttatgagtaaaaatgtaaaaacatttctttcttttc

SEQ ID NO: 8600 - protein, 197 aa, Arabidopsis thaliana
LSLSLFSPITLSLVFSYSQLNMPSEPNQTRPTRVQPSTAAYPPPNLAEPLPCPRCNSTTTKFCYYNNYNLAQPRYYCKSCRRYWTQGGTLRDVPVGGGTRRSSSKRHRSFSTTVTSSSSSSSVITSTTQEPATTEASQIKVSNVTSGHGSFASLLGLGSGNGGLDYGFGYGYGLEDMSIGYLGDSSVGEIPVVDGCG

SEQ ID NO: 8601 - protein, 176 aa, Arabidopsis thaliana
MPSEPNQTRPTRVQPSTAAYPPPNLAEPLPCPRCNSTTTKFCYYNNYNLAQPRYYCKSCRRYWTQGGTLRDVPVGGGTRRSSSKRHRSFSTTVTSSSSSSSVITSTTQEPATTEASQIKVSNVTSGHGSFASLLGLGSGNGGLDYGFGYGYGLEDMSIGYLGDSSVGEIPVVDGCG

SEQ ID NO: 8602 - DNA, 1093 bp, Arabidopsis thaliana
gtttctcaaaaatcaaaatcccttcctctctctctctcaccgagccggcgagcccgttctctcggtgtttttaaagatgcttatgatgatgatggggagtgagtaatatcagaaatcaagctttttcacaatctcagaaattgtagtagagtttggcgattttatcaacctccggaacaagcttcttcttcttcgttttactcttgtcatccgtaaatgggttgtttccattccacggctgccagagaatttcccgatcacgaaaaccctgtgaagcttgcttctgagactgcttttagtgttagtgaagttgaagcattgtatgaattgttcaagagcataagcagctcggttgttgacgatggcttgataaacaaggaagagtttcaacttgctttgttcaagaacagaaagaaagaaaatttgtttgccaataggatatttgatttatttgatgttaaacgaaaaggcgtaattgattttggagactttgtgagatcactcaatgttttccatcctaatgcttccctagaggagaaaacagactttacctttaggctttacgacatggactgcacaggcttcattgagcgccaagaggtgaagcagatgttgattgcacttctctgcgaatctgaaatgaaactggctgatgatacaatagagatgatacttgatcagacatttgaggacgcagatgtggatcgggatggaaagattgataagacagaatggagcaatttcgttatcaaaaacccatctttgcttaaaatcatgactcttccgtatctcagggatataacgacgacatttccgagtttcgtatttaactcggaggtggacgagattgcgacgtgaaagagacaagacaagctggtttatagagaccaagtcgtaggctggaccaagaataaaaagaagattgattccaacaatgttatatagcaggatcgagctctatttcctttggaatttttagtctattggatttcaatttcatgtattgcgattacttttggctctctttctttaacagttttgaatactcaagttgtagttctacgaaaagattaatataaaaccacaatttctg

SEQ ID NO: 8603 - protein, 213 aa, Arabidopsis thaliana
MGCFHSTAAREFPDHENPVKLASETAFSVSEVEALYELFKSISSSVVDDGLINKEEFQLALFKNRKKENLFANRIFDLFDVKRKGVIDFGDFVRSLNVFHPNASLEEKTDFTFRLYDMDCTGFIERQEVKQMLIALLCESEMKLADDTIEMILDQTFEDADVDRDGKIDKTEWSNFVIKNPSLLKIMTLPYLRDITTTFPSFVFNSEVDEIAT

SEQ ID NO: 8604 - DNA, 1748 bp, Arabidopsis thaliana
atcagaagagtaaataaacatcaaaatccaacaaaccaaactagaaaaatgtcagtagttttactctcttctacttctgcaacaatcaccaaatcccaatccaaaaagattccctttttatctcccaccacaaaattcccattaaaggtctcaatttctccatcaagatcgaaacttttccacaaccctttacgcgtggcggcgccgccgtctgtacccacttcggattcgacggaggagaagcggatcgaagaagaatacggcggagataaggaagaagaagggtctgagtttaagtggagagatcattggtatccagtttctttggttgaggatttggatccgaatgtgccaaccccgttccagctcttgggtcgagaccttgtactctggtttgatcggaatgatcagaaatgggcagcctttgatgatctctgccctcaccggctcgctcctttatctgaaggaaggttggatgagaatggacacttgcaatgttcgtatcatggatggtcatttggtgggtgtggatcttgcactaggattcctcaggctgctacttcaggtcctgaagctcgtgctgttaaatccccgagagcttgtgctattaagttcccgacaatggtgtctcaaggtcttctctttgtgtggcctgatgaaaatggttgggatagagccaattcaattgaaccccctaggttgccggatgatttcgataaaccggaattttcgacggtgacaattcaaagggatcttttctatggatatgatactctcatggaaaatgtatctgatccttcccatatagattttgctcatcacaaggttacaggaagaagagacagagccaaaccattgccgttcaaggtggagtcaagtgggccttggggtttccaaggtgcgaatgatgacagtccaaggataaccgcaaaatttgttgctccgtgctattctatgaacaaaattgagttagatgcgaaactaccaatcgtcggtaatcaaaaatgggtcatttggatttgctcattcaatataccaatggctccaggaaagacccgttccatcgtttgcagcgcccgtaacttctttcagttctctgtaccaggaccagcttggtggcaggttgtaccaagatggtatgaacactggacttcgaacttagtctatgacggagacatgatcgtacttcaaggacaagagaaagtattcctcgctaaatcaatggagtcaccagactacgacgtgaacaaacagtacacaaagctcacattcactccaacccaggcagaccgttttgttctagcattcagaaactggctcagacggcatggtaagagtcagcctgaatggttcggctccaccccgtctaaccaacctctcccttccactgtcttaaccaagcgtcagatgctagatagatttgatcagcatacacaagtatgctcttcctgcaaaggagcttacaacagtttccaaatcctcaagaagtttctcgttggcgcgacggttttctgggccgccacggctggtgttccttctgatgttcagattcgactggttcttgctggtttatcactgatatcagctgcttctgcatatgctttacatgaacaagagaagaactttgtgtttagagattatgtacattctgaaatcgagtagatttgttgtgtatatgtataatcatcatacaaagtacaaacattgtaaatcaaaatccagaggaacttttagcagtttacatctgc

SEQ ID NO: 8605 - protein, 553 aa, Arabidopsis thaliana
IRRVNKHQNPTNQTRKMSVVLLSSTSATITKSQSKKIPFLSPTTKFPLKVSISPSRSKLFHNPLRVAAPPSVPTSDSTEEKRIEEEYGGDKEEEGSEFKWRDHWYPVSLVEDLDPNVPTPFQLLGRDLVLWFDRNDQKWAAFDDLCPHRLAPLSEGRLDENGHLQCSYHGWSFGGCGSCTRIPQAATSGPEARAVKSPRACAIKFPTMVSQGLLFVWPDENGWDRANSIEPPRLPDDFDKPEFSTVTIQRDLFYGYDTLMENVSDPSHIDFAHHKVTGRRDRAKPLPFKVESSGPWGFQGANDDSPRITAKFVAPCYSMNKIELDAKLPIVGNQKWVIWICSFNIPMAPGKTRSIVCSARNFFQFSVPGPAWWQVVPRWYEHWTSNLVYDGDMIVLQGQEKVFLAKSMESPDYDVNKQYTKLTFTPTQADRFVLAFRNWLRRHGKSQPEWFGSTPSNQPLPSTVLTKRQMLDRFDQHTQVCSSCKGAYNSFQILKKFLVGATVFWAATAGVPSDVQIRLVLAGLSLISAASAYALHEQEKNFVFRDYVHSEIE

SEQ ID NO: 8606 - protein, 537 aa, Arabidopsis thaliana
MSVVLLSSTSATITKSQSKKIPFLSPTTKFPLKVSISPSRSKLFHNPLRVAAPPSVPTSDSTEEKRIEEEYGGDKEEEGSEFKWRDHWYPVSLVEDLDPNVPTPFQLLGRDLVLWFDRNDQKWAAFDDLCPHRLAPLSEGRLDENGHLQCSYHGWSFGGCGSCTRIPQAATSGPEARAVKSPRACAIKFPTMVSQGLLFVWPDENGWDRANSIEPPRLPDDFDKPEFSTVTIQRDLFYGYDTLMENVSDPSHIDFAHHKVTGRRDRAKPLPFKVESSGPWGFQGANDDSPRITAKFVAPCYSMNKIELDAKLPIVGNQKWVIWICSFNIPMAPGKTRSIVCSARNFFQFSVPGPAWWQVVPRWYEHWTSNLVYDGDMIVLQGQEKVFLAKSMESPDYDVNKQYTKLTFTPTQADRFVLAFRNWLRRHGKSQPEWFGSTPSNQPLPSTVLTKRQMLDRFDQHTQVCSSCKGAYNSFQILKKFLVGATVFWAATAGVPSDVQIRLVLAGLSLISAASAYALHEQEKNFVFRDYVHSEIE

SEQ ID NO: 8607 - protein, 346 aa, Arabidopsis thaliana
MVSQGLLFVWPDENGWDRANSIEPPRLPDDFDKPEFSTVTIQRDLFYGYDTLMENVSDPSHIDFAHHKVTGRRDRAKPLPFKVESSGPWGFQGANDDSPRITAKFVAPCYSMNKIELDAKLPIVGNQKWVIWICSFNIPMAPGKTRSIVCSARNFFQFSVPGPAWWQVVPRWYEHWTSNLVYDGDMIVLQGQEKVFLAKSMESPDYDVNKQYTKLTFTPTQADRFVLAFRNWLRRHGKSQPEWFGSTPSNQPLPSTVLTKRQMLDRFDQHTQVCSSCKGAYNSFQILKKFLVGATVFWAATAGVPSDVQIRLVLAGLSLISAASAYALHEQEKNFVFRDYVHSEIE

SEQ ID NO: 8608 - DNA, 932 bp, Arabidopsis thaliana
aactcttccactctccagtcacagccacagagtacccggaggccaaagagatttgatcagctttgtgtgttttccatggcgtcggaagcgagggaatcaccagcaaacaatcctggcttgtcaacgaatcgagatgaggctacaaaaggatacatcatgcaacagactatgtttcggatcaaggaccctaaggctagtcttgacttttactcacgtgtgctggggatgtcattgctgaagaggctggatttctctgagatgaaatttagtttgtacttcctgggctacgaggatactacaacagctccaaccgatccaacagagagaacggtttggacatttggtcaaccggcaacaattgaattgactcacaactggggtacagagagtgatcctgagtttaaaggttatcacaatgggaactctgagcctcgtggatttgggcacattggggttaccgttgatgatgtgcacaaggcatgcgagagatttgaagaattgggagtagagtttgccaagaaaccaaacgatggaaagatgaagaatatagccttcattaaggatcctgatggctactggatcgagatctttgatctcaagactatcggaactactaccgtaaacgcagcttgatctcaagactatcggaactactaccgtaaacgcagcttgatctcaagactatcgggactactaccggaaacgcagcttgaggaagtagcgattgcgctatttgtgttcttttgctcattccacccgagtgtgtgcatacagttaaagaattttcatgtttcatcgaataatcggaacaagatggtcgttgtttatcaatgtggtctgtttcttgacatatatataatgagctaggtcgttatcattgttaaaaataacatacacgtccattattaatgacaatcagtttggtactgttc

SEQ ID NO: 8609 - protein, 210 aa, Arabidopsis thaliana
NSSTLQSQPQSTRRPKRFDQLCVFSMASEARESPANNPGLSTNRDEATKGYIMQQTMFRIKDPKASLDFYSRVLGMSLLKRLDFSEMKFSLYFLGYEDTTTAPTDPTERTVWTFGQPATIELTHNWGTESDPEFKGYHNGNSEPRGFGHIGVTVDDVHKACERFEELGVEFAKKPNDGKMKNIAFIKDPDGYWIEIFDLKTIGTTTVNAA

SEQ ID NO: 8610 - protein, 185 aa, Arabidopsis thaliana
MASEARESPANNPGLSTNRDEATKGYIMQQTMFRIKDPKASLDFYSRVLGMSLLKRLDFSEMKFSLYFLGYEDTTTAPTDPTERTVWTFGQPATIELTHNWGTESDPEFKGYHNGNSEPRGFGHIGVTVDDVHKACERFEELGVEFAKKPNDGKMKNIAFIKDPDGYWIEIFDLKTIGTTTVNAA

SEQ ID NO: 8611 - protein, 158 aa, Arabidopsis thaliana
MQQTMFRIKDPKASLDFYSRVLGMSLLKRLDFSEMKFSLYFLGYEDTTTAPTDPTERTVWTFGQPATIELTHNWGTESDPEFKGYHNGNSEPRGFGHIGVTVDDVHKACERFEELGVEFAKKPNDGKMKNIAFIKDPDGYWIEIFDLKTIGTTTVNAA

SEQ ID NO: 8612 - DNA, 648 bp, Arabidopsis thaliana
aaagaaaaaggttcctttttttgactttgtatccgtagatcatcttcttcttcttcttccagagttttatccttatccgttccatcaaattctctctctaagcaaagatgaataaaggaagcatctttaagatggacaacgatttcgaaaagagaaaagctgaagctggaaggatcagggagaaataccctgatcgaattcctgtgattgtggaaaaggctgagaaaagtgaagtcccaaatatagacaagaagaagtaccttgtgccatcagacctaacagttggtcaatttgtgtatgtgattcggaagagaatcaaactaagtgcagagaaagctatcttcattttcgtagacaatgttcttcctccaacaggagagctaatgtcaagcgtttacgaggataagaaagacgaagatggcttcctttacatcacttacagtggcgagaacacattcggtgcttcttcaatctaatctctgacctctgagaatccgccacgttttaatgcttcttcccaactttcaatttgtgtgtatagtttgttctcaatatttatcatttctcaaataattgtgattactatcttcttttcacttgttaaaatgtacatagactaatcttataatattatcttcctttggtatt

SEQ ID NO: 8613 - protein, 122 aa, Arabidopsis thaliana
MNKGSIFKMDNDFEKRKAEAGRIREKYPDRIPVIVEKAEKSEVPNIDKKKYLVPSDLTVGQFVYVIRKRIKLSAEKAIFIFVDNVLPPTGELMSSVYEDKKDEDGFLYITYSGENTFGASSI

SEQ ID NO: 8614 - protein, 114 aa, Arabidopsis thaliana
MDNDFEKRKAEAGRIREKYPDRIPVIVEKAEKSEVPNIDKKKYLVPSDLTVGQFVYVIRKRIKLSAEKAIFIFVDNVLPPTGELMSSVYEDKKDEDGFLYITYSGENTFGASSI

SEQ ID NO: 8615 - DNA, 1000 bp, Arabidopsis thaliana
atttaaaacccttatttaaattatatagaaaaaaaaaaggtcaagtagtcttctattatttactagtataacctctagaaacatcatcaccacattcctggctaatatccttcatctagaacaattattaacgaatcaaaataccaaaaaacaaagcacctcattgactattaaattagtactaatacattaattaagttattattcctatatataaatctcacccattctccaccttatcatcacaatccaaaactctctctctctctctctctctgtctcttgtcttatcatttatctctctaacggcgaggcaatgggttttccggtgggatattctgagctacttctcccaaaaatctttttctacttgttatctttcttaggtttgatacgtaaactcatctccacaatgttcaagatcattggtctaccagatttcttagaacctgaaccggtttcaacctcatggcccgacccaccacccacgttgaccaaacctgactcagcagcaatactagccggagagatgttaccggttgttcgattctcggatataaaccgaccggaatccgagtgttgcgcagtgtgtctctacgatttcgagaacgacgacgagatccgacggctgacgaattgtcgacatatatttcatcggggatgtttggaccgttggatgatgggttataatcagatgacgtgtccactttgtcgtacacagtttatacctgatcatcttcaactggagtttaatcaaaggctctggtctcaatcttctgctgtttcttctcaacttcttgatgaatcatcatcttaggacgtattaaatctttgtccaaacaaaaaaaaaagacatattaaatcctttttttttggtactttcattgggaattgggtttggtgtgagatcgatgtaaatattaaacaaaaaaaaaaaaggtagtggttacaggttaatgaaaaaagaaagaagaagaaaatttgtacttatccatccctc

SEQ ID NO: 8616 - protein, 166 aa, Arabidopsis thaliana
MGFPVGYSELLLPKIFFYLLSFLGLIRKLISTMFKIIGLPDFLEPEPVSTSWPDPPPTLTKPDSAAILAGEMLPVVRFSDINRPESECCAVCLYDFENDDEIRRLTNCRHIFHRGCLDRWMMGYNQMTCPLCRTQFIPDHLQLEFNQRLWSQSSAVSSQLLDESSS

SEQ ID NO: 8617 - protein, 134 aa, Arabidopsis thaliana
MFKIIGLPDFLEPEPVSTSWPDPPPTLTKPDSAAILAGEMLPVVRFSDINRPESECCAVCLYDFENDDEIRRLTNCRHIFHRGCLDRWMMGYNQMTCPLCRTQFIPDHLQLEFNQRLWSQSSAVSSQLLDESSS

SEQ ID NO: 8618 - protein, 95 aa, Arabidopsis thaliana
MLPVVRFSDINRPESECCAVCLYDFENDDEIRRLTNCRHIFHRGCLDRWMMGYNQMTCPLCRTQFIPDHLQLEFNQRLWSQSSAVSSQLLDESSS

SEQ ID NO: 8619 - DNA, 907 bp, Arabidopsis thaliana
gatgacataccaaaagcaataccaaatgcaaacacaccacatgcagcaacaacaactccatcacttcgtctttgtccacggctcatgtcatggagcatggtgctggttcaaactagctgcaaagctcaagctcgatggtcaccgtgtgacagctatcgaccttggtggctccggtgtcgacacgaggcagctccatgaggttcgtttggtgtcggcgtatctagagcctttgatgagtttcatggagtctctccctgaaaacgagaaagtggttcttgttggtcatagctatggtggcattggaacttctcttgctatggaaaggtttccgaccaaagtctctgtcggaatcttcctctctgcttacatgccgcaccatgactctcctccggcggttttgattcaagagtattttacgagactaccagagggtttcgctatggactgtgagtttacattcgaggaaggattagaacacccaccaagttcagttttgttcggtactagtttcttgaaggagaaggcatatagtaattgccagttagaggatctagaattagccatggcgttgatgaaaccaagctagttatacactaaggaaatgggaggtgaagatctgataacaaaggagaggtatggatctgggaagagagtgtttattgtctgtgaaggcgacaatgtggttccagaggagattcagaagtggatgattagtaactacgagcctcacgaagttaagcggattgaagaagctggtcacatggctatgctcactaagcctcatgaactttctcaactgctacaagaaatagcagcgaaatataactaaatgtaaaatgatgacacctgtgtatgatttgggctcagttacatctatgatatgaataagagagtttcaatatttgtg

SEQ ID NO: 8620 - protein, 194 aa, Arabidopsis thaliana
MTYQKQYQMQTHHMQQQQLHHFVFVHGSCHGAWCWFKLAAKLKLDGHRVTAIDLGGSGVDTRQLHEVRLVSAYLEPLMSFMESLPENEKVVLVGHSYGGIGTSLAMERFPTKVSVGIFLSAYMPHHDSPPAVLIQEYFTRLPEGFAMDCEFTFEEGLEHPPSSVLFGTSFLKEKAYSNCQLEDLELAMALMKPS

SEQ ID NO: 8621 - protein, 186 aa, Arabidopsis thaliana
MQTHHMQQQQLHHFVFVHGSCHGAWCWFKLAAKLKLDGHRVTAIDLGGSGVDTRQLHEVRLVSAYLEPLMSFMESLPENEKVVLVGHSYGGIGTSLAMERFPTKVSVGIFLSAYMPHHDSPPAVLIQEYFTRLPEGFAMDCEFTFEEGLEHPPSSVLFGTSFLKEKAYSNCQLEDLELAMALMKPS

SEQ ID NO: 8622 - protein, 181 aa, Arabidopsis thaliana
MQQQQLHHFVFVHGSCHGAWCWFKLAAKLKLDGHRVTAIDLGGSGVDTRQLHEVRLVSAYLEPLMSFMESLPENEKVVLVGHSYGGIGTSLAMERFPTKVSVGIFLSAYMPHHDSPPAVLIQEYFTRLPEGFAMDCEFTFEEGLEHPPSSVLFGTSFLKEKAYSNCQLEDLELAMALMKPS

SEQ ID NO: 8623 - DNA, 1784 bp, Arabidopsis thaliana
aagataaacccaattttgttatttttgttctctcttctctctcgttcatgtttcaaatctgtttctagggtttcacaaaccagagatagagagaggtttagcgaaaaatggcgatggccatggctcttcgaaggctttcttcttcaattgacaaacccattcgtcctcttattcgatccacttcatgttacatgtcttctttgcccagtgaagctgttgatgagaaggaaagatctcgtgtcacttggccaaaacagcttaacgcacctttagaggaggttgatcctgagattgctgacattattgagcatgagaaagctagacaatggaagggacttgaacttattccatctgagaacttcacatctgtgtcggtgatgcaagctgttgggtctgtcatgactaacaaatacagtgaaggctatcctggtgccagatactatggaggaaatgagtatatagacatggcagaaaccttatgccagaagcgcgctcttgaagctttccggttagatcctgaaaagtggggagtgaatgttcaacctttgtctggatctcctgccaacttccatgtgtacactgcattgttaaagcctcatgaaagaatcatggcacttgatcttcctcatggtggtcatctttctcatggttatcagactgacaccaagaagatatcagctgtgtctatcttctttgaaacaatgccctatagattggacgagagcactggctacatcgactacgatcagatggagaaaagtgctactcttttcaggccaaaaattgattgttgctggtgcaagtgcttatgctagattgtatgactatgcccgcatcagaaaggtctgtaacaagcaaaaagctgtaatgctagcagatatggcacacatcagtggtttggttgctgctaatgtaatcccttcaccgttcgactatgctgatgttgtaaccaccacaactcacaagtcacttcgtggaccccgtggagccatgattttcttcagaaagggtgttaaggaaattaacaagcaagggaaagaggttttgtatgattttgaagacaagatcaaccaagctgtcttccctggtcttcaaggtggtccacacaaccacactatcacaggactagctgttgctttgaaacaggcaactacttcagagtacaaagcataccaagaacaagtcctgagtaacagtgcaaagtttgctcagactctaatggagagaggatatgaacttgtttctggtggaactgacaaccatctggttctagtgaatctaaagcccaagggaattgatggatctagagttgagaaagtgttggaagctgttcacattgcatccaacaaaaacactgttcctggagatgtttctgccatggttcctggtggaatcagaatgggtactcctgctctcacttccagaggctttgttgaggaagactttgccaaagtagctgaatacttcgacaaagctgtgacaatagctctcaaagtcaaatctgaagctcaaggaaccaagttgaaggatttcgtgtcagcaatggaatcctcttcaaccatccaatccgagattgcgaaactgcgccatgaagtcgaggaattcgctaagcagttcccaacaattgggtttgagaaagaaaccatgaagtacaagaactaaactgtttcaccccacaagtgttttctgttatgctttgaattcccatggaatgtatagatgatacatgtaaaactctattttcacgctatgcgaaaaataatgatctgttaaattttctctct

SEQ ID NO: 8624 - protein, 354 aa, Arabidopsis thaliana
MKESWHLIFLMVVIFLMVIRLTPRRYQLCLSSLKQCPIDWTRALATSTTIRWRKVLLFSGQKLIVAGASAYARLYDYARIRKVCNKQKAVMLADMAHISGLVAANVIPSPFDYADVVTTTTHKSLRGPRGAMIFFRKGVKEINKQGKEVLYDFEDKINQAVFPGLQGGPHNHTITGLAVALKQATTSEYKAYQEQVLSNSAKFAQTLMERGYELVSGGTDNHLVLVNLKPKGIDGSRVEKVLEAVHIASNKNTVPGDVSAMVPGGIRMGTPALTSRGFVEEDFAKVAEYFDKAVTIALKVKSEAQGTKLKDFVSAMESSSTIQSEIAKLRHEVEEFAKQFPTIGFEKETMKYKN

SEQ ID NO: 8625 - protein, 344 aa, Arabidopsis thaliana
MVVIFLMVIRLTPRRYQLCLSSLKQCPIDWTRALATSTTIRWRKVLLFSGQKLIVAGASAYARLYDYARIRKVCNKQKAVMLADMAHISGLVAANVIPSPFDYADVVTTTTHKSLRGPRGAMIFFRKGVKEINKQGKEVLYDFEDKINQAVFPGLQGGPHNHTITGLAVALKQATTSEYKAYQEQVLSNSAKFAQTLMERGYELVSGGTDNHLVLVNLKPKGIDGSRVEKVLEAVHIASNKNTVPGDVSAMVPGGIRMGTPALTSRGFVEEDFAKVAEYFDKAVTIALKVKSEAQGTKLKDFVSAMESSSTIQSEIAKLRHEVEEFAKQFPTIGFEKETMKYKN

SEQ ID NO: 8626 - protein, 338 aa, Arabidopsis thaliana
MVIRLTPRRYQLCLSSLKQCPIDWTRALATSTTIRWRKVLLFSGQKLIVAGASAYARLYDYARIRKVCNKQKAVMLADMAHISGLVAANVIPSPFDYADVVTTTTHKSLRGPRGAMIFFRKGVKEINKQGKEVLYDFEDKINQAVFPGLQGGPHNHTITGLAVALKQATTSEYKAYQEQVLSNSAKFAQTLMERGYELVSGGTDNHLVLVNLKPKGIDGSRVEKVLEAVHIASNKNTVPGDVSAMVPGGIRMGTPALTSRGFVEEDFAKVAEYFDKAVTIALKVKSEAQGTKLKDFVSAMESSSTIQSEIAKLRHEVEEFAKQFPTIGFEKETMKYKN

SEQ ID NO: 8627 - DNA, 1505 bp, Arabidopsis thaliana
attaatccactgaaacaatcactattcattctctttccttaagtgtcaaactcttgaaaaaactactttgaaggaaaaaatgtctaagaagaagaaaggcagcaacaactttaagcttctctgtttcttcctgtttttgggtggtttggttcagacagatgcttcttttggagtaggaggcggcgttggagtaggaatcggcggcggcggcggtggcggtggcggtggtgtttgggttggcggtggatacaacaacggtggaaatcgtaatgctgttccaggatcatcagctccaaacagggtagcttacaatgctcttcaagtttggaaatcagccatgagagaggatccatcaaatgttctcaaaacatgggttggatcagatgtttgttcttacaaaggtgtgttctgttctggtcaatctataacctctatagatcttaaccatgcaaatctcaaaggcacacttgtcaaagacctagctttactctcagacctcaatattctccatctcaacagtaacagattctcagggcaaatcccagattctttcaaatctttagcttctcttcaagaacttgatctaagcaacaataaactctcaggtcctttccctttagtcacactctacataccaaatctggtttacctcgatctccggtttaatagtttaaccggtttcatccctgaagagcttttcaacaaacggttagacgcgattctcctcaataacaatcaattcgtcggagaaatcccaagaaacctcggaaattctccggcttcggttattaatctcgcgaataacagattttccggcgaaattccgacgagttttggtctgacgggatcgagggttaaggaagttttgcttttgaataaccagttaaccggttgtataccggaatctgttggtatgttctctgaaattgaagtctttgacgttagctacaatgcattgatgggtcatgttccagatacgatctcttgcttgtcggcgattgaaattttgaatcttgctcacaataaattctctggggaggttcctgatttggtttgttcgttgaggaatcttattaatctcactgttgcgttcaatttcttctctgggtttagctctgaatgttcttccagggttagtttcgggtttgatttcgttgggaattgtattcccgggaggaattcgcagcggccgcagccggattgttccggttattccggcggagctatgagctgttttaggattccgacgcagcctttggcttgtgctgcgataagtgttggattgagagagagtaataatcaatactacacttcatctcctccatgaaagtttctaaagttagaagcttttttttattaatggttgatgctgaatgatctatcttttttgtaacttattaattagttgattagtgaccaaattaaacgttaattcctcttctgtgtaatccaatcgttgctaatgttgttttgtaagcagaagaattttgtaaaaatctaacgtt

SEQ ID NO: 8628 - protein, 415 aa, Arabidopsis thaliana
MSKKKKGSNNFKLLCFFLFLGGLVQTDASFGVGGGVGVGIGGGGGGGGGGVWVGGGYNNGGNRNAVPGSSAPNRVAYNALQVWKSAMREDPSNVLKTWVGSDVCSYKGVFCSGQSITSIDLNHANLKGTLVKDLALLSDLNILHLNSNRFSGQIPDSFKSLASLQELDLSNNKLSGPFPLVTLYIPNLVYLDLRFNSLTGFIPEELFNKRLDAILLNNNQFVGEIPRNLGNSPASVINLANNRFSGEIPTSFGLTGSRVKEVLLLNNQLTGCIPESVGMFSEIEVFDVSYNALMGHVPDTISCLSAIEILNLAHNKFSGEVPDLVCSLRNLINLTVAFNFFSGFSSECSSRVSFGFDFVGNCIPGRNSQRPQPDCSGYSGGAMSCFRIPTQPLACAAISVGLRESNNQYYTSSPP

SEQ ID NO: 8629 - protein, 329 aa, Arabidopsis thaliana
MREDPSNVLKTWVGSDVCSYKGVFCSGQSITSIDLNHANLKGTLVKDLALLSDLNILHLNSNRFSGQIPDSFKSLASLQELDLSNNKLSGPFPLVTLYIPNLVYLDLRFNSLTGFIPEELFNKRLDAILLNNNQFVGEIPRNLGNSPASVINLANNRFSGEIPTSFGLTGSRVKEVLLLNNQLTGCIPESVGMFSEIEVFDVSYNALMGHVPDTISCLSAIEILNLAHNKFSGEVPDLVCSLRNLINLTVAFNFFSGFSSECSSRVSFGFDFVGNCIPGRNSQRPQPDCSGYSGGAMSCFRIPTQPLACAAISVGLRESNNQYYTSSPP

SEQ ID NO: 8630 - DNA, 1237 bp, Arabidopsis thaliana
aaatattaacacttactgattgccgagagacgaaagacggaaaatcccaacaataaagagcaaaagatcttacagctcataatatttcgttaattatcaaattgctaataggagaaaaaaatgggtcaagctttgggttgtattcaagttgatcagtcgaatgtagcaatcaaagagacttttgggaagtttgacgaagttcttgagccgggttgtcactgtttgccatggtgtttgggaagtcaagtcgctggtcacctttctttacgtgttcaacagctcgcatgttcgctgcgagacaaagactaaggataatgtgtttgtcacggttgttgcttccattcaataccgtgccttagcggagagtgctcaagatgctttttacaagctcagcaacacaaggaatcagattcaagcttatgtctttgatgtgatccgagcaagtgtacctaagctggatctagactctacctttgagcaaaagaatgacattgcaaaaaccgttgagactgagctcgaaaagggctatgtcgcattacggatatgagattgttcagacactgattgtggatatcgagcctgatgtgcatgtcaagagggcaatgaatgagatcaatgctgcttctagaatgagagaggcagcgagtgagaaagctgaggcagagaaaattctgcagatcaagcgtgctgagggagaagctgaatcgaaatacctttcaggtatgggtatagcccgtcagagacaagccattgtggatggtctgaggaacagcgtactcgccttctctgagtctgttccaggaacatcttccaaagacgtgatggatatggttcttgtgactcagtactttgacacattgaaggaaattggtgcttcttcgaagtcaaactcggtgttcataccgcacggtccaggcgctgttagggacattgcttcacagatcagggatggtcttcttcagggtaactctgctgctgagtagagaaatgtctcaaagtacaaaaaggctttttcagggttttagagttgtgttgctacttgcttactcagtttatcttttagcggtttgctctatatgatgggttcttaaatttcttatcgtttctctcttctaggcttgtggacttgatccattgtcttgttttctggtggtttgtggatagagtttgggcttgaaaaacatccgagttattttgggttttaatgtcattattaatgtttaatacgacagtggtc

SEQ ID NO: 8631 - protein, 165 aa, Arabidopsis thaliana
MTLQKPLRLSSKRAMSHYGYEIVQTLIVDIEPDVHVKRAMNEINAASRMREAASEKAEAEKILQIKRAEGEAESKYLSGMGIARQRQAIVDGLRNSVLAFSESVPGTSSKDVMDMVLVTQYFDTLKEIGASSKSNSVFIPHGPGAVRDIASQIRDGLLQGNSAAE

SEQ ID NO: 8632 - protein, 151 aa, Arabidopsis thaliana
MSHYGYEIVQTLIVDIEPDVHVKRAMNEINAASRMREAASEKAEAEKILQIKRAEGEAESKYLSGMGIARQRQAIVDGLRNSVLAFSESVPGTSSKDVMDMVLVTQYFDTLKEIGASSKSNSVFIPHGPGAVRDIASQIRDGLLQGNSAAE

SEQ ID NO: 8633 - protein, 126 aa, Arabidopsis thaliana
MNEINAASRMREAASEKAEAEKILQIKRAEGEAESKYLSGMGIARQRQAIVDGLRNSVLAFSESVPGTSSKDVMDMVLVTQYFDTLKEIGASSKSNSVFIPHGPGAVRDIASQIRDGLLQGNSAAE

SEQ ID NO: 8634 - DNA, 1177 bp, Arabidopsis thaliana
aatacgagaagaaaaaggcgaaaacctcgccaatccgattacgcgaaaaatcaaaggtttttggatatggcgtcgaagcggatcttgaaggaattgaaggatctccagattttttttttttttttttggcaatttctttcatgtgattcccttctattaggcgttgcttcgctcttttggctattttgtttttctgcaggcgttcataatctcaacatgtatcctttcatagtctttttttaataaaagtcagttgacgaagaaaataaaagtaaaaaaaaaaaaaaaaaaaaaaaaaaaaaaaataaaaaatggcttcctcatcaacgagaaagtacgagacacgaaagcgagatccaaactctaaaatcgcagctcttctcgttatcgacatgcagaatcacttctcctccatggccaaacccatcctcaacaacgttctcaccaccatcgacatctgccgacgcgcctcagtccccgtattctttacgcgtcacaaccacaaatccccgaccgaccacggcatgctcggcgagtggtgtaacggcgatgtaatccttgacggaaccaccgattctgaaatcatccaggagatacaaggccaagtaaccggaccagacgagatggtggagaagaacacgtacagtgcgtttaacaaaacccgcctccaggaaaacctggaaaagatcggagtaaaggaggtgatcgtgatcggagtgatgacgaacttgtgctgtgagacaacggcgcgtgaagcgtttattaagggttttagggtttttttctcgacggacgcgactgcgacgtttaatgaggagcttcacgaggctacgctaatgaatctcgcttttggcttcgcttatctcgtcgattgcgataaactccggcgaagtctactcggtaactaaaaaatgataattacacgcacaaccgtcgcggaaaagctatccgacgttgcatgttatttggagaagcaaagttggagtctctatgcttaccatattgagctttttttcttaagtattttgtctaatatctttcatgtgattcccttctcttaggcgttgcttcgctcttttggctattttgtttttctgcaggcgttcataatctcaacatgtatcctttcatagtctttttttaataaaagtcagttgacgaagaaaataaaagtaaa

SEQ ID NO: 8635 - protein, 198 aa, Arabidopsis thaliana
MASSSTRKYETRKRDPNSKIAALLVIDMQNHFSSMAKPILNNVLTTIDICRRASVPVFFTRHNHKSPTDHGMLGEWCNGDVILDGTTDSEIIQEIQGQVTGPDEMVEKNTYSAFNKTRLQENLEKIGVKEVIVIGVMTNLCCETTAREAFIKGFRVFFSTDATATFNEELHEATLMNLAFGFAYLVDCDKLRRSLLGN

SEQ ID NO: 8636 - protein, 171 aa, Arabidopsis thaliana
MQNHFSSMAKPILNNVLTTIDICRRASVPVFFTRHNHKSPTDHGMLGEWCNGDVILDGTTDSEIIQEIQGQVTGPDEMVEKNTYSAFNKTRLQENLEKIGVKEVIVIGVMTNLCCETTAREAFIKGFRVFFSTDATATFNEELHEATLMNLAFGFAYLVDCDKLRRSLLGN

SEQ ID NO: 8637 - protein, 164 aa, Arabidopsis thaliana
MAKPILNNVLTTIDICRRASVPVFFTRHNHKSPTDHGMLGEWCNGDVILDGTTDSEIIQEIQGQVTGPDEMVEKNTYSAFNKTRLQENLEKIGVKEVIVIGVMTNLCCETTAREAFIKGFRVFFSTDATATFNEELHEATLMNLAFGFAYLVDCDKLRRSLLGN

SEQ ID NO: 8638 - DNA, 2726 bp, Arabidopsis thaliana
aaaggattcaaaaaaccctaaacactccaatgtcttcttctactcttcaagcttctctttttcttcgtcctcctctccatacttcttcgtttaagctttacccttgtctattctcttcttcttcattgagtttttgtccacaatctctctcaagtttctaccgtctttcttcagttcttcacaactctcgatttcgtccccttccttgctcattgcgtcaagacaatgtcgcttccgattctgatttcattcccaaagactccgcttttgaggttacggattcagctgagagtaatagattggtttccgatacggaggtttcggaattagagacgaatgatagatttgtgggtggtgaggagacgaaaagtggaggagaagaagcggaggttagtaatggagtaacggaaggtaaggaggaagatcagaagaagagcaagtttaggattgtggtgttgatgatggcactatgggcggctataaagagagctatagagaaggtaatggagtgggaatggttaagctggtggcctttctctcgccaggagaagcggctcgagaaacttattgctgaggctgatgctaatccaaaggacgcagctttgcagggtgctttattggctgagctcaataagcatattcctgaggctgtagttcaacggtttgaacaaagggaacacacagtggatagtagaggagttgctgaatatattcgggctcttgtcattacaaatgctatctcggagtatcttcctgatgaacaaacggggaagccatctagtcttcccgcactgctgcaagagctgaagcatcgtgcatcaggcaatatggacgaatcatttgtgaaccctggtatatctgagaagcaaccactgcatgttaccatggttaatcctaaagtttcaaacaaatcaagatttgcgcaagagcttgtctctacgatcttgttcactgttgcggtgggattagtgtggattatgggtgcagctgctctgcaaaagtatattggaagtcttggaggaattggaacttcgggtgttggttcaagctcttcatattccccaaaagagctgaacaaagaaataacgccagaaaagaatgtcaaaacatttaaggacgtaaagggttgtgatgatgcaaaacaagagctcgaagaggtagttgaatatctcaaaaatccatcaaagtttacccgccttggaggaaagttgccaaagggaattcttctaaccggggcacctggtactggaaagacattgctggccaaagcaattgctggagaagctggagtacccttcttctatagagctggatctgaatttgaagagatgtttgttggggtaggagctcgccgtgtgagatccttgtttcaggcagccaagaagaaggcaccttgtattattttcattgacgaaattgatgctgttggatccacaagaaaacaatgggaagggcatacaaagaagacattgcatcaactacttgttgaaatggatggttttgagcagaatgagggaataatagttatggctgcaacaaacttgcctgatatacttgatccagctctgacaagaccgggtagatttgatagacatattgtcgtacccagtccggatgtccgtggacgcgaagagattttggaactctacctccaaggcaaacctatgtcagaagatgttgatgttaaagcaattgctcgtggaactcctggattcaatggtgctgatcttgcaaacctggtaaatattgctgccataaaagcagctgttgaaggtgctgagaagttatcttctgaacagttggaattcgcaaaggaccgaattgtcatgggcacagagaggaagacaatgttcgtatcagaggactcaaaaaagctcactgcataccatgagagtggtcatgctattgtcgctttaaatacgaaaggtgcgcacccgatccacaaagcgactataatgccacgtggatctgcattgggaatggttacacagttaccttcaaacgatgaaacatcagtgagcaagaggcagttattagctcgtctcgatgtatgtatgggaggaagagttgcagaggagctcatctttggcttggaccatattaccactggagcgagtagcgatctgtcacaggccactgaacttgcacaatacatggtatcgagttgtgggatgagtgaggcaataggaccagttcatataaaagaaagaccaagctctgatatgcaatcacgcattgatgccgaggttgtgaagcttcttagagaagcatatgagagagtgaaatctctcttgaaacggcatgagaagcagctacacacgttagcaaacgcacttctagagtatgaaacgctaaccgcagaggacataaagcgtattctccttccaaagcaggaaggcgagaaatttgaagagcaacaacaagaagaaggagacttggtattggcctaatcacatcattcattaccataaacacacttctttgggtgaaaaagggagattcaaagctttgtacagagtaaatctcccatagcttctacaacaacaaccaaaagaaaaacatatgaaattattgatctcatgttacaaaattattgtagtttttatttcattagctcattagttttcgcttcgaccttgaaccttttgccctttttgacattctgttcaattctatgaagaaaaatgtaaaacaacattgaaaagaaagtaataattgttgtcttt

SEQ ID NO: 8639 - protein, 815 aa, Arabidopsis thaliana
RIQKTLNTPMSSSTLQASLFLRPPLHTSSFKLYPCLFSSSSLSFCPQSLSSFYRLSSVLHNSRFRPLPCSLRQDNVASDSDFIPKDSAFEVTDSAESNRLVSDTEVSELETNDRFVGGEETKSGGEEAEVSNGVTEGKEEDQKKSKFRIVVLMMALWAAIKRAIEKVMEWEWLSWWPFSRQEKRLEKLIAEADANPKDAALQGALLAELNKHIPEAVVQRFEQREHTVDSRGVAEYIRALVITNAISEYLPDEQTGKPSSLPALLQELKHRASGNMDESFVNPGISEKQPLHVTMVNPKVSNKSRFAQELVSTILFTVAVGLVWIMGAAALQKYIGSLGGIGTSGVGSSSSYSPKELNKEITPEKNVKTFKDVKGCDDAKQELEEVVEYLKNPSKFTRLGGKLPKGILLTGAPGTGKTLLAKAIAGEAGVPFFYRAGSEFEEMFVGVGARRVRSLFQAAKKKAPCIIFIDEIDAVGSTRKQWEGHTKKTLHQLLVEMDGFEQNEGIIVMAATNLPDILDPALTRPGRFDRHIVVPSPDVRGREEILELYLQGKPMSEDVDVKAIARGTPGFNGADLANLVNIAAIKAAVEGAEKLSSEQLEFAKDRIVMGTERKTMFVSEDSKKLTAYHESGHAIVALNTKGAHPIHKATIMPRGSALGMVTQLPSNDETSVSKRQLLARLDVCMGGRVAEELIFGLDHITTGASSDLSQATELAQYMVSSCGMSEAIGPVHIKERPSSDMQSRIDAEVVKLLREAYERVKSLLKRHEKQLHTLANALLEYETLTAEDIKRILLPKQEGEKFEEQQQEEGDLVLA

SEQ ID NO: 8640 - protein, 806 aa, Arabidopsis thaliana
MSSSTLQASLFLRPPLHTSSFKLYPCLFSSSSLSFCPQSLSSFYRLSSVLHNSRFRPLPCSLRQDNVASDSDFIPKDSAFEVTDSAESNRLVSDTEVSELETNDRFVGGEETKSGGEEAEVSNGVTEGKEEDQKKSKFRIVVLMMALWAAIKRAIEKVMEWEWLSWWPFSRQEKRLEKLIAEADANPKDAALQGALLAELNKHIPEAVVQRFEQREHTVDSRGVAEYIRALVITNAISEYLPDEQTGKPSSLPALLQELKHRASGNMDESFVNPGISEKQPLHVTMVNPKVSNKSRFAQELVSTILFTVAVGLVWIMGAAALQKYIGSLGGIGTSGVGSSSSYSPKELNKEITPEKNVKTFKDVKGCDDAKQELEEVVEYLKNPSKFTRLGGKLPKGILLTGAPGTGKTLLAKAIAGEAGVPFFYRAGSEFEEMFVGVGARRVRSLFQAAKKKAPCIIFIDEIDAVGSTRKQWEGHTKKTLHQLLVEMDGFEQNEGIIVMAATNLPDILDPALTRPGRFDRHIVVPSPDVRGREEILELYLQGKPMSEDVDVKAIARGTPGFNGADLANLVNIAAIKAAVEGAEKLSSEQLEFAKDRIVMGTERKTMFVSEDSKKLTAYHESGHAIVALNTKGAHPIHKATIMPRGSALGMVTQLPSNDETSVSKRQLLARLDVCMGGRVAEELIFGLDHITTGASSDLSQATELAQYMVSSCGMSEAIGPVHIKERPSSDMQSRIDAEVVKLLREAYERVKSLLKRHEKQLHTLANALLEYETLTAEDIKRILLPKQEGEKFEEQQQEEGDLVLA

SEQ ID NO: 8641 - protein, 663 aa, Arabidopsis thaliana
MMALWAAIKRAIEKVMEWEWLSWWPFSRQEKRLEKLIAEADANPKDAALQGALLAELNKHIPEAVVQRFEQREHTVDSRGVAEYIRALVITNAISEYLPDEQTGKPSSLPALLQELKHRASGNMDESFVNPGISEKQPLHVTMVNPKVSNKSRFAQELVSTILFTVAVGLVWIMGAAALQKYIGSLGGIGTSGVGSSSSYSPKELNKEITPEKNVKTFKDVKGCDDAKQELEEVVEYLKNPSKFTRLGGKLPKGILLTGAPGTGKTLLAKAIAGEAGVPFFYRAGSEFEEMFVGVGARRVRSLFQAAKKKAPCIIFIDEIDAVGSTRKQWEGHTKKTLHQLLVEMDGFEQNEGIIVMAATNLPDILDPALTRPGRFDRHIVVPSPDVRGREEILELYLQGKPMSEDVDVKAIARGTPGFNGADLANLVNIAAIKAAVEGAEKLSSEQLEFAKDRIVMGTERKTMFVSEDSKKLTAYHESGHAIVALNTKGAHPIHKATIMPRGSALGMVTQLPSNDETSVSKRQLLARLDVCMGGRVAEELIFGLDHITTGASSDLSQATELAQYMVSSCGMSEAIGPVHIKERPSSDMQSRIDAEVVKLLREAYERVKSLLKRHEKQLHTLANALLEYETLTAEDIKRILLPKQEGEKFEEQQQEEGDLVLA

SEQ ID NO: 8642 - DNA, 1084 bp, Arabidopsis thaliana
tcttcttcgatcttcttcctctcgtcaggtttcgtggttctaatcctcgttttattctttctccaaggaagatggctctaaaggagcagctagataaattcaacaaacagcaagtgaaatgccaatctactctttcgagcattgcttcttcaagagaaagaacgagttcttcgaggcagaatgtgcctttgcctgcggcaatcactcagaagaagcctgatgcagctcctgtcaagttttcaagcgataccgagcgacttcagaacattaacaacattagaaaagctcctgttggagctcaaatcaagcgtgtcattgatcttctctatgagagaaggctagccttgacgccagagcaaataaatgaatggtgtcatgtagatatgcatgctaataaggctgtttttgatagtttaaggaagaatccgaaagcgcattatgatggaagaaggttctcttataaggctacgcacgatgttaatgataagaaccagcttctttcgttggtgagaaaataccttgatgggattgcggtggttgatctcaaagacgcttacccgaatgtaatggaggatttgaaggctctgagtgcttcaggggacatctacttgctatcaaattcacaagaggacattgcatacccaaatgatttcaagtgtgagattaaggttgatgacgaatttaaagctctattccgtgacataaacatcccgaacgacatgctggacgtggagaaggagctgctgaaaatcggtttgaagccggcgacaaacactgcggagaggagagctgctgcacagacccatggcatatcgaataaaccgaaggataagaagaagaagaaacaagagatcagcaagagaaccaaactcaccaatgcccatcttcccgagcttttccagaaccttaacggcagcagttcccggaactgaacctcataaatggatgatcatgcggttctaaattcaaattgagcctgaattttcttgtaattgtaattgttactatcttgagtttacaaattacaatggttctcatgtattctcacgacatttgctagaaatatagaataaacacatttgtg

SEQ ID NO: 8643 - protein, 309 aa, Arabidopsis thaliana
FFDLLPLVRFRGSNPRFILSPRKMALKEQLDKFNKQQVKCQSTLSSIASSRERTSSSRQNVPLPAAITQKKPDAAPVKFSSDTERLQNINNIRKAPVGAQIKRVIDLLYERRLALTPEQINEWCHVDMHANKAVFDSLRKNPKAHYDGRRFSYKATHDVNDKNQLLSLVRKYLDGIAVVDLKDAYPNVMEDLKALSASGDIYLLSNSQEDIAYPNDFKCEIKVDDEFKALFRDINIPNDMLDVEKELLKIGLKPATNTAERRAAAQTHGISNKPKDKKKKKQEISKRTKLTNAHLPELFQNLNGSSSRN

SEQ ID NO: 8644 - protein, 286 aa, Arabidopsis thaliana
MALKEQLDKFNKQQVKCQSTLSSIASSRERTSSSRQNVPLPAAITQKKPDAAPVKFSSDTERLQNINNIRKAPVGAQIKRVIDLLYERRLALTPEQINEWCHVDMHANKAVFDSLRKNPKAHYDGRRFSYKATHDVNDKNQLLSLVRKYLDGIAVVDLKDAYPNVMEDLKALSASGDIYLLSNSQEDIAYPNDFKCEIKVDDEFKALFRDINIPNDMLDVEKELLKIGLKPATNTAERRAAAQTHGISNKPKDKKKKKQEISKRTKLTNAHLPELFQNLNGSSSRN

SEQ ID NO: 8645 - protein, 182 aa, Arabidopsis thaliana
MHANKAVFDSLRKNPKAHYDGRRFSYKATHDVNDKNQLLSLVRKYLDGIAVVDLKDAYPNVMEDLKALSASGDIYLLSNSQEDIAYPNDFKCEIKVDDEFKALFRDINIPNDMLDVEKELLKIGLKPATNTAERRAAAQTHGISNKPKDKKKKKQEISKRTKLTNAHLPELFQNLNGSSSRN

SEQ ID NO: 8646 - DNA, 1391 bp, Arabidopsis thaliana
atggaagaattagaaaaaacccagaaatttcagaagaagaagaagcaacaacaagagaaacaagaccagtcttcaccaatcaacttcgagatgtcttcaagatcatcacttcattcattaccacaaacaacgattgaatcacctcctgattcaccaaccctctcttcaatccccgatagccatggatcttctcctcacacgattattccaactccttctgtggccaagacggagactccttttagggttactaacggagaggaggagaagaaagtcagcgagagtaggagacaattgagaccgagcttttcttcttcttcttctactccgcgtgaatcgaaatgggcaagtttgattaggaaagctctacttggatttagggttattgcgtttgtttcgtgtcttgtttcgttctctgtaatggtttctgatagagataaaggatgggctcatgattctttctacaactacaaagaattcaggttctgtttggctgcgaatgtgattggttttgtctactctggttttatgatatgtgatcttgtatacctgttatctactagcatccgaagatcacgacataacctgcgacatttcttggaatttggtcttgatcaaatgctagcttatcttcttgcatcagcttcaacttcagcttcgatccgcgtagatgattggcaatcaaactggggagcagacaagttcccagacttagctagagcatctgtcgcactgtcttacgtctcctttgtcgcattcgccttctgctcattggcttccggttatgctctatgtgcactccggtccatctaaactaaacaagcgcaagctcgagacaaaaagtctcattttgtctactctcagaagttgtatccttgaccctaaacgggtccagtttctgatttttagaagaaacttttattttatatagtggagaatattccatcttgttaaaagatggtgcgaatgctcgtttatacatcactttatctatttcactttttattatatagttctaagaaaagctatatgatgctatcttctccccaaaaaaaaaaaaaaaaaaatcaagaattcgcacgagaccattacctagaacatcctaatcaaaaaaattgggttattagtacgaattttataatgagtgtgccataatttacctaaaaaagaaaaaaaaagaaaaaaagagtgttgtatgtacgtgtgtttgacttggataattagtgacattttaagcaaatgtgtatttggaaaagtgatgtcaatgaaatatgaatatgggtcgaataaagaagcgaagatccgtagactgttgcttctctgcatctgttgttgtattcccgatcatattgttgtatgtttataatttattaaaagcaaattgtcttccc

SEQ ID NO: 8647 - protein, 270 aa, Arabidopsis thaliana
MEELEKTQKFQKKKKQQQEKQDQSSPINFEMSSRSSLHSLPQTTIESPPDSPTLSSIPDSHGSSPHTIIPTPSVAKTETPFRVTNGEEEKKVSESRRQLRPSFSSSSSTPRESKWASLIRKALLGFRVIAFVSCLVSFSVMVSDRDKGWAHDSFYNYKEFRFCLAANVIGFVYSGFMICDLVYLLSTSIRRSRHNLRHFLEFGLDQMLAYLLASASTSASIRVDDWQSNWGADKFPDLARASVALSYVSFVAFAFCSLASGYALCALRSI

SEQ ID NO: 8648 - protein, 240 aa, Arabidopsis thaliana
MSSRSSLHSLPQTTIESPPDSPTLSSIPDSHGSSPHTIIPTPSVAKTETPFRVTNGEEEKKVSESRRQLRPSFSSSSSTPRESKWASLIRKALLGFRVIAFVSCLVSFSVMVSDRDKGWAHDSFYNYKEFRFCLAANVIGFVYSGFMICDLVYLLSTSIRRSRHNLRHFLEFGLDQMLAYLLASASTSASIRVDDWQSNWGADKFPDLARASVALSYVSFVAFAFCSLASGYALCALRSI

SEQ ID NO: 8649 - DNA, 1304 bp, Arabidopsis thaliana
aaacctaaatttctctactcaataatgtctcacagaaagtttgagcatccaagacatggttctttgggtttccttccaaggaaaagagctagccgacaccgtgggaaagtgaaggccttccctaaggatgatccaactaagccttgcagactcacctccttcttgggatacaaagctgggatgactcacattgtgagagatgttgaaaaacctggatcaaaactacacaagaaggaaacatgtgaagctgtgacgatcattgagacacctccaatggtggttgtaggtgtggttggttatgtaaagacacctcgtggtctgcggtctctatgcactgtgtgggctcagcatctgagcgaagaattgagaaggaggttctacaagaactgggccaagtcaaagaagaaggctttcactagatattctaagaaacatgaaactgaagaagggaaaaaagatattcaaagtcaattggagaagatgaagaagtactgctctgtcatcagagttcttgctcacactcagataaggaaaatgaaagggctgaagcagaagaaggcacatctgaatgagattcagatcaatggtggagatatagcaaagaaagttgactatgcctgcagtttatttgaaaaacaagtcccagttgatgccatcttccagaaagatgaaatgattgatatcattggtgtcaccaaaggaaaaggttatgaaggtgtggttacaagatggggagtgacccgacttccaagaaagactcatcgtggtcttcgcaaggttgcttgtatcggtgcttggcatccagctagagtctcctacacggtggctagagctggacaaaacggttaccatcaccgtactgaaatgaacaagaaggtataccgggttgggaaagttggccaggagactcactcagccatgaccgagtatgacagaaccgagaaggatatcacaccaatgggaggatttccccactatgggatagtgaaggaagattatttgatgatcaagggatgttgcgtggggcctaagaaacgtgtggtgactttaagacagactttgcttaagcagacgtctaggcttgctatggaggagatcaagcttaagttcattgacgctgcttccaatgggggacacggtcgtttccagacttctcaagagaaggccaagttctatggtagaaccatcaaagcttagatttctaagtattttgttgttttttgagttttttctttggtgtttgtcggatttctcttgacagttgatatcaattatctttttttttttttaatctggatattatc

SEQ ID NO: 8650 - protein, 398 aa, Arabidopsis thaliana
KPKFLYSIMSHRKFEHPRHGSLGFLPRKRASRHRGKVKAFPKDDPTKPCRLTSFLGYKAGMTHIVRDVEKPGSKLHKKETCEAVTIIETPPMVVVGVVGYVKTPRGLRSLCTVWAQHLSEELRRRFYKNWAKSKKKAFTRYSKKHETEEGKKDIQSQLEKMKKYCSVIRVLAHTQIRKMKGLKQKKAHLNEIQINGGDIAKKVDYACSLFEKQVPVDAIFQKDEMIDIIGVTKGKGYEGVVTRWGVTRLPRKTHRGLRKVACIGAWHPARVSYTVARAGQNGYHHRTEMNKKVYRVGKVGQETHSAMTEYDRTEKDITPMGGFPHYGIVKEDYLMIKGCCVGPKKRVVTLRQTLLKQTSRLAMEEIKLKFIDAASNGGHGRFQTSQEKAKFYGRTIKA

SEQ ID NO: 8651 - protein, 390 aa, Arabidopsis thaliana
MSHRKFEHPRHGSLGFLPRKRASRHRGKVKAFPKDDPTKPCRLTSFLGYKAGMTHIVRDVEKPGSKLHKKETCEAVTIIETPPMVVVGVVGYVKTPRGLRSLCTVWAQHLSEELRRRFYKNWAKSKKKAFTRYSKKHETEEGKKDIQSQLEKMKKYCSVIRVLAHTQIRKMKGLKQKKAHLNEIQINGGDIAKKVDYACSLFEKQVPVDAIFQKDEMIDIIGVTKGKGYEGVVTRWGVTRLPRKTHRGLRKVACIGAWHPARVSYTVARAGQNGYHHRTEMNKKVYRVGKVGQETHSAMTEYDRTEKDITPMGGFPHYGIVKEDYLMIKGCCVGPKKRVVTLRQTLLKQTSRLAMEEIKLKFIDAASNGGHGRFQTSQEKAKFYGRTIKA

SEQ ID NO: 8652 - protein, 338 aa, Arabidopsis thaliana
MTHIVRDVEKPGSKLHKKETCEAVTIIETPPMVVVGVVGYVKTPRGLRSLCTVWAQHLSEELRRRFYKNWAKSKKKAFTRYSKKHETEEGKKDIQSQLEKMKKYCSVIRVLAHTQIRKMKGLKQKKAHLNEIQINGGDIAKKVDYACSLFEKQVPVDAIFQKDEMIDIIGVTKGKGYEGVVTRWGVTRLPRKTHRGLRKVACIGAWHPARVSYTVARAGQNGYHHRTEMNKKVYRVGKVGQETHSAMTEYDRTEKDITPMGGFPHYGIVKEDYLMIKGCCVGPKKRVVTLRQTLLKQTSRLAMEEIKLKFIDAASNGGHGRFQTSQEKAKFYGRTIKA

SEQ ID NO: 8653 - DNA, 1758 bp, Arabidopsis thaliana
aaagcttaacaacctccactagagactttcttgagcaaaaaagattggttataaaggaccaaccattgtcatgttattgagtgtcatttttgtgagggagagaattaagagagcaaaatgagcataaataggaatctgttgaatatcataataatcctttgtatatgtctcaatttgggttgtaacgatggagctcaagaaagagagactgattctcatactatccaagtcagctctctcctcccttcatcatcatcatcttgtgttctttctcccagagcgtctactacaaagtcttcactgcacgtgacgcatagacacggcacgtgttcgcgtctaaacaatggcaaggccacgagtccagaccatgtcgagatcctaagactcgaccaggctcgcgtaaactcaatccactcaaaactatcgaagaaactcgcaacagatcacgtcagtgaaagcaagtcaacggatctaccggctaaagacggaagcacactcggttcaggtaactacatcgtgacggtcggcctcgggacaccaaagaacgatctatcactaatcttcgacactggaagcgatttaacgtggactcagtgtcagccatgtgttcgaacttgctatgaccagaaggaaccaatctttaacccttctaagtctacttcttactacaacgtatcctgctcatcggctgcgtgtggttctctctcttctgctacaggaaacgccggaagctgttcggcttcgaattgcatctacggtattcaatacggcgatcaatcgttctccgtcggatttctcgccaaggagaagtttacactaacgaactccgacgtatttgacggcgtttatttcggttgcggcgagaacaaccaaggacttttcaccggtgtcgccggacttctcggtcttggtcgtgacaagctttcgtttccgtcgcagacggcaacggcttacaataagatcttctcttactgcctcccttcctccgctagctacaccggacatctcacattcggatccgccggaatctccagatccgttaaattcacaccaatttcaaccatcactgatggaacttccttctacggccttaatatcgtcgcaatcaccgtcggcggtcagaaattgccgattccttcaactgtattctctactccgggagctttaatcgattccggcaccgttatcactcgtctcccgccgaaagcctacgcggcgttaagaagctcgttcaaggcgaagatgtcaaagtatccgaccacgtcgggcgtctcgatcttggacacgtgtttcgatctcagcgggtttaagacggtgactatcccgaaagtggcgttctctttcagcggtggcgccgtcgtggagcttggttcgaaagggatattttacgtgtttaagatatctcaggtttgtctggcgtttgcagggaatagcgatgacagtaacgctgccatctttggaaacgttcagcagcaaacgctagaagttgtgtatgatggtgcgggtgggcgggtcgggtttgctccaaacgggtgtagttaagttagttaatgaaaaacagaacggggtaaattttaaatttatggatttggcacaaattagctttatccttaatcaagtgtgtaatttgggtaaagatcggaattcgtgatggtctttgaagtaattgtatagtaataagtttgtgtgcatgatacaacaattacaagaacaaactgtttattgtaaaattttattccaatacaactatacaagatg

SEQ ID NO: 8654 - protein, 474 aa, Arabidopsis thaliana
MSINRNLLNIIIILCICLNLGCNDGAQERETDSHTIQVSSLLPSSSSSCVLSPRASTTKSSLHVTHRHGTCSRLNNGKATSPDHVEILRLDQARVNSIHSKLSKKLATDHVSESKSTDLPAKDGSTLGSGNYIVTVGLGTPKNDLSLIFDTGSDLTWTQCQPCVRTCYDQKEPIFNPSKSTSYYNVSCSSAACGSLSSATGNAGSCSASNCIYGIQYGDQSFSVGFLAKEKFTLTNSDVFDGVYFGCGENNQGLFTGVAGLLGLGRDKLSFPSQTATAYNKIFSYCLPSSASYTGHLTFGSAGISRSVKFTPISTITDGTSFYGLNIVAITVGGQKLPIPSTVFSTPGALIDSGTVITRLPPKAYAALRSSFKAKMSKYPTTSGVSILDTCFDLSGFKTVTIPKVAFSFSGGAVVELGSKGIFYVFKISQVCLAFAGNSDDSNAAIFGNVQQQTLEVVYDGAGGRVGFAPNGCS

SEQ ID NO: 8655 - DNA, 1107 bp, Arabidopsis thaliana
aactcggtccgagtcgactcggtccgacaagcgattttcgtgactccgtcgtcaccacgcctatgttaagtgagtaaatccgactcttctccgtagagatttctcctactttcaggctctcttgtgaatttggaagacatgagctttgttttccggggaagtagaggagatttagaaagcggattctcgggtggttttctacccgaaagacgagctatgcgtgttcatggagctcgaccagttaattctaattccctcgcttttctggttacagttcttttgctgtttatgattctcaattcgcatcagatgcctcctaatttcctgctgtggcttgtgcttggggtgtttttgatggcaacgacgcttaggatgtatgctacttgccaacaacttcaagctcatgctcaggctcaggctgcagcagcaagtggcctctttagccatactgagctgaggttgcatgtgcctccttccattgctcttgctacgagagggcgtcttcagggacttaggctccagctggctcttcttgatcgggaatttgatgacttagattatgaaactttaagagcacttgattctgataatgtttccacaacttctatgagcgaggaagagataaatgcacttccagttcacaagtacaaggtgttggatcctgaaaatggttgctctttggcaaagcaagcgtcaacctcatcctcagctgagaagatgctagattctgccaatgaaagtaaaaaaggaacagaagatgagctcacatgtagtgtttgcctagaacaagttaccgtaggggaaatcgttcgcaccttaccttgtttgcatcagtttcatgcaggatgtatcgatccatggttgagacagcaaggaacatgtcctgtctgtaaatttagagctcattcaggatggcaagaacaagatgagattgatgatgatgcttccgacatggtttgaaaagtttggtttcgaacacttgtttatgttattaatgtgcgtgcgaattaaaccccaaacaaatcatgtaatggtcaataactcaatatgatgtaactgatgactctccctttccaaaagtttgatttagattcatcatgaaaaagt

SEQ ID NO: 8656 - protein, 273 aa, Arabidopsis thaliana
MSFVFRGSRGDLESGFSGGFLPERRAMRVHGARPVNSNSLAFLVTVLLLFMILNSHQMPPNFLLWLVLGVFLMATTLRMYATCQQLQAHAQAQAAAASGLFSHTELRLHVPPSIALATRGRLQGLRLQLALLDREFDDLDYETLRALDSDNVSTTSMSEEEINALPVHKYKVLDPENGCSLAKQASTSSSAEKMLDSANESKKGTEDELTCSVCLEQVTVGEIVRTLPCLHQFHAGCIDPWLRQQGTCPVCKFRAHSGWQEQDEIDDDASDMV

SEQ ID NO: 8657 - protein, 247 aa, Arabidopsis thaliana
MRVHGARPVNSNSLAFLVTVLLLFMILNSHQMPPNFLLWLVLGVFLMATTLRMYATCQQLQAHAQAQAAAASGLFSHTELRLHVPPSIALATRGRLQGLRLQLALLDREFDDLDYETLRALDSDNVSTTSMSEEEINALPVHKYKVLDPENGCSLAKQASTSSSAEKMLDSANESKKGTEDELTCSVCLEQVTVGEIVRTLPCLHQFHAGCIDPWLRQQGTCPVCKFRAHSGWQEQDEIDDDASDMV

SEQ ID NO: 8658 - protein, 223 aa, Arabidopsis thaliana
MILNSHQMPPNFLLWLVLGVFLMATTLRMYATCQQLQAHAQAQAAAASGLFSHTELRLHVPPSIALATRGRLQGLRLQLALLDREFDDLDYETLRALDSDNVSTTSMSEEEINALPVHKYKVLDPENGCSLAKQASTSSSAEKMLDSANESKKGTEDELTCSVCLEQVTVGEIVRTLPCLHQFHAGCIDPWLRQQGTCPVCKFRAHSGWQEQDEIDDDASDMV

SEQ ID NO: 8659 - DNA, 1289 bp, Arabidopsis thaliana
aaaaaaaaaaataatctgaagcagccatggagatagccgccgttagcactgtctccgtcgcgccacaatcgcgcagagtgtcgaatgcgttctccaggaatctaggatccgtatcttctctttcgtttggtttctttgagaaagaatattgctttaagagccctagccttcgtgtgtctgcagcagcttccatggacgccgtcacagctgagaaattttctccggcgagttttctagacaaaaaagaaaccggagttcttcactttgtgaaataccatggcctcggcaatgacttcattttggtcgataacagagactcatcggaacctaagattactcaagaacaggcggcgaagctgtgtgatcgaaacttcggtgttggtgccgatggagtgatttttgcaatgccaggagtcaatggtactgattacgcaatgcggattttcaattcagatggtagtgaaccagagatgtgtggcaatggagttcgatgctttgctaggttcattgctgagcttgagaatttgcagggaaaacatagttttacaatacataccggtgccgggttgattgttccagaaattcaagatgacggacaggttaaggttgacatggggacaccgattcttaaagcacaagatgtgcccacgaaattgtcagggaacaaaggtgaagctgttgttgaggcagagctagttgttgatggagtaagctggaatgtgacgtgtgttagtatgggcaatcctcactgtatcacatttggtaaaaagggtggaccgaatctgaaagttgatgatttgaacttaccagagattggtccaaagttcgagcatcatgaaatgttcccagctcgaactaacacagaatttgttgaggtcttatcacgttctcatttgaaaatgcgtgtgtgggagcgcggagcaggagcaactttggcctgtggaactggagcttgtgctctggttgttgcagcagtccttgaaggtcgagccgacaggaaatgcacggtggatctaccgggcggaccattggagatagagtggaaacaggaagacaaccatatctacatgacgggtcctgcagaagctgttttctatggatcagcgctgctctaatgggccttcacagtcgatgacttctcctctctctgttgttgttcttttggggtctgtgtgttctaattcaaacgtgtgaagctcttacctgtcctgctagattgtgtttcatggattttgtttatgtacttttattgttttcagagtatccaaaccttttgatttgttgctgct

SEQ ID NO: 8660 - protein, 362 aa, Arabidopsis thaliana
MEIAAVSTVSVAPQSRRVSNAFSRNLGSVSSLSFGFFEKEYCFKSPSLRVSAAASMDAVTAEKFSPASFLDKKETGVLHFVKYHGLGNDFILVDNRDSSEPKITQEQAAKLCDRNFGVGADGVIFAMPGVNGTDYAMRIFNSDGSEPEMCGNGVRCFARFIAELENLQGKHSFTIHTGAGLIVPEIQDDGQVKVDMGTPILKAQDVPTKLSGNKGEAVVEAELVVDGVSWNVTCVSMGNPHCITFGKKGGPNLKVDDLNLPEIGPKFEHHEMFPARTNTEFVEVLSRSHLKMRVWERGAGATLACGTGACALVVAAVLEGRADRKCTVDLPGGPLEIEWKQEDNHIYMTGPAEAVFYGSALL

SEQ ID NO: 8661 - protein, 307 aa, Arabidopsis thaliana
MDAVTAEKFSPASFLDKKETGVLHFVKYHGLGNDFILVDNRDSSEPKITQEQAAKLCDRNFGVGADGVIFAMPGVNGTDYAMRIFNSDGSEPEMCGNGVRCFARFIAELENLQGKHSFTIHTGAGLIVPEIQDDGQVKVDMGTPILKAQDVPTKLSGNKGEAVVEAELVVDGVSWNVTCVSMGNPHCITFGKKGGPNLKVDDLNLPEIGPKFEHHEMFPARTNTEFVEVLSRSHLKMRVWERGAGATLACGTGACALVVAAVLEGRADRKCTVDLPGGPLEIEWKQEDNHIYMTGPAEAVFYGSALL

SEQ ID NO: 8662 - protein, 236 aa, Arabidopsis thaliana
MPGVNGTDYAMRIFNSDGSEPEMCGNGVRCFARFIAELENLQGKHSFTIHTGAGLIVPEIQDDGQVKVDMGTPILKAQDVPTKLSGNKGEAVVEAELVVDGVSWNVTCVSMGNPHCITFGKKGGPNLKVDDLNLPEIGPKFEHHEMFPARTNTEFVEVLSRSHLKMRVWERGAGATLACGTGACALVVAAVLEGRADRKCTVDLPGGPLEIEWKQEDNHIYMTGPAEAVFYGSALL

SEQ ID NO: 8663 - DNA, 1335 bp, Arabidopsis thaliana
ctaacatcctaatcgaaaaatttttctagggttttatttttttttaatttattttttttctttgatttttatattctctctctctctcaaatctttactcatctgggtatggaagaataccagcatgacaacagcaccactcctcaaagagtaagtttcttgtactctccaatctcttcttccaacaaaaacgataacacaagtgataccaacaacaacaacaacaataataatagtagcaattatggtcctggttacaataatactaacaacaacaatcatcaccaccaacacatgttgtttccacatatgagctctcttctccctcaaacaaccgagaattgcttccgatctgatcatgatcaacccaacaacaacaacaacccatctgttaaatctgaagctagctcctcaagaatcaatcattactccatgttaatgagagccatccacaatactcaagaagctaacaacaacaacaatgacaacgtaagcgatgttgaagccatgaaggctaaaatcattgctcatcctcactactctaccctcctacaagcttacttggactgccaaaagattggagctccacctgatgtggttgatagaattacggcggcacggcaagactttgaggctcgacaacagcggtcaacaccgtctgtctctgcctcctctagagacccggagttagatcaattcatggaagcatactgtgacatgttggttaaatatcgtgaggagctaacaaggcccattcaggaagcaatggagtttatacgtcgtattgaatctcagcttagcatgttgtgtcagagtcccattcacatcctcaacaatcctgatgggaagagtgacaatatgggatcatcagacgaagaacaagagaataacagcggaggggaaacagaattaccggaaatagacccgagggccgaagatcgggaactcaagaaccatttgctgaagaagtatagtggatacttaagcagtttgaagcaagaactatccaagaagaaaaagaaaggtaaacttcctaaagaagcacggcagaagcttctcacgtggtgggagttgcattacaagtggccatatccttctgagtcagagaaggtagcgttggcggaatcaacggggttagatcagaaacaaatcaacaattggttcataaaccaaagaaagcgtcactggaaaccatctgaagacatgcagttcatggtgatggatggtctgcagcacccgcaccacgcagctctgtacatggatggtcattacatgggtgatggaccttatcgtctcggtccataagacatccaaaagctttagccacataataac

SEQ ID NO: 8664 - protein, 398 aa, Arabidopsis thaliana
MEEYQHDNSTTPQRVSFLYSPISSSNKNDNTSDTNNNNNNNNSSNYGPGYNNTNNNNHHHQHMLFPHMSSLLPQTTENCFRSDHDQPNNNNNPSVKSEASSSRINHYSMLMRAIHNTQEANNNNNDNVSDVEAMKAKIIAHPHYSTLLQAYLDCQKIGAPPDVVDRITAARQDFEARQQRSTPSVSASSRDPELDQFMEAYCDMLVKYREELTRPIQEAMEFIRRIESQLSMLCQSPIHILNNPDGKSDNMGSSDEEQENNSGGETELPEIDPRAEDRELKNHLLKKYSGYLSSLKQELSKKKKKGKLPKEARQKLLTWWELHYKWPYPSESEKVALAESTGLDQKQINNWFINQRKRHWKPSEDMQFMVMDGLQHPHHAALYMDGHYMGDGPYRLGP

SEQ ID NO: 8665 - protein, 336 aa, Arabidopsis thaliana
MLFPHMSSLLPQTTENCFRSDHDQPNNNNNPSVKSEASSSRINHYSMLMRAIHNTQEANNNNNDNVSDVEAMKAKIIAHPHYSTLLQAYLDCQKIGAPPDVVDRITAARQDFEARQQRSTPSVSASSRDPELDQFMEAYCDMLVKYREELTRPIQEAMEFIRRIESQLSMLCQSPIHILNNPDGKSDNMGSSDEEQENNSGGETELPEIDPRAEDRELKNHLLKKYSGYLSSLKQELSKKKKKGKLPKEARQKLLTWWELHYKWPYPSESEKVALAESTGLDQKQINNWFINQRKRHWKPSEDMQFMVMDGLQHPHHAALYMDGHYMGDGPYRLGP

SEQ ID NO: 8666 - protein, 331 aa, Arabidopsis thaliana
MSSLLPQTTENCFRSDHDQPNNNNNPSVKSEASSSRINHYSMLMRAIHNTQEANNNNNDNVSDVEAMKAKIIAHPHYSTLLQAYLDCQKIGAPPDVVDRITAARQDFEARQQRSTPSVSASSRDPELDQFMEAYCDMLVKYREELTRPIQEAMEFIRRIESQLSMLCQSPIHILNNPDGKSDNMGSSDEEQENNSGGETELPEIDPRAEDRELKNHLLKKYSGYLSSLKQELSKKKKKGKLPKEARQKLLTWWELHYKWPYPSESEKVALAESTGLDQKQINNWFINQRKRHWKPSEDMQFMVMDGLQHPHHAALYMDGHYMGDGPYRLGP

SEQ ID NO: 8667 - DNA, 732 bp, Arabidopsis thaliana
agaacatcctaatcaaaaaataaaaagtagtactcgtatcttactcgtgccagccactcgcatttctccagattttattatccttcctcgaaacaagagcttagctaagatgacgaagaactacccaaccgtgagcgaagattacaagaaggctgttgagaagtgcaggaggaagctcagaggtttgatcgctgagaagaactgtgcacccatcatggtccgactcgcatggcactctgctggaactttcgattgtcaatcaaggactggaggtccattcggaacaatgaggtttgacgctgagcaagctcatggagccaacagtggtatccacattgctcttaggttgttggaccccatcagggagcaattccctaccatctcttttgctgatttccatcagcttgctggtgttgtggccgttgaagttactggtggccctgacattcctttccaccctggaagagaggacaagccccaaccacctccagagggtcgtcttcctgatgcttaagctgtgacgtatgctctgtgtgtgtgtgtgtgtctccccgagagtcatggctgtttttggttgggggctggaggggtcgcattgcatttgaactttgtcatatgattgcttaatgtactctcggatttacgtatctgtttttttcggtgggttgtgatttgaacacatccgttgcgcttttgctgcttagacacattaataaaattaatttctctcgc

SEQ ID NO: 8668 - protein, 170 aa, Arabidopsis thaliana
EHPNQKIKSSTRILLVPATRISPDFIILPRNKSLAKMTKNYPTVSEDYKKAVEKCRRKLRGLIAEKNCAPIMVRLAWHSAGTFDCQSRTGGPFGTMRFDAEQAHGANSGIHIALRLLDPIREQFPTISFADFHQLAGVVAVEVTGGPDIPFHPGREDKPQPPPEGRLPDA

SEQ ID NO: 8669 - protein, 134 aa, Arabidopsis thaliana
MTKNYPTVSEDYKKAVEKCRRKLRGLIAEKNCAPIMVRLAWHSAGTFDCQSRTGGPFGTMRFDAEQAHGANSGIHIALRLLDPIREQFPTISFADFHQLAGVVAVEVTGGPDIPFHPGREDKPQPPPEGRLPDA

SEQ ID NO: 8670 - protein, 99 aa, Arabidopsis thaliana
MVRLAWHSAGTFDCQSRTGGPFGTMRFDAEQAHGANSGIHIALRLLDPIREQFPTISFADFHQLAGVVAVEVTGGPDIPFHPGREDKPQPPPEGRLPDA

SEQ ID NO: 8671 - DNA, 647 bp, Arabidopsis thaliana
aacatcctaatcgaaaaccggcgccaccattaaaatctctcgatctctatctgcgaaatttcacggtaggtatttgaaatggcgacagttccaggacaattgatctgggagatcgtgaagaacaacaactgtttcttggtgaagcagttcggtagaggaaactctaaggttcaattcagcaaggagactaacaacctcaccaacgttcactcttacaagcactctggtcttgcaaacaaaaagactgtgaccatccaggccgctgacaaggaccaagctgttgtgctcgccaccaccaagaccaagaagcagaacaagcctaagctctctgtcaacaagtctatcctcaagaaggaattccccaggatgtcaaaggctgttgctaaccaggtggtggacaactactacaggccggacttgaagaaagctgcacttgctagactcagcgccatcagcaaaggtctcagggttgccaagtccggtgccaagcaaagaaacagacaagcttaagcttcttctttcacaatctgttttttttgaagtaaaagattttgttgaacaggttttatttaagttgttgctttgaagttgaaccataatgctattctcctttttcattatccttattataaaggagttagaagttt

SEQ ID NO: 8672 - protein, 143 aa, Arabidopsis thaliana [sequence omitted]

SEQ ID NO: 8673 - DNA, 2300 bp, Arabidopsis thaliana
atgacctacatatatagagacacaaagatcacaacaaaatcaaccattcctttccttatcttcttcctcttttgcttttctaatctctcaatggctaccttaaaacacaaacctgtaaatttggtattttacgtttataatttgattattatattctcctcccatagttccacggcggagctccgcaggctactgcagccatcaaaaaccgatggtacagtgagctttctcgttatcggagactggggaagaagaggctcctataatcagtcccaagtagctcttcagatgggagaaatcggagagaaattagatatcgattttgtgatttctactggagataatttttacgacaatggtttaaccagcttgcacgatcctctatttcaagattcttttaccaacatttataccgctccgagcttgcagaaaccttggtatagtgttttaggaaatcatgattatagaggtgacgtcagggcacaacttagccctatgctcagagctctggacaacagatgggtttgcatgagatctttcattgtaaatgctgagatcgtcgatttgttcttcgtcgacacaactccgttcgtcgataaatactttattcaaccaaataagcatgtttatgactggagcggtgtattacctaggcaaacatatctgaataatctcttaaaggaactcgacgtggcgttgagagagtcagtcgcaaagtggaaaatagtgattggtcaccatacgatcaaaagcgcaggccaccacgggaacaccattgagttggagaaacaccttttacctattctccaagcaaatgaagtggatctctacgtaaacggacatgatcattgcttagagcacataagcagcgtggacagtaacatacaatttatgacaagtggaggtggatccaaggcctggaaaggaggtgacgtgaactacgttgaaccagaagagatgaggttttactacgacggacaaggtttcatgtcggttcacgtttcagaagctgaactgcgtgtagtcttttatgatgtttttggacacgttctgcatcattggaagaagacttacaaggaggcgctttatttcgcttcttgattccaatttaatcggacgtaattgtttatgatcgatgtactatgaaattatcaatatcgtacttcgtccaaaaaaaaaaaaaaaaaagcttctcgtgccgttttttttttttttttttggactaaaaacttaattaacataaaaaaccaaaccaatggtttcagtaaataaagcagggaaacattaagagaaagcaaaaagacaaaagctacaaactctcatgactgcgcatggaatcagtgaaaaaacataacaactcgagttttcttttctccttttttttattcagaacagtacgaactcaaccacacacaaactctcgccggtgtaagcttaggcctttgacatgtgaacgataaggtcaacgacacgagaactgtaaccccattcgttgtcgtaccatgacaccaacttcacaaacttgtcgctcaatgcaatcccagccttggcatcgaaaatgcttgacctgttgtcaccaacaaagtcggtagacacaacatcatcctcagtgtatcccaaaattcccttcattttgccttcagattcctccttgatggccttcttgatttcgtcgtatgttgcagctgtcgctcgtctacatttacactcggagcttagaccttccaatctaccggcggcgaaaatgggtttcaagaggtacgttgagatcgggagagtagcacttgtgaactacggagaagatcatggaaagctcgtcgttatcgtcgacgttgttgaccagaacagagctttggtggatgcccctgatatggagaggatccagatgaacttcaagaggttgtctcttaccgatattgtcattgacatcaaccgtgtgccaaagaagaaggctttgatcgaggcaatggaaaaggctgatgtgaagaacaagtgggagaaaagctcatggggtaggaagcttatcgtgcagaaacgtagggctaaccttaacgactttgataggttcaagatcatgttggccaagatcaagaaagctggtgttgtcaggcaagagcttgcaaaactcaagaaggagatcactgcctgatcaaatattatctacaattctgttgtctttcttttttgattttggattcggaaattagtgtttttggaactatcaatatcagtatgtgctcaattatcagacattattcaagtttgaaaccttgtttgcaaaactcaaagttttttgttcc

SEQ ID NO: 8674 - protein, 366 aa, Arabidopsis thaliana
MTYIYRDTKITTKSTIPFLIFFLFCFSNLSMATLKHKPVNLVFYVYNLIIIFSSHSSTAELRRLLQPSKTDGTVSFLVIGDWGRRGSYNQSQVALQMGEIGEKLDIDFVISTGDNFYDNGLTSLHDPLFQDSFTNIYTAPSLQKPWYSVLGNHDYRGDVRAQLSPMLRALDNRWVCMRSFIVNAEIVDLFFVDTTPFVDKYFIQPNKHVYDWSGVLPRQTYLNNLLKELDVALRESVAKWKIVIGHHTIKSAGHHGNTIELEKHLLPILQANEVDLYVNGHDHCLEHISSVDSNIQFMTSGGGSKAWKGGDVNYVEPEEMRFYYDGQGFMSVHVSEAELRVVFYDVFGHVLHHWKKTYKEALYFAS

SEQ ID NO: 8675 - protein, 336 aa, Arabidopsis thaliana
MATLKHKPVNLVFYVYNLIIIFSSHSSTAELRRLLQPSKTDGTVSFLVIGDWGRRGSYNQSQVALQMGEIGEKLDIDFVISTGDNFYDNGLTSLHDPLFQDSFTNIYTAPSLQKPWYSVLGNHDYRGDVRAQLSPMLRALDNRWVCMRSFIVNAEIVDLFFVDTTPFVDKYFIQPNKHVYDWSGVLPRQTYLNNLLKELDVALRESVAKWKIVIGHHTIKSAGHHGNTIELEKHLLPILQANEVDLYVNGHDHCLEHISSVDSNIQFMTSGGGSKAWKGGDVNYVEPEEMRFYYDGQGFMSVHVSEAELRVVFYDVFGHVLHHWKKTYKEALYFAS

SEQ ID NO: 8676 - protein, 270 aa, Arabidopsis thaliana
MGEIGEKLDIDFVISTGDNFYDNGLTSLHDPLFQDSFTNIYTAPSLQKPWYSVLGNHDYRGDVRAQLSPMLRALDNRWVCMRSFIVNAEIVDLFFVDTTPFVDKYFIQPNKHVYDWSGVLPRQTYLNNLLKELDVALRESVAKWKIVIGHHTIKSAGHHGNTIELEKHLLPILQANEVDLYVNGHDHCLEHISSVDSNIQFMTSGGGSKAWKGGDVNYVEPEEMRFYYDGQGFMSVHVSEAELRVVFYDVFGHVLHHWKKTYKEALYFAS

SEQ ID NO: 8677 - DNA, 1692 bp, Arabidopsis thaliana
agaaatcgaaaaaatcagatctagatctaaaagaagagcgtcttcataaacgcccttcttcttcttcgtcttcttccctgcaaatctagtttctagatcttttctttcttccgcgaaacgaaaatgagagagtgcatttcgatccacattggtcaggccggtatccaggtcggaaatgcttgctgggagctttactgtcttgaacatggcattcagcctgatggccagatgccgagtgacaagactgttggcggaggtgacgatgctttcaacaccttcttcagtgagaccggtgcagggaagcacgtcccacgtgctgtctttgttgatcttgagccaactgtgatcgatgaggtcaggactggtacttaccgtcagcttttccaccctgagcaactcatcagcggtaaagaagacgcagctaacaatttcgcccgtgggcattacaccattgggaaagagattgttgatctgtgcttggaccgtatcagaaagctcgctgataactgtactggtctccaaggattcctcgtcttcaacgctgttggtggagggactggatctggtcttggatctctcctccttgagagactttctgttgactacgggaaaaagtccaagttgggtttcacagtttacccatctccacaggtctccacctctgttgttgagccttacaacagtgtcctctccactcactcactcttggaacacactgatgtctctatcctcctcgacaatgaagctatctatgacatctgcagacgttccctaagcattgagagacccacctacaccaacctcaaccgtctcgtctctcaggttatctcatccttgactgcttctctgaggttcgatggtgccttgaatgttgatgtgactgagttccaaaccaacttggtcccatacccaagaatccacttcatgctttcctcctatgccccagtcatctccgcagagaaggccttccatgagcagctctcggttgctgagatcacaaacagtgcttttgagccagcatccatgatggcaaagtgtgaccctcgtcacggaaagtacatggcttgctgtttgatgtaccgtggtgatgtcgtccccaaggatgtgaacgcagctgttggcaccatcaagaccaagcgtactattcagtttgtggactggtgtcctactggattcaagtgtggaatcaactaccagccaccaactgttgttccaggaggtgatcttgctaaagtccagagagctgtgtgtatgatctcaaactccaccagtgttgctgaggtgttctcccgtattgatcacaagtttgatcttatgtacgcaaaacgtgctttcgttcactggtatgtgggtgagggtatggaagaaggagaattttcagaggctcgtgaggatcttgcagcattggagaaggattacgaagaggttggtgctgaaggtggtgacgatgaggatgatgaaggagaggagtactaagaaggttgtcggttttatgtgggatttctattatctcgtgtttgtgtgaataggctcgaaactcttacgagtcgtacttgtgttttcaaaaaccatatttctatctcttgcttgtggcggtagccatttgttctagttcgtttgtttctgataatattttcatctccaagaactgaatttaagctgggtttggtttaaatcgattgtccaaaatct

SEQ ID NO: 8678 - protein, 450 aa, Arabidopsis thaliana
MRECISIHIGQAGIQVGNACWELYCLEHGIQPDGQMPSDKTVGGGDDAFNTFFSETGAGKHVPRAVFVDLEPTVIDEVRTGTYRQLFHPEQLISGKEDAANNFARGHYTIGKEIVDLCLDRIRKLADNCTGLQGFLVFNAVGGGTGSGLGSLLLERLSVDYGKKSKLGFTVYPSPQVSTSVVEPYNSVLSTHSLLEHTDVSILLDNEAIYDICRRSLSIERPTYTNLNRLVSQVISSLTASLRFDGALNVDVTEFQTNLVPYPRIHFMLSSYAPVISAEKAFHEQLSVAEITNSAFEPASMMAKCDPRHGKYMACCLMYRGDVVPKDVNAAVGTIKTKRTIQFVDWCPTGFKCGINYQPPTVVPGGDLAKVQRAVCMISNSTSVAEVFSRIDHKFDLMYAKRAFVHWYVGEGMEEGEFSEAREDLAALEKDYEEVGAEGGDDEDDEGEEY

SEQ ID NO: 8679 - protein, 415 aa, Arabidopsis thaliana
MPSDKTVGGGDDAFNTFFSETGAGKHVPRAVFVDLEPTVIDEVRTGTYRQLFHPEQLISGKEDAANNFARGHYTIGKEIVDLCLDRIRKLADNCTGLQGFLVFNAVGGGTGSGLGSLLLERLSVDYGKKSKLGFTVYPSPQVSTSVVEPYNSVLSTHSLLEHTDVSILLDNEAIYDICRRSLSIERPTYTNLNRLVSQVISSLTASLRFDGALNVDVTEFQTNLVPYPRIHFMLSSYAPVISAEKAFHEQLSVAEITNSAFEPASMMAKCDPRHGKYMACCLMYRGDVVPKDVNAAVGTIKTKRTIQFVDWCPTGFKCGINYQPPTVVPGGDLAKVQRAVCMISNSTSVAEVFSRIDHKFDLMYAKRAFVHWYVGEGMEEGEFSEAREDLAALEKDYEEVGAEGGDDEDDEGEEY

SEQ ID NO: 8680 - DNA, 1833 bp, Arabidopsis thaliana
acaatcatttgattatttcctcctctccgtatctgtgtctctcttctcttgatcttttagtgttcttgctttgtcgcttcaacgcttaagtttggatttgtgtgagtctgcataatcatggcgaggaagatgcttgttgatggtgagattgataaggtggcggctgatgaagccaacgcgacgcactatgattttgatttgtttgtcatcggtgccgggagtggcggtgttcgtgctgctaggttttcggctaatcatggcgctaaggttggtatttgtgagcttccatttcaccctattagctctgaggagattggaggcgttggtggaacctgtgttatccgtggttgtgttcctaaaaagattctcgtctatggagctacttacggtggtgaacttgaggatgctaaaaattatgggtgggaaataaatgagaaagtcgacttcacatggaagaagcttttgcaaaagaagactgatgagatactaagactgaataatatctacaagcggttattggcaaatgctgcggtgaaattgtatgaaggtgaaggaagagtagttggtcccaacgaagtggaggtgagacaaatagatggcacaaaaataagttataccgcaaagcacatattgattgccactggcagtcgggcgcaaaagcctaatattcctggacatgagctggctattacatctgatgaagctttgagcttggaagaatttcccaagcgtgctatagtgcttggaggagggtatattgctgtggagtttgcatcaatatggcgtggaatgggtgctactgtagatttattcttcaggaaggaacttccgctaaggggttttgatgacgaaatgagggcactagttgctagaaatcttgaaggaaggggcgttaatctgcatccacaaacaagtttgactcagttgacaaaaacagaccaggggatcaaagtcatatcgtcccatggggaggaattcgtggcagatgtcgtcctatttgctactggcagaagtcctaataccaaaagattgaatttagaagctgttggtgttgaacttgatcaggctggagctgtgaaggttgacgagtattcacgaactaatatacctagcatatgggctgtaggagatgccacaaaccgaattaaccttacacctgttgcgttaatggaggccacctgttttgcgaacactgcttttggtggaaagcctactaaagcagaatacagcaatgtcgcctgtgctgtattttgcataccaccactagctgtagtgggtctcagcgaagaagaagcagtagaacaagcaaccggtgatattctggtcttcacctcaggctttaatccaatgaagaacaccatttctggacgccaggaaaagacattgatgaagctaatagttgatgagaagagtgataaggttattggagcatccatgtgcggtcctgatgcagctgagatcatgcaggggattgcaattgcgctcaagtgtggagcaaccaaagcacaatttgatagcacggttgggatacatccatcttctgcagaggaatttgtgacaatgcgcagtgtgaccagacgcattgcccacaaacccaaacctaagacaaatctatgaaccgcaaaatataaagagctatatagcatgaaaactcggtacacttaatttgatcaaagagtcagacaacgatgagtttaatcatactcgtgtcccaataaaggatttgtaatttttgtttgtttgtatgatgcttctcttcttacttacttgagaaaacatcaaggtttcttctcttattgcttagtggaactttattacaaagaattattctct

SEQ ID NO: 8681 - protein, 499 aa, Arabidopsis thaliana
MARKMLVDGEIDKVAADEANATHYDFDLFVIGAGSGGVRAARFSANHGAKVGICELPFHPISSEEIGGVGGTCVIRGCVPKKILVYGATYGGELEDAKNYGWEINEKVDFTWKKLLQKKTDEILRLNNIYKRLLANAAVKLYEGEGRVVGPNEVEVRQIDGTKISYTAKHILIATGSRAQKPNIPGHELAITSDEALSLEEFPKRAIVLGGGYIAVEFASIWRGMGATVDLFFRKELPLRGFDDEMRALVARNLEGRGVNLHPQTSLTQLTKTDQGIKVISSHGEEFVADVVLFATGRSPNTKRLNLEAVGVELDQAGAVKVDEYSRTNIPSIWAVGDATNRINLTPVALMEATCFANTAFGGKPTKAEYSNVACAVFCIPPLAVVGLSEEEAVEQATGDILVFTSGFNPMKNTISGRQEKTLMKLIVDEKSDKVIGASMCGPDAAEIMQGIAIALKCGATKAQFDSTVGIHPSSAEEFVTMRSVTRRIAHKPKPKTNL

SEQ ID NO: 8682 - protein, 495 aa, Arabidopsis thaliana
MLVDGEIDKVAADEANATHYDFDLFVIGAGSGGVRAARFSANHGAKVGICELPFHPISSEEIGGVGGTCVIRGCVPKKILVYGATYGGELEDAKNYGWEINEKVDFTWKKLLQKKTDEILRLNNIYKRLLANAAVKLYEGEGRVVGPNEVEVRQIDGTKISYTAKHILIATGSRAQKPNIPGHELAITSDEALSLEEFPKRAIVLGGGYIAVEFASIWRGMGATVDLFFRKELPLRGFDDEMRALVARNLEGRGVNLHPQTSLTQLTKTDQGIKVISSHGEEFVADVVLFATGRSPNTKRLNLEAVGVELDQAGAVKVDEYSRTNIPSIWAVGDATNRINLTPVALMEATCFANTAFGGKPTKAEYSNVACAVFCIPPLAVVGLSEEEAVEQATGDILVFTSGFNPMKNTISGRQEKTLMKLIVDEKSDKVIGASMCGPDAAEIMQGIAIALKCGATKAQFDSTVGIHPSSAEEFVTMRSVTRRIAHKPKPKTNL

SEQ ID NO: 8683 - protein, 275 aa, Arabidopsis thaliana
MGATVDLFFRKELPLRGFDDEMRALVARNLEGRGVNLHPQTSLTQLTKTDQGIKVISSHGEEFVADVVLFATGRSPNTKRLNLEAVGVELDQAGAVKVDEYSRTNIPSIWAVGDATNRINLTPVALMEATCFANTAFGGKPTKAEYSNVACAVFCIPPLAVVGLSEEEAVEQATGDILVFTSGFNPMKNTISGRQEKTLMKLIVDEKSDKVIGASMCGPDAAEIMQGIAIALKCGATKAQFDSTVGIHPSSAEEFVTMRSVTRRIAHKPKPKTNL

SEQ ID NO: 8684 - DNA, 1311 bp, Arabidopsis thaliana
ctctccctctttcccccttacgtaaccctaagcggacggagcaatgctctgctagatctatctttctttcaattcttcaccagagatcgtcgagactcaccattgaaatcgaagaaacagcaccaatttccacttcaccaccgaaagagagagacagagaggataataaaaggccgccatggatttagatcaatggatttccaaggttaaagacggccaacatctctctgaggacgagcttcaacttctctgcgaatacgtgaaagaaattcttattgaggaatcaaatgtacaacctgtcaacagtcctgtcaccgtctgtggtgatatccatggccagtttcatgatcttatgaagcttttccagaccggagcatgttcccgagaccaattacatatttatgggggatttcgttgatagaggttacaacagtcttgaagttttcaccattcttttgcttcttaaagcaagacatccagccaatatcactcttttgcgtggaaatcatgaaagtagacagctaactcaggtgtatggtttctatgacgaatgccaaaggaagtatggtaatgctaatgcttggagatattgcacggatgtttttgactatcttacactttcagctattatagatggcactgttctatgtgttcatggtggcctttcacctgatgtacggacaattgaccagataagattgattgagcggaattgcgaaataccgcatgaaggacccttctgtgatcttatgtggagtgatcctgaagatattgaaacatgggctgtcagtccacgtggagctggttggcttttcgggtccagggttaccactgagtttaaccatattaacaatcttgatctagtatgtcgcgctcaccagcttgtacaagaaggtctcaagtacatgttccaagataaaggtcttgtaactgtgtggtctgcgcctaattactgctaccgttgtgggaatgtggcttctatattgagtttcaatgacaacatggaaagggaagtgaagttcttcacggagacagaagagaacaatcaaatgagagggccaaggacaggtgttccttatttcctgtgattcatgatgatgatcctacatcattattagtctcgtattgctcttatcaatttagccattatcatgattgccattggcttatgttctttcaaggtatatcttctgatgttgtttacacttccattgttttttttttcctttttccattttggaaacattttcttgtgaaagtgaatgtcactttggtaattttagtggttttgatgcactttaacctgaaccc

SEQ ID NO: 8685 - protein, 228 aa, Arabidopsis thaliana
MGDFVDRGYNSLEVFTILLLLKARHPANITLLRGNHESRQLTQVYGFYDECQRKYGNANAWRYCTDVFDYLTLSAIIDGTVLCVHGGLSPDVRTIDQIRLIERNCEIPHEGPFCDLMWSDPEDIETWAVSPRGAGWLFGSRVTTEFNHINNLDLVCRAHQLVQEGLKYMFQDKGLVTVWSAPNYCYRCGNVASILSFNDNMEREVKFFTETEENNQMRGPRTGVPYFL

SEQ ID NO: 8686 - DNA, 724 bp, Arabidopsis thaliana
acaaatctcacatctcttctgcagccgattcttctattagccgccatggtgaagtactcgcaagaacccgacaatcagaccaagtcttgcaaggctagaggatccgatcttagggttcacttcaagaatactagggaaacagcgcacgcaatcaggaagctaccattgatcaaggcgaagaggtaccttgaggatgtgatagctcacaagcaagcaattcccttcacacgtttctgcagaggtgttgggagaactgctcaagctaagaacaggcactctaatggtcaaggacgttggccagccaagtctgctcagtttgttcttgatttgctcaagaacgctgagagcaatgctgaggtgaaaggtttggatgttgatgccctcttcatatcacacatccaagtgaaccaggccgcaaagcaaaggagaaggacttaccgtgctcacggaagaatcaacccttacatgtccaacccatgccacattgagttgattttgtcagagaaggaagagcctgtcaaaaaagagccggagactcagttggctgccaagtccaagaaatcagcagcttaagctttctttctttattttcatgtcccttgtgttcttgaacgagattttgttctcttttttctttagctcgaatcgttttgtaagacaatggatagatttatcttggaaattttcgttctatgacttatgaaatcagtgatcatggttctgc

SEQ ID NO: 8687 - protein, 190 aa, Arabidopsis thaliana
TNLTSLLQPILLLAAMVKYSQEPDNQTKSCKARGSDLRVHFKNTRETAHAIRKLPLIKAKRYLEDVIAHKQAIPFTRFCRGVGRTAQAKNRHSNGQGRWPAKSAQFVLDLLKNAESNAEVKGLDVDALFISHIQVNQAAKQRRRTYRAHGRINPYMSNPCHIELILSEKEEPVKKEPETQLAAKSKKSAA

SEQ ID NO: 8688 - protein, 175 aa, Arabidopsis thaliana
MVKYSQEPDNQTKSCKARGSDLRVHFKNTRETAHAIRKLPLIKAKRYLEDVIAHKQAIPFTRFCRGVGRTAQAKNRHSNGQGRWPAKSAQFVLDLLKNAESNAEVKGLDVDALFISHIQVNQAAKQRRRTYRAHGRINPYMSNPCHIELILSEKEEPVKKEPETQLAAKSKKSAA

SEQ ID NO: 8689 - DNA, 1424 bp, Arabidopsis thaliana
aattgataatttgttacactagttgtgaattgagtttcttggttctttcattaattttgatttggttttgtagcctacgaattcgaatcatcagcatcatcttcaacaccagcttaacgaaaatggaagtataataagtggccacggactagtactctctcaccaacttccacctctccaagcaaaccctaaccctaaccaccaccatgtcgctacctctgctggtcttccgtcaaggatgggtggatcgatggcggagagagcaaggcaggccaacattcctccactagcgggacccctaaagtgtcctcgatgcgactccagcaacactaagttctgttactacaacaactataacctcactcagcctcgtcacttctgcaaaggttgccgtcgctactggacacaagggggcgccctgagaaacgtccctgtaggtggaggctgccggaggaataacaagaagggcaaaaatggaaatttaaaatcttcttcttcttcgtccaaacagtcttcctcggtcaacgctcaaagtcctagctcaggacagctaaggacaaatcatcagttccctttttcaccaactctttacaatctcactcaactcggaggtattggtttgaacttagccgctactaatggcaacaaccaagctcaccagatcggttccagtttgatgatgagcgatctagggtttctccatggacgaaatacttcaactccgatgacgggaaacattcatgaaaacaacaacaataataacaatgaaaacaacctaatggcatccgttggatctttgagcccctttgctctcttcgatccaacgacggggctatacgctttccagaacgacggtaatatcgggaacaacgttgggatatctggttcttctacttccatggttgattctagggtttatcagacgcctccggtgaagatggaagaacaacctaatttggctaacttgtctagaccggtctccggtttgacgtctcctgggaatcaaacaaatcagtacttttggcctggttcggatttctcgggtccttctaatgatctcttgtgagatttttgtgtgttttgtcggatcattaacgtatgttacgacttacgacgtggagattgattaaaaggactaccaacggtcaggattaactgcatgcatagtctgtgctcaagacgatgatcgtggagaagtacaaggacaaactaaaaggtatcttaattagagattgtggttttacaacttaaattcgatacttatttatataatcaggtgtgtcatataatttgtttgtattgcgtgatttcatggttgatctgatttctcaagttgctatatatgcctcaatacatgtgtgtaacagtccaatttgtatactctttagactgaattttatcgaatatataatatttttcagttt

SEQ ID NO: 8690 - protein, 275 aa, Arabidopsis thaliana
MGGSMAERARQANIPPLAGPLKCPRCDSSNTKFCYYNNYNLTQPRHFCKGCRRYWTQGGALRNVPVGGGCRRNNKKGKNGNLKSSSSSSKQSSSVNAQSPSSGQLRTNHQFPFSPTLYNLTQLGGIGLNLAATNGNNQAHQIGSSLMMSDLGFLHGRNTSTPMTGNIHENNNNNNNENNLMASVGSLSPFALFDPTTGLYAFQNDGNIGNNVGISGSSTSMVDSRVYQTPPVKMEEQPNLANLSRPVSGLTSPGNQTNQYFWPGSDFSGPSNDLL

SEQ ID NO: 8691 - protein, 271 aa, Arabidopsis thaliana
MAERARQANIPPLAGPLKCPRCDSSNTKFCYYNNYNLTQPRHFCKGCRRYWTQGGALRNVPVGGGCRRNNKKGKNGNLKSSSSSSKQSSSVNAQSPSSGQLRTNHQFPFSPTLYNLTQLGGIGLNLAATNGNNQAHQIGSSLMMSDLGFLHGRNTSTPMTGNIHENNNNNNNENNLMASVGSLSPFALFDPTTGLYAFQNDGNIGNNVGISGSSTSMVDSRVYQTPPVKMEEQPNLANLSRPVSGLTSPGNQTNQYFWPGSDFSGPSNDLL

SEQ ID NO: 8692 - DNA, 500 bp, Arabidopsis thaliana
aacaagacttaatttctagggttttgaagagtctctcgtcgccgtttgtaattcctctgtgagcaaatcgacaaaatgggtcactctaatgtctggaactctcatccgaagaagtacggtcctggatctcgtttatgccgtgtgtgcgggaactcacacgggcttatcaggaagtatggtttgaattgctgcagacagtgtttccgcagtaacgccaaggagatcggattcattaagtaccgttaaagaggcctttgactgatgcttataatacacaaacatgttggtgttgatgaattggccttgaatcttttaagttgttgttgcattcttctttaaagtttatctcttatttggaacaatgatcttttggttttgattaatattttgcttgttaatatagaccattttggcatagaatctctaggttttcttgaagacgtttagacatcagaatccttgaaaatccaaatgtttttattatatggttttgatttcgc

SEQ ID NO: 8693 - protein, 56 aa, Arabidopsis thaliana [sequence omitted]

SEQ ID NO: 8694 - protein, 31 aa, Arabidopsis thaliana
MSGTLIRRSTVLDLVYAVCAGTHTGLSGSMV

SEQ ID NO: 8695 - DNA, 1287 bp, Arabidopsis thaliana
atggctgcttgcgctactcactcctctctcatgctagcatacgccgccgcatccactcgttcccaggaccttacccctactccatctcttttctcttttgccagctccagacccaaccacttgagcttcccgcttcttctccttgggggttccagggaccggagatgtgctgctattgacagagcttccaaccacaagtttattgtctccgccgtggccgctgaggctgacctcgacacggaggaggacctggagcagaccgccaccgccgtccttgatccgcccaagcctaagaaaggaaaagccgctttggttctcaagagagatagaacaaggtctaagaggtttttggaaatccaaaagctaagggaaaccaaaaaggagtatgatgtcaacactgctatctctttgcttaaacaaactgccaacacaaggtttgttgagtctgttgaagcccatttccgtctcaacatcgatcctaagtacaatgaccagcagctgcgtgcaacggtgagcctgcctaagggaactggccagactgttatagtcgctgttcttgcacaaggtgagaaggttgatgaagccaaaagtgcaggggcagatattgtgggcagtgatgatttaatcgaacagattaaaggaggcttcatggagtttgacaagctgattgcatccccggatatgatggtcaaggttgctggcctgggaaagattcttggaccacgggggctcatgccaaatcccaaggctggtacagtcacagcgaacattccccaggctattgaagagttcaagaaggggaaagttgaattcagagcagacaaaactgggattgttcacattccatttgggaaagttaattttacagaggaagaccttctcataaacttccttgcagcagtgaaatcggtggagacaaacaagccaaagggagctaaaggagtgtactggaaaagcgctcacatatgctcgtcaatggggccttccatcaagttgaacataagagagatgatagacttcaagcctcccactgcgaactaatcgacaacgccatttgtaaatggggtccttttgggagacgggcaatgccagtgtagacagagaagagaaacaccaagtctagtctgttagtaatcttttcacgcctcactgctttgtatcactttgatggccatttgcttcttgtcgttatttatttactattgcctattaaaatttggcaaggggctgtacatgtcaggacgcagaactctttagtactctctaaaagaaaagaccttacattga

SEQ ID NO: 8696 - protein, 346 aa, Arabidopsis thaliana
MAACATHSSLMLAYAAASTRSQDLTPTPSLFSFASSRPNHLSFPLLLLGGSRDRRCAAIDRASNHKFIVSAVAAEADLDTEEDLEQTATAVLDPPKPKKGKAALVLKRDRTRSKRFLEIQKLRETKKEYDVNTAISLLKQTANTRFVESVEAHFRLNIDPKYNDQQLRATVSLPKGTGQTVIVAVLAQGEKVDEAKSAGADIVGSDDLIEQIKGGFMEFDKLIASPDMMVKVAGLGKILGPRGLMPNPKAGTVTANIPQAIEEFKKGKVEFRADKTGIVHIPFGKVNFTEEDLLINFLAAVKSVETNKPKGAKGVYWKSAHICSSMGPSIKLNIREMIDFKPPTAN

SEQ ID NO: 8697 - protein, 336 aa, Arabidopsis thaliana
MLAYAAASTRSQDLTPTPSLFSFASSRPNHLSFPLLLLGGSRDRRCAAIDRASNHKFIVSAVAAEADLDTEEDLEQTATAVLDPPKPKKGKAALVLKRDRTRSKRFLEIQKLRETKKEYDVNTAISLLKQTANTRFVESVEAHFRLNIDPKYNDQQLRATVSLPKGTGQTVIVAVLAQGEKVDEAKSAGADIVGSDDLIEQIKGGFMEFDKLIASPDMMVKVAGLGKILGPRGLMPNPKAGTVTANIPQAIEEFKKGKVEFRADKTGIVHIPFGKVNFTEEDLLINFLAAVKSVETNKPKGAKGVYWKSAHICSSMGPSIKLNIREMIDFKPPTAN

SEQ ID NO: 8698 - DNA, 959 bp, Arabidopsis thaliana
gtaggagaagaaagttctcatttcataattgtatcaaattgtgagaggaaaaaaagaagttcaagaaatggagaaggaaggactcgggcttgagataacggagctgagattggggcttccggggagagatgtggcagagaagatgatgaagaagagagctttcacggagatgaatatgacgtcgtcgggtagtaatagtgatcaatgtgaaagcggcgtcgtttcatctggtggtgacgctgagaaggttaatgattcgccggcggcgaaaagccaggtggtggggtggccaccggtttgttcttaccggaagaaaaacagctgtaaggaagcttcgaccacgaaagtggggttagggtatgtgaaagtgagcatggatggtgtgccttatttgaggaagatggatcttggttcgagccaaggctatgatgatctagcctttgctcttgataagctcttcggtttccgtggcatcggtgtggccttgaaagatggtgacaactgcgaatacgttaccatatacgaagacaaagatggagactggatgctcgccggtgatgtaccttgggggatgtttctagagtcatgcaagaggttgagaataatgaaaagatcggatgctaccgggtttgggctgcagcctagaggagtagacgagtgatgatgacttgaacaagaagcaaggagctggttcattaatttaatcttaaacttgatcatcaagatcctttagaacatttttcctattcatgttatataaatatatatgttatagtatattattttgcaacaaaatttcatgttatggttttgcataattatcttcagaaagacagctatatatatatacactacttgtttcttgagtgttgagttaaaacattaatctgtttcaaaatttattgttatttcggatctatatatgtgtgtagaaacatatgtaataagtatccattatt

SEQ ID NO: 8699 - protein, 197 aa, Arabidopsis thaliana
MEKEGLGLEITELRLGLPGRDVAEKMMKKRAFTEMNMTSSGSNSDQCESGVVSSGGDAEKVNDSPAAKSQVVGWPPVCSYRKKNSCKEASTTKVGLGYVKVSMDGVPYLRKMDLGSSQGYDDLAFALDKLFGFRGIGVALKDGDNCEYVTIYEDKDGDWMLAGDVPWGMFLESCKRLRIMKRSDATGFGLQPRGVDE

SEQ ID NO: 8700 - protein, 172 aa, Arabidopsis thaliana
MMKKRAFTEMNMTSSGSNSDQCESGVVSSGGDAEKVNDSPAAKSQVVGWPPVCSYRKKNSCKEASTTKVGLGYVKVSMDGVPYLRKMDLGSSQGYDDLAFALDKLFGFRGIGVALKDGDNCEYVTIYEDKDGDWMLAGDVPWGMFLESCKRLRIMKRSDATGFGLQPRGVDE

SEQ ID NO: 8701 - protein, 171 aa, Arabidopsis thaliana
MKKRAFTEMNMTSSGSNSDQCESGVVSSGGDAEKVNDSPAAKSQVVGWPPVCSYRKKNSCKEASTTKVGLGYVKVSMDGVPYLRKMDLGSSQGYDDLAFALDKLFGFRGIGVALKDGDNCEYVTIYEDKDGDWMLAGDVPWGMFLESCKRLRIMKRSDATGFGLQPRGVDE

SEQ ID NO: 8702 - DNA, 1104 bp, Arabidopsis thaliana
  misc_feature (208)..(208): n is a, c, g, or t
atcgaaacaaaaaataattaagagagaaaaaaacaaaaaacattttccatctctctctctctctctctcgcctgcttcaagaaatggatcggcaaagttccgatgacatcatgaaatttctcgacggcatggctagctccgacgatgttctttttggcttcctcgacgaaggaaaccactcaccggagattataacttcgccgccggnacgaatccgaagttgacaacgataccaccgattgtaattcagaagagaacagaaaattttggcaagaacacgaacaacttctccaggcgacactgtataggacaagttcaattgagacaaagataagacaagcaactaaggaagcgttgaaagtagttagatcaaagggtttggtatgtgtctgccggagaccggttaccgacggttgtcgtagctgtttacgcggcgaagtatctagcctcctccgagaagctggctatgattgcgtcatttccaaatctaagtggagaagctctcatgagatccctgcaggtgagcatgaatacttggaggtcgtggacaaatcggtttcaaagaaaggcgagatccgggtggtgatcgaactatgttttagggcggagtttgagatggcgagaggcagtgaagagtacaagcgactcatcggaatgttaccggaagtgtatgttgggaaaacggagaggctaaaatcattaataaagatattgtgcaccgcagcgaagaagtgtatgaaagacaagaagatgcacatgggtccttggagaaaacacaaatacatgcaggctaaatggtttggaacttgtgagagaaaatctgtgtcgccagtatccgaaactgaggagaatatgtttccggtggcaaagcagagggtttctatgttgaattatggtctttttggtgctggaataggccatcagactgttgtagcggttgtgtgaaacatctatatagacgtacgaatacgataagttaggaggaaataaagtgaaatgagtttcactttgaaattttgcatgatattgtctcagttagaattttgtgtgtccaaaacagggtaatttctgggactattatggtatacaaagcggtattttaag

SEQ ID NO: 8703 - protein, 109 aa, Arabidopsis thaliana
MARGSEEYKRLIGMLPEVYVGKTERLKSLIKILCTAAKKCMKDKKMHMGPWRKHKYMQAKWFGTCERKSVSPVSETEENMFPVAKQRVSMLNYGLFGAGIGHQTVVAVV

SEQ ID NO: 8704 - protein, 96 aa, Arabidopsis thaliana
MLPEVYVGKTERLKSLIKILCTAAKKCMKDKKMHMGPWRKHKYMQAKWFGTCERKSVSPVSETEENMFPVAKQRVSMLNYGLFGAGIGHQTVVAVV

SEQ ID NO: 8705 - protein, 69 aa, Arabidopsis thaliana
MKDKKMHMGPWRKHKYMQAKWFGTCERKSVSPVSETEENMFPVAKQRVSMLNYGLFGAGIGHQTVVAVV

SEQ ID NO: 8706 - DNA, 641 bp, Arabidopsis thaliana
ggtgaacgagtatattttatcttcttcatctcttcacatcaaaaaacttttctcctccatcaaaatcctccgacgatgacaaccatagctgcagctggcctcaacgtcgcgactccacgagtggtcgttcgacctgtggctcgtgtattaggtccggtccggttgaattacccgtggaaattcggttcgatgaagcggatggttgtggttaaggctacatcggaaggagagatatcggagaaggtggagaagagtatacaagaagctaaggagacatgcgctgatgatccggtgagcggggagtgtgtagcggcttgggacgaggtggaggagctgagtgcggcggcgagtcatgctagggacaagaagaaagctggtggctccgatcctttggaagagtattgcaatgataatcctgagactgatgagtgtcgtacttatgataattaaaaaatatgtttttgatgttcgaattatgaaactttaggtatggatcaatgtttgttcttcttgtcccttgttgttatgtttgtgtttttggtttggttgatgattgtaatgtgataaatgaatatgaatagtacaatacacaacatatgtttcataatgtgtttggttcgaaaaaaaaaaaaaaaaaagct

SEQ ID NO: 8707 - protein, 149 aa, Arabidopsis thaliana
GERVYFIFFISSHQKTFLLHQNPPTMTTIAAAGLNVATPRVVVRPVARVLGPVRLNYPWKFGSMKRMVVVKATSEGEISEKVEKSIQEAKETCADDPVSGECVAAWDEVEELSAAASHARDKKKAGGSDPLEEYCNDNPETDECRTYDN

SEQ ID NO: 8708 - protein, 124 aa, Arabidopsis thaliana
MTTIAAAGLNVATPRVVVRPVARVLGPVRLNYPWKFGSMKRMVVVKATSEGEISEKVEKSIQEAKETCADDPVSGECVAAWDEVEELSAAASHARDKKKAGGSDPLEEYCNDNPETDECRTYDN

SEQ ID NO: 8709 - protein, 86 aa, Arabidopsis thaliana
MKRMVVVKATSEGEISEKVEKSIQEAKETCADDPVSGECVAAWDEVEELSAAASHARDKKKAGGSDPLEEYCNDNPETDECRTYDN

SEQ ID NO: 8710 - DNA, 535 bp, Arabidopsis thaliana
gagtggaacgacgacggcacaaaagcttcaccggagatcagagacgcgaaaatggtgaacattccaaagacaaagaacacttactgtaagaacaaggaatgcaaaaagcatactttgcacaaggttacccaatacaagaagggtaaagacagtcttgctgctcaaggaaagcgtcgttatgaccgtaaacaatctggttatggtggtcagactaagcctgtcttccacaaaaaggctaagaccacgaagaagattgttttgaggcttcagtgtcaaagctgcaagcacttttcgcagcgtcctatcaagaggtgcaagcatttcgagatcggtggtgacaagaagggaaagggaacatctctgttttaagttggtttcatcttattttctgcgatttttgtacttgctggatttggaatccatttgttttagctctctcgtacaagattgtctcatctttgcttgttaactctatattttgaatcatcaagatatggttttgctgttaatcattgaccttcgatatttttttgcc

SEQ ID NO: 8711 - protein, 122 aa, Arabidopsis thaliana
EWNDDGTKASPEIRDAKMVNIPKTKNTYCKNKECKKHTLHKVTQYKKGKDSLAAQGKRRYDRKQSGYGGQTKPVFHKKAKTTKKIVLRLQCQSCKHFSQRPIKRCKHFEIGGDKKGKGTSLF

SEQ ID NO: 8712 - protein, 105 aa, Arabidopsis thaliana
MVNIPKTKNTYCKNKECKKHTLHKVTQYKKGKDSLAAQGKRRYDRKQSGYGGQTKPVFHKKAKTTKKIVLRLQCQSCKHFSQRPIKRCKHFEIGGDKKGKGTSLF

SEQ ID NO: 8713 - DNA, 2885 bp, Arabidopsis thaliana
aagccgtcatgatcggccatttctcggccgagtctgagtctgactctgcgtccgtgtcaccattatcagatcgagcctgtcttatctcgttgcgattccctatgcaaaaatcttcttcttttttttattcccccatttatctctgatctcttctctcttctcaagtaaacctccctgcttcacgtctcttcttttcttgtcgattttccccagataatcagttgaaaacacacccaaattcatcttcgaatcaataatggatataagtaatgaggctagtgtcgatcccttttcgattggaccatcatctatcatgggtcgaaccattgctttcagagtcttgttctgtagatcaatgtcacagcttaggcgtgatctctttcggttcttgttgcattggtttcttagatttaagctgaccgtttcaccgtttgtgtcgtggtttcatcctcggaaccctcaagggattttagcggtggttacaatcattgcctttgtgttgaaacgatacacgaatgtgaaaataaaggcggaaatggcttaccggaggaagttttggaggaatatgatgcggacggctttgacttatgaggaatgggctcatgctgctaagatgttagagaaggaaacaccaaagatgaatgaatctgatctttatgatgaagagttggttaagaacaagcttcaggagcttcgtcatcgtcgccaagaaggctcacttagagacattatgttttgtatgagagctgatttggtgaggaatctcggtaatatgtgtaattcggagcttcataaaggtagacttcaggttcctagacatatcaaagagtacattgatgaggtgtctactcagttgagaatggtttgtaactctgattcagaggagctttctttagaagagaagctttcttttatgcatgaaacacggcatgcctttggtagaacggctttgcttttgagtggtggggcttctcttggtgcgtttcatgttggtgtggttaggactttggttgagcataagcttttacctcgaataattgctggttctagtgttggatccatcatttgtgctgttgtggcctcaaggtcttggccagaactacagagtttctttgagaattctttgcattctttacagttctttgatcagctcggaggcgtgttctcaatagtgaaacgggtaatgacacaaggggctctacacgatatcagacagttgcaatgtatgcttagaaacctcacaagcaatctcacattccaagaagcttatgacatgacaggaaggattctcgggatcaccgtttgctccccaagaaagcatgaacctcctcggtgtcttaactatttgacttcgcctcatgtggttatatggagcgcagtgactgcttcttgtgcttttcctggtctctttgaagctcaagagctaatggctaaagatcgaagtggagagatcgtaccgtatcatccacctttcaatttggatccagaagtaggcactaaatcatcatctggacgccggtggagagatggtagtttggaggttgatttaccaatgatgcagcttaaagaactgttcaatgtcaatcattttattgtgagccaagccaatcctcacattgctccattactgcgtctaaaggatttagttcgagcttatggtggtagattcgcagctaagctcgcgcatctagtggagatggaggtcaaacatagatgcaaccaggtattagagctcggttttcctctcggtggactcgcaaagctttttgctcaggagtgggaaggtgatgttacagttgtaatgcctgctactcttgctcagtactcgaagattatacaaaatccgactcatgtcgagcttcagaaagcggctaaccaaggaagaagatgcacttgggagaagctctcagccataaaatcaaactgcgggatcgagcttgcgcttgatgattctgtagctattcttaaccatatgcggaggctcaagaaaagtgcggagagagccgccactgccacgtcttcgtctcatcacggattggcttcaaccaccagattcaatgcttcaagaagaatcccatcttggaacgtccttgccagagagaactcaacaggctcactggatgatctagtcactgacaataacctccacgcttcttcgggcaggaatttaagcgacagtgaaacagagagcgtggagttgagttcttggacaagaactggtggacctttaatgagaacagcttctgctaataagttcattgattttgttcagagtcttgatatcgacattgcattggtcagaggatttagtagcagtcccaattctccagcagttcctcctggtggctcgtttactccaagcccgagatccatagcggctcattcggatatcgaatcaaacagcaatagcaacaatcttggaacaagcacttcaagcataacagttactgaaggtgatcttctacagcctgagagaacgagtaacggatttgtgttaaacgtcgttaaaagagagaacttgggaatgccatcgattgggaaccaaaatacagagttaccagagagtgtacagctcgatataccggagaaggagatggattgtagctctgtatcagaacacgaagaagatgataacgacaatgaagaagaacataacggctcgagtctggttactgtttcttcagaagattccggtttacaagaaccggtgtctggtagtgttatagatgcttagagtgtgattgattcaagtgagtatagattcttaattaaatttgcagagtttccaaagggtttagtgcaccacttgtgtatgtttgtattgcttattgtttgaaattcatttgtgaaatcgaaatatatctgtaaattcagaaaatattctc

SEQ ID NO: 8714 - protein, 825 aa, Arabidopsis thaliana
MDISNEASVDPFSIGPSSIMGRTIAFRVLFCRSMSQLRRDLFRFLLHWFLRFKLTVSPFVSWFHPRNPQGILAVVTIIAFVLKRYTNVKIKAEMAYRRKFWRNMMRTALTYEEWAHAAKMLEKETPKMNESDLYDEELVKNKLQELRHRRQEGSLRDIMFCMRADLVRNLGNMCNSELHKGRLQVPRHIKEYIDEVSTQLRMVCNSDSEELSLEEKLSFMHETRHAFGRTALLLSGGASLGAFHVGVVRTLVEHKLLPRIIAGSSVGSIICAVVASRSWPELQSFFENSLHSLQFFDQLGGVFSIVKRVMTQGALHDIRQLQCMLRNLTSNLTFQEAYDMTGRILGITVCSPRKHEPPRCLNYLTSPHVVIWSAVTASCAFPGLFEAQELMAKDRSGEIVPYHPPFNLDPEVGTKSSSGRRWRDGSLEVDLPMMQLKELFNVNHFIVSQANPHIAPLLRLKDLVRAYGGRFAAKLAHLVEMEVKHRCNQVLELGFPLGGLAKLFAQEWEGDVTVVMPATLAQYSKIIQNPTHVELQKAANQGRRCTWEKLSAIKSNCGIELALDDSVAILNHMRRLKKSAERAATATSSSHHGLASTTRFNASRRIPSWNVLARENSTGSLDDLVTDNNLHASSGRNLSDSETESVELSSWTRTGGPLMRTASANKFIDFVQSLDIDIALVRGFSSSPNSPAVPPGGSFTPSPRSIAAHSDIESNSNSNNLGTSTSSITVTEGDLLQPERTSNGFVLNVVKRENLGMPSIGNQNTELPESVQLDIPEKEMDCSSVSEHEEDDNDNEEEHNGSSLVTVSSEDSGLQEPVSGSVIDA

SEQ ID NO: 8715 - protein, 806 aa, Arabidopsis thaliana
MGRTIAFRVLFCRSMSQLRRDLFRFLLHWFLRFKLTVSPFVSWFHPRNPQGILAVVTIIAFVLKRYTNVKIKAEMAYRRKFWRNMMRTALTYEEWAHAAKMLEKETPKMNESDLYDEELVKNKLQELRHRRQEGSLRDIMFCMRADLVRNLGNMCNSELHKGRLQVPRHIKEYIDEVSTQLRMVCNSDSEELSLEEKLSFMHETRHAFGRTALLLSGGASLGAFHVGVVRTLVEHKLLPRIIAGSSVGSIICAVVASRSWPELQSFFENSLHSLQFFDQLGGVFSIVKRVMTQGALHDIRQLQCMLRNLTSNLTFQEAYDMTGRILGITVCSPRKHEPPRCLNYLTSPHVVIWSAVTASCAFPGLFEAQELMAKDRSGEIVPYHPPFNLDPEVGTKSSSGRRWRDGSLEVDLPMMQLKELFNVNHFIVSQANPHIAPLLRLKDLVRAYGGRFAAKLAHLVEMEVKHRCNQVLELGFPLGGLAKLFAQEWEGDVTVVMPATLAQYSKIIQNPTHVELQKAANQGRRCTWEKLSAIKSNCGIELALDDSVAILNHMRRLKKSAERAATATSSSHHGLASTTRFNASRRIPSWNVLARENSTGSLDDLVTDNNLHASSGRNLSDSETESVELSSWTRTGGPLMRTASANKFIDFVQSLDIDIALVRGFSSSPNSPAVPPGGSFTPSPRSIAAHSDIESNSNSNNLGTSTSSITVTEGDLLQPERTSNGFVLNVVKRENLGMPSIGNQNTELPESVQLDIPEKEMDCSSVSEHEEDDNDNEEEHNGSSLVTVSSEDSGLQEPVSGSVIDA

SEQ ID NO: 8716 - protein, 792 aa, Arabidopsis thaliana
MSQLRRDLFRFLLHWFLRFKLTVSPFVSWFHPRNPQGILAVVTIIAFVLKRYTNVKIKAEMAYRRKFWRNMMRTALTYEEWAHAAKMLEKETPKMNESDLYDEELVKNKLQELRHRRQEGSLRDIMFCMRADLVRNLGNMCNSELHKGRLQVPRHIKEYIDEVSTQLRMVCNSDSEELSLEEKLSFMHETRHAFGRTALLLSGGASLGAFHVGVVRTLVEHKLLPRIIAGSSVGSIICAVVASRSWPELQSFFENSLHSLQFFDQLGGVFSIVKRVMTQGALHDIRQLQCMLRNLTSNLTFQEAYDMTGRILGITVCSPRKHEPPRCLNYLTSPHVVIWSAVTASCAFPGLFEAQELMAKDRSGEIVPYHPPFNLDPEVGTKSSSGRRWRDGSLEVDLPMMQLKELFNVNHFIVSQANPHIAPLLRLKDLVRAYGGRFAAKLAHLVEMEVKHRCNQVLELGFPLGGLAKLFAQEWEGDVTVVMPATLAQYSKIIQNPTHVELQKAANQGRRCTWEKLSAIKSNCGIELALDDSVAILNHMRRLKKSAERAATATSSSHHGLASTTRFNASRRIPSWNVLARENSTGSLDDLVTDNNLHASSGRNLSDSETESVELSSWTRTGGPLMRTASANKFIDFVQSLDIDIALVRGFSSSPNSPAVPPGGSFTPSPRSIAAHSDIESNSNSNNLGTSTSSITVTEGDLLQPERTSNGFVLNVVKRENLGMPSIGNQNTELPESVQLDIPEKEMDCSSVSEHEEDDNDNEEEHNGSSLVTVSSEDSGLQEPVSGSVIDA

SEQ ID NO: 8717 - DNA, 1529 bp, Arabidopsis thaliana
gaacaatctctcatctttagcatagttgtgttatcttcttcttcatcacaatttttctacggtcagagattcaaaagagttctttctctctatcttattctccgatcatcatgatgcagcagccaccacccggaggtatccttccacatcacgctcctcctccttctgcgcaacaacagtacggttaccaacaaccttacgggattgctggagctgctccaccaccaccacagatgtggaatcctcaagcggcggcgccgccatcagttcagcctacgaccgctgacgagatccggactctttggatcggggacttacagtattggatggatgagaatttcctctacggttgctttgctcataccggagagatggtttctgctaaagtgattcgtaacaagcaaaccggtcaagttgaaggatacggtttcattgaattcgcatctcatgctgctgctgaaagagttctacaaacattcaacaacgctcctatcccgagctttcctgatcagctctttagactgaactgggcatcattgagttcaggagataaacgagacgattcaccggactacacgatatttgtcggtgatctggctgctgatgttacggattatatcttacttgagacgttcagagcctcttatccgtcagtgaagggtgcaaaggttgttattgacagagtcactggacgtacaaaaggatatgggtttgttaggttttctgatgaaagtgaacagatccgtgctatgacggagatgaatggcgttccttgttctactagacctatgagaattggtcccgctgctagcaagaaaggtgtaactggtcaaagagattcataccagagctctgctgcaggggtaacaactgataatgatccaaataacacaactgtttttgttggtggattagatgcatctgtcacggatgatcatctgaagaatgtctttagccaatatggtgagattgtgcatgtgaaaatacccgctggaaagcgctgtggattcgttcagttttccgagaagagctgtgcagaggaagctcttagaatgctgaatggagtgcaattaggcggaacaaccgtcaggctctcatggggccgaagtccttcgaacaaacagtcgggggatccgagccagttttactacggtgggtatggacaaggacaggagcagtatgggtacacgatgcctcaagaccctaatgcatattacggaggctactctggtggaggatacagcggtggttaccagcagacaccacaggcaggacagcaaccaccacaacagccaccacagcagcaacaagtcgggtttagctactaaccccgagagtattgcttgagttaatgtcactctgcttgttgtttgcgtactttgttatgaacttgtttctgcgtgccttgttatgaatattttcccaaacacagtttatttgtctttgcttttctctaggtgtgtgttgagtttttaactcttaataatgtttctgcgatgcttctgtttttaatgttttcatcacctttt

SEQ ID NO: 8718 - protein, 405 aa, Arabidopsis thaliana
MMQQPPPGGILPHHAPPPSAQQQYGYQQPYGIAGAAPPPPQMWNPQAAAPPSVQPTTADEIRTLWIGDLQYWMDENFLYGCFAHTGEMVSAKVIRNKQTGQVEGYGFIEFASHAAAERVLQTFNNAPIPSFPDQLFRLNWASLSSGDKRDDSPDYTIFVGDLAADVTDYILLETFRASYPSVKGAKVVIDRVTGRTKGYGFVRFSDESEQIRAMTEMNGVPCSTRPMRIGPAASKKGVTGQRDSYQSSAAGVTTDNDPNNTTVFVGGLDASVTDDHLKNVFSQYGEIVHVKIPAGKRCGFVQFSEKSCAEEALRMLNGVQLGGTTVRLSWGRSPSNKQSGDPSQFYYGGYGQGQEQYGYTMPQDPNAYYGGYSGGGYSGGYQQTPQAGQQPPQQPPQQQQVGFSY

SEQ ID NO: 8719 - protein, 404 aa, Arabidopsis thaliana
MQQPPPGGILPHHAPPPSAQQQYGYQQPYGIAGAAPPPPQMWNPQAAAPPSVQPTTADEIRTLWIGDLQYWMDENFLYGCFAHTGEMVSAKVIRNKQTGQVEGYGFIEFASHAAAERVLQTFNNAPIPSFPDQLFRLNWASLSSGDKRDDSPDYTIFVGDLAADVTDYILLETFRASYPSVKGAKVVIDRVTGRTKGYGFVRFSDESEQIRAMTEMNGVPCSTRPMRIGPAASKKGVTGQRDSYQSSAAGVTTDNDPNNTTVFVGGLDASVTDDHLKNVFSQYGEIVHVKIPAGKRCGFVQFSEKSCAEEALRMLNGVQLGGTTVRLSWGRSPSNKQSGDPSQFYYGGYGQGQEQYGYTMPQDPNAYYGGYSGGGYSGGYQQTPQAGQQPPQQPPQQQQVGFSY

SEQ ID NO: 8720 - protein, 364 aa, Arabidopsis thaliana
MWNPQAAAPPSVQPTTADEIRTLWIGDLQYWMDENFLYGCFAHTGEMVSAKVIRNKQTGQVEGYGFIEFASHAAAERVLQTFNNAPIPSFPDQLFRLNWASLSSGDKRDDSPDYTIFVGDLAADVTDYILLETFRASYPSVKGAKVVIDRVTGRTKGYGFVRFSDESEQIRAMTEMNGVPCSTRPMRIGPAASKKGVTGQRDSYQSSAAGVTTDNDPNNTTVFVGGLDASVTDDHLKNVFSQYGEIVHVKIPAGKRCGFVQFSEKSCAEEALRMLNGVQLGGTTVRLSWGRSPSNKQSGDPSQFYYGGYGQGQEQYGYTMPQDPNAYYGGYSGGGYSGGYQQTPQAGQQPPQQPPQQQQVGFSY

SEQ ID NO: 8721 - DNA, 1242 bp, Arabidopsis thaliana
agatgcggcggacggagttaccaaagaagaaggccgctcaaaataattaaatttgttcaaccgtcatcttcttcaactgatcttagctcaactaacacactctttcttcttggcgtcaattcaatcaaccaaaacctttttctcctatctagctcacgctttcttcttcttccaatggcgtcttctgcagctctcggatctctccatcagactttagggtcagccattaattcacagagtgaggttcactcgctttctggaaactggtctgcctctggtaattcatgtgtgccacggtggagattatccaacaggaacagcaactacaggctcgtgttacgtgctaaggccgctaaatcttcgacaacaaccataagtgatggttcatctgatgctagtgtgtcagacgggaagaaaacagttcgacggataactttcccgaaagaagtggaggcactggttcacgagatgtgtgatgaaactgaggttgctgtgctgcaacttaaggttggagatttcgagatgaacctaaaacggaagattggagcagccacaaaccccattcccgtggcggatatatctccaactgtagcgcctcctattccttctgaacctatgaataaatctgcttcttcggctcctagcccatctcaagcaaagccttcctctgagaaagtgtctccatttaagaatacatcatatgggaaaccagcaaagttggctgctttggaggcatctggatccaccaactatgtgttagtcacatctcccgcagtgggcaagtttcagaggagcagaactgtaaaaggaaagaaacaatctcctagctgcaaagagggtgatgcaataaaggaaggccaagttattggatacttacatcagttgggaacagaacttccagtgacgtcagatgtagctggagaagtccttaagcttctttcagatgacggagactccgtaggttatggagatcctctggttgcagtcttgccatctttccacgacatcaacatccagtgatgatggtttcttcagcccaattccatagcaaatgaatagtctttcatccggagactgtactattcatcttctcctgtgtttgttcaatgaagatttgtaatctgtttagttgcaaagagtctactttgatcttgctctcatcatttgtcacgtaatgtggattttctgcaccagagaaaaaaaacaattgtggaatttttatagaaatgacgtggctatctc

SEQ ID NO: 8722 - protein, 339 aa, Arabidopsis thaliana
RCGGRSYQRRRPLKIIKFVQPSSSSTDLSSTNTLFLLGVNSINQNLFLLSSSRFLLLPMASSAALGSLHQTLGSAINSQSEVHSLSGNWSASGNSCVPRWRLSNRNSNYRLVLRAKAAKSSTTTISDGSSDASVSDGKKTVRRITFPKEVEALVHEMCDETEVAVLQLKVGDFEMNLKRKIGAATNPIPVADISPTVAPPIPSEPMNKSASSAPSPSQAKPSSEKVSPFKNTSYGKPAKLAALEASGSTNYVLVTSPAVGKFQRSRTVKGKKQSPSCKEGDAIKEGQVIGYLHQLGTELPVTSDVAGEVLKLLSDDGDSVGYGDPLVAVLPSFHDINIQ

SEQ ID NO: 8723 - protein, 281 aa, Arabidopsis thaliana
MASSAALGSLHQTLGSAINSQSEVHSLSGNWSASGNSCVPRWRLSNRNSNYRLVLRAKAAKSSTTTISDGSSDASVSDGKKTVRRITFPKEVEALVHEMCDETEVAVLQLKVGDFEMNLKRKIGAATNPIPVADISPTVAPPIPSEPMNKSASSAPSPSQAKPSSEKVSPFKNTSYGKPAKLAALEASGSTNYVLVTSPAVGKFQRSRTVKGKKQSPSCKEGDAIKEGQVIGYLHQLGTELPVTSDVAGEVLKLLSDDGDSVGYGDPLVAVLPSFHDINIQ

SEQ ID NO: 8724 - protein, 183 aa, Arabidopsis thaliana
MCDETEVAVLQLKVGDFEMNLKRKIGAATNPIPVADISPTVAPPIPSEPMNKSASSAPSPSQAKPSSEKVSPFKNTSYGKPAKLAALEASGSTNYVLVTSPAVGKFQRSRTVKGKKQSPSCKEGDAIKEGQVIGYLHQLGTELPVTSDVAGEVLKLLSDDGDSVGYGDPLVAVLPSFHDINIQ

SEQ ID NO: 8725 - DNA, 2075 bp, Arabidopsis thaliana
gagcgcacacaaagtttgcttgccttctgggcttcacgattctcacgacatctgtttatcttctccgatttccacgtccatggatctcagtcaatgttccttaatctctcttttcgattagtccaatctccactaatctctgacctcagatcgcttccgacgccgctgaactgtgtccgtcttgatctgtgtttaggagaaagcttctagggtttttgttttggttgctgagtagaatttgttggatctgaaacggaaatcaaaatgggctttttcagtacgatactaggattttgtggatttggagttgggatttcattgggacttgttattggttacgttctcttcgtctacttgctccccaacgacgtcaaggatcctgaaattcgttcaatagctgaccaagatcccaaagctatgctacggatgcttccagagatacctctatgggtcaaaaatccggatttcgatcgtgttgactggataaacagatttctcgagtacatgtggccttatctcgacaaggccatatgtaagactgcaaagaatatagcaaaaccgatcattgaggagcagataccaaagtacaagattgactctgttgaatttgaaacgcttactctaggctctttaccccctacatttcaagggatgaaagtttatctcacggatgagaaagagttgattatggaaccatgcttgaaatgggccgcaaatcccaatatcttggttgccatcaaggcatttgggttgaaggcaacagttcaggtggtcgatctgcaagtttttgctcagcctcgtatcactctcaagccattagttccaagtttcccttgttttgccaatatctatgtgtctcttatggagaagccacatgttgattttggactgaagcttggtggagcagatcttatgtcaatccctggcctctacagatttgttcaggagcaaatcaaggatcaagttgcgaacatgtatctctggcctaagacccttgtagttccaatccttgaccctgcaaaggcgttcagaaggcctgttggaattgtccatgtgaaagttgtgagggctgtggggctgaggaaaaaagatctgatgggcggggcagatccattcgtgaaaatcaagctctctgaagataagattccttctaagaagacaacagttaaacacaagaatttgaatcctgaatggaatgaggagttcaaattctcggtcagagatccccagactcaggttctagagttcagtgtgtatgactgggaacaggttgggaatcccgagaagatgggtatgaatgtattagctctgaaagaaatggtgcctgacgaacataaagcattcaccttggaactgcgtaagactctggacggcggtgaagatgggcagcctcctgacaagtatagggggaagctggaggttgaactcttgtataagccattcacggaggaagaaatgcccaaaggctttgaagaaacgcaagccgtgcagaaagctccagaaggcacaccggctgctggaggaatgcttgtggtaatagtgcattcggctgaggatgttgaaggaaagcaccataccaatccttacgtgcgcatctatttcaaaggagaagagagaaaaacaaagcacgtgaagaagaacagagacccaaggtggaatgaggagttcacctttatgctcgaggagcctccagtccgtgagaagctgcacgttgaagtgctgagcacctcttccaggataggtctattgcatcccaaggaaacactggggtatgtggatattccagtggtggacgtggtgaacaacaaaaggatgaatcagaagtttcaccttattgattctaagaacggaaagatccaaatcgagctcgagtggcgaactgcctcttgatttctgagttgattcgagaacaaacaaagagataattggtttgatgttgttaagaactatgtgttgttgtacaaaatgggctttaactcttaaaaaccaacattcagatttgcagagccttcttttatttggatttgtgtgtcttcgacttctcttttctatgaaattcggtagtgtgagtgacc

SEQ ID NO: 8726 - protein, 541 aa, Arabidopsis thaliana
MGFFSTILGFCGFGVGISLGLVIGYVLFVYLLPNDVKDPEIRSIADQDPKAMLRMLPEIPLWVKNPDFDRVDWINRFLEYMWPYLDKAICKTAKNIAKPIIEEQIPKYKIDSVEFETLTLGSLPPTFQGMKVYLTDEKELIMEPCLKWAANPNILVAIKAFGLKATVQVVDLQVFAQPRITLKPLVPSFPCFANIYVSLMEKPHVDFGLKLGGADLMSIPGLYRFVQEQIKDQVANMYLWPKTLVVPILDPAKAFRRPVGIVHVKVVRAVGLRKKDLMGGADPFVKIKLSEDKIPSKKTTVKHKNLNPEWNEEFKFSVRDPQTQVLEFSVYDWEQVGNPEKMGMNVLALKEMVPDEHKAFTLELRKTLDGGEDGQPPDKYRGKLEVELLYKPFTEEEMPKGFEETQAVQKAPEGTPAAGGMLVVIVHSAEDVEGKHHTNPYVRIYFKGEERKTKHVKKNRDPRWNEEFTFMLEEPPVREKLHVEVLSTSSRIGLLHPKETLGYVDIPVVDVVNNKRMNQKFHLIDSKNGKIQIELEWRTAS

SEQ ID NO: 8727 - protein, 490 aa, Arabidopsis thaliana
MLRMLPEIPLWVKNPDFDRVDWINRFLEYMWPYLDKAICKTAKNIAKPIIEEQIPKYKIDSVEFETLTLGSLPPTFQGMKVYLTDEKELIMEPCLKWAANPNILVAIKAFGLKATVQVVDLQVFAQPRITLKPLVPSFPCFANIYVSLMEKPHVDFGLKLGGADLMSIPGLYRFVQEQIKDQVANMYLWPKTLVVPILDPAKAFRRPVGIVHVKVVRAVGLRKKDLMGGADPFVKIKLSEDKIPSKKTTVKHKNLNPEWNEEFKFSVRDPQTQVLEFSVYDWEQVGNPEKMGMNVLALKEMVPDEHKAFTLELRKTLDGGEDGQPPDKYRGKLEVELLYKPFTEEEMPKGFEETQAVQKAPEGTPAAGGMLVVIVHSAEDVEGKHHTNPYVRIYFKGEERKTKHVKKNRDPRWNEEFTFMLEEPPVREKLHVEVLSTSSRIGLLHPKETLGYVDIPVVDVVNNKRMNQKFHLIDSKNGKIQIELEWRTAS

SEQ ID NO: 8728 - protein, 487 aa, Arabidopsis thaliana
MLPEIPLWVKNPDFDRVDWINRFLEYMWPYLDKAICKTAKNIAKPIIEEQIPKYKIDSVEFETLTLGSLPPTFQGMKVYLTDEKELIMEPCLKWAANPNILVAIKAFGLKATVQVVDLQVFAQPRITLKPLVPSFPCFANIYVSLMEKPHVDFGLKLGGADLMSIPGLYRFVQEQIKDQVANMYLWPKTLVVPILDPAKAFRRPVGIVHVKVVRAVGLRKKDLMGGADPFVKIKLSEDKIPSKKTTVKHKNLNPEWNEEFKFSVRDPQTQVLEFSVYDWEQVGNPEKMGMNVLALKEMVPDEHKAFTLELRKTLDGGEDGQPPDKYRGKLEVELLYKPFTEEEMPKGFEETQAVQKAPEGTPAAGGMLVVIVHSAEDVEGKHHTNPYVRIYFKGEERKTKHVKKNRDPRWNEEFTFMLEEPPVREKLHVEVLSTSSRIGLLHPKETLGYVDIPVVDVVNNKRMNQKFHLIDSKNGKIQIELEWRTAS

SEQ ID NO: 8729 - DNA, 1600 bp, Arabidopsis thaliana
agtctcaggtcagagaagccatcatcaacattcaacaagagagccgtgtttgtgtcttgactgattcttctctcaagcttttttaatctctctctcttttcccacgtaattcccccaaatccattctttctagggttcgatctccctctctcaatcatgaaccttcttctcttctagaccccacaaagtttcccccttttatttgatcggcgacggagaagcctaagtctgatcccggaatgtctgtctccgagctcaaagaacgccacgccgtcgctacggagaccgttaataacctccgtgaccagcttagacagagacgcctccagctcctcgataccgatgtggcgaggtattcagcggcgcaaggacgtactcgggtgagcttcggagcaacggatctggtttgttgtcgtactcttcagggacacaccggaaaggtttattcattagattggacaccggagaggaaccggattgtcagtgcatctcaagatgggagattaatcgtgtggaatgctctaacgagtcagaaaactcatgctattaaactcccttgtgcatgggttatgacatgtgctttctctccaaatggtcagtcggttgcgtgtggtggattagacagtgtatgttctatctttagccttagctcaacggcggacaaggatggaactgtaccggtttcaagaatgctcactggtcacaggggatatgtttcgtgctgtcagtatgtcccaaatgaggatgcccaccttatcaccagttcaggtgatcaaacttgtatcttatgggatgtaactactggtctcaaaacttctgtttttggcggtgaatttcagtctggacatactgctgatgtactaagcgtctcaatcagtggatcaaacccaaactggtttatatctggttcatgcgattccacagcacggttgtgggacactcgtgctgcaagccgagcagtgcgtacctttcatggtcacgagggagatgttaatacggtcaagttctttccggatgggtatagatttgggactggatcagacgatggaacatgcaggctgtatgacataaggactggtcaccaactccaggtctatcagccacatggtgatggtgagaacggacctgtcacctccattgcattctctgtgtcagggagacttcttttcgctggctatgcgagcaacaacacttgctacgtttgggataccctcttgggagaggttgtattggatttgggattacagcaggattcacacaggaatagaataagctgtttggggttgtcagcagatggaagtgccttgtgtacaggaagttgggattcaaatctaaagatatgggcgtttggaggaccaggagagtgatttgaagaagatttaacgaaagtaggagtcacgtctccagttgttggttaatatattctgtagtcgggaagtaaggttcggtttgtggaaggtgtttggtttgaaatagtggagtggttagaagaattaaacttccctttttgtagtgtgctttgatttatttatttcttcattgggaactaaactccttcaacacgctactcaatgtgaattctgtaatcaattgtgtaccc

SEQ ID NO: 8730 - protein, 375 aa, Arabidopsis thaliana
MSVSELKERHAVATETVNNLRDQLRQRRLQLLDTDVARYSAAQGRTRVSFGATDLVCCRTLQGHTGKVYSLDWTPERNRIVSASQDGRLIVWNALTSQKTHAIKLPCAWVMTCAFSPNGQSVACGGLDSVCSIFSLSSTADKDGTVPVSRMLTGHRGYVSCCQYVPNEDAHLITSSGDQTCILWDVTTGLKTSVFGGEFQSGHTADVLSVSISGSNPNWFISGSCDSTARLWDTRAASRAVRTFHGHEGDVNTVKFFPDGYRFGTGSDDGTCRLYDIRTGHQLQVYQPHGDGENGPVTSIAFSVSGRLLFAGYASNNTCYVWDTLLGEVVLDLGLQQDSHRNRISCLGLSADGSALCTGSWDSNLKIWAFGGPGE

SEQ ID NO: 8731 - protein, 265 aa, Arabidopsis thaliana
MTCAFSPNGQSVACGGLDSVCSIFSLSSTADKDGTVPVSRMLTGHRGYVSCCQYVPNEDAHLITSSGDQTCILWDVTTGLKTSVFGGEFQSGHTADVLSVSISGSNPNWFISGSCDSTARLWDTRAASRAVRTFHGHEGDVNTVKFFPDGYRFGTGSDDGTCRLYDIRTGHQLQVYQPHGDGENGPVTSIAFSVSGRLLFAGYASNNTCYVWDTLLGEVVLDLGLQQDSHRNRISCLGLSADGSALCTGSWDSNLKIWAFGGPGE

SEQ ID NO: 8732 - protein, 225 aa, Arabidopsis thaliana
MLTGHRGYVSCCQYVPNEDAHLITSSGDQTCILWDVTTGLKTSVFGGEFQSGHTADVLSVSISGSNPNWFISGSCDSTARLWDTRAASRAVRTFHGHEGDVNTVKFFPDGYRFGTGSDDGTCRLYDIRTGHQLQVYQPHGDGENGPVTSIAFSVSGRLLFAGYASNNTCYVWDTLLGEVVLDLGLQQDSHRNRISCLGLSADGSALCTGSWDSNLKIWAFGGPGE

SEQ ID NO: 8733 - DNA, 1706 bp, Arabidopsis thaliana
gtcgatttctcttatgctcggattgctaaataatttattttatttttttaaatggtttgattctataattgtgagaggtttttatcatatggtttagtcttttttggcattttatctgaaaatattatcatcatccacgtggcaaatcctcgtcagccggctcacgagaacctcaattatccaatctttgtatgtcacttgagtctctatatatcaaaccaccgaaaagcacgattgtttatcgtagtgcgttacaagcgttttaagctctcactagcaagcaagtactagcaacaatggcgtcaagcactgcgactatgctcaaagcctcaccggtgaaatctgattgggttaagggacagagtcttctcctccgtcaaccttcctctgtctcagctattcgcagccacgtggcaccttccgctctcaccgtccgagccgcttctgcttacgccgatgagctcgtcaaaaccgctaaaacaatcgcgtctccgggacacggaattatggcgatggatgagtccaacgcgacttgtggaaagcgtttggcgtcaattgggctagagaacacggaggctaaccgtcaagcttacaggacgttgcttgtgtcggctccaggacttggacagtacatctccggagctatcctgttcgaggagactctgtaccaatccaccactgatggcaagaaaatggttgatgttctcgtcgagcagaacatcgtccctggcatcaaagtcgacaagggtttggtgccacttgttgggtcttacgacgagtcatggtgccaaggacttgacggtttagcctctcgcaccgctgcttactaccaacaaggtgctcgtttcgccaaatggcgtactgttgtgagcattccaaatggaccctctgctttggctgttaaagaagcagcttggggacttgctcgctacgcagctatttctcaagacagcggtctggtgccgattgtggagccagagattatgttggacggagaacacggcattgacaggacatacgacgttgcagagaaggtttgggctgaggtcttcttctacctcgctcagaacaacgtcatgttcgaaggtattctcctgaagccaagcatggttactccaggagctgaggccacagacagagctactcctgagcaggttgcttcctacactctcaagctccttcgcaacagaatccctcccgctgtccccggaatcatgttcttgtctggtggacagtccgagttggaggcgaccttgaacttgaacgcaatgaaccaggcaccgaacccatggcacgtgtccttctcctacgcacgtgccttgcagaacacttgcttgaagacatggggaggcaaggaagagaacgtgaaggcggctcaggacattctcttggccagagccaaagccaattcgctggctcagctcgggaaatacactggagaaggcgagtctgaggaagccaaggagggtatgtttgtaaaaggctacacctactaagctatttgtaataatggttccatagatcaaaactcaaaaacttgagcttgattctggtcatttgagttattatactcttcttcaggtataaaagtcagttctgtgttatcatgtgagactagttttgtttcttcatggttaatatcttagtacctactcgttactactaataattgagttagtagtctgtttctatcattgttatcactc

SEQ ID NO: 8734 - protein, 399 aa, Arabidopsis thaliana
MASSTATMLKASPVKSDWVKGQSLLLRQPSSVSAIRSHVAPSALTVRAASAYADELVKTAKTIASPGHGIMAMDESNATCGKRLASIGLENTEANRQAYRTLLVSAPGLGQYISGAILFEETLYQSTTDGKKMVDVLVEQNIVPGIKVDKGLVPLVGSYDESWCQGLDGLASRTAAYYQQGARFAKWRTVVSIPNGPSALAVKEAAWGLARYAAISQDSGLVPIVEPEIMLDGEHGIDRTYDVAEKVWAEVFFYLAQNNVMFEGILLKPSMVTPGAEATDRATPEQVASYTLKLLRNRIPPAVPGIMFLSGGQSELEATLNLNAMNQAPNPWHVSFSYARALQNTCLKTWGGKEENVKAAQDILLARAKANSLAQLGKYTGEGESEEAKEGMFVKGYTY

SEQ ID NO: 8735 - protein, 392 aa, Arabidopsis thaliana
MLKASPVKSDWVKGQSLLLRQPSSVSAIRSHVAPSALTVRAASAYADELVKTAKTIASPGHGIMAMDESNATCGKRLASIGLENTEANRQAYRTLLVSAPGLGQYISGAILFEETLYQSTTDGKKMVDVLVEQNIVPGIKVDKGLVPLVGSYDESWCQGLDGLASRTAAYYQQGARFAKWRTVVSIPNGPSALAVKEAAWGLARYAAISQDSGLVPIVEPEIMLDGEHGIDRTYDVAEKVWAEVFFYLAQNNVMFEGILLKPSMVTPGAEATDRATPEQVASYTLKLLRNRIPPAVPGIMFLSGGQSELEATLNLNAMNQAPNPWHVSFSYARALQNTCLKTWGGKEENVKAAQDILLARAKANSLAQLGKYTGEGESEEAKEGMFVKGYTY

SEQ ID NO: 8736 - protein, 329 aa, Arabidopsis thaliana
MAMDESNATCGKRLASIGLENTEANRQAYRTLLVSAPGLGQYISGAILFEETLYQSTTDGKKMVDVLVEQNIVPGIKVDKGLVPLVGSYDESWCQGLDGLASRTAAYYQQGARFAKWRTVVSIPNGPSALAVKEAAWGLARYAAISQDSGLVPIVEPEIMLDGEHGIDRTYDVAEKVWAEVFFYLAQNNVMFEGILLKPSMVTPGAEATDRATPEQVASYTLKLLRNRIPPAVPGIMFLSGGQSELEATLNLNAMNQAPNPWHVSFSYARALQNTCLKTWGGKEENVKAAQDILLARAKANSLAQLGKYTGEGESEEAKEGMFVKGYTY

SEQ ID NO: 8737 - DNA, 1324 bp, Arabidopsis thaliana
tgcacctatctcactctaaaatctctctctgccaatctcatcttcaacctctctctaactctcgttttcgattctacaatggctgacaagaagattaggatcggaatcaacggattcggaagaattggtcgtttggttgctagagttgttctccagagggacgatgttgagctcgtcgctgtcaacgaccccttcatcactactgagtacatgacctacatgttcaagtacgacagtgttcacggtcaatggaaacacaatgaactcaagatcaaggatgagaagacccttctcttcggtgagaagccagtcactgttttcggcatcaggaaccctgaggatatcccatgggccgaggctggagctgactacgttgttgagtctactggtgtcttcactgacaaagacaaggctgcagctcacttgaagggtggtgccaagaaggttgttatctctgcccccagcaaagacgctccaatgtttgttgttggtgtcaacgagcacgaatacaagtccgaccttgacattgtctccaacgctagctgcaccactaactgccttgctccccttgccaaggttatcaatgacagatttggaattgttgagggtcttatgactacagtccactcaatcactgctactcagaagactgttgatgggccttcaatgaaggactggagaggtggaagagctgcttcattcaacattattcccagcagcactggagctgccaaggctgtcggaaaggtgcttccagctcttaacggaaagttgactggaatgtctttccgtgtcccaaccgttgatgtctcagttgttgaccttactgtcagactcgagaaagctgctacctacgatgaaatcaaaaaggctatcaaggaggaatccgaaggcaaactcaagggaatccttggatacaccgaggatgatgttgtctcaactgacttcgttggcgacaacaggtcgagcatttttgacgccaaggctggaattgcattgagcgacaagtttgtgaaattggtgtcatggtacgacaacgaatggggttacagttcccgtgtggtcgacttgatcgtccacatgtcaaaggcctaagctaagaagcagatctcgaatgatagggagtggaaagtcatctgttcatccccttttatggtctgaatttgtcgttttcgaataaaatttctttgaacttggaactttttttttttttggttttcttaattctcattcatgtgaggtgatgggagtttgtagaccgatgttttactggaagccctttgtttttggcttttgatatattgagttaacgttatggttttcg

SEQ ID NO: 8738 - protein, 364 aa, Arabidopsis thaliana
CTYLTLKSLSANLIFNLSLTLVFDSTMADKKIRIGINGFGRIGRLVARVVLQRDDVELVAVNDPFITTEYMTYMFKYDSVHGQWKHNELKIKDEKTLLFGEKPVTVFGIRNPEDIPWAEAGADYVVESTGVFTDKDKAAAHLKGGAKKVVISAPSKDAPMFVVGVNEHEYKSDLDIVSNASCTTNCLAPLAKVINDRFGIVEGLMTTVHSITATQKTVDGPSMKDWRGGRAASFNIIPSSTGAAKAVGKVLPALNGKLTGMSFRVPTVDVSVVDLTVRLEKAATYDEIKKAIKEESEGKLKGILGYTEDDVVSTDFVGDNRSSIFDAKAGIALSDKFVKLVSWYDNEWGYSSRVVDLIVHMSKA

SEQ ID NO: 8739 - protein, 338 aa, Arabidopsis thaliana
MADKKIRIGINGFGRIGRLVARVVLQRDDVELVAVNDPFITTEYMTYMFKYDSVHGQWKHNELKIKDEKTLLFGEKPVTVFGIRNPEDIPWAEAGADYVVESTGVFTDKDKAAAHLKGGAKKVVISAPSKDAPMFVVGVNEHEYKSDLDIVSNASCTTNCLAPLAKVINDRFGIVEGLMTTVHSITATQKTVDGPSMKDWRGGRAASFNIIPSSTGAAKAVGKVLPALNGKLTGMSFRVPTVDVSVVDLTVRLEKAATYDEIKKAIKEESEGKLKGILGYTEDDVVSTDFVGDNRSSIFDAKAGIALSDKFVKLVSWYDNEWGYSSRVVDLIVHMSKA

SEQ ID NO: 8740 - protein, 294 aa, Arabidopsis thaliana
MTYMFKYDSVHGQWKHNELKIKDEKTLLFGEKPVTVFGIRNPEDIPWAEAGADYVVESTGVFTDKDKAAAHLKGGAKKVVISAPSKDAPMFVVGVNEHEYKSDLDIVSNASCTTNCLAPLAKVINDRFGIVEGLMTTVHSITATQKTVDGPSMKDWRGGRAASFNIIPSSTGAAKAVGKVLPALNGKLTGMSFRVPTVDVSVVDLTVRLEKAATYDEIKKAIKEESEGKLKGILGYTEDDVVSTDFVGDNRSSIFDAKAGIALSDKFVKLVSWYDNEWGYSSRVVDLIVHMSKA

SEQ ID NO: 8741 - DNA, 1869 bp, Arabidopsis thaliana
cagaggatcattttctcatatctctctcgtagccaatgacactttctccacaatcctctctctttcttcttcgtcgtcatcatttgattcttctctgtaaattactctgatttttgtagaaatcgaaactgggcttgatcaattttgactctttgcatccaatttcgattctaatctccgtaattgttctccgaatcgggtcaatttcaagttgggaaacaaaccctagcgaacctccattgatgtgatctctctctctctctcacaacttgagaatcaactctctagaaaatatcagaaaatcgttgaaaaaatctggtcttttctggagggaaatgccaggggtagctgtgaagctctatagcgtcttctttaagttactattgaaacatcgtcttcagaatctgatttcaatttcagctgctgatggcttatctgattcctttggtgtttcgacccgatccgatgaatccgtcgccgccgcgaatccgtctttcaccgacggtgttgccaccaaagatatacacattgatccaatgacgtcactcaccgtaaggatctttcttcccgaatctgctctttctccagaaccagattcgttacgccacaaggataattataaccaccaacccagatctgatcggagacatagctatggccctaatcataactctccggcaccggcggagaggaacgaatctcgaaggaacagctatggttgcaacaacgagaatctagaaccttatggtggatatgcgccatctgcgaagaggaattctcggaaactaccagtgatgttgcagtttcatggtggaggttgggttagtggaagttctgattcggctgctaatgacttcttttgccggagaattgctaaagtctgtgatgtcattgtattggccgttggttataggcttgcgcctgagaataggtaccctgcggcgtttgaggatggagtcaaagtgcttcattggcttgggaaacaggctaatctagctgattgttgtaagtctttgggtaatcgacgtgtcaatggcgttgaggttaagaagttgaatgttcaaggacagattgtggatgcttttggagcttccatggttgagccttggttggctgctcacgccgatccttccagatgtgttcttctcggggtgagctgtggtgggaacatagcagactatgtagctcggaaagcagtggaagctgggaaacttctagaaccggtgaaagttgttgcacaggttctaatgtacccctttttcattggaaacaacccaacacagtccgaaataaagctggcaaactcttacttctacgataagcctgtctctgttctagcctggaaactcttcttaccagagaaagagttcgactttgaccacccggcagcaaacccacttgcccataaccgcagtggaccacctctgaagctaatgcctccaacacttacagtagtagctgagcatgactggatgagagaccgagccattgcttattcagaagagcttagaaaggtaaacgtagattctccagttttagaatacaaagacgcagttcatgagtttgctacacttgatatgcttctcaagactcctcaggcacaggcctgcgccgaagatattgccatttgggtcaagaaatacatttcactccgcggccatgagttctcttactgaaaatttttaccctgttattattcattttcttccttttttttgtgtgatagcaagattttctgggtaggattagagacaatccaagatcgagtcttttggcaaaagctataaaattttattttttggttacttatgtattcatatgtacgtattctgaataaaccatttttggttcgaccaaattttcaagttt

SEQ ID NO: 8742 - protein, 446 aa, Arabidopsis thaliana
MPGVAVKLYSVFFKLLLKHRLQNLISISAADGLSDSFGVSTRSDESVAAANPSFTDGVATKDIHIDPMTSLTVRIFLPESALSPEPDSLRHKDNYNHQPRSDRRHSYGPNHNSPAPAERNESRRNSYGCNNENLEPYGGYAPSAKRNSRKLPVMLQFHGGGWVSGSSDSAANDFFCRRIAKVCDVIVLAVGYRLAPENRYPAAFEDGVKVLHWLGKQANLADCCKSLGNRRVNGVEVKKLNVQGQIVDAFGASMVEPWLAAHADPSRCVLLGVSCGGNIADYVARKAVEAGKLLEPVKVVAQVLMYPFFIGNNPTQSEIKLANSYFYDKPVSVLAWKLFLPEKEFDFDHPAANPLAHNRSGPPLKLMPPTLTVVAEHDWMRDRAIAYSEELRKVNVDSPVLEYKDAVHEFATLDMLLKTPQAQACAEDIAIWVKKYISLRGHEFSY

SEQ ID NO: 8743 - protein, 379 aa, Arabidopsis thaliana
MTSLTVRIFLPESALSPEPDSLRHKDNYNHQPRSDRRHSYGPNHNSPAPAERNESRRNSYGCNNENLEPYGGYAPSAKRNSRKLPVMLQFHGGGWVSGSSDSAANDFFCRRIAKVCDVIVLAVGYRLAPENRYPAAFEDGVKVLHWLGKQANLADCCKSLGNRRVNGVEVKKLNVQGQIVDAFGASMVEPWLAAHADPSRCVLLGVSCGGNIADYVARKAVEAGKLLEPVKVVAQVLMYPFFIGNNPTQSEIKLANSYFYDKPVSVLAWKLFLPEKEFDFDHPAANPLAHNRSGPPLKLMPPTLTVVAEHDWMRDRAIAYSEELRKVNVDSPVLEYKDAVHEFATLDMLLKTPQAQACAEDIAIWVKKYISLRGHEFSY

SEQ ID NO: 8744 - protein, 293 aa, Arabidopsis thaliana
MLQFHGGGWVSGSSDSAANDFFCRRIAKVCDVIVLAVGYRLAPENRYPAAFEDGVKVLHWLGKQANLADCCKSLGNRRVNGVEVKKLNVQGQIVDAFGASMVEPWLAAHADPSRCVLLGVSCGGNIADYVARKAVEAGKLLEPVKVVAQVLMYPFFIGNNPTQSEIKLANSYFYDKPVSVLAWKLFLPEKEFDFDHPAANPLAHNRSGPPLKLMPPTLTVVAEHDWMRDRAIAYSEELRKVNVDSPVLEYKDAVHEFATLDMLLKTPQAQACAEDIAIWVKKYISLRGHEFSY

SEQ ID NO: 8745 - DNA, 841 bp, Arabidopsis thaliana
cgtagacttatctctatataccccctttaatttgtttgctcttagcctttactttatagttttatatcatatcaatcgacatggcgaatgtggatcgtgatcggcgtgtgcatgtagaccgtactgacaaacgtgttcatcagccaaactacgaagatgatgtcggttttggtggctatggcggttatggtgctggttctgattataagagtcgcggcccctccactaaccaaatcttggcacttatagcaggagttcccattggtggcacactgctaaccctagctggactcactctagccggttcggtgatcggcttgctagtctccatacccctcttcctcctcttcagtccggtgatagtcccggcggctctcactattgggcttgctgtgacgggaatcttggcttctggtttgtttgggttgacgggtctgagctcggtctcgtgggtcctcaactacctccgtgggacgagtgatacagtgccagagcaattggactacgctaaacggcgtatggctgatgcggtaggctatgctggtatgaagggaaaagagatgggtcagtatgtgcaagataaggctcatgaggctcgtgagactgagttcatgactgagacccatgagccgggtaaggccaggagaggctcataagctaatataaattgcgggagtcagttggaaacgcgataaatgtagttttacttttatgtcccagtttctttcctcttttaagaatatctttgtctatatatgtgttcgttcgttttgtcttgtccaaataaaaatccttgttagtgaaataagaaatgaaataaatatgttttcttttttgagat

SEQ ID NO: 8746 - protein, 191 aa, Arabidopsis thaliana
MANVDRDRRVHVDRTDKRVHQPNYEDDVGFGGYGGYGAGSDYKSRGPSTNQILALIAGVPIGGTLLTLAGLTLAGSVIGLLVSIPLFLLFSPVIVPAALTIGLAVTGILASGLFGLTGLSSVSWVLNYLRGTSDTVPEQLDYAKRRMADAVGYAGMKGKEMGQYVQDKAHEARETEFMTETHEPGKARRGS

SEQ ID NO: 8747 - DNA, 1664 bp, Arabidopsis thaliana
gatatcatcaccttccccactaatactctatagtttgtttttgttcttcttataatctttatattttcagcaaacgaaagggaagtgtgtcagaaatctcagagggtgagaatcccaatgaggatcttacccgaacctcgaggttcggttccgtgtcttctccttcttgtgtcggttctcttatcagcgactctctcactcgctcgtgtcgtcgaagttgtcggttacgccgagagcaagatcaaaaccccccatgcattttcaggacttcgagtgacgatcgactgtaaggtgaataaaggccattttgttacaaaaggttcgggaaacattgacgacaaaggaaagtttggtcttaatattcctcatgacattgtctccgacaacggagcgttaaaggaggagtgttacgctcagcttcacagcgcggcgggaacaccttgtccggctcacgacggccttgagtccaccaagatcgtgtttttatccaaatccggggataaacacattttgggtctcaaacaaaatctgaaattttcaccggagatttgcgtttccaaattcttctggcctatgcctaagttgcctccttttaagggctttgatcatcctttccctttacctccacctttggaacttccaccgtttctcaagaagccatgtccacctaaatacagtcctcctgtggaggttccacccccggtaccagtttacgagccgccgccaaagaaagagattcccccgccggttccggtttacgatccaccgcctaagaaagaggttccaccacctgtcccagtttacaagccaccaccaaaggtggagcttccaccgcctattcctaagaagccttgtccacctaaaccgccgaagatagagcacccacctccggttccggtttacaagccaccgccaaagatagagaagccacctccggttccggtttacaagcccccgccaaagatagagcacccacctcccgttccggtacacaagctaccgaagaagccatgtccgcctaagaaagttgatccaccgccggtgccagtccacaaaccaccaacgaagaagccttgtccgcctaagaaagttgatccaccgccggttccagtccacaagccgccgccaaagatagtcattccaccgccgaagatagagcacccacctccagttccggtttacaagccgccgccgaagatagagcatccaccaatctacataccaccaattgtgaagaagccgtgtcctccgccggtaccaatatacaaaccaccggttgtgatccccaagaagccatgccctccgccggtaccagtatacaaaccaccggtagtggtgattccaaagaagccatgtccgccacttccacagctcccaccacttccaaagtttccacctcttcctcctaaatacattcaccaccccaagttcgggaaatggcctccgttgcctccacacccttgagaaacattaaatacgtatatatagatatacgtatactcatgtataatcaacgtgtttgcctttttttaatattttatctttgcatatgttttatatcttgtttcttttgttggctttgagttctctttgtgtagactggttgtttatattcccgcaatcttccaacaataatatggtaatgatacgtttctcttttatct

SEQ ID NO: 8748 - protein, 448 aa, Arabidopsis thaliana
MRILPEPRGSVPCLLLLVSVLLSATLSLARVVEVVGYAESKIKTPHAFSGLRVTIDCKVNKGHFVTKGSGNIDDKGKFGLNIPHDIVSDNGALKEECYAQLHSAAGTPCPAHDGLESTKIVFLSKSGDKHILGLKQNLKFSPEICVSKFFWPMPKLPPFKGFDHPFPLPPPLELPPFLKKPCPPKYSPPVEVPPPVPVYEPPPKKEIPPPVPVYDPPPKKEVPPPVPVYKPPPKVELPPPIPKKPCPPKPPKIEHPPPVPVYKPPPKIEKPPPVPVYKPPPKIEHPPPVPVHKLPKKPCPPKKVDPPPVPVHKPPTKKPCPPKKVDPPPVPVHKPPPKIVIPPPKIEHPPPVPVYKPPPKIEHPPIYIPPIVKKPCPPPVPIYKPPVVIPKKPCPPPVPVYKPPVVVIPKKPCPPLPQLPPLPKFPPLPPKYIHHPKFGKWPPLPPHP

SEQ ID NO: 8749 - protein, 296 aa, Arabidopsis thaliana
MPKLPPFKGFDHPFPLPPPLELPPFLKKPCPPKYSPPVEVPPPVPVYEPPPKKEIPPPVPVYDPPPKKEVPPPVPVYKPPPKVELPPPIPKKPCPPKPPKIEHPPPVPVYKPPPKIEKPPPVPVYKPPPKIEHPPPVPVHKLPKKPCPPKKVDPPPVPVHKPPTKKPCPPKKVDPPPVPVHKPPPKIVIPPPKIEHPPPVPVYKPPPKIEHPPIYIPPIVKKPCPPPVPIYKPPVVIPKKPCPPPVPVYKPPVVVIPKKPCPPLPQLPPLPKFPPLPPKYIHHPKFGKWPPLPPHP

SEQ ID NO: 8750 - DNA, 1663 bp, Arabidopsis thaliana
gtcatcattatctctatctaataaatggcgttacaaaggcaactcctgaagagagctacttccgatatctatcaccgccgtgcgatctctctcctccgtactgatttctctacttctccttcgattgctgatgctccaccgcacattccgccgttcgttcaccagccacggccgtataaaggtccttccgccgatgaggttttacagaaacggaagaagtttctcggaccttctcttttccactactaccagaagcctcttaacatcgttgaagggaagatgcagtacttgtatgatgagagtggtaggcgatatctggatgcctttgctggaatagtcactgtgtcgtgcggtcactgccatccggatattcttaatgcgattacggaacagagcaagctacttcagcacgcgactactatttacctgcatcatgccattggtgattttgctgaagcattggctgccaagatgcccggaaatcttaaggttgtgtactttgtgaattctggctcagaagctaatgagctagcaatgatgatggctaggctttacactggtagccttgagatgatttccttgagaaatgcttatcatggtggaagttccaatactattggactaactgctcttaacacatggaagtacccattacctcagggggaaatccatcacgtagtaaatccagatccataccgtggagtttttggctctgatggttctctttatgctaaagatgttcaagaccacatcgagtatggtacctctggaaaagtagctggatttatcgcagagaccatccagggggtcggaggagctgtagaattggctcctggttacttaaagtcggtttatgaaattgttcgcaacgctggtggtgtatgcattgctgatgaagtccaaactggatttgggcgaacaggaagccactattggggtttccagactcaagatgtggttcctgacatagtcacaatggcaaagggaattggaaatggattgccattaggagctgtggtgactacaccagaaatcgcaagtgttttagctagcaagattctgttcaacacttttggtgggaacccggtttgttcagctggtggacttgcggttctaaacgttattgataaggagaaacgccaagaacattgtgctgaagttggttcacaccttatacaacgtttgaaagatgtgcagaaaagacatgatatcattggagacgtgagaggaagagggttaatggttgggattgagcttgtgagtgaccggaaagacaagacaccagccaaggctgaaacatctgtcttgtttgagcaacttagagaacttggcattctcgtcggaaaaggaggacttcatgggaacgttttcaggataaagccaccaatgtgtttcactaaagatgatgcagatttcttggtagatgcattggactattccatctccaggttgtgaacaaggatgaaacaaagccaacgagagtttttaaccatatgaaccgttttaatgtttccgcgtctttgtaacgaaaaccaagccaagtctcatctcctttgatttcagaataaataaataaaatttatttatttctcagtgttgctatgacataatacaaatacattagaaaagcccaattatttttgttttctttgttaaaattccc

SEQ ID NO: 8751 - protein, 476 aa, Arabidopsis thaliana
MALQRQLLKRATSDIYHRRAISLLRTDFSTSPSIADAPPHIPPFVHQPRPYKGPSADEVLQKRKKFLGPSLFHYYQKPLNIVEGKMQYLYDESGRRYLDAFAGIVTVSCGHCHPDILNAITEQSKLLQHATTIYLHHAIGDFAEALAAKMPGNLKVVYFVNSGSEANELAMMMARLYTGSLEMISLRNAYHGGSSNTIGLTALNTWKYPLPQGEIHHVVNPDPYRGVFGSDGSLYAKDVQDHIEYGTSGKVAGFIAETIQGVGGAVELAPGYLKSVYEIVRNAGGVCIADEVQTGFGRTGSHYWGFQTQDVVPDIVTMAKGIGNGLPLGAVVTTPEIASVLASKILFNTFGGNPVCSAGGLAVLNVIDKEKRQEHCAEVGSHLIQRLKDVQKRHDIIGDVRGRGLMVGIELVSDRKDKTPAKAETSVLFEQLRELGILVGKGGLHGNVFRIKPPMCFTKDDADFLVDALDYSISRL

SEQ ID NO: 8752 - protein, 391 aa, Arabidopsis thaliana
MQYLYDESGRRYLDAFAGIVTVSCGHCHPDILNAITEQSKLLQHATTIYLHHAIGDFAEALAAKMPGNLKVVYFVNSGSEANELAMMMARLYTGSLEMISLRNAYHGGSSNTIGLTALNTWKYPLPQGEIHHVVNPDPYRGVFGSDGSLYAKDVQDHIEYGTSGKVAGFIAETIQGVGGAVELAPGYLKSVYEIVRNAGGVCIADEVQTGFGRTGSHYWGFQTQDVVPDIVTMAKGIGNGLPLGAVVTTPEIASVLASKILFNTFGGNPVCSAGGLAVLNVIDKEKRQEHCAEVGSHLIQRLKDVQKRHDIIGDVRGRGLMVGIELVSDRKDKTPAKAETSVLFEQLRELGILVGKGGLHGNVFRIKPPMCFTKDDADFLVDALDYSISRL

SEQ ID NO: 8753 - protein, 327 aa, Arabidopsis thaliana
MPGNLKVVYFVNSGSEANELAMMMARLYTGSLEMISLRNAYHGGSSNTIGLTALNTWKYPLPQGEIHHVVNPDPYRGVFGSDGSLYAKDVQDHIEYGTSGKVAGFIAETIQGVGGAVELAPGYLKSVYEIVRNAGGVCIADEVQTGFGRTGSHYWGFQTQDVVPDIVTMAKGIGNGLPLGAVVTTPEIASVLASKILFNTFGGNPVCSAGGLAVLNVIDKEKRQEHCAEVGSHLIQRLKDVQKRHDIIGDVRGRGLMVGIELVSDRKDKTPAKAETSVLFEQLRELGILVGKGGLHGNVFRIKPPMCFTKDDADFLVDALDYSISRL

SEQ ID NO: 8754 - DNA, 1050 bp, Arabidopsis thaliana
ggtattcgtcttccgcctcctctcccatcggttttgaacagcttggcagaagaagtgaaacttgagagagtaatggagaacttggaagatctgaaaattctggctgagcagtggtcgcatcaaggaattgaatatcttcagaagataccaccgaatcagctgtatgccgccattggtgttttgttgtttacaaccatcttgctcttcctatccattcgcctggtcagacgtaccaaatccaacactgtactcctttctgggctgaccggaagtggaaagactgtgctcttttaccaactccgagatggatcgtcgcatcagggcactgtaacatcaatggaaccaaatgaaggcacttttgttcttcacagtgaaaatactaagaaaggaaaaatcaagcctgttcatcttgttgatgttcctgggcactctcggcttcgacccaagctagaagaattcttgccccaagcagctgccattgtgttcgtagtggatgccttggagttcctcccaaactgtcgtgcagcttcagagtacctatacgagattctgaccaatgcgaatgttgtcaagaagaagattccagtcctcctttgctgtaacaagaccgataaactcactgcacacaccaaggagtttatccggaagcaaatggagaaagaaattgagaaactgagggcttcaaggagtgcagtctctactgctgatatagcgaatgacttcaccattggaattgagggagaagtgttctccttcacgcattgctccaacaaagtcactgtcgctgaggcatctggacttaccggagaaaccatccagattgaagacttcattcgagaatacatcaagccatgagctccaacatgccttcatagattgaatctaccacaagtttcttatgctttgggctgtgactttgatttgagtttagagatccttttgtatatgagatctttggatgatttagggtgttcaaaactgagtagctgtattttcgagttagataatctgttttaaatcggaatgattttaaggaaatgttaaatgact

SEQ ID NO: 8755 - protein, 284 aa, Arabidopsis thaliana
GIRLPPPLPSVLNSLAEEVKLERVMENLEDLKILAEQWSHQGIEYLQKIPPNQLYAAIGVLLFTTILLFLSIRLVRRTKSNTVLLSGLTGSGKTVLFYQLRDGSSHQGTVTSMEPNEGTFVLHSENTKKGKIKPVHLVDVPGHSRLRPKLEEFLPQAAAIVFVVDALEFLPNCRAASEYLYEILTNANVVKKKIPVLLCCNKTDKLTAHTKEFIRKQMEKEIEKLRASRSAVSTADIANDFTIGIEGEVFSFTHCSNKVTVAEASGLTGETIQIEDFIREYIKP

SEQ ID NO: 8756 - protein, 260 aa, Arabidopsis thaliana
MENLEDLKILAEQWSHQGIEYLQKIPPNQLYAAIGVLLFTTILLFLSIRLVRRTKSNTVLLSGLTGSGKTVLFYQLRDGSSHQGTVTSMEPNEGTFVLHSENTKKGKIKPVHLVDVPGHSRLRPKLEEFLPQAAAIVFVVDALEFLPNCRAASEYLYEILTNANVVKKKIPVLLCCNKTDKLTAHTKEFIRKQMEKEIEKLRASRSAVSTADIANDFTIGIEGEVFSFTHCSNKVTVAEASGLTGETIQIEDFIREYIKP

SEQ ID NO: 8757 - protein, 172 aa, Arabidopsis thaliana
MEPNEGTFVLHSENTKKGKIKPVHLVDVPGHSRLRPKLEEFLPQAAAIVFVVDALEFLPNCRAASEYLYEILTNANVVKKKIPVLLCCNKTDKLTAHTKEFIRKQMEKEIEKLRASRSAVSTADIANDFTIGIEGEVFSFTHCSNKVTVAEASGLTGETIQIEDFIREYIKP

SEQ ID NO: 8758 - DNA, 1223 bp, Arabidopsis thaliana
gaatctcgaagttggtcgaagcaaagcaaaagcaaaattctcttggccgagagaagaaacattgatcgtcgatcatggttggaccagtaagacctcaaatcgtacttttcggttcttcaattgttcaatatagcttcactgatcgtggttggggtgccactctcgctgacctctactctcgcacggctgatatcattcttcgtggatatgctggttggaattctaggtttgccttgaaggttcttcaccaagtattcccaaaggatgctgtgatacaaccttctttggtgatagtctatttcggtgggaatgattcaactcatcctcatccttcaggtcatggccctcatgttcctttatctgaattcatcgaaaacatgaggaagattggtgaacatcttttgagcctttctgataaaactcgtgtcattttcctcactccgccaccaatgaatgagaaacagatcgagatagtttttggagatgcaataaaaggccggagtaacgagttgtgccgtccatatgcagaagagttgttaaatctatgcagagagatcaatgtgaaaggtatcgatatttggaccgcgatacagcagcaagatgattggttgaacagctgcttcacagatgggatccatttcactgcgaaggcaagtgagattgttgttaaggagatattgaaggtactgagaggagcggattggaaaccaagtctttactggaaatcattaccggttgaatttccatttgattttgatgctccaaactctataagccttcatgacctagagttaaccagaaacaaccattttgagtcaccgcaccttgtaagcctttgtgaacaagagttaaccagaaacgagcagctggagccgccacaccctgtaagcctttgtgaccatgagttaacccgaaacgagcagctggagccgccacaccctgtaagcctttgtgaccatgagttaacccaaaacgagcagctggagccaccacagcctacggcgcgcttgtaaaacaagtcgtagttagagattatgcttctacattgacatcttgatggtgtgtaaccagtttcacctttcatttgcatctggatatttgtattgctaatttaacattttgttagacgttttgttttgtatcattagtttcgctgggtctttggattagaatattttgttctcacttgtgtgcttcagatatacaaaacaaaatgctagctc

SEQ ID NO: 8759 - protein, 312 aa, Arabidopsis thaliana
MVGPVRPQIVLFGSSIVQYSFTDRGWGATLADLYSRTADIILRGYAGWNSRFALKVLHQVFPKDAVIQPSLVIVYFGGNDSTHPHPSGHGPHVPLSEFIENMRKIGEHLLSLSDKTRVIFLTPPPMNEKQIEIVFGDAIKGRSNELCRPYAEELLNLCREINVKGIDIWTAIQQQDDWLNSCFTDGIHFTAKASEIVVKEILKVLRGADWKPSLYWKSLPVEFPFDFDAPNSISLHDLELTRNNHFESPHLVSLCEQELTRNEQLEPPHPVSLCDHELTRNEQLEPPHPVSLCDHELTQNEQLEPPQPTARL

SEQ ID NO: 8760 - protein, 211 aa, Arabidopsis thaliana
MRKIGEHLLSLSDKTRVIFLTPPPMNEKQIEIVFGDAIKGRSNELCRPYAEELLNLCREINVKGIDIWTAIQQQDDWLNSCFTDGIHFTAKASEIVVKEILKVLRGADWKPSLYWKSLPVEFPFDFDAPNSISLHDLELTRNNHFESPHLVSLCEQELTRNEQLEPPHPVSLCDHELTRNEQLEPPHPVSLCDHELTQNEQLEPPQPTARL

SEQ ID NO: 8761 - protein, 187 aa, Arabidopsis thaliana
MNEKQIEIVFGDAIKGRSNELCRPYAEELLNLCREINVKGIDIWTAIQQQDDWLNSCFTDGIHFTAKASEIVVKEILKVLRGADWKPSLYWKSLPVEFPFDFDAPNSISLHDLELTRNNHFESPHLVSLCEQELTRNEQLEPPHPVSLCDHELTRNEQLEPPHPVSLCDHELTQNEQLEPPQPTARL

SEQ ID NO: 8762 - DNA, 2117 bp, Arabidopsis thaliana
tcacttcctttttcccgaatcttgataatgtaaattcacaacaaatctgtttaaaaacaaccaatcaaaacccaacattgcttctcaacaaaaaagcaaagcaaaagattttgcgagagaaaaaaagaaaatggatttgttcaagatccttcttcttgtgttcttcgtgaacataagtttctgcttcgctgcagatccatattctttctataacttcgaagtctcttacattactgcttctcctcttggtgtccctcaacaggtcattgctataaatggaaagtttcctggtcctacaatcaatgttacaaccaatgaaaatctggttgttaatgtcagaaacaagttagacgagggacttcttcttcattggaatggaatccaacagagacgtgtgtcatggcaagatggagttttaggaaccaattgtccaatcccaccaaagtggaattggacttatgagtttcaagttaaagaccaaattggtagtttcttctactttccatctctacatttccagagagcttctggtggttttggctcctttgttgtcaatcctagagctattattccagtccctttctctactccagacggtgatattaccgttaccattggtgattggtacataaggaaccacacggctttgaggaaggctttggatgatggtaaagatcttggaatgcctgatggagttctcattaatggaaaaggaccttaccgatacaatgacacgcttgttgctgatgggatcgatttcgaaacaatcacagtccatcctggaaaaacttatagacttcgagtgtcgaatgtgggaatctcgacgagtttgaactttaggattcaaggtcacaacttagttcttgcggaatcagaaggatcatacacagttcaacaaaactatacaagcttggatattcatgttggacagtcttattctttcttggttacaatggatcaaaacgcgagctctgattactacattgtcgcgagtgctcgggttgttaacgaaaccatatggagaagagtcactggagttggaatcttgaagtataccaactctaaaggaaaagctaaaggtcagttaccccctggaccacaagacgaattcgacaaaactttctccatgaatcaagcaagatccatcagatggaatgtatcagcaagtggtgcacgtcctaacccgcaaggatcatttaaatacggttcgatcaatgtaaccgatgtctacgttctaaggaacatgccgcctgtgacgattagtgggaagagaagaacaacgcttaatggcatatcgttcaagaatccttcaacacctattagactagctgataagcttaaagttaaagatgtgtataagcttgatttccctaagagacctttaactggaccagctaaagtggcgacttcgattatcaatggtacttatcgtggattcatggaagtcgttcttcagaacaatgacactaagatgcaaagctatcacatgagtggctacgccttctttgtcgtcggtatggattatggagagtggacagagaacagtagaggaacatacaacaaatgggatggtatcgcgcgttccactattcaggtgtatccaggggcatggtcagcgatattgatatcattagacaatcctggagcttggaatctaagaacagagaatcttgattcgtggtatcttggacaagaaacttacgttagagtggttaatccagacgaaaacaacaaaaccgaattcggacaccctgacaatgttctttactgtggtgctctcagcaaactacaaaagccacagaaggtttcatcgtcggcatcgaagagcattggattcacgagtctttctatggtggtaatggctttggtgatgatgatgatgcttcagcattgaaattgttaaatctgagggtttgttgtattttctagggttttgttgatatcaaaccagagatgatgattcttcttcttctttacgtttccacagttcttcttatttgggggttgttggatttctctgacttgtctttttttttttgtttctttttggattcaatctgttgttttattctttttcccgggatttgtttatttgagaagaagaaaaacaaatattc

SEQ ID NO: 8763 - protein, 587 aa, Arabidopsis thaliana
MDLFKILLLVFFVNISFCFAADPYSFYNFEVSYITASPLGVPQQVIAINGKFPGPTINVTTNENLVVNVRNKLDEGLLLHWNGIQQRRVSWQDGVLGTNCPIPPKWNWTYEFQVKDQIGSFFYFPSLHFQRASGGFGSFVVNPRAIIPVPFSTPDGDITVTIGDWYIRNHTALRKALDDGKDLGMPDGVLINGKGPYRYNDTLVADGIDFETITVHPGKTYRLRVSNVGISTSLNFRIQGHNLVLAESEGSYTVQQNYTSLDIHVGQSYSFLVTMDQNASSDYYIVASARVVNETIWRRVTGVGILKYTNSKGKAKGQLPPGPQDEFDKTFSMNQARSIRWNVSASGARPNPQGSFKYGSINVTDVYVLRNMPPVTISGKRRTTLNGISFKNPSTPIRLADKLKVKDVYKLDFPKRPLTGPAKVATSIINGTYRGFMEVVLQNNDTKMQSYHMSGYAFFVVGMDYGEWTENSRGTYNKWDGIARSTIQVYPGAWSAILISLDNPGAWNLRTENLDSWYLGQETYVRVVNPDENNKTEFGHPDNVLYCGALSKLQKPQKVSSSASKSIGFTSLSMVVMALVMMMMLQH

SEQ ID NO: 8764 - protein, 403 aa, Arabidopsis thaliana
MPDGVLINGKGPYRYNDTLVADGIDFETITVHPGKTYRLRVSNVGISTSLNFRIQGHNLVLAESEGSYTVQQNYTSLDIHVGQSYSFLVTMDQNASSDYYIVASARVVNETIWRRVTGVGILKYTNSKGKAKGQLPPGPQDEFDKTFSMNQARSIRWNVSASGARPNPQGSFKYGSINVTDVYVLRNMPPVTISGKRRTTLNGISFKNPSTPIRLADKLKVKDVYKLDFPKRPLTGPAKVATSIINGTYRGFMEVVLQNNDTKMQSYHMSGYAFFVVGMDYGEWTENSRGTYNKWDGIARSTIQVYPGAWSAILISLDNPGAWNLRTENLDSWYLGQETYVRVVNPDENNKTEFGHPDNVLYCGALSKLQKPQKVSSSASKSIGFTSLSMVVMALVMMMMLQH

SEQ ID NO: 8765 - protein, 313 aa, Arabidopsis thaliana
MDQNASSDYYIVASARVVNETIWRRVTGVGILKYTNSKGKAKGQLPPGPQDEFDKTFSMNQARSIRWNVSASGARPNPQGSFKYGSINVTDVYVLRNMPPVTISGKRRTTLNGISFKNPSTPIRLADKLKVKDVYKLDFPKRPLTGPAKVATSIINGTYRGFMEVVLQNNDTKMQSYHMSGYAFFVVGMDYGEWTENSRGTYNKWDGIARSTIQVYPGAWSAILISLDNPGAWNLRTENLDSWYLGQETYVRVVNPDENNKTEFGHPDNVLYCGALSKLQKPQKVSSSASKSIGFTSLSMVVMALVMMMMLQH

SEQ ID NO: 8766 - DNA, 1746 bp, Arabidopsis thaliana
ggaagaagaagattgattataaaggtgttagctttttcaatacttcacaccaaataaagcctttctcgttagataagtaacaagcatttactcaaaagcttcttcctttctcactctctctctctctctgtctcttcttgtttgctttagacttaagatgggtgcggcgcattttagtaaggagagggtcttcagagggtttctggtttggttctgcttttggggactgatgtctctaacatgcgctgggagactcagtgtttcaaggcagaattttgaagtgcacaaacacttgaatcgattgaataaaccagccgttaagagcattcagagtccagatggtgacataatagactgtgttcacatatcgaagcaaccagcttttgatcaccctttcctcaaagatcacaagattcagatgggacctagttacactccagaatcgctgtttggtgagagcaaagtgtctgagaaaccaaaagagagtgtcaatcctattacacagttatggcaccagaacggagtttgttctgaagggacaataccagtgaggaggacaaagaaagaggatgtcttgagggcgagttctgttaaacggtatggtaagaagaagcacctttctgttcctctgcctcgatctgctgatcctgatctcattaaccaaagtggtcatcagcacgcgatagcttatgtggaaggaggcaagttttacggggcaaaggcgacaataaatgtatgggaacccaaagtgcaaagctctaatgagtttagcttgtctcagttatggattcttggaggttcttttggtcaagatctcaacagcattgaagctggttggcaggttagtccagatttatatggcgataacaacacaaggcttttcacatactggacgagcgatgcttatcaagctacgggctgctacaatctcctttgttcgggtttcatacaaatcaacagtcaaatagcaatgggagcaagtatctctccggtatctggcttccataacccgcaatacgatataagtattaccatttggaaggatccaaaagaagggcactggtggatgcagtttggagacgggtatgtgttgggatactggccaagctttctattctcttacttagcagatagtgcatcaatagtagagtggggtggagaagtagtgaacatggaagaagatggtcaccacacaaccacgcaaatgggaagcggtcaatttccggatgaagggttcacgaaagcgagttacttcaggaacattcaagtcgttgatagctctaataatctgaaagaaccaaaagggctcaacactttcactgagaaatcgaattgctatgatgttgaggttggtaagaatgatgattggggacattatttttactatggaggtcctggaagaaaccctaattgtcagtagaagttaaagaaagaagatgattgaagttgtagaggaacacttgtgctggattttttcttattatgtgaagtgtgaaaatatcgtttttgttgatttttccttacacttactctgtttttttattttacctggacggctggacactgttttgtttttttttggggtttttaggttttgattaggtttagttgaaggttttttaaatgttacttgggttgaaaggtttgtctttagtttgtaagtgtggaagagagaagttgatagtctcttttcttgtaggagtaacctttaagataagaagattaaagatctttggattgtcttag

SEQ ID NO: 8767 - protein, 420 aa, Arabidopsis thaliana
MGAAHFSKERVFRGFLVWFCFWGLMSLTCAGRLSVSRQNFEVHKHLNRLNKPAVKSIQSPDGDIIDCVHISKQPAFDHPFLKDHKIQMGPSYTPESLFGESKVSEKPKESVNPITQLWHQNGVCSEGTIPVRRTKKEDVLRASSVKRYGKKKHLSVPLPRSADPDLINQSGHQHAIAYVEGGKFYGAKATINVWEPKVQSSNEFSLSQLWILGGSFGQDLNSIEAGWQVSPDLYGDNNTRLFTYWTSDAYQATGCYNLLCSGFIQINSQIAMGASISPVSGFHNPQYDISITIWKDPKEGHWWMQFGDGYVLGYWPSFLFSYLADSASIVEWGGEVVNMEEDGHHTTTQMGSGQFPDEGFTKASYFRNIQVVDSSNNLKEPKGLNTFTEKSNCYDVEVGKNDDWGHYFYYGGPGRNPNCQ

SEQ ID NO: 8768 - protein, 396 aa, Arabidopsis thaliana
MSLTCAGRLSVSRQNFEVHKHLNRLNKPAVKSIQSPDGDIIDCVHISKQPAFDHPFLKDHKIQMGPSYTPESLFGESKVSEKPKESVNPITQLWHQNGVCSEGTIPVRRTKKEDVLRASSVKRYGKKKHLSVPLPRSADPDLINQSGHQHAIAYVEGGKFYGAKATINVWEPKVQSSNEFSLSQLWILGGSFGQDLNSIEAGWQVSPDLYGDNNTRLFTYWTSDAYQATGCYNLLCSGFIQINSQIAMGASISPVSGFHNPQYDISITIWKDPKEGHWWMQFGDGYVLGYWPSFLFSYLADSASIVEWGGEVVNMEEDGHHTTTQMGSGQFPDEGFTKASYFRNIQVVDSSNNLKEPKGLNTFTEKSNCYDVEVGKNDDWGHYFYYGGPGRNPNCQ

SEQ ID NO: 8769 - protein, 333 aa, Arabidopsis thaliana
MGPSYTPESLFGESKVSEKPKESVNPITQLWHQNGVCSEGTIPVRRTKKEDVLRASSVKRYGKKKHLSVPLPRSADPDLINQSGHQHAIAYVEGGKFYGAKATINVWEPKVQSSNEFSLSQLWILGGSFGQDLNSIEAGWQVSPDLYGDNNTRLFTYWTSDAYQATGCYNLLCSGFIQINSQIAMGASISPVSGFHNPQYDISITIWKDPKEGHWWMQFGDGYVLGYWPSFLFSYLADSASIVEWGGEVVNMEEDGHHTTTQMGSGQFPDEGFTKASYFRNIQVVDSSNNLKEPKGLNTFTEKSNCYDVEVGKNDDWGHYFYYGGPGRNPNCQ

SEQ ID NO: 8770 - DNA, 1972 bp, Arabidopsis thaliana
attaattctgtagtctcgagattcgctttttctcctgcttacttctttttatcatcttctcttttcggtttgatttggaaaaactttctgcaaaaaaaagagagattcttaaactttttatctcaagatcctttcaaaaaatctgaaaagagaagatttttaataaaaaagaatggttgaaactggtcaccatcatcaacatccaccggcaccggctgcagccggtcatccgccggttccatccatggcgatggcgcgtaacatgggaaccacttggcctccggcggagcaacttcatcatcttcaatattgcatccactctaacccttcttggcatgagacggttgtactggctttccagcattacatcgttatgctcgggactactgttttgattgccaacacactagtgtcaccaatgggtggagatcctggtgataaagcgcgggttatccagactatattgtttatgtcgggcataaacacgttgctataaacgcttatcgggacaaggcttcccacggttatgggagtatcgttcgcgtatgttcttcccgtattgtctataatcagagattacaacaatggtcaattcgattccgagaaacagagattccgacatactatgagaacggtacaaggatcattaatcatttcttcattcgtcaacatcataatcggatatggtcaggcatgggggaacttaataagaatctttagtcccatcattgttgtgcccgttgtttctgttgtgagccttggcctattccttagaggcttcccactgcttgcaaactgtgtggaaatcggtctaccaatgctgattctgttgatcatcacacagcaatatcttaaacatgcattctcaaggatttctatgattcttgaaagatatgctttacttgtttgcctggctatcatatgggcttttgctgctatccttactgtttctggtgcttataataatgtttctaccgcaacaaaacaaagttgtcgaacggatcgtgcctttcttatgtcatcagctccctggattagaatcccatatccattccagtgggggactccgatattcaaagcgagtcatgtttttggaatgtttggtgctgcaattgtcgcatctgcagagtctaccggagtatttttcgctgcatctagactagcaggagcaacagcgcctccagcacatgtcgtctctcgtagtatcggtctacagggtattggtgtgctccttgaaggaatatttggttccattactggcaataccgcgtccgtggaaaatgtcggtctccttggcctcacacgaatagggagtagacgagtggtgcaggtttcaacgtttttcatgatatttttctccatatttggaaaatttggcgcgttctttgcgtctattccgcttccaatctttgcaggcatatactgtatactacttggaatcgttgttgctgttggaatatcgtttatacagtttaccgacactaattcgatgagaaacatgtacgtcattggtgtctctctcttcttaagtctttccatcgctcagtactttcttgccaacacttcaagagcaggatatggaccagttaggacagcaggaggatggttcaacgatatacttaatacgatatttgcttcggctccgttggtggcgaccattcttgcgaccatactagataacacgttggaagcaagacatgcaagtgacgacgcaagaggaatcccgtggtggaagcccttccagcacaggaacggagacggcaggaacgatgagttctatagtatgccccttagaatcaacgagttaatgccgacacggttcctttgaagactgcctctgaacgtttcttctgtatttggaaatgtaagatatgattatgtgcataccttgtagcttcattggggaaaaattgagtccagtggatacaaatgaacataggcctttgatggaaaaagctatttttttgcaaac

SEQ ID NO: 8771 - protein, 433 aa, Arabidopsis thaliana
MGVSFAYVLPVLSIIRDYNNGQFDSEKQRFRHTMRTVQGSLIISSFVNIIIGYGQAWGNLIRIFSPIIVVPVVSVVSLGLFLRGFPLLANCVEIGLPMLILLIITQQYLKHAFSRISMILERYALLVCLAIIWAFAAILTVSGAYNNVSTATKQSCRTDRAFLMSSAPWIRIPYPFQWGTPIFKASHVFGMFGAAIVASAESTGVFFAASRLAGATAPPAHVVSRSIGLQGIGVLLEGIFGSITGNTASVENVGLLGLTRIGSRRVVQVSTFFMIFFSIFGKFGAFFASIPLPIFAGIYCILLGIVVAVGISFIQFTDTNSMRNMYVIGVSLFLSLSIAQYFLANTSRAGYGPVRTAGGWFNDILNTIFASAPLVATILATILDNTLEARHASDDARGIPWWKPFQHRNGDGRNDEFYSMPLRINELMPTRFL

SEQ ID NO: 8772 - protein, 400 aa, Arabidopsis thaliana
MRTVQGSLIISSFVNIIIGYGQAWGNLIRIFSPIIVVPVVSVVSLGLFLRGFPLLANCVEIGLPMLILLIITQQYLKHAFSRISMILERYALLVCLAIIWAFAAILTVSGAYNNVSTATKQSCRTDRAFLMSSAPWIRIPYPFQWGTPIFKASHVFGMFGAAIVASAESTGVFFAASRLAGATAPPAHVVSRSIGLQGIGVLLEGIFGSITGNTASVENVGLLGLTRIGSRRVVQVSTFFMIFFSIFGKFGAFFASIPLPIFAGIYCILLGIVVAVGISFIQFTDTNSMRNMYVIGVSLFLSLSIAQYFLANTSRAGYGPVRTAGGWFNDILNTIFASAPLVATILATILDNTLEARHASDDARGIPWWKPFQHRNGDGRNDEFYSMPLRINELMPTRFL

SEQ ID NO: 8773 - protein, 336 aa, Arabidopsis thaliana
MLILLIITQQYLKHAFSRISMILERYALLVCLAIIWAFAAILTVSGAYNNVSTATKQSCRTDRAFLMSSAPWIRIPYPFQWGTPIFKASHVFGMFGAAIVASAESTGVFFAASRLAGATAPPAHVVSRSIGLQGIGVLLEGIFGSITGNTASVENVGLLGLTRIGSRRVVQVSTFFMIFFSIFGKFGAFFASIPLPIFAGIYCILLGIVVAVGISFIQFTDTNSMRNMYVIGVSLFLSLSIAQYFLANTSRAGYGPVRTAGGWFNDILNTIFASAPLVATILATILDNTLEARHASDDARGIPWWKPFQHRNGDGRNDEFYSMPLRINELMPTRFL

SEQ ID NO: 8774 - DNA, 1111 bp, Arabidopsis thaliana
gccattgcttaatcctctcctctccttcacgttgagatatttttgagttttctgtgctgaattttggggaatcgaagaaattgaatttcaaaaatcaatggcggaagaaattgaaaaatctgtgccgacagaggaatctctgatggagaagatctccgagaagattcaccatcacgattcgtcgtcatcgtctgaatccgagtacgagaaacctgattctccttcggctgtgaaagcgaagatctatcgtatgtttggcagagagaagcctgttcacaaggttctcggtggtggaaagcctgctgatgtgttcttgtggagggataaaaaactatcaggtgctgttcttggtgtcgcgactgctatttgggttctgttcgagctggttgagtatcatttgttgagtcttttgtgtcacatttcgatactcgctcttggaggcctctttttgtggtccaatgctcacacacttatcaacaagacttcaccacaaattccagaaatccatgttcccgaggaggctttccttgtggttgcttcttctctgagaaacgaactaaaccaagcttttgttatcctacgaagcattgctttaggaagggacctaaaaaaattcctgatggttgttgtcggtctatggatcatctcggtggtgggcaattggttcaatttcctgactttggtgtacatttgcttcgtgatattgcacacagtcccaatgttgtatgagaaacacgaggacaaggttgatccattggcagagaaagcaatgaaggagttgcagaaacagtatgtggttttcgatgaaaaggttctctctaagattcccattgcttctctcaaggcaaaggcaaaattgggttaaaaagagagacagacgtctatggttttctttttgcatttttgatcatgtgaaattggtggtcacttgcagggttttgccgctaatggcccaactgtcctttttatgattttatcacgttttgagtacacttgttttttcttttcaaataccattttttccagctttttatggagaattcttgagctcatgaaacgtgagacattgtttcgttttgaatattccacaaatatagaagatataaatcac

SEQ ID NO: 8775 - protein, 255 aa, Arabidopsis thaliana
MAEEIEKSVPTEESLMEKISEKIHHHDSSSSSESEYEKPDSPSAVKAKIYRMFGREKPVHKVLGGGKPADVFLWRDKKLSGAVLGVATAIWVLFELVEYHLLSLLCHISILALGGLFLWSNAHTLINKTSPQIPEIHVPEEAFLVVASSLRNELNQAFVILRSIALGRDLKKFLMVVVGLWIISVVGNWFNFLTLVYICFVILHTVPMLYEKHEDKVDPLAEKAMKELQKQYVVFDEKVLSKIPIASLKAKAKLG

SEQ ID NO: 8776 - protein, 240 aa, Arabidopsis thaliana
MEKISEKIHHHDSSSSSESEYEKPDSPSAVKAKIYRMFGREKPVHKVLGGGKPADVFLWRDKKLSGAVLGVATAIWVLFELVEYHLLSLLCHISILALGGLFLWSNAHTLINKTSPQIPEIHVPEEAFLVVASSLRNELNQAFVILRSIALGRDLKKFLMVVVGLWIISVVGNWFNFLTLVYICFVILHTVPMLYEKHEDKVDPLAEKAMKELQKQYVVFDEKVLSKIPIASLKAKAKLG

SEQ ID NO: 8777 - protein, 204 aa, Arabidopsis thaliana
MFGREKPVHKVLGGGKPADVFLWRDKKLSGAVLGVATAIWVLFELVEYHLLSLLCHISILALGGLFLWSNAHTLINKTSPQIPEIHVPEEAFLVVASSLRNELNQAFVILRSIALGRDLKKFLMVVVGLWIISVVGNWFNFLTLVYICFVILHTVPMLYEKHEDKVDPLAEKAMKELQKQYVVFDEKVLSKIPIASLKAKAKLG

SEQ ID NO: 8778 - DNA, 4114 bp, Arabidopsis thaliana
atggggcggaagaagccgagtgctcgaggtggagatgctgagcagcaacctcctgcgtcatctctcgttggtgctactaaatctaagaagaaaggtgctcaaattgatgacgatgagtactcaataggtactgagttgtctgaggagtctaaagttgaggaagagaaggttgttgttatcactgggaagaagaagggtaagaaaggtaataagaagggtacgcagcaggatgatgatgatgatttttctgataaggtttcggctgcgggggtgaaagacgatgttcctgagatagcttttgttgggaagaagaagtcgaaaggtaagaagggcggtggttctgttagctttgccttgcttgatgatgaagatgagaaggaggataatgaatctgatgaggaagtgcacgaagatgaggaagaagagtctcctatcaccttctctggtaagaaaaagaagtcatctaagtcttcgaagaagaacactaactcgtttaccgctgatttgctcgatgaagaagaagggactgatgcttcaaactctagagacgacgaaaatacaattgaagatgaagagagccctgaagtaacgttttcaggtaagaagaaatcttctaaaaagaagggcggcagtgttttggcctcagtaggtgatgactcagttgcagacgaaactaaaacttctgatactaagaatgtggaggttgtggaaactggaaagagtaagaaaaagaagaagaataacaagagtggaaggacagtacaggaagaggaagatttggacaaacttcttgcagcacttggagaaacccctgctgctgaaagacctgcttcatctacgcctgtagaagagaaagcagctcagcctgagccagttgcacctgtggagaatgctggtgagaaggaaggagaagaagagactgctgctgcgaagaaaaagaaaaagaagaaggagaaagagaaggagaaaaaagcagcagctgctgctgcagcaacctcttctgtagaggttaaggaggaaaaacaagaagaatcagtaactgagccactacagccgaagaagaaggatgcaaagggtaaagcagcagagaagaaaattcctaaacatgttagagagatgcaagaggctcttgctcgtcggcaagaagctgaagagcgaaaaaagaaggaagaagaagaaaaattgaggaaggaggaagaggagcgccgcaggcaggaagagcttgaggctcaagctgaggaggctaagcgtaagagaaaggaaaaggaaaaggagaaactgttgaggaagaagctagagggcaagcttctaacagcaaagcaaaagactgaagctcaaaagagggaggcttttaagaaccagttacttgctgctggtggaggtcttcctgttgcagataatgatggtgatgctacttcctcaaagcgtcccatttacgccaacaagaaaaaatcatctcgccagaaaggcattgacacttctgttcagggggaagatgaggtagagccaaaagagaatcaagcagatgaacaagatactttaggtgaagtgggtttaacagacactggaaaggttgatttaatagagttagtaaacacagacgaaaattcaggacctgctgatgtagctcaggaaaatggggttgaggaagatgacgaagaagatgaatgggatgcgaaaagctggggtacggtcgatcttaaccttaaaggtgattttgatgacgaggaggaagaagctcagcctgtggttaagaaagaattaaaggatgctatatcaaaggcgcatgattcagaacctgaagctgaaaaaccaacagctaaaccagcaggtacaggcaaaccactaatagctgccgtaaaagctacacctgaagtggaagatgctacacggacaaaacgtgctacccgagcaaaagatgcctctaagaagggtaaaggcttagctccaagtgaatctattgagggtgaagaaaatctccgctctcccatttgctgcatcatgggtcatgtcgatactggtaagacaaagctgttggattgcatcagaggaacaaatgtacaggaaggcgaggctggaggtattactcagcagattggtgcaacatatttcccagctgaaaacatccgagagaggaccaaggaactgaaagccgatgcaaaactcaaggtgccaggtttattagttattgatacacctggccacgagtccttcacgaatctgcggtcaagaggttcaagtttgtgtgaccttgcaattttggtggtggacataatgcatgggttagagccacaaaccatagaatctctaaatcttttgaggatgaggaatacagagttcattgttgcattgaataaggtggataggctatatggatggaaaacatgcaagaatgctcctatcgtgaaggcaatgaagcagcaaaataaagatgttataaatgaatttaacttgaggctgaaaaatattataaacgagttccaggagcaaggacttaacactgagctttattacaagaataaagacatgggagacactttcagtattgttcctactagtgctattagtggagaaggggtcccagatctcttgctgtggttggttcaatgggctcagaaaacaatggttgagaaacttacatatgttgacgaagtgcagtgtactgtacttgaggtcaaagttattgaaggccatggtacaacgattgatgttgtgttggtaaacggtgaactccatgaaggtgatcaaatcgtcgtttgtgggctacagggacctattgtcacaacaattagagcattactgaccccgcatccaatgaaggagttacgggtgaagggtacttatctgcattacaaagaaataaaggctgcacagggtatcaagattactgcccagggccttgaacacgcaattgctggtactgccctgcatgtggttggacctgatgatgacatcgaggcaattaaggagtcggctatggaagatatggagtcggttttgagcagaattgacaaaagtggcgaaggagtttatgtacaagcgtctacattagggtcattagaagcattgcttgaatacttgaagtccccagctgtaaagatacctgtaagtggtattggcatagggcctgtgcataagaaggatgtaatgaaggcaggagttatgctcgagagaaaaaaggaatatgctacaattttggcttttgatgtgaaagttactacagaggctcgtgaacttgcagacgaaatgggagttaagatcttctgcgctgatatcatctatcatctatttgatctgtttaaggcttacattgagaatatcaaagaggagaaaaagaaggaatcagccgatgaggcagtcttcccatgtgtccttcagattttacctaactgtgtgttcaataagaaagacccaatagtccttggagttgatgtcatcgagggtatacttaagattggaacccccatttgcgtccctggcagagagttcatcgatattggccgaattgcctcgattgagaataaccacaagcctgttgactatgcaaagaagggcaacaaggtggcaataaagattgttggttcgaatgctgaagaacagaagatgtttggaaggcactttgacatggaagatgagctagtgagtcacatatcgaggagatctatcgacatactaaaatctaactaccgggatgaattatcgttggaagaatggaagctagtagtgaaactgaagaacatcttcaagatacagtaggagattcaaatgtctactttggagcttgaaacactctcacatgccttgttatgccgtgtctgcgtcgatgcagaacaaatagattcgtcttcctgcttctagcggagaagccttcacagaagatttgaaagagagacaagagagagtttttgtttttggtttattttctttctttttttggtctttctccctgaaaagtgctgaataattggttcatgaaccttcatgctggcaaattgcaggggaaagaagagccttgggtcttgagatataccacatatcatctttatatatgctttttttgacttatttccatttttgttgacaaaggaaaatattcgaataaatgtttttgtcc

SEQ ID NO: 8779 - protein, 1251 aa, Arabidopsis thaliana
MGRKKPSARGGDAEQQPPASSLVGATKSKKKGAQIDDDEYSIGTELSEESKVEEEKVVVITGKKKGKKGNKKGTQQDDDDDFSDKVSAAGVKDDVPEIAFVGKKKSKGKKGGGSVSFALLDDEDEKEDNESDEEVHEDEEEESPITFSGKKKKSSKSSKKNTNSFTADLLDEEEGTDASNSRDDENTIEDEESPEVTFSGKKKSSKKKGGSVLASVGDDSVADETKTSDTKNVEVVETGKSKKKKKNNKSGRTVQEEEDLDKLLAALGETPAAERPASSTPVEEKAAQPEPVAPVENAGEKEGEEETAAAKKKKKKKEKEKEKKAAAAAAATSSVEVKEEKQEESVTEPLQPKKKDAKGKAAEKKIPKHVREMQEALARRQEAEERKKKEEEEKLRKEEEERRRQEELEAQAEEAKRKRKEKEKEKLLRKKLEGKLLTAKQKTEAQKREAFKNQLLAAGGGLPVADNDGDATSSKRPIYANKKKSSRQKGIDTSVQGEDEVEPKENQADEQDTLGEVGLTDTGKVDLIELVNTDENSGPADVAQENGVEEDDEEDEWDAKSWGTVDLNLKGDFDDEEEEAQPVVKKELKDAISKAHDSEPEAEKPTAKPAGTGKPLIAAVKATPEVEDATRTKRATRAKDASKKGKGLAPSESIEGEENLRSPICCIMGHVDTGKTKLLDCIRGTNVQEGEAGGITQQIGATYFPAENIRERTKELKADAKLKVPGLLVIDTPGHESFTNLRSRGSSLCDLAILVVDIMHGLEPQTIESLNLLRMRNTEFIVALNKVDRLYGWKTCKNAPIVKAMKQQNKDVINEFNLRLKNIINEFQEQGLNTELYYKNKDMGDTFSIVPTSAISGEGVPDLLLWLVQWAQKTMVEKLTYVDEVQCTVLEVKVIEGHGTTIDVVLVNGELHEGDQIVVCGLQGPIVTTIRALLTPHPMKELRVKGTYLHYKEIKAAQGIKITAQGLEHAIAGTALHVVGPDDDIEAIKESAMEDMESVLSRIDKSGEGVYVQASTLGSLEALLEYLKSPAVKIPVSGIGIGPVHKKDVMKAGVMLERKKEYATILAFDVKVTTEARELADEMGVKIFCADIIYHLFDLFKAYIENIKEEKKKESADEAVFPCVLQILPNCVFNKKDPIVLGVDVIEGILKIGTPICVPGREFIDIGRIASIENNHKPVDYAKKGNKVAIKIVGSNAEEQKMFGRHFDMEDELVSHISRRSIDILKSNYRDELSLEEWKLVVKLKNIFKIQ

SEQ ID NO: 8780 - protein, 879 aa, Arabidopsis thaliana
MQEALARRQEAEERKKKEEEEKLRKEEEERRRQEELEAQAEEAKRKRKEKEKEKLLRKKLEGKLLTAKQKTEAQKREAFKNQLLAAGGGLPVADNDGDATSSKRPIYANKKKSSRQKGIDTSVQGEDEVEPKENQADEQDTLGEVGLTDTGKVDLIELVNTDENSGPADVAQENGVEEDDEEDEWDAKSWGTVDLNLKGDFDDEEEEAQPVVKKELKDAISKAHDSEPEAEKPTAKPAGTGKPLIAAVKATPEVEDATRTKRATRAKDASKKGKGLAPSESIEGEENLRSPICCIMGHVDTGKTKLLDCIRGTNVQEGEAGGITQQIGATYFPAENIRERTKELKADAKLKVPGLLVIDTPGHESFTNLRSRGSSLCDLAILVVDIMHGLEPQTIESLNLLRMRNTEFIVALNKVDRLYGWKTCKNAPIVKAMKQQNKDVINEFNLRLKNIINEFQEQGLNTELYYKNKDMGDTFSIVPTSAISGEGVPDLLLWLVQWAQKTMVEKLTYVDEVQCTVLEVKVIEGHGTTIDVVLVNGELHEGDQIVVCGLQGPIVTTIRALLTPHPMKELRVKGTYLHYKEIKAAQGIKITAQGLEHAIAGTALHVVGPDDDIEAIKESAMEDMESVLSRIDKSGEGVYVQASTLGSLEALLEYLKSPAVKIPVSGIGIGPVHKKDVMKAGVMLERKKEYATILAFDVKVTTEARELADEMGVKIFCADIIYHLFDLFKAYIENIKEEKKKESADEAVFPCVLQILPNCVFNKKDPIVLGVDVIEGILKIGTPICVPGREFIDIGRIASIENNHKPVDYAKKGNKVAIKIVGSNAEEQKMFGRHFDMEDELVSHISRRSIDILKSNYRDELSLEEWKLVVKLKNIFKIQ

SEQ ID NO: 8781 - DNA, 760 bp, Arabidopsis thaliana
aattcgtgtgccactctatttgctcatctccttcgatttcgaacccctaatcttgagatggcatcggagaagaagctctcgaaccctatgagggatattaaggtccagaagctagttcttaacatctctgttggtgagagtggtgatcgtctcactcgtgcctccaaggtgttggaacagctcagtggtcagactcctgtcttctctaaggcgaggtacactgtgaggtctttcggtatcaggcgtaatgaaaagattgcgtgctatgtcaccgtgagaggtgagaaggcaatgcagcttcttgagagtggcttgaaagtgaaggaatacgagctgttgaggaggaacttcagtgacactggctgcttcggattcggtatccaggagcacattgatcttggaatcaagtatgatccttctaccggtatctacggtatggatttctacgttgttcttgaacgtccaggataccgtgtggcccgtcgccgtagatgcaagactcgcgttggtattcaacatagagttaccaaggatgatgccatgaagtggttccaagttaagtatgaaggagttatcctcaacaagtctcagaacatcactggttgaagagcttttttttgtcattttgttttgtttcaagttcttatatttaagattctggatagtaaggatttcgtgttgtggtaacctttttgacttaagttggttaagaatcttcaagtaccttctaaatatgaaaccatttttgggggtttttgtc

SEQ ID NO: 8782 - protein, 201 aa, Arabidopsis thaliana
NSCATLFAHLLRFRTPNLEMASEKKLSNPMRDIKVQKLVLNISVGESGDRLTRASKVLEQLSGQTPVFSKARYTVRSFGIRRNEKIACYVTVRGEKAMQLLESGLKVKEYELLRRNFSDTGCFGFGIQEHIDLGIKYDPSTGIYGMDFYVVLERPGYRVARRRRCKTRVGIQHRVTKDDAMKWFQVKYEGVILNKSQNITG

SEQ ID NO: 8783 - protein, 182 aa, Arabidopsis thaliana
MASEKKLSNPMRDIKVQKLVLNISVGESGDRLTRASKVLEQLSGQTPVFSKARYTVRSFGIRRNEKIACYVTVRGEKAMQLLESGLKVKEYELLRRNFSDTGCFGFGIQEHIDLGIKYDPSTGIYGMDFYVVLERPGYRVARRRRCKTRVGIQHRVTKDDAMKWFQVKYEGVILNKSQNITG

SEQ ID NO: 8784 - protein, 172 aa, Arabidopsis thaliana
MRDIKVQKLVLNISVGESGDRLTRASKVLEQLSGQTPVFSKARYTVRSFGIRRNEKIACYVTVRGEKAMQLLESGLKVKEYELLRRNFSDTGCFGFGIQEHIDLGIKYDPSTGIYGMDFYVVLERPGYRVARRRRCKTRVGIQHRVTKDDAMKWFQVKYEGVILNKSQNITG

SEQ ID NO: 8785 - DNA, 1809 bp, Arabidopsis thaliana
tggcaacacaaaaacatacacactactaataaaccatgaagcttcttatgctcgcctttgtttttctattagctttggcgacttgtaaaggtgacgagtttgtttgtgaagagaacgagccattcacatgtaaccaaactaaacttttcaacagtggcaatttcgaaaaaggcttcatcttcggtgttgcatcttctgcttaccaggtggaaggcggtagaggccgtggacttaacgtttgggatagcttcactcaccgattcccagagaaaggtggagctgatttgggaaatggagacactacttgtgactcatatactctttggcagaaagatatagacgtgatggacgagctcaactctactggctacagattctccattgcgtggtcaagactccttccaaaaggaaagaggagcaggggagtgaacccaggagctattaagtactacaacggtctcatagatggcctcgtcgcaaagaatatgacgccctttgttaccctctttcattgggaccttcctcaaacactacaagatgaatataacggtttcttgaacaaaacgatcgtagacgatttcaaggattacgcggatctatgtttcgagttatttggtgatagggtaaagaactggatcaccatcaaccagctatacacagtgcctactagaggatatgcattgggaacagatgcacccggtcgatgttctcctaagattgacgttagatgtcccggcggaaattcgtcaacagaaccctatattgttgcacataaccagcttcttgctcatgcagcggccgttgatgtttacaggacgaaatataaggatgaccaaaaaggtatgattggaccagtgatgataactagatggtttcttccatttgatcatagtcaagagagcaaagatgcaactgagcgggctaaaatatttttccatggatggttcatggggcctctaacagaaggtaaatacccagacatcatgagggaatatgttggtgatcggcttccagagttcagtgaaacagaagccgcacttgtaaagggttcatatgattttcttggtctcaactattacgtcactcaatacgcccaaaataatcagacgattgttccttcggacgtacacactgccttgatggactcacgcacaactctcacatctaaaaatgcaactggtcatgctcctggtccaccgttcaatgcagccagttactactacccaaaaggcatttactacgtaatggattacttcaaaaccacttacggtgaccctttaatatatgtcactgagaatggatttagtaccccaggtgatgaggactttgagaaggctactgccgattacaagcggattgattatctctgtagtcatctctgtttcctcagtaaagtcatcaaggagaagaatgtcaacgtgaaaggatattttgcttggtctcttggggataattacgaattctgtaacggatttaccgtcagattcggactaagttacgttgatttcgcaaatatcactggtgatagagacctcaaagcatctggcaaatggttccagaagttcataaacgttaccgacgaagactctacgaaccaagatctactccgctcaagcgtctcctccaagaaccgtgatcggaagagtcttgcagatgcatgaaatatccaatccactatatgtccaccaagatcatcttcatgtttcctctttctacttgctccatagataaggagctttttctaccatatgtattaaaataaaatcctaataaaagatgatcaataataataaagactttgtttactgc

SEQ ID NO: 8786 - protein, 541 aa, Arabidopsis thaliana
MKLLMLAFVFLLALATCKGDEFVCEENEPFTCNQTKLFNSGNFEKGFIFGVASSAYQVEGGRGRGLNVWDSFTHRFPEKGGADLGNGDTTCDSYTLWQKDIDVMDELNSTGYRFSIAWSRLLPKGKRSRGVNPGAIKYYNGLIDGLVAKNMTPFVTLFHWDLPQTLQDEYNGFLNKTIVDDFKDYADLCFELFGDRVKNWITINQLYTVPTRGYALGTDAPGRCSPKIDVRCPGGNSSTEPYIVAHNQLLAHAAAVDVYRTKYKDDQKGMIGPVMITRWFLPFDHSQESKDATERAKIFFHGWFMGPLTEGKYPDIMREYVGDRLPEFSETEAALVKGSYDFLGLNYYVTQYAQNNQTIVPSDVHTALMDSRTTLTSKNATGHAPGPPFNAASYYYPKGIYYVMDYFKTTYGDPLIYVTENGFSTPGDEDFEKATADYKRIDYLCSHLCFLSKVIKEKNVNVKGYFAWSLGDNYEFCNGFTVRFGLSYVDFANITGDRDLKASGKWFQKFINVTDEDSTNQDLLRSSVSSKNRDRKSLADA

SEQ ID NO: 8787 - protein, 537 aa, Arabidopsis thaliana
MLAFVFLLALATCKGDEFVCEENEPFTCNQTKLFNSGNFEKGFIFGVASSAYQVEGGRGRGLNVWDSFTHRFPEKGGADLGNGDTTCDSYTLWQKDIDVMDELNSTGYRFSIAWSRLLPKGKRSRGVNPGAIKYYNGLIDGLVAKNMTPFVTLFHWDLPQTLQDEYNGFLNKTIVDDFKDYADLCFELFGDRVKNWITINQLYTVPTRGYALGTDAPGRCSPKIDVRCPGGNSSTEPYIVAHNQLLAHAAAVDVYRTKYKDDQKGMIGPVMITRWFLPFDHSQESKDATERAKIFFHGWFMGPLTEGKYPDIMREYVGDRLPEFSETEAALVKGSYDFLGLNYYVTQYAQNNQTIVPSDVHTALMDSRTTLTSKNATGHAPGPPFNAASYYYPKGIYYVMDYFKTTYGDPLIYVTENGFSTPGDEDFEKATADYKRIDYLCSHLCFLSKVIKEKNVNVKGYFAWSLGDNYEFCNGFTVRFGLSYVDFANITGDRDLKASGKWFQKFINVTDEDSTNQDLLRSSVSSKNRDRKSLADA

SEQ ID NO: 8788 - protein, 438 aa, Arabidopsis thaliana
MDELNSTGYRFSIAWSRLLPKGKRSRGVNPGAIKYYNGLIDGLVAKNMTPFVTLFHWDLPQTLQDEYNGFLNKTIVDDFKDYADLCFELFGDRVKNWITINQLYTVPTRGYALGTDAPGRCSPKIDVRCPGGNSSTEPYIVAHNQLLAHAAAVDVYRTKYKDDQKGMIGPVMITRWFLPFDHSQESKDATERAKIFFHGWFMGPLTEGKYPDIMREYVGDRLPEFSETEAALVKGSYDFLGLNYYVTQYAQNNQTIVPSDVHTALMDSRTTLTSKNATGHAPGPPFNAASYYYPKGIYYVMDYFKTTYGDPLIYVTENGFSTPGDEDFEKATADYKRIDYLCSHLCFLSKVIKEKNVNVKGYFAWSLGDNYEFCNGFTVRFGLSYVDFANITGDRDLKASGKWFQKFINVTDEDSTNQDLLRSSVSSKNRDRKSLADA

SEQ ID NO: 8789 - DNA, 1246 bp, Arabidopsis thaliana
  misc_feature (715)..(715): n is a, c, g, or t
acttcaccatcagcatcactaaactcgaaccctaaagaaaaacaaaaatggctgccatagcttctactctctctctttcttcaaccaaacctcagagacttttcgattcttccttccatggctcagccatctccgcagctcctatctccatcggtctcaaaccacgatctttctccgttcgcgccacaaccgctggttacgacttgaacgctttcacgttcgacccgatcaaggaatcgatcgtgtcacgtgagatgacgagaaggtacatgacggatatgatcacttacgctgagactgatgttgtcgtcgttggtgctggatctgctggtttatctgctgcttatgagatcagtaagaaccctgatgttcaagttgccattattgagcaatctgttagtcctggtggtggtgcttggctcggtggtcagcttttctccgccatgattgttcgcaaaccagctcacttgttccttgacgagattggtgtggcttacgatgagcaagacacctacgttgtcgttaagcacgctgtctgttcacatcaaccatcatgagcaagcttttgggctcgtcctaatgtgaactcttcaacgcttgttgcagcttaaggatttgattgtgaaaggaaacagagttggtggtgtggggactaactgggctcttgtggctcagaaccatgacacacaatcgtgtatggaccctaatgttatgnaggcgaagattgtggttagctcttgtggtcatgatggtccttttggagcgactggtgttaagaggttgaagagcattgggatgattgatcatgttcctgggatgaaagctttggacatgaacacttgctgaagatgctattgtgaggttgaccagagaggttgttcctggtatgattgttaccggtatggaagttgctgagatcgatggtgcaccgagaatgggaccaacgtttggagctatgatgatatcgggacaaaaggcgggacaacttgctcttaaggctttggggctaccgaatgctattgatggaactctcgtcggaaacctaagcccggagctggtcttagctgcagcagattcagctgaaaccgtagatgcttaaaatcaaaaggttttaacttttaagaaaatgtcccttcatccttcggatgttgaaggagtgcaataaaaggagtttaggtgttttatatgtcttgaacttttctggtgtctttgtttctctcttctcaatgaaatgtttcttctgtgg

SEQ ID NO: 8790 - protein, 169 aa, Arabidopsis thaliana
MAAIASTLSLSSTKPQRLFDSSFHGSAISAAPISIGLKPRSFSVRATTAGYDLNAFTFDPIKESIVSREMTRRYMTDMITYAETDVVVVGAGSAGLSAAYEISKNPDVQVAIIEQSVSPGGGAWLGGQLFSAMIVRKPAHLFLDEIGVAYDEQDTYVVVKHAVCSHQPS

SEQ ID NO: 8791 - protein, 100 aa, Arabidopsis thaliana
MTRRYMTDMITYAETDVVVVGAGSAGLSAAYEISKNPDVQVAIIEQSVSPGGGAWLGGQLFSAMIVRKPAHLFLDEIGVAYDEQDTYVVVKHAVCSHQPS

SEQ ID NO: 8792 - protein, 95 aa, Arabidopsis thaliana
MTDMITYAETDVVVVGAGSAGLSAAYEISKNPDVQVAIIEQSVSPGGGAWLGGQLFSAMIVRKPAHLFLDEIGVAYDEQDTYVVVKHAVCSHQPS

SEQ ID NO: 8793 - DNA, 2663 bp, Arabidopsis thaliana
acctctcttacctcactctccttaaacctttaatagggtttttaggttactctttgttcaactactacaaactcttttctctttagagattgagagattgtaaaaaaatctcaaatcttttccttcacaactttcaaatctaatggctcctgctttgagtagaagtctctacacatctcctttgacttcagttccaatcactcctgtctcttctcgtctctctcatctgagaagctcgtttctcccacacggcggcgctttaagaaccggcgtttcgtgtagctggaatctcgaaaagagatgtaaccgattcgccgtgaagtgtgacgccgccgtggcggagaaagagaccactgaagaagggtcaggtgagaagtttgagtaccaagctgaggttagtagattgttggatttgattgttcatagcttatacagtcacaaggaggtgtttctcagggagcttgtaagtaatgcaagtgatgctttggataagctgaggttcttgagtgtaacagagccttctttgcttggagatggtggagatcttgagattaggattaagcctgatcctgataacggcaccatcaccataactgatactggtattggaatgacaaaggaagaacttattgattgccttggaactattgctcaaagtggtacttcgaaattcttgaaggctctaaaggaaaacaaggaccttggtgctgacaacggtttgatcggacagtttggtgttgggttttactctgctttcttagttgctgagaaggttgttgtgtccaccaaaagccccaaatctgacaagcaatatgtttgggaatcggttgccgatagtagctcgtatctgatcagagaagaaacagaccctgataacattctacgtcgtggaacacaaatcaccttgtatctgagggaggatgataaatacgaatttgcggagtctacaaggatcaagaacctcgtgaagaattactctcagttcgttgggtttcctatctatacatggcaggagaaatcaaggactatagaggtcgaagaggacgaaccagttaaggaaggagaagagggtgagccaaagaaaaagaagaccactaaaactgagaagtattgggattgggaactagccaacgagaccaaaccgctatggatgcgcaattcgaaggaagtggaaaaaggagagtacaatgagttctacaaaaaggctttcaatgagttcttggatccacttgctcacacacacttcacaactgagggtgaggttgagttcaggagcattttgtacatccctgggatgggtcctcttaacaatgaagatgttacaaacccgaaaacaaagaacattcgtctctacgtgaagcgtgtgtttatctctgacgattttgatggagagcttttcccgagatatctgagctttgtgaagggagttgtggactctgatgatcttcctcttaatgtttctcgtgaaattctccaagaaagcagaattgtaagaatcatgagaaagaggctcattagaaaaacctttgacatgatacaagaaatctctgagagtgaaaacaaagaggattacaagaaattctgggagaactttggtagattccttaaattgggttgtattgaagacaccggtaaccacaagcgtatcacaccgctacttagattcttcagttccaagaatgaagaggaattgacaagcttggatgattatatcgagaacatgggagagaaccaaaaggcgatctactacctcgcaactgatagtcttaaaagtgccaagtctgcccctttcttggagaaactaatccaaaaagatatcgaggttctatatttggttgaaccaatcgatgaagttgctattcagaatttgcaaacctacaaagaaaagaaattcgttgatatcagtaaagaagatttggaactcggagatgaagatgaagtaaaggacagggaagcgaaacaagagtttaaccttctctgtgactggataaaacagcagctcggtgacaaagttgcaaaagtccaagtctcaaaccgtttgagctcttctccttgtgtgcttgtctctggcaaattcgggtggtcagctaatatggaaaggctaatgaaggcacaggctcttggagacacttcaagcctggagttcatgagaggtaggagaatactagagatcaatccagatcatcccatcatcaaagacttgaacgctgcttgtaagaatgcaccagagagcactgaagcaacaagagtggtcgatctcttgtatgacactgctataatatcaagtggattcactcctgatagcccggccgagctcgggaacaagatatatgagatgatggcaatggcggttggaggaagatggggcagagttgaagaagaagaagaaagctcgactgtgaatgaaggagatgacaaaagcggagaaacagaggtagttgaaccatctgaagtgagggcagagagtgatccttggcaagattgatccttttttaccttcttttgtttgcagtgatttttttttgacagaacgctttatctttccattagcagtatcatgggcctaatgaaagcccataattaaatcacgcgtgaacgagatttatccaatacagtatttgtagtttttttttgataattaaaataattttagagaatttaca

SEQ ID NO: 8794 - protein, 780 aa, Arabidopsis thaliana
MAPALSRSLYTSPLTSVPITPVSSRLSHLRSSFLPHGGALRTGVSCSWNLEKRCNRFAVKCDAAVAEKETTEEGSGEKFEYQAEVSRLLDLIVHSLYSHKEVFLRELVSNASDALDKLRFLSVTEPSLLGDGGDLEIRIKPDPDNGTITITDTGIGMTKEELIDCLGTIAQSGTSKFLKALKENKDLGADNGLIGQFGVGFYSAFLVAEKVVVSTKSPKSDKQYVWESVADSSSYLIREETDPDNILRRGTQITLYLREDDKYEFAESTRIKNLVKNYSQFVGFPIYTWQEKSRTIEVEEDEPVKEGEEGEPKKKKTTKTEKYWDWELANETKPLWMRNSKEVEKGEYNEFYKKAFNEFLDPLAHTHFTTEGEVEFRSILYIPGMGPLNNEDVTNPKTKNIRLYVKRVFISDDFDGELFPRYLSFVKGVVDSDDLPLNVSREILQESRIVRIMRKRLIRKTFDMIQEISESENKEDYKKFWENFGRFLKLGCIEDTGNHKRITPLLRFFSSKNEEELTSLDDYIENMGENQKAIYYLATDSLKSAKSAPFLEKLIQKDIEVLYLVEPIDEVAIQNLQTYKEKKFVDISKEDLELGDEDEVKDREAKQEFNLLCDWIKQQLGDKVAKVQVSNRLSSSPCVLVSGKFGWSANMERLMKAQALGDTSSLEFMRGRRILEINPDHPIIKDLNAACKNAPESTEATRVVDLLYDTAIISSGFTPDSPAELGNKIYEMMAMAVGGRWGRVEEEEESSTVNEGDDKSGETEVVEPSEVRAESDPWQD

SEQ ID NO: 8795 - protein, 624 aa, Arabidopsis thaliana
MTKEELIDCLGTIAQSGTSKFLKALKENKDLGADNGLIGQFGVGFYSAFLVAEKVVVSTKSPKSDKQYVWESVADSSSYLIREETDPDNILRRGTQITLYLREDDKYEFAESTRIKNLVKNYSQFVGFPIYTWQEKSRTIEVEEDEPVKEGEEGEPKKKKTTKTEKYWDWELANETKPLWMRNSKEVEKGEYNEFYKKAFNEFLDPLAHTHFTTEGEVEFRSILYIPGMGPLNNEDVTNPKTKNIRLYVKRVFISDDFDGELFPRYLSFVKGVVDSDDLPLNVSREILQESRIVRIMRKRLIRKTFDMIQEISESENKEDYKKFWENFGRFLKLGCIEDTGNHKRITPLLRFFSSKNEEELTSLDDYIENMGENQKAIYYLATDSLKSAKSAPFLEKLIQKDIEVLYLVEPIDEVAIQNLQTYKEKKFVDISKEDLELGDEDEVKDREAKQEFNLLCDWIKQQLGDKVAKVQVSNRLSSSPCVLVSGKFGWSANMERLMKAQALGDTSSLEFMRGRRILEINPDHPIIKDLNAACKNAPESTEATRVVDLLYDTAIISSGFTPDSPAELGNKIYEMMAMAVGGRWGRVEEEEESSTVNEGDDKSGETEVVEPSEVRAESDPWQD

SEQ ID NO: 8796 - protein, 444 aa, Arabidopsis thaliana
MRNSKEVEKGEYNEFYKKAFNEFLDPLAHTHFTTEGEVEFRSILYIPGMGPLNNEDVTNPKTKNIRLYVKRVFISDDFDGELFPRYLSFVKGVVDSDDLPLNVSREILQESRIVRIMRKRLIRKTFDMIQEISESENKEDYKKFWENFGRFLKLGCIEDTGNHKRITPLLRFFSSKNEEELTSLDDYIENMGENQKAIYYLATDSLKSAKSAPFLEKLIQKDIEVLYLVEPIDEVAIQNLQTYKEKKFVDISKEDLELGDEDEVKDREAKQEFNLLCDWIKQQLGDKVAKVQVSNRLSSSPCVLVSGKFGWSANMERLMKAQALGDTSSLEFMRGRRILEINPDHPIIKDLNAACKNAPESTEATRVVDLLYDTAIISSGFTPDSPAELGNKIYEMMAMAVGGRWGRVEEEEESSTVNEGDDKSGETEVVEPSEVRAESDPWQD

SEQ ID NO: 8797 - DNA, 1174 bp, Arabidopsis thaliana
gtgagggtggttttatctctttggcccaaatttcggtgtaaccaaaaaaatcttcacacacatccttgaccattttcttgttcatcgctctctttcttcttcacaaatcctaaacgagtaggagctatggctgcaccgattgttgatgcggagtacttgaaagagatcactaaggctcgccgtgagctccgttctctcatcgcgaacaagaactgtgctcctatcatgctccgattggcatggcacgatgctggaacctatgatgctcaatcgaagaccggtggacctaatggctctatcaggaacgaagaagagcacactcatggtgccaacagtggtttgaagatcgctctcgatctctgtgagggcgtgaaagctaagcatcccaaaatcacatacgcagacctgtatcagcttgctggtgtggtagcagttgaggttactggtggacctgacatcgtgttcgttcccgggagaaaggattcaaatgtctgccccaaggaaggaagacttcctgatgccaaacaaggtttccaacatctcagagatgtcttctaccgcatgggactatctgataaggatattgtggcactctcagggggtcatactctgggaagggctcacccagagaggtcaggctttgatggaccatggacccaagagccgctgaagtttgacaactcctacttcgtggaactgctgaaaggagaatcagagggcttgttgaaacttccaactgacaagaccttattggaagacccggagttccgtcgtcttgttgagctttatgcaaaggatgaagatgcattcttcagagactacgcggaatcgcacaagaaactctctgagcttggtttcaacccaaactcctcagcaggcaaagcagttgcagacagcacgattctggcacagagtgcgttcggggttgcagttgctgctgcggttgtggcatttggttacttttacgagatccggaagaggatgaagtaaacgaaataggaagtaaaacacgaagcaacgatgctcttatttgggtattaaagaaactattaatcgtctatcgaatctattttgctgctacaagattctaaactctttgaatccacgattctactgtttagtagtaaaaaagttaaaaagtcaatattttgggtccgtgattcatttttgcgat

SEQ ID NO: 8798 - protein, 287 aa, Arabidopsis thaliana
MAAPIVDAEYLKEITKARRELRSLIANKNCAPIMLRLAWHDAGTYDAQSKTGGPNGSIRNEEEHTHGANSGLKIALDLCEGVKAKHPKITYADLYQLAGVVAVEVTGGPDIVFVPGRKDSNVCPKEGRLPDAKQGFQHLRDVFYRMGLSDKDIVALSGGHTLGRAHPERSGFDGPWTQEPLKFDNSYFVELLKGESEGLLKLPTDKTLLEDPEFRRLVELYAKDEDAFFRDYAESHKKLSELGFNPNSSAGKAVADSTILAQSAFGVAVAAAVVAFGYFYEIRKRMK

SEQ ID NO: 8799 - protein, 254 aa, Arabidopsis thaliana
MLRLAWHDAGTYDAQSKTGGPNGSIRNEEEHTHGANSGLKIALDLCEGVKAKHPKITYADLYQLAGVVAVEVTGGPDIVFVPGRKDSNVCPKEGRLPDAKQGFQHLRDVFYRMGLSDKDIVALSGGHTLGRAHPERSGFDGPWTQEPLKFDNSYFVELLKGESEGLLKLPTDKTLLEDPEFRRLVELYAKDEDAFFRDYAESHKKLSELGFNPNSSAGKAVADSTILAQSAFGVAVAAAVVAFGYFYEIRKRMK

SEQ ID NO: 8800 - DNA, 2185 bp, Arabidopsis thaliana
agattccggtgagaaacgagcaggtcctgtcttcttaagaactcaatttcttcatttctgattctataaaacatccttaaaaacatgtctaccacattgttgagaacaattcagctaaaccagttctcacttctcggaactagcttgttaagaaggagaaggagtaacaacttctccgtgaggtcttgtggaagccaaacaacgacgacccatgaagctaaacagtcttctccaacaagggttgctccaaaaaaccacaaaagcaaccaacttgataagattctgagagattacgaagctgtaattgggatagagactcatgttcagctctctacattgacaaaagccttttgtagttgctctaacaattacgtttcttatccaaacacaagtatttgtcctgtttgtatgggtttgcctggtgctttgcctgttttgaattccaaagttgttgaatttggtgttagattgggtttagctttgaattgtgatttgtctcttaagtctaaattcgataggaagcagtatttttatccagatcttcctaaaggttatcagatttctcagtttgatattcctattgcatctggtggttatgtggatgtggatattcctcttgagtttggtggtggacataggagatttggtattactagggttcatatggaagaagatgctggcaagttacttcattcagacacagtagattactctcaggtagatttgaatagagcaggtgttcctttacttgagattgtttctgaacctgatatgagaagtggtatagaagctgctgaatacgcttgtgaaatgcaacggattgcgaggtatttgggagtcagtaatgggaatatgcaagaaggctctcttcgctgcgatgtcaatatctcaatccgtcctattgggcaagctgagtttggcaccaaggtagaaataaagaatttgaacgcgttttcagcaattagcagagcaatagactttgagatatcaagacaagcacttctctataatcaggggaaagcagaccagattgtaacggagactcggctatgggaagaaggcgctcagaaaacagtaacaatgaggaaaaaggaagggcttgctgattaccgctactttccagaaccagatcttccagaagttatccttacccaagaatatgttgatagcattcgtgcttctttaccggaactccctgaagcaaagcgcaggagatatgaggcgatgggtctaggcatgcaagatgtgcttttcctcgcgaatgacgtcagtgttgcagaatatttcgatgcagtcattggtaagggtgctgaagtgaagttggcagcaaattggataatgagtgatattgcagctatcagttcagccaactcttggggagtgagtttaatatcattgatagaaagtttctcatttttcaagtaagcagcaatatcatcactttcacaatcttcttcatcgatttctctcttccaaatctcccaaaagatgtcgaaccctagagttttcttcgacatgagtctcagcggtactcccatcggacggatcgagatggagcttttcgctgatacaaccccaaacacggcggagaatttccgtgctctctgtaccggcgagaaaggaatgggaaagctaggtaagccacttcacttcaaaggatcgatcttccaccgtgtgattcccggattcatgtgtcaaggaggtgatttcaccgccaagaacggaaccggtggtgaatcgatctacggtgctaagttcaaggacgagaactttatcaagaagcatacaggagctgggattctctcaatggctaactctggtcctaacactaacggatctcagttcttcatctgtaccgataagacgtcgtggttagatggtaagcacgttgtgtttggacaagttgttaaaggcttggacgtcgtgaaggcgattgagaaagttggatctgattctggaaagacttccaaagtcgttaccatcactgattgtggtcagctttcttagatctgagtgagaaagtgagagactttgatctttatgagtaataatggtgtcttttgctttcggttgttcttcctcttaccttaatggattattctgtttagggtttgagttttcgtttcagagtttgtaacaaaacccttttgtgttttctggggtttgaaataattatgagcttacc

SEQ ID NO: 8801 - protein, 446 aa, Arabidopsis thaliana
MSTTLLRTIQLNQFSLLGTSLLRRRRSNNFSVRSCGSQTTTTHEAKQSSPTRVAPKNHKSNQLDKILRDYEAVIGIETHVQLSTLTKAFCSCSNNYVSYPNTSICPVCMGLPGALPVLNSKVVEFGVRLGLALNCDLSLKSKFDRKQYFYPDLPKGYQISQFDIPIASGGYVDVDIPLEFGGGHRRFGITRVHMEEDAGKLLHSDTVDYSQVDLNRAGVPLLEIVSEPDMRSGIEAAEYACEMQRIARYLGVSNGNMQEGSLRCDVNISIRPIGQAEFGTKVEIKNLNAFSAISRAIDFEISRQALLYNQGKADQIVTETRLWEEGAQKTVTMRKKEGLADYRYFPEPDLPEVILTQEYVDSIRASLPELPEAKRRRYEAMGLGMQDVLFLANDVSVAEYFDAVIGKGAEVKLAANWIMSDIAAISSANSWGVSLISLIESFSFFK

SEQ ID NO: 8802 - protein, 338 aa, Arabidopsis thaliana
MGLPGALPVLNSKVVEFGVRLGLALNCDLSLKSKFDRKQYFYPDLPKGYQISQFDIPIASGGYVDVDIPLEFGGGHRRFGITRVHMEEDAGKLLHSDTVDYSQVDLNRAGVPLLEIVSEPDMRSGIEAAEYACEMQRIARYLGVSNGNMQEGSLRCDVNISIRPIGQAEFGTKVEIKNLNAFSAISRAIDFEISRQALLYNQGKADQIVTETRLWEEGAQKTVTMRKKEGLADYRYFPEPDLPEVILTQEYVDSIRASLPELPEAKRRRYEAMGLGMQDVLFLANDVSVAEYFDAVIGKGAEVKLAANWIMSDIAAISSANSWGVSLISLIESFSFFK

SEQ ID NO: 8803 - protein, 253 aa, Arabidopsis thaliana
MEEDAGKLLHSDTVDYSQVDLNRAGVPLLEIVSEPDMRSGIEAAEYACEMQRIARYLGVSNGNMQEGSLRCDVNISIRPIGQAEFGTKVEIKNLNAFSAISRAIDFEISRQALLYNQGKADQIVTETRLWEEGAQKTVTMRKKEGLADYRYFPEPDLPEVILTQEYVDSIRASLPELPEAKRRRYEAMGLGMQDVLFLANDVSVAEYFDAVIGKGAEVKLAANWIMSDIAAISSANSWGVSLISLIESFSFFK

SEQ ID NO: 8804 - DNA, 860 bp, Arabidopsis thaliana
aagagtagggaaaaagaaaagaaaagtagagtactatcttcctcttaaaccaaccattcaaaatgttgcgtactatcttcctcttatctcttctctttgctctatccaatgcctctgttcaagatttctgtgtcgcaaacctgaaacgcgctgaaacccctgcgggttacccttgcattcgtcccattcatgtcaaagctacagactttgtcttctctggcttaggcactcctggaaacactacaaacatcatcaacgccgctgtcacacccgctttcgcagctcagttcccgggtctgaacggtctaggcctctctacagctagacttgacttagctcctaaaggtgtgatcccaatgcacactcaccctggtgcctctgaggttctctttgtccttactggctccattaccgctgggtttgtctcctcggcaaacgctgtctacgtgcagacactcaaaccaggacaggtcatggttttcccacagggcttgcttcatttccagatcaacgcgggaaaatcctctgcttcagccgttgtcactttcaacagcgctaatccgggtctgcagattctcgacttcgcactctttgctaacagtcttcccactgaactcgtcgtgggtactactttccttgacgccactacagtcaagaagctaaagggtgttcttggaggaactggctaaaaaaagacttaggactactccttgactaaaacaccaaaacctgtttcttcatctttttttctctttaattgattcttgtcttctctgttttgtgtgccttgtaattcttcaaaacctgtcaaaattgttacattgtatgtgagttttttcaattaagatcctgagttggtc

SEQ ID NO: 8805 - protein, 208 aa, Arabidopsis thaliana
MLRTIFLLSLLFALSNASVQDFCVANLKRAETPAGYPCIRPIHVKATDFVFSGLGTPGNTTNIINAAVTPAFAAQFPGLNGLGLSTARLDLAPKGVIPMHTHPGASEVLFVLTGSITAGFVSSANAVYVQTLKPGQVMVFPQGLLHFQINAGKSSASAVVTFNSANPGLQILDFALFANSLPTELVVGTTFLDATTVKKLKGVLGGTG

SEQ ID NO: 8806 - protein, 110 aa, Arabidopsis thaliana
MHTHPGASEVLFVLTGSITAGFVSSANAVYVQTLKPGQVMVFPQGLLHFQINAGKSSASAVVTFNSANPGLQILDFALFANSLPTELVVGTTFLDATTVKKLKGVLGGTG

SEQ ID NO: 8807 - DNA, 2073 bp, Arabidopsis thaliana
gaaaggaaaacgctaaaaggttgcgcgagtggagagtctgcccgccaagcaacccctagtattcagctttttgtgcactgatccaactcgactcggcctttttctctgagttgactcgaccgagaaaaggcgatagagctggggtttaattcggcgataacaatggacgaagattccgtccatggcgattctcacctcaagacatgtgtcgtcctcggcggacgagggttcattggtcgatcgcttgtctccagattgcttcgtctcggaaactggacagtccgagtcgcagattccggtcacactctccatcttgatgaatccgattcgctcctcgaggatgctctctcctccggccgcgcttcttatcactgcgtcgatgttcgtgataaacctcagatcgttaaagttaccgagggttcctatgttgtattttacatgggagctactgatttacgttcccatgattactttgactgctacaaggttatagttcaaggtacaagaaatgtgatttctgcctgtcgtgaatctggagtcagaaaacttatctacaacagtacagctgatgttgtttttgatggttcccaacctatacgtgatggtgatgaatccttgagacgtcctttgaagttccaatctatgttgacagacttcaaagctcaagcagaagcgttgatcaaattggctaacaaccgagatggtctcttaacttgtgcacttcgctctagcattgtatttggacctggtgacacagagtttgtaccttttttggtgaatctagccaagtccggatatgcaaagtttatactcgggagtggtgaaaatatctctgatttcacttactcggagaacgtttctcatgcacatatttgcgccgttaaagcattagattcacagatggagtttgtggctggaaaggaattttttatcacaaacctcaagccggtcagattttgggactttgtaagccatatagttgaaggtctgggatacccaagaccatccattaaacttcctgttcggctggttttgtatgttttctcacttcttaagtggacacatgaaaaggagggccttgggagtaattatgacacagcacatcagtatgctctgttagcttcatcaacgagaacttttaactgcaatgcagctaagaagcatcttggttacacacctgttgtgacacttgaagatggtattgcatcaacgcttcaatggttctctcgggatcttgagaagtctgatgacacaatcattcaatctactgcagatcagcttcttggttgtgggaaagttgcagacatcttgctgtggagaaatgagaagaaaaccttcgtttcttttcttgtcctaaacttgttttattactggttcttcttttctggaaacacatttacttcatctgcagcccaacttctgtttatatttgctgttgctctctatggagtctcttttgtgccgtcaaagattttcgggtttcaagtcaacaaaatacccccatggagatttgagatctccgaatccgctgtgagagatcttagtagtgatatcgtagttgtctggaatcaaggagttcgcagttttaaatccttaagcagtggaggagactggatcaagttcttcaagattgcaggatcactgtatctcctcaaactgattgtatcccgttcattggcagcatttcttttcacagttatgtcgttctcattcaccggtttcttcatctacgagcaatacgagcttgagctctaccacctagcccggatattcgtcgaatgcttaacatttattaaaaggatggtgatacctgtttctgatgcttcatctaaaccaatgttcatgtgaagcttccaaagtcctccactaaacgaacaccaacaatcccagagactaattgcagttattagatgtcttatgtacaaacattatgctatcaggatgtaatcttcactgagaggggatggatatatgattatttacgaatttgccataactactatcaaaatgcaccgttttgatccggtttccaaaaaaaaaagaaaaaaaaggaaagtatccttatatatcctt

SEQ ID NO: 8808 - protein, 561 aa, Arabidopsis thaliana
MDEDSVHGDSHLKTCVVLGGRGFIGRSLVSRLLRLGNWTVRVADSGHTLHLDESDSLLEDALSSGRASYHCVDVRDKPQIVKVTEGSYVVFYMGATDLRSHDYFDCYKVIVQGTRNVISACRESGVRKLIYNSTADVVFDGSQPIRDGDESLRRPLKFQSMLTDFKAQAEALIKLANNRDGLLTCALRSSIVFGPGDTEFVPFLVNLAKSGYAKFILGSGENISDFTYSENVSHAHICAVKALDSQMEFVAGKEFFITNLKPVRFWDFVSHIVEGLGYPRPSIKLPVRLVLYVFSLLKWTHEKEGLGSNYDTAHQYALLASSTRTFNCNAAKKHLGYTPVVTLEDGIASTLQWFSRDLEKSDDTIIQSTADQLLGCGKVADILLWRNEKKTFVSFLVLNLFYYWFFFSGNTFTSSAAQLLFIFAVALYGVSFVPSKIFGFQVNKIPPWRFEISESAVRDLSSDIVVVWNQGVRSFKSLSSGGDWIKFFKIAGSLYLLKLIVSRSLAAFLFTVMSFSFTGFFIYEQYELELYHLARIFVECLTFIKRMVIPVSDASSKPMFM

SEQ ID NO: 8809 - protein, 469 aa, Arabidopsis thaliana
MGATDLRSHDYFDCYKVIVQGTRNVISACRESGVRKLIYNSTADVVFDGSQPIRDGDESLRRPLKFQSMLTDFKAQAEALIKLANNRDGLLTCALRSSIVFGPGDTEFVPFLVNLAKSGYAKFILGSGENISDFTYSENVSHAHICAVKALDSQMEFVAGKEFFITNLKPVRFWDFVSHIVEGLGYPRPSIKLPVRLVLYVFSLLKWTHEKEGLGSNYDTAHQYALLASSTRTFNCNAAKKHLGYTPVVTLEDGIASTLQWFSRDLEKSDDTIIQSTADQLLGCGKVADILLWRNEKKTFVSFLVLNLFYYWFFFSGNTFTSSAAQLLFIFAVALYGVSFVPSKIFGFQVNKIPPWRFEISESAVRDLSSDIVVVWNQGVRSFKSLSSGGDWIKFFKIAGSLYLLKLIVSRSLAAFLFTVMSFSFTGFFIYEQYELELYHLARIFVECLTFIKRMVIPVSDASSKPMFM

SEQ ID NO: 8810 - protein, 401 aa, Arabidopsis thaliana
MLTDFKAQAEALIKLANNRDGLLTCALRSSIVFGPGDTEFVPFLVNLAKSGYAKFILGSGENISDFTYSENVSHAHICAVKALDSQMEFVAGKEFFITNLKPVRFWDFVSHIVEGLGYPRPSIKLPVRLVLYVFSLLKWTHEKEGLGSNYDTAHQYALLASSTRTFNCNAAKKHLGYTPVVTLEDGIASTLQWFSRDLEKSDDTIIQSTADQLLGCGKVADILLWRNEKKTFVSFLVLNLFYYWFFFSGNTFTSSAAQLLFIFAVALYGVSFVPSKIFGFQVNKIPPWRFEISESAVRDLSSDIVVVWNQGVRSFKSLSSGGDWIKFFKIAGSLYLLKLIVSRSLAAFLFTVMSFSFTGFFIYEQYELELYHLARIFVECLTFIKRMVIPVSDASSKPMFM

SEQ ID NO: 8811 - DNA, 1512 bp, Arabidopsis thaliana
gagatttatatagagagaaaaaaactatggctcacataaagatctaacagagacagtagtatagtcccacttccccaccaccaaagcttcgatcatcatcatcatcatcatcatggatccggatccggatcataaccatcgacccaacttccctctccagcttcttgattcttctacctcctcctcttccacttccttagccatcatctctactacttccgaacctaactccgaacctaagaagcctcctcctaaacgaacctctactaaagaccgacacaccaaagtcgaaggccgaggccgtcggatccgtatgcctgccatgtgtgctgcacgtgtctttcagctcacacgtgagcttggtcacaaatccgacggtgaaactattgagtggctactccaacaagcagaaccagcggttatagccgctacagggactggaaccattccggctaacttcacttctttaaacatctcacttcgtagctcaagatcttctctctctgctgctcatcttcgtacaactcctagtagctattactttcattcaccacatcagtccatgactcatcatcttcaacatcagcatcaggttcgtcccaagaacgagtcacattcttcgtcttcttcttcttcacagcttttagatcacaaccaaatgggtaactatctagtacaatcaactgctggatctttacctacgagtcagagtcctgcaacggcaccgttttggagtagtggtgacaacacacagaatctttgggcttttaatattaatcctcatcattccggtgttgtcgccggagatgtttacaaccccaacagtggtggtagtggcggcggtagtggagttcatttgatgaattttgcagctcctattgctttgttttctggacagcctttggcttctggttatggaggaggaggaggtggcggtggagaacatagccattatggagttttagcggcgttgaatgctgcttaccgaccggtggcggagacggggaaccataacaacaaccagcaaaaccgtgacggagatcatcatcacaaccatcaagaagatggaagcaccagtcatcattcctaggcaaacatacacaaacaaatatattctgtgagatttatttttctttttttgtcctttcgtttgtttgtttgttcttaacaagcgtgttttttttgcattgcttctttttcatatatttttatttatttctaaattctaatattctacggatttcatcttgtttatttttctgattaatgtattgagtaagtaattaagaacctgataatcgatatgttttagtttgtggtttttgcatgcaaggctttggttttattattctagagatttttgcttgaagtagttgtcttgtgaaatgttttcctcattactattgagtgtgagagttttctaatacttgattagggtttttgaacaatttttatatatgtatattaattcagtacggattatcaataaattatttcgcatgccaaattatt

SEQ ID NO: 8812 - protein, 325 aa, Arabidopsis thaliana
MDPDPDHNHRPNFPLQLLDSSTSSSSTSLAIISTTSEPNSEPKKPPPKRTSTKDRHTKVEGRGRRIRMPAMCAARVFQLTRELGHKSDGETIEWLLQQAEPAVIAATGTGTIPANFTSLNISLRSSRSSLSAAHLRTTPSSYYFHSPHQSMTHHLQHQHQVRPKNESHSSSSSSSQLLDHNQMGNYLVQSTAGSLPTSQSPATAPFWSSGDNTQNLWAFNINPHHSGVVAGDVYNPNSGGSGGGSGVHLMNFAAPIALFSGQPLASGYGGGGGGGGEHSHYGVLAALNAAYRPVAETGNHNNNQQNRDGDHHHNHQEDGSTSHHS

SEQ ID NO: 8813 - protein, 258 aa, Arabidopsis thaliana
MPAMCAARVFQLTRELGHKSDGETIEWLLQQAEPAVIAATGTGTIPANFTSLNISLRSSRSSLSAAHLRTTPSSYYFHSPHQSMTHHLQHQHQVRPKNESHSSSSSSSQLLDHNQMGNYLVQSTAGSLPTSQSPATAPFWSSGDNTQNLWAFNINPHHSGVVAGDVYNPNSGGSGGGSGVHLMNFAAPIALFSGQPLASGYGGGGGGGGEHSHYGVLAALNAAYRPVAETGNHNNNQQNRDGDHHHNHQEDGSTSHHS

SEQ ID NO: 8814 - protein, 255 aa, Arabidopsis thaliana
MCAARVFQLTRELGHKSDGETIEWLLQQAEPAVIAATGTGTIPANFTSLNISLRSSRSSLSAAHLRTTPSSYYFHSPHQSMTHHLQHQHQVRPKNESHSSSSSSSQLLDHNQMGNYLVQSTAGSLPTSQSPATAPFWSSGDNTQNLWAFNINPHHSGVVAGDVYNPNSGGSGGGSGVHLMNFAAPIALFSGQPLASGYGGGGGGGGEHSHYGVLAALNAAYRPVAETGNHNNNQQNRDGDHHHNHQEDGSTSHHS

SEQ ID NO: 8815 - DNA, 1913 bp, Arabidopsis thaliana
atggcttcttcgaaactccatcatcatcctcaccgcagaaaatccccaatacgttgcttctgtctcttaatcataaccatgtcctccattctcatccttctcttctctctcttcctcttctcctctccctcctcctcctcccgtcaccaccaccaccacaattccggcgacacttctccggtcaatccttcgtcgtctctcgccgctcagatccgtctcgcttgtaacgcaactcgttacccagaccaatgcgtctcttccctatccgaacagggtcgggttcctccggatcctaaaccaatccagatcattcactcagcgatctcattctcattccaaaacctcaaaaccgcccaatcaaaaatcaagtctattgtagactcgtccgtagggaatctaaaccgtacaaacgccgcgaacacgtgtctccagcttctcacttactccgagcaccgcactcaatcgacggatcaagctttaacacgtggcaaaatcaaagacgctcgagcttggatgagcgctgctctagtgtaccagtacgattcatggtcagcgctcaagtacgtcaacgacacgagccaagtaggtgaaacgatgtcgtttctcgacggacttatccacgtcaccagcaacgcgcttagcatgatggtatcgtacgataacttcggagacaacgtcgcgtcgtggacttacccagcaacggaacgtgacgggttttgggaaaagactgggcctggtttgggcttagatccgagtacagggcttaatttgggttttccttccggtttaaaagaagacgtgacggtgtgtaaagacggaaaatgcggttacaagacggtgcaagacgccgttaacgctgcgccggaggataacggaatgcgtaagttcgttataaagattagcgaaggagtctacgaggagaacgttattgttccgtttgagaagaagaacgttgtgtttatcggtgacggtatgggcaaaacggtcattacaggttcgttaaacgccggtatgcctgggatcactacgtacaatactgcaactgtcggagtggtaggagatggattcatggctcgtgatctaacgttccagaacacggcgggaccagacgctcaccaagcggtggcgtttagatccgacagcgatttttctctgatcgagaattgcgagttccttgggaaccaagacactctctatgcccatggtcttcgtcagttctacaaaaactgtcgtatccaaggaaatgttgactttatctttgggaattcagctgctgtcttccaagactgtgaaatcctaatcgcaccgcgtcaaattaaccctgaaaagggcgagaaaaacgcagtcactgcccaaggaaggattgacccgtcccagtccacgggtttcgtgttcttgaactgtttgattaacggaacagaggagtacatgaagctgtttaaagctaaccctaaggtgcataagaacttcttggggaggccatggaaagattactcaaggactgtgtttataggttgtaatttagaggctttgattactcctgatggatggttaccttggagcggggatttcgcgctcaagacactttattacggtgaatctaagaacacgggtccgggatcagataggtcacaaagggtttcatggagcagtcagataccggacgagcatgttcatgtgtattcggtggctaactttattcaggctgatgagtgggcttcgatgtctgcttaaatcaatctttaagactataaggggtttaggaatgttttaaaagaagaaaaccatctcattgtaatttagttgataaactgttttaaacataaaagcaaacattgcattcatgttatatcaattgagagttcatagtcttaggactaattgaagtaaaacaataaagtttcaaaacttgg

SEQ ID NO: 8816 - protein, 577 aa, Arabidopsis thaliana
MASSKLHHHPHRRKSPIRCFCLLIITMSSILILLFSLFLFSSPSSSSRHHHHHNSGDTSPVNPSSSLAAQIRLACNATRYPDQCVSSLSEQGRVPPDPKPIQIIHSAISFSFQNLKTAQSKIKSIVDSSVGNLNRTNAANTCLQLLTYSEHRTQSTDQALTRGKIKDARAWMSAALVYQYDSWSALKYVNDTSQVGETMSFLDGLIHVTSNALSMMVSYDNFGDNVASWTYPATERDGFWEKTGPGLGLDPSTGLNLGFPSGLKEDVTVCKDGKCGYKTVQDAVNAAPEDNGMRKFVIKISEGVYEENVIVPFEKKNVVFIGDGMGKTVITGSLNAGMPGITTYNTATVGVVGDGFMARDLTFQNTAGPDAHQAVAFRSDSDFSLIENCEFLGNQDTLYAHGLRQFYKNCRIQGNVDFIFGNSAAVFQDCEILIAPRQINPEKGEKNAVTAQGRIDPSQSTGFVFLNCLINGTEEYMKLFKANPKVHKNFLGRPWKDYSRTVFIGCNLEALITPDGWLPWSGDFALKTLYYGESKNTGPGSDRSQRVSWSSQIPDEHVHVYSVANFIQADEWASMSA

SEQ ID NO: 8817 - protein, 551 aa, Arabidopsis thaliana
MSSILILLFSLFLFSSPSSSSRHHHHHNSGDTSPVNPSSSLAAQIRLACNATRYPDQCVSSLSEQGRVPPDPKPIQIIHSAISFSFQNLKTAQSKIKSIVDSSVGNLNRTNAANTCLQLLTYSEHRTQSTDQALTRGKIKDARAWMSAALVYQYDSWSALKYVNDTSQVGETMSFLDGLIHVTSNALSMMVSYDNFGDNVASWTYPATERDGFWEKTGPGLGLDPSTGLNLGFPSGLKEDVTVCKDGKCGYKTVQDAVNAAPEDNGMRKFVIKISEGVYEENVIVPFEKKNVVFIGDGMGKTVITGSLNAGMPGITTYNTATVGVVGDGFMARDLTFQNTAGPDAHQAVAFRSDSDFSLIENCEFLGNQDTLYAHGLRQFYKNCRIQGNVDFIFGNSAAVFQDCEILIAPRQINPEKGEKNAVTAQGRIDPSQSTGFVFLNCLINGTEEYMKLFKANPKVHKNFLGRPWKDYSRTVFIGCNLEALITPDGWLPWSGDFALKTLYYGESKNTGPGSDRSQRVSWSSQIPDEHVHVYSVANFIQADEWASMSA

SEQ ID NO: 8818 - protein, 406 aa, Arabidopsis thaliana
MSAALVYQYDSWSALKYVNDTSQVGETMSFLDGLIHVTSNALSMMVSYDNFGDNVASWTYPATERDGFWEKTGPGLGLDPSTGLNLGFPSGLKEDVTVCKDGKCGYKTVQDAVNAAPEDNGMRKFVIKISEGVYEENVIVPFEKKNVVFIGDGMGKTVITGSLNAGMPGITTYNTATVGVVGDGFMARDLTFQNTAGPDAHQAVAFRSDSDFSLIENCEFLGNQDTLYAHGLRQFYKNCRIQGNVDFIFGNSAAVFQDCEILIAPRQINPEKGEKNAVTAQGRIDPSQSTGFVFLNCLINGTEEYMKLFKANPKVHKNFLGRPWKDYSRTVFIGCNLEALITPDGWLPWSGDFALKTLYYGESKNTGPGSDRSQRVSWSSQIPDEHVHVYSVANFIQADEWASMSA

SEQ ID NO: 8819 - DNA, 1980 bp, Arabidopsis thaliana
gattccaaaatcctctgtatatggatctacacctctcctcagtctcatactcaaatcaataatccaaaccccaaaaaaaagaaaaccagagaagagagtttaaaaaatgagaggttcttgcaaagtctctatagttcttcttctggttttaatcaatggtgtgcttggagataacccttatagattcttcacctggaaaattacttatggcgacatttatccccttggtgttaaacaacagggaatattgataaatgggcagtttcctggacctcacattgacgcaatcacaaatgataatatcattatcagtgttttcaattacttgaaagagccttttctcatttcttggaacggagtgcaacagaggaagaactcatggcaagatggagtcgtagggacaacatgtccgattccaccaggcaaaaacttcacttatgtaattcaagtcaaagatcaaattggtagcttctactatttcccttctcttgccttccacaaagccgctggtgcatttggagccatccgtgtctggagtcgtcctcgcatccctgtcccgttctctccccctgacggtgatttctggcttctcgccggagattggtacaaaaccaatcactatgttttgagacgtctactagaagccggaaggaatctaccgaatcctgatggagttctcatcaatggtcgcggctggggaggcaataccttcaccgttcaacccggtaagacctatagattcagaatatcaaacgttggggtcgcgacttcattaaacttcagaatccaaggacacacgatgaagctcgttgaagtagaaggctctcacactgttcaaaacatctacacttcacttgacattcatttaggacagtcttactctgttcttgtgacggctaaccaagctcctcaagactattacatcgtcatctcctcgaggttcacgcggaaagtccttacaacgacttcgattctccattacagtaactcgagaaaaggcgtatctggccctgttccaaatggtcctactttggacatcgcatcttcactctaccaagctcgaactatccggagaaatcttacagcgagtggtccgagaccgaatccgcaaggctcgtatcattacggtttgatcaaaccaggccgtacgatcatactcgccaactcagctccttggatcaacggcaagcaaaggtacgccgtgaacggtgcctcgtttgttgcgcctgacacaccattgaagctcgccgattacttcaagattcccggagtttttaacctcggaagcatcccaacgagtccctctggtggaaacggagggtatcttcaaagctctgttatggccgctaactttagagaattcatcgaggttgttttccaaaactgggaaaattcagtccagtcttggcacgtctccggttactctttcttcgtcgtcggtatggatggaggacaatggactcccggaagccgagcaaagtacaacctgcgggacgcggtttcacggtccaccgttcaagtatatccgagggcatggacagcgatctacatagcgttggataatgttgggatgtggaacataaggtcggagaattgggcaagacagtatttggggcaacaattctatcttcgagtttacacttcctctacttcgtaccgagatgaatatccaccaccaaagaacgctcttatgtgcggacgagctaaaggccgccacactaggccattctaaaagggatattggacgcaacggctcaactgttttttttttctttgtttttttagattgaatgatttgaaatgtttagtattgtcacgagagggtggcaaagagatgtgagcttcgtggatttattcactacggcacaaaaattaggaacaagaaaaatttggagcttgacttgagctttcaacttagtttttatgacgaaatcaaatgttgtgttcttattttaaataatcaaattattttgttttact

SEQ ID NO: 8820 - protein, 541 aa, Arabidopsis thaliana
MRGSCKVSIVLLLVLINGVLGDNPYRFFTWKITYGDIYPLGVKQQGILINGQFPGPHIDAITNDNIIISVFNYLKEPFLISWNGVQQRKNSWQDGVVGTTCPIPPGKNFTYVIQVKDQIGSFYYFPSLAFHKAAGAFGAIRVWSRPRIPVPFSPPDGDFWLLAGDWYKTNHYVLRRLLEAGRNLPNPDGVLINGRGWGGNTFTVQPGKTYRFRISNVGVATSLNFRIQGHTMKLVEVEGSHTVQNIYTSLDIHLGQSYSVLVTANQAPQDYYIVISSRFTRKVLTTTSILHYSNSRKGVSGPVPNGPTLDIASSLYQARTIRRNLTASGPRPNPQGSYHYGLIKPGRTIILANSAPWINGKQRYAVNGASFVAPDTPLKLADYFKIPGVFNLGSIPTSPSGGNGGYLQSSVMAANFREFIEVVFQNWENSVQSWHVSGYSFFVVGMDGGQWTPGSRAKYNLRDAVSRSTVQVYPRAWTAIYIALDNVGMWNIRSENWARQYLGQQFYLRVYTSSTSYRDEYPPPKNALMCGRAKGRHTRPF

SEQ ID NO: 8821 - protein, 310 aa, Arabidopsis thaliana
MKLVEVEGSHTVQNIYTSLDIHLGQSYSVLVTANQAPQDYYIVISSRFTRKVLTTTSILHYSNSRKGVSGPVPNGPTLDIASSLYQARTIRRNLTASGPRPNPQGSYHYGLIKPGRTIILANSAPWINGKQRYAVNGASFVAPDTPLKLADYFKIPGVFNLGSIPTSPSGGNGGYLQSSVMAANFREFIEVVFQNWENSVQSWHVSGYSFFVVGMDGGQWTPGSRAKYNLRDAVSRSTVQVYPRAWTAIYIALDNVGMWNIRSENWARQYLGQQFYLRVYTSSTSYRDEYPPPKNALMCGRAKGRHTRPF

SEQ ID NO: 8822 - DNA, 1043 bp, Arabidopsis thaliana
gatcgaagaaatgttgagaagaaaaccaacaaaaatccaactcaaaatcgaagaccgtgaagagcttgaacaatcccgcaaatctcaaccatccaccaccacaaccaccgcaccatcttcctcctccgccgcctcctctctccaccacctcatagacccaaaacacaaaaacccttcctccaaatccgaccgaatcggtctctcttaaaacactccatggaagtcgaagtcaagctccgtctcctaaccgccgctgctcatctccgtctcaccactctcctcactccataccacctcaaaacccttcaccaacgcaacaccttcttcgacacacccaaaaacgacctctctctccgccgcgccgtcctccgtctccgcttccttcaaaacgccgccgtttccgcggcttctccttctccgccgcgttgtatcgtctctcttaaagcgaagccaactctagctaatgggattagtcgtgtggaggaagatgaagaggagattgagtattggattggtaaagaatgtgttgagtcaccggctaagctctcagatattggatctagggttttgaaaagggttaaagaggaatatgggtttaatgactttttagggtttgtttgtttaggtggctttgagaatgttaggaatgtttatgagtggagaggtgttaaacttgaggttgatgagactaagtatgattttgggaattgttatgagattgaatgtgagacagaggaaccagagcgtgttaagacaatgattgaggagtttcttacagaggagaagattgagttttcgaattccgacatgacaaagtttgctgttttccggtcaggaaaacttccttgacaatgtgggagaaacggtggctctaattagaagagtggtttcttggttcagggattttggtcatcagcattggtcaagtgatattgattgcaagaaagtttactattgaactagatgatctcagtttgtactatttttctttaggccttgtccatctttgactctttaagtactggttcatgagccttggtatt

SEQ ID NO: 8823 - protein, 210 aa, Arabidopsis thaliana
MEVEVKLRLLTAAAHLRLTTLLTPYHLKTLHQRNTFFDTPKNDLSLRRAVLRLRFLQNAAVSAASPSPPRCIVSLKAKPTLANGISRVEEDEEEIEYWIGKECVESPAKLSDIGSRVLKRVKEEYGFNDFLGFVCLGGFENVRNVYEWRGVKLEVDETKYDFGNCYEIECETEEPERVKTMIEEFLTEEKIEFSNSDMTKFAVFRSGKLP

SEQ ID NO: 8824 - DNA, 1830 bp, Arabidopsis thaliana
gaacaactaaactaattgacatttgacaataaaaagctgaactttattatgcatctctaggctttttccttgagagtttctctctttgaagtcatttacgtatatatatataaacccttgcaccattcttcttcgtcttgttaagcttttaagaatctctactcacattttctctgtaaaaatgggaactaggttccaatcattcttgctcgtgttcttgctttcatgtttaatcctcatatcaactgcctcgtgtgagcgaaatggtgatggaacgattagaattggattgaagaagaggaaactagaccggagcaacaggctagcttctcagctttttttgaaaaaccgagggtctcattggtctcccaaacactattttcgcctgaacgatgaaaatgcggatatggttccgctgaaaaactatttggatgctcaatactatggtgacattaccattggtactcctcctcagaagttcactgtgatctttgatactggtagctccaatctctggataccatctactaaatgttacctatcggttgcttgttatttccactccaagtacaaggctagccagtcatcgtcatatagaaagaacggaaaacccgcgtctatccgctatgggacgggtgctatttctggttactttagcaatgatgatgttaaagttggtgatattgttgtgaaagagcaggaattcatagaggctactagtgagcctggtataacattcttgctagcaaagtttgatggtatcctcggtttgggtttcaaagagatttctgtaggaaactcaactccggtttggtataacatggtagaaaaaggtttagttaaggaaccgattttttcgttctggcttaaccgtaacccgaaagatccagaaggcggtgagattgttttcggtggagtcgacccgaagcacttcaaaggagagcatacttttgttcctgtgacacataaaggttactggcagtttgacatgggtgatctccaaattgctggcaaaccaaccggatattgtgctaaaggttgttctgctattgctgattccggaacttctctgctcaccggtccatcgactgtcatcacgatgatcaatcacgcgataggagcacaaggaattgtaagccgtgaatgcaaggccgtggtggatcaatacggaaaaaccatgttgaattctcttctagctcaggaggatccgaagaaagtatgctcacaaattggagtctgcgcttatgatggtacacagagtgtgagtatggggatccagtcagttgtagacgatggaacatcgggtcttttaaaccaagcgatgtgcagtgcttgcgaaatggcagccgtgtggatggagagcgaattgactcagaatcaaacacaagaacgcatactcgcttatgctgctgagctatgtgaccatataccaacccaaaaccaacaatcagcagtggactgtgggagggtttcgtcgatgcctatagtcacattctcaattggtggcagaagctttgatctaactcctcaagactatatattcaagatcggggaaggagttgagtctcagtgcaccagcggtttcacggcaatggatattgctccgcctcgtggacctctctggatcttgggtgatatcttcatgggaccataccacacagtgttcgattatgggaaaggaagagttggattcgccaaagctgcttaaacaatatctcttctttaataccctcgttttttatatgatgtttgtgaatgtgtttgtaataacttaaaacatattgctatcctagaatggtatcatcttaatacagatttttatttggtttc

SEQ ID NO: 8825 - protein, 508 aa, Arabidopsis thaliana
MGTRFQSFLLVFLLSCLILISTASCERNGDGTIRIGLKKRKLDRSNRLASQLFLKNRGSHWSPKHYFRLNDENADMVPLKNYLDAQYYGDITIGTPPQKFTVIFDTGSSNLWIPSTKCYLSVACYFHSKYKASQSSSYRKNGKPASIRYGTGAISGYFSNDDVKVGDIVVKEQEFIEATSEPGITFLLAKFDGILGLGFKEISVGNSTPVWYNMVEKGLVKEPIFSFWLNRNPKDPEGGEIVFGGVDPKHFKGEHTFVPVTHKGYWQFDMGDLQIAGKPTGYCAKGCSAIADSGTSLLTGPSTVITMINHAIGAQGIVSRECKAVVDQYGKTMLNSLLAQEDPKKVCSQIGVCAYDGTQSVSMGIQSVVDDGTSGLLNQAMCSACEMAAVWMESELTQNQTQERILAYAAELCDHIPTQNQQSAVDCGRVSSMPIVTFSIGGRSFDLTPQDYIFKIGEGVESQCTSGFTAMDIAPPRGPLWILGDIFMGPYHTVFDYGKGRVGFAKAA

SEQ ID NO: 8826 - protein, 433 aa, Arabidopsis thaliana
MVPLKNYLDAQYYGDITIGTPPQKFTVIFDTGSSNLWIPSTKCYLSVACYFHSKYKASQSSSYRKNGKPASIRYGTGAISGYFSNDDVKVGDIVVKEQEFIEATSEPGITFLLAKFDGILGLGFKEISVGNSTPVWYNMVEKGLVKEPIFSFWLNRNPKDPEGGEIVFGGVDPKHFKGEHTFVPVTHKGYWQFDMGDLQIAGKPTGYCAKGCSAIADSGTSLLTGPSTVITMINHAIGAQGIVSRECKAVVDQYGKTMLNSLLAQEDPKKVCSQIGVCAYDGTQSVSMGIQSVVDDGTSGLLNQAMCSACEMAAVWMESELTQNQTQERILAYAAELCDHIPTQNQQSAVDCGRVSSMPIVTFSIGGRSFDLTPQDYIFKIGEGVESQCTSGFTAMDIAPPRGPLWILGDIFMGPYHTVFDYGKGRVGFAKAA

SEQ ID NO: 8827 - protein, 295 aa, Arabidopsis thaliana
MVEKGLVKEPIFSFWLNRNPKDPEGGEIVFGGVDPKHFKGEHTFVPVTHKGYWQFDMGDLQIAGKPTGYCAKGCSAIADSGTSLLTGPSTVITMINHAIGAQGIVSRECKAVVDQYGKTMLNSLLAQEDPKKVCSQIGVCAYDGTQSVSMGIQSVVDDGTSGLLNQAMCSACEMAAVWMESELTQNQTQERILAYAAELCDHIPTQNQQSAVDCGRVSSMPIVTFSIGGRSFDLTPQDYIFKIGEGVESQCTSGFTAMDIAPPRGPLWILGDIFMGPYHTVFDYGKGRVGFAKAA

SEQ ID NO: 8828 - DNA, 945 bp, Arabidopsis thaliana
gggaaagagcagaagaaatttgcagaagagagaaaaacaaaaatggcggttctttgctcgtcttcgacggtgatactctcttcttcttccgtgaaatcctccggaagtgagagaaagtctccgtttttagggttctctttaacggctatctcgaagccgtcggtacgagtcggcatttatgcgaattcgaaaagaggattgcaagtgaagtgtgaagctgagccgacgacgacgacttctcttgttccggcgaatcaacgatggatgttcgacgaagaagaagctaatggccctgacatctggaacacgacatggtatccaaaagcttcagaccatgtgaacacggacaagccctggtttgtggttgatgcaactgacaaaattcttggtagattggcatcgacaattgctaatcacatccgtgggaagaatcttgcctcttacactcctagtgtcgacatgggagcttttgtgattgtggtgaatgctgagaaagttgctgtatctggaaagaagcgtaaccaaaagctgtacaggaggcattcaggacgacctggtggtatgacagtagagacatttgatcaattgcagcagagaattcctgaaagaatcgttgagcatgctgttcgtggaatgcttccaaagggacggcttgggagagctctgttcaatcacctgaaggtgtacaaaggccctgaccatcctcacgaggcccagaaaccgcttgatctgcctatcagggacaagagaatacagctgcaaaaatagaagctccaccactgttccattatcgccaagcgcagagagttttttcttctcaggtttctgtagtttcttcatcccaaaaccagaggaggctttacagattcttgttttcgcttctatcaactctgttatgctacaaaactttctaatttgaaatatttctcgttatttttttttgcc

SEQ ID NO: 8829 - protein, 255 aa, Arabidopsis thaliana
GKEQKKFAEERKTKMAVLCSSSTVILSSSSVKSSGSERKSPFLGFSLTAISKPSVRVGIYANSKRGLQVKCEAEPTTTTSLVPANQRWMFDEEEANGPDIWNTTWYPKASDHVNTDKPWFVVDATDKILGRLASTIANHIRGKNLASYTPSVDMGAFVIVVNAEKVAVSGKKRNQKLYRRHSGRPGGMTVETFDQLQQRIPERIVEHAVRGMLPKGRLGRALFNHLKVYKGPDHPHEAQKPLDLPIRDKRIQLQK

SEQ ID NO: 8830 - protein, 241 aa, Arabidopsis thaliana
MAVLCSSSTVILSSSSVKSSGSERKSPFLGFSLTAISKPSVRVGIYANSKRGLQVKCEAEPTTTTSLVPANQRWMFDEEEANGPDIWNTTWYPKASDHVNTDKPWFVVDATDKILGRLASTIANHIRGKNLASYTPSVDMGAFVIVVNAEKVAVSGKKRNQKLYRRHSGRPGGMTVETFDQLQQRIPERIVEHAVRGMLPKGRLGRALFNHLKVYKGPDHPHEAQKPLDLPIRDKRIQLQK

SEQ ID NO: 8831 - protein, 167 aa, Arabidopsis thaliana
MFDEEEANGPDIWNTTWYPKASDHVNTDKPWFVVDATDKILGRLASTIANHIRGKNLASYTPSVDMGAFVIVVNAEKVAVSGKKRNQKLYRRHSGRPGGMTVETFDQLQQRIPERIVEHAVRGMLPKGRLGRALFNHLKVYKGPDHPHEAQKPLDLPIRDKRIQLQK

SEQ ID NO: 8832 - DNA, 1793 bp, Arabidopsis thaliana
aaaacatagctagataaaaatcaagcttcacctaattagtgtattcccccaaatttctcaattctcactaatggctttggtcagcttacttgaaatctccattgctttcttttgtttccttatctttcgaattttcctgatcagcaagaaaccacaccgttcatttctcacaaactggccgctcctgggcatgcttccgggtttacttaccgtgctccctcgagtttacgactttataaccgaggttcttgaggacggcaacttaaactatcttttcataggcccttttttagggggcatcgacatgttgttcaccgttgatcctgctaatatcaatcacatcatgagctcaaactttgcgaattacccgaaaggaaccgaattcaagaagttatttgacgttttgggagatgggattttcaacgcggattcagatttgtggaaggatctaaggaaatcttctcaaagcatgatgaatcatcccgattttcaaaggttttcattagctacaagcttgagtaagctagagaaagggcttgtgccacttcttgatcatgttgctaaagagaaactcgtcgtggacttacaagatgttttccaaagattcacgtttgacactacctttgttttagcaaccgggtatgatccaggttgtctctcggtggaaatgccggaaatcgagtttgcaagagccttagacgatgcagaggaagctattttctacagacatttcaagccggaggtggtgtggaagatgcaaagattgattggggttggagctgagttgaagctgaaaagagctcacgcgattttcgatcgtgtttgctctaagtgcatagcttctaagagagatgagatcagccaagggattgattcttcttcttctaaagatttgttgatgtcttctataaatgttgacacgactaagtacaagttgttgaatccaagtgatgacagattccttagagacacaatcttgtccttcatgttagctggtagagacacaacaggctcagcgctcacttggttcttctggcttctatgcaataaccaagaagccatgaccaagattcgtcaagaaatcaacacaaatctatttccaagaaacaagaccgacgacggttctgtttcttatgattctgattcattcaatccccaagaggtaaagaagttggtgtatttacacggcgcggtttgtgaagccctcaggctctatccacctgttccctttaaccacaagtctcctgctaaacccgacgtgcttccaagcggccacaaagtcaaggccaattcgaggattttgttctgtctttactcattagggagaatgaaatcggtttggggagaagatgcaatggaatttaaaccggagagatggatttctgagagtggaagatcggtacatgagccatcttataagttcctatcgtttaacgccggtccaagaacttgtttggggaaagaagtggctatgacgcaaatgaagacagtggctgtgaaaatcatacaaaattatgacattaatgtcgttgaagggcacaagatcaagccagctccttcggttattctccacatgaagcatggtcttaaagtcactgtctctaaaagatgtttgtcttgaatgttttaactagaatgtagaaactgtggcagttgacgaagatgatttctatgatatgaagacatctcaaatcatgcatcctgaaatataatgttattgttaaacataatttctaaatttaagtaaaatatataaatgttggtaagaaaattaataatttcctttttatttt

SEQ ID NO: 8833 - protein, 516 aa, Arabidopsis thaliana
MALVSLLEISIAFFCFLIFRIFLISKKPHRSFLTNWPLLGMLPGLLTVLPRVYDFITEVLEDGNLNYLFIGPFLGGIDMLFTVDPANINHIMSSNFANYPKGTEFKKLFDVLGDGIFNADSDLWKDLRKSSQSMMNHPDFQRFSLATSLSKLEKGLVPLLDHVAKEKLVVDLQDVFQRFTFDTTFVLATGYDPGCLSVEMPEIEFARALDDAEEAIFYRHFKPEVVWKMQRLIGVGAELKLKRAHAIFDRVCSKCIASKRDEISQGIDSSSSKDLLMSSINVDTTKYKLLNPSDDRFLRDTILSFMLAGRDTTGSALTWFFWLLCNNQEAMTKIRQEINTNLFPRNKTDDGSVSYDSDSFNPQEVKKLVYLHGAVCEALRLYPPVPFNHKSPAKPDVLPSGHKVKANSRILFCLYSLGRMKSVWGEDAMEFKPERWISESGRSVHEPSYKFLSFNAGPRTCLGKEVAMTQMKTVAVKIIQNYDINVVEGHKIKPAPSVILHMKHGLKVTVSKRCLS

SEQ ID NO: 8834 - protein, 476 aa, Arabidopsis thaliana
MLPGLLTVLPRVYDFITEVLEDGNLNYLFIGPFLGGIDMLFTVDPANINHIMSSNFANYPKGTEFKKLFDVLGDGIFNADSDLWKDLRKSSQSMMNHPDFQRFSLATSLSKLEKGLVPLLDHVAKEKLVVDLQDVFQRFTFDTTFVLATGYDPGCLSVEMPEIEFARALDDAEEAIFYRHFKPEVVWKMQRLIGVGAELKLKRAHAIFDRVCSKCIASKRDEISQGIDSSSSKDLLMSSINVDTTKYKLLNPSDDRFLRDTILSFMLAGRDTTGSALTWFFWLLCNNQEAMTKIRQEINTNLFPRNKTDDGSVSYDSDSFNPQEVKKLVYLHGAVCEALRLYPPVPFNHKSPAKPDVLPSGHKVKANSRILFCLYSLGRMKSVWGEDAMEFKPERWISESGRSVHEPSYKFLSFNAGPRTCLGKEVAMTQMKTVAVKIIQNYDINVVEGHKIKPAPSVILHMKHGLKVTVSKRCLS

SEQ ID NO: 8835 - protein, 438 aa, Arabidopsis thaliana
MLFTVDPANINHIMSSNFANYPKGTEFKKLFDVLGDGIFNADSDLWKDLRKSSQSMMNHPDFQRFSLATSLSKLEKGLVPLLDHVAKEKLVVDLQDVFQRFTFDTTFVLATGYDPGCLSVEMPEIEFARALDDAEEAIFYRHFKPEVVWKMQRLIGVGAELKLKRAHAIFDRVCSKCIASKRDEISQGIDSSSSKDLLMSSINVDTTKYKLLNPSDDRFLRDTILSFMLAGRDTTGSALTWFFWLLCNNQEAMTKIRQEINTNLFPRNKTDDGSVSYDSDSFNPQEVKKLVYLHGAVCEALRLYPPVPFNHKSPAKPDVLPSGHKVKANSRILFCLYSLGRMKSVWGEDAMEFKPERWISESGRSVHEPSYKFLSFNAGPRTCLGKEVAMTQMKTVAVKIIQNYDINVVEGHKIKPAPSVILHMKHGLKVTVSKRCLS

SEQ ID NO: 8836 - DNA, 1789 bp, Arabidopsis thaliana
aacttggccaatccgcatcgtgtggcgatcagagagttaagccttgaagacgaagagataacgaattggttgttgatcactcgctttataaatctctcagtttcttgctcacaccaacatctctctaagcttcttcttctaccaatctaattcctctcttcagcttcttgtgttgtgacgcatactcgtcgcagtcttgagatatggccgccgcagtttccaccgtcggtgccatcaacagagctccgttgagcttgaacgggtcaggatcaggagctgtatcagccccagcttcaaccttcttgggaaagaaagttgtaactgtgtcgagattcgcacagagcaacaagaagagcaacggatcattcaaggtgttggctgtgaaagaagacaaacaaaccgatggagacagatggagaggtcttgcctacgacacttctgatgatcaacaagacatcaccagaggcaagggtatggttgactctgtcttccaagctcctatgggaaccggaactcaccacgctgtccttagctcatacgaatacgttagccaaggccttaggcagtacaacttggacaacatgatggatgggttttacattgctcctgctttcatggacaagcttgttgttcacatcaccaagaacttcttgactctgcctaacatcaaggttccacttattttgggtatatggggaggcaaaggtcaaggtaaatccttccagtgtgagcttgtcatggccaagatgggtatcaacccaatcatgatgagtgctggagagcttgagagtggaaacgcaggagaacccgcaaagcttatccgtcagaggtaccgtgaggcagctgacttgatcaagaagggaaagatgtgttgtctcttcatcaacgatcttgacgctggtgcgggtcgtatgggtggtactactcagtacactgtcaacaaccagatggttaacgcaacactcatgaacattgctgataacccaaccaacgtccagctcccaggaatgtacaacaaggaagagaacgcacgtgtccccatcatttgcactggtaacgatttctccaccctatacgctcctctcatccgtgatggacgtatggagaagttctactgggccccgacccgtgaagaccgtatcggtgtctgcaagggtatcttcagaactgacaagatcaaggacgaagacattgtcacacttgttgatcagttccctggtcaatctatcgatttcttcggtgctttgagggcgagagtgtacgatgatgaagtgaggaagttcgttgagagccttggagttgagaagatcggaaagaggctggttaactcaagggaaggacctcccgtgttcgagcaacccgagatgacttatgagaagcttatggaatacggaaacatgcttgtgatggaacaagagaatgtcaagagagtccaacttgccgagacctacctcagccaggctgctttgggagacgcaaacgctgacgccatcggccgcggaactttctacggaaaaggagcccagcaagtaaacctgccagttcctgaagggtgtactgatcctgtggctgaaaactttgatccaacggctagaagtgacgatggaacctgtgtctacaacttttgagcaatattatcctgcttattaatttgctgttttactcctattgtctcttttggtttatttttctcctttgtgtaattgtggattggatcttgtcctcttttgttccctttttttttttttatgatgtacaacacattggtaatttaaaattgccttgtcat

SEQ ID NO: 8837 - protein, 474 aa, Arabidopsis thaliana
MAAAVSTVGAINRAPLSLNGSGSGAVSAPASTFLGKKVVTVSRFAQSNKKSNGSFKVLAVKEDKQTDGDRWRGLAYDTSDDQQDITRGKGMVDSVFQAPMGTGTHHAVLSSYEYVSQGLRQYNLDNMMDGFYIAPAFMDKLVVHITKNFLTLPNIKVPLILGIWGGKGQGKSFQCELVMAKMGINPIMMSAGELESGNAGEPAKLIRQRYREAADLIKKGKMCCLFINDLDAGAGRMGGTTQYTVNNQMVNATLMNIADNPTNVQLPGMYNKEENARVPIICTGNDFSTLYAPLIRDGRMEKFYWAPTREDRIGVCKGIFRTDKIKDEDIVTLVDQFPGQSIDFFGALRARVYDDEVRKFVESLGVEKIGKRLVNSREGPPVFEQPEMTYEKLMEYGNMLVMEQENVKRVQLAETYLSQAALGDANADAIGRGTFYGKGAQQVNLPVPEGCTDPVAENFDPTARSDDGTCVYNF

SEQ ID NO: 8838 - protein, 384 aa, Arabidopsis thaliana
MVDSVFQAPMGTGTHHAVLSSYEYVSQGLRQYNLDNMMDGFYIAPAFMDKLVVHITKNFLTLPNIKVPLILGIWGGKGQGKSFQCELVMAKMGINPIMMSAGELESGNAGEPAKLIRQRYREAADLIKKGKMCCLFINDLDAGAGRMGGTTQYTVNNQMVNATLMNIADNPTNVQLPGMYNKEENARVPIICTGNDFSTLYAPLIRDGRMEKFYWAPTREDRIGVCKGIFRTDKIKDEDIVTLVDQFPGQSIDFFGALRARVYDDEVRKFVESLGVEKIGKRLVNSREGPPVFEQPEMTYEKLMEYGNMLVMEQENVKRVQLAETYLSQAALGDANADAIGRGTFYGKGAQQVNLPVPEGCTDPVAENFDPTARSDDGTCVYNF

SEQ ID NO: 8839 - protein, 375 aa, Arabidopsis thaliana
MGTGTHHAVLSSYEYVSQGLRQYNLDNMMDGFYIAPAFMDKLVVHITKNFLTLPNIKVPLILGIWGGKGQGKSFQCELVMAKMGINPIMMSAGELESGNAGEPAKLIRQRYREAADLIKKGKMCCLFINDLDAGAGRMGGTTQYTVNNQMVNATLMNIADNPTNVQLPGMYNKEENARVPIICTGNDFSTLYAPLIRDGRMEKFYWAPTREDRIGVCKGIFRTDKIKDEDIVTLVDQFPGQSIDFFGALRARVYDDEVRKFVESLGVEKIGKRLVNSREGPPVFEQPEMTYEKLMEYGNMLVMEQENVKRVQLAETYLSQAALGDANADAIGRGTFYGKGAQQVNLPVPEGCTDPVAENFDPTARSDDGTCVYNF

SEQ ID NO: 8840 - DNA, 959 bp, Arabidopsis thaliana
acacaacaatcttaagaaacagatcctctgtcttgccacatcagcaaacgcaatctcaagtttcgtagattgcttatttcttcatcacacacttcaaactcgattttattttaattttcataagagaacaaccaagacaaaaagaacaatggcagcgagtgcatctccaatggcgagccagctaaggagcagcttctcctccgcttctctttctcagcgtctcgccgtcccgaagggcatctccggtgctcctttcggtgtttctccgaccaaaagagtctcttccttcactgtccgagctgttaaatccgacaagacaacattccaagtagttcaaccaatcaacggtgatccattcatcggaagtttggaaactccggtgacatcaagcccattgatcgcgtggtacctttccaacctccctggttaccgtaccgccgtcaaccctctcctccgcggtgtggaagtgggcctggcccatggtttcttcttagtgggcccgttcgtcaaggctggcccattaaggaacactgcttacgccgggtcagccgggtctttagccgcggctgggctggtagtcatcctcagcatgtgcctcaccatctacggtatctcttctttcaaggaaggagagccatcgatcgcaccgagtttgactttgactgggcggaagaagcagcctgaccagcttcaaacggctgatggatgggctaagttcactggaggattcttctttggagggatctctggggtgacttgggcttacttccttctctacgttcttgaccttccttacttcgtcaagtaaatgtagatcaaaatatatcgagtgtactttcaactctcttgcatcattgttttttactctttgtcttgatcaagaatcttgaaactcaggattgttaatgtatattactctttctttatcttattgacattaatttatatttgccttgctt

SEQ ID NO: 8841 - protein, 268 aa, Arabidopsis thaliana
HNNLKKQILCLATSANAISSFVDCLFLHHTLQTRFYFNFHKRTTKTKRTMAASASPMASQLRSSFSSASLSQRLAVPKGISGAPFGVSPTKRVSSFTVRAVKSDKTTFQVVQPINGDPFIGSLETPVTSSPLIAWYLSNLPGYRTAVNPLLRGVEVGLAHGFFLVGPFVKAGPLRNTAYAGSAGSLAAAGLVVILSMCLTIYGISSFKEGEPSIAPSLTLTGRKKQPDQLQTADGWAKFTGGFFFGGISGVTWAYFLLYVLDLPYFVK

SEQ ID NO: 8842 - protein, 219 aa, Arabidopsis thaliana
MAASASPMASQLRSSFSSASLSQRLAVPKGISGAPFGVSPTKRVSSFTVRAVKSDKTTFQVVQPINGDPFIGSLETPVTSSPLIAWYLSNLPGYRTAVNPLLRGVEVGLAHGFFLVGPFVKAGPLRNTAYAGSAGSLAAAGLVVILSMCLTIYGISSFKEGEPSIAPSLTLTGRKKQPDQLQTADGWAKFTGGFFFGGISGVTWAYFLLYVLDLPYFVK

SEQ ID NO: 8843 - protein, 212 aa, Arabidopsis thaliana
MASQLRSSFSSASLSQRLAVPKGISGAPFGVSPTKRVSSFTVRAVKSDKTTFQVVQPINGDPFIGSLETPVTSSPLIAWYLSNLPGYRTAVNPLLRGVEVGLAHGFFLVGPFVKAGPLRNTAYAGSAGSLAAAGLVVILSMCLTIYGISSFKEGEPSIAPSLTLTGRKKQPDQLQTADGWAKFTGGFFFGGISGVTWAYFLLYVLDLPYFVK

SEQ ID NO: 8844 - DNA, 1058 bp, Arabidopsis thaliana
gaattatctatcacaccaccactctctctctaatctatctatccgagaatggccaagatgggcttgaaacccgacccggctactactaaccagacccacaataatgccaaggagattcgttacagaggcgttaggaagcgtccttggggccgttatgccgccgagatccgagatccgggcaagaaaacccgcgtctggcttggcactttcgatacggctgaagaggcggcgcgtgcttacgatacggcggcgcgtgattttcgtggtgctaaggctaagaccaatttcccaacttttctcgagctgagtgaccagaaggtccctaccggtttcgcgcgtagccctagccagagcagcacgctcgactgtgcttctcctccgacgttagttgtgccttcagcgacggctgggaatgttcccccgcagctcgagcttagtctcggcggaggaggcggcggctcgtgttatcagatcccgatgtcgcgtcctgtctactttttggacctgatggggatcggtaacgtaggtcgtggtcagcctcctcctgtgacatcggcgtttagatcgccggtggtgcatgttgcgacgaagatggcttgtggtgcccaaagcgactctgattcgtcatcggtcgttgatttcgaaggtgggatggagaagagatctcagctgttagatctagatcttaatttgcctcctccatcggaacaggcctgagcttttaacggtgtcgtttcaattcgaagcgcatgcgtttcttcttctttttgagctgtgaaaattcgttttctcatagtttttcctctctctctctctcagtctaaatttattaccagtttttagaaagaaaaaacagattaaatctgagagagaaaaatataattttagctgacatggatcgttatgtacatattattacataaccggagatctgaacttttgttgtgtgcttttaattttttgcgacttggtttcaccccatgttgtttctctattttttttactactttttttttttttgttcttccaaattttcaatcaataatttggtaatcttc

SEQ ID NO: 8845 - protein, 222 aa, Arabidopsis thaliana
MAKMGLKPDPATTNQTHNNAKEIRYRGVRKRPWGRYAAEIRDPGKKTRVWLGTFDTAEEAARAYDTAARDFRGAKAKTNFPTFLELSDQKVPTGFARSPSQSSTLDCASPPTLVVPSATAGNVPPQLELSLGGGGGGSCYQIPMSRPVYFLDLMGIGNVGRGQPPPVTSAFRSPVVHVATKMACGAQSDSDSSSVVDFEGGMEKRSQLLDLDLNLPPPSEQA

SEQ ID NO: 8846 - protein, 219 aa, Arabidopsis thaliana
MGLKPDPATTNQTHNNAKEIRYRGVRKRPWGRYAAEIRDPGKKTRVWLGTFDTAEEAARAYDTAARDFRGAKAKTNFPTFLELSDQKVPTGFARSPSQSSTLDCASPPTLVVPSATAGNVPPQLELSLGGGGGGSCYQIPMSRPVYFLDLMGIGNVGRGQPPPVTSAFRSPVVHVATKMACGAQSDSDSSSVVDFEGGMEKRSQLLDLDLNLPPPSEQA

SEQ ID NO: 8847 - DNA, 855 bp, Arabidopsis thaliana
acatttcctcactcaactctctcattctcactaacagagagaaaaagcaaaagcaaaaatggctcgatctttcgctattgctgtgatctgtatcgtcctcatcgccggcgttactggtcaagctccgacttcaccaccaaccgctacaccagctccaccaactccaacaactcctccaccagcagcaactcctcctcctgtctcagcaccaccaccagtcacaacatctcctcctccagtcaccactgctcctcctccagcaaatccaccaccaccagtctcttctcctcctcctgcttctcctccaccagctactcctcctccagtcgcttctcctcctcctcccgttgcttctcctccaccagcaactcctcctcccgtcgctactcctcccccagctcctctagcttcccctcctgctcaagttccagctccagcaccgaccacgaagccagattctccatctccatctccgtcatctagcccacctcttccatcaagcgacgctcctggacctagcaccgattctatctctcctgctcctagccccactgatgtgaacgaccagaatggagctagcaagatggtttcgagcttagtatttggatctgttctcgtctgatttatgatctaagtggaatcttttgtgactgtgttacttgcatttatttttatgtcgtctttgtttgttccactgtattgcttgggactgaattcttttgggatttattatctttcggagaggatactattgagagcttgagatggagatagcaggatattttgattgcagatacttttgtggcttcatttctcattccatttgattattagtgtactacattccttttctcc

SEQ ID NO: 8848 - protein, 187 aa, Arabidopsis thaliana
MARSFAIAVICIVLIAGVTGQAPTSPPTATPAPPTPTTPPPAATPPPVSAPPPVTTSPPPVTTAPPPANPPPPVSSPPPASPPPATPPPVASPPPPVASPPPATPPPVATPPPAPLASPPAQVPAPAPTTKPDSPSPSPSSSPPLPSSDAPGPSTDSISPAPSPTDVNDQNGASKMVSSLVFGSVLV

SEQ ID NO: 8849 - protein, 160 aa, Arabidopsis thaliana
TFPHSTLSFSLTERKSKSKNGSIFRYCCDLYRPHRRRYWSSSDFTTNRYTSSTNSNNSSTSSNSSSCLSTTTSHNISSSSHHCSSSSKSTTTSLFSSSCFSSTSYSSSSRFSSSSRCFSSTSNSSSRRYSSPSSSSFPSCSSSSSSTDHEARFSISISVI

SEQ ID NO: 8850 - DNA, 1176 bp, Arabidopsis thaliana
gaccatttcttttccatgactttcctcttatcaagaacatttatttctctcactctcagaccttcttgttcgatttccatggcgaatttaacgacgaacgctaaatctcgcctgagaggtgttgtattcgatatggacggaaccctgactgttccggtcatcgatttcgccgcaatgtatagagctgttcttggtgaagatgcttacaagcgaatcaaagcagagagccctagtgggattgatattctgcatcatattgagtcgtggagtcctgataaacagcagaaggcgtatgaaatcattgctgattatgagaaacaaggaatagataagcttcaaatcatgcctggtactgctgaactatgtggcttccttgattccaaaaagataaagagggggctaattacacgcaatgttcaaaaggcaatcgacatcttccatcaacgttttgaggttatcttttctccagcactaggcagagagtttcgtccatataaaccaaacccagacccgctgttgcatatatgttctacatgggacatccaacctaatgaagtcatgatggttggtgacagcttaaaagatgatgtgagtgacagacatgatgacaagcctttggtcaaccctttctccatagcaaatcgataagcaatgcaatgaaagaagcttaaacaatggatcttctcatgccattgcttaaagattttctatgtggaaaggatgcctaccaacttttcagactatttttctcacatctttactgaagattacaactgggaatcgatctttcttttctcgattctgcagatagcatgtgggaaacgagctggagccttcacttgcttgctagatgaaaccggaaggtatggaccagacgatttttctgtttccggtctgcaacctgattttaaggttgattccttgtccaaaatccagaacctattggagacgaacttcgacctgaacccgtagtttttccaagttcctcatcttgtagtttcagtgaccaaattagtgtcctactcaacacagtatctgttcaggatagccataaatgtcaaaccacggaattctatgcactggctatctttaagttgcacaattgtgtccctgcatggtcgtctagcgaacatgtgtgtgagggcaaacattgttgtttgttaaatccaaaatttc

SEQ ID NO: 8851 - protein, 215 aa, Arabidopsis thaliana
DHFFSMTFLLSRTFISLTLRPSCSISMANLTTNAKSRLRGVVFDMDGTLTVPVIDFAAMYRAVLGEDAYKRIKAESPSGIDILHHIESWSPDKQQKAYEIIADYEKQGIDKLQIMPGTAELCGFLDSKKIKRGLITRNVQKAIDIFHQRFEVIFSPALGREFRPYKPNPDPLLHICSTWDIQPNEVMMVGDSLKDDVSDRHDDKPLVNPFSIANR

SEQ ID NO: 8852 - protein, 210 aa, Arabidopsis thaliana
MTFLLSRTFISLTLRPSCSISMANLTTNAKSRLRGVVFDMDGTLTVPVIDFAAMYRAVLGEDAYKRIKAESPSGIDILHHIESWSPDKQQKAYEIIADYEKQGIDKLQIMPGTAELCGFLDSKKIKRGLITRNVQKAIDIFHQRFEVIFSPALGREFRPYKPNPDPLLHICSTWDIQPNEVMMVGDSLKDDVSDRHDDKPLVNPFSIANR

SEQ ID NO: 8853 - protein, 189 aa, Arabidopsis thaliana
MANLTTNAKSRLRGVVFDMDGTLTVPVIDFAAMYRAVLGEDAYKRIKAESPSGIDILHHIESWSPDKQQKAYEIIADYEKQGIDKLQIMPGTAELCGFLDSKKIKRGLITRNVQKAIDIFHQRFEVIFSPALGREFRPYKPNPDPLLHICSTWDIQPNEVMMVGDSLKDDVSDRHDDKPLVNPFSIANR

SEQ ID NO: 8854 - DNA, 659 bp, Arabidopsis thaliana
gactgattcgcttctcttactacttcaatttcatttctttctcctcaaaatatcagatcgataaccaacaagcgaaactagggttctctaatctcgacgaagatggcgatgcagaaagctaaggagatcgttaacagcgaatcagtcgttgttttcagcaagacttattgtccgtattgcgtgagagtgaaggagcttttgcaacaattgggagctaagttcaaggccgttgaactcgacaccgaaagtgatggtagccaaattcaatcaggtctcgcagaatggacaggacaacgtaccgtgcctaatgtgtttataggaggaaatcacatcggtggctgtgatgcaacatcaaacttgcataaagatgggaagttggttccgctgttaactgaagctggagcgatcgcaggaaagactgcaacaacttctgcttaagagcacatccatatgtgattgcttctatcaagaataaagaggtttgagtcataaatgtgaacttgtttcgttgtcaagttgaagaaatattctgtaatgtttttaagattatggttatgtcgaagtcggatttgaacttctgatacatgatgttattatcttctggctatgcttttggtaacattttggggtaaatagaagaaactcgagtcttaggctct

SEQ ID NO: 8855 - protein, 111 aa, Arabidopsis thaliana
MAMQKAKEIVNSESVVVFSKTYCPYCVRVKELLQQLGAKFKAVELDTESDGSQIQSGLAEWTGQRTVPNVFIGGNHIGGCDATSNLHKDGKLVPLLTEAGAIAGKTATTSA

SEQ ID NO: 8856 - protein, 109 aa, Arabidopsis thaliana
MQKAKEIVNSESVVVFSKTYCPYCVRVKELLQQLGAKFKAVELDTESDGSQIQSGLAEWTGQRTVPNVFIGGNHIGGCDATSNLHKDGKLVPLLTEAGAIAGKTATTSA

SEQ ID NO: 8857 - DNA, 1453 bp, Arabidopsis thaliana
actagtagtatccatttgacttgcggtttcaaaatccgaaaaagaccaatcaatcctttctccctgaaatggcggcggctctgcagacgaatatccggacggtcaaggttccggctacgttcagagctgtaagtaaacagtcattggcaccctttagagtaagatgtgctgttgcttcccctgggaaaaaacgatacaccatcactctccttcccggagacggcatcggtccggaggttgtctccattgccaaaaatgtgcttcagcaagctggatctttggaaggtgtggaatttaacttccgtgagatgcccattggaggagctgctttggatttggtcggagtgcccttgccggaggagactatctcagctgcaaaagaatcagatgcagtgcttcttggagccattggagggtacaaatgggataacaatgaaaaacatctgaggcctgagaaggggttacttcagattcgtgcagctctcaaagtctttgcaaatctgagacctgctacagttctcccacagttagtggatgcttccaccttaaagagagaggtagcagaaggtgttgatctaatggttgtaagggagcttacaggaggtatttactttggagagccaaggggcataaagaccaatgaaaatggcgaggaagttgggtttaatactgaggtttatgctgctcacgagattgatagaattgctcgtgttgccttcgagactgctcggaaacggcgtggcaagctgtgttctgttgacaaagctaatgttttggaagcctcaatcttatggaggaaacgagtaacagcattagcctctgaatatcctgatgttgagctgtcacatatgtatgttgacaatgccgcgatgcagcttgttcgtgacccaaaacagtttgacaccatcgtcacaaacaacatttttggtgatatattatccgatgaagcttcaatgatcacaggaagcataggaatgctgccatctgctagtctcagtgattcgggacctggactctttgaacctatacatggttctgcacctgatattgctggacaggataaggcaaacccattggcaaccattctaagcgctgcaatgcttctgaaatacggacttggagaagaaaaggcagccaagagaattgaagacgcagtgttggttgctctgaacaacggattcagaactggagacatatactccgcgggaacaaaactggtgggctgcaaggagatgggagaggaggttctgaagtcagtggactcccaagttccagcttctgtttaatatttgtagaaactttgaagagttcatttccaacaacaaatgttgtaccttgtactcaaagagtctcggttttattagcgatttttataatgtgagattattagagggacttatttgatcgaactgaaacgttgatgtttttttctgagaaataaatatccttgtgg

SEQ ID NO: 8858 - protein, 405 aa, Arabidopsis thaliana
MAAALQTNIRTVKVPATFRAVSKQSLAPFRVRCAVASPGKKRYTITLLPGDGIGPEVVSIAKNVLQQAGSLEGVEFNFREMPIGGAALDLVGVPLPEETISAAKESDAVLLGAIGGYKWDNNEKHLRPEKGLLQIRAALKVFANLRPATVLPQLVDASTLKREVAEGVDLMVVRELTGGIYFGEPRGIKTNENGEEVGFNTEVYAAHEIDRIARVAFETARKRRGKLCSVDKANVLEASILWRKRVTALASEYPDVELSHMYVDNAAMQLVRDPKQFDTIVTNNIFGDILSDEASMITGSIGMLPSASLSDSGPGLFEPIHGSAPDIAGQDKANPLATILSAAMLLKYGLGEEKAAKRIEDAVLVALNNGFRTGDIYSAGTKLVGCKEMGEEVLKSVDSQVPASV

SEQ ID NO: 8859 - protein, 325 aa, Arabidopsis thaliana
MPIGGAALDLVGVPLPEETISAAKESDAVLLGAIGGYKWDNNEKHLRPEKGLLQIRAALKVFANLRPATVLPQLVDASTLKREVAEGVDLMVVRELTGGIYFGEPRGIKTNENGEEVGFNTEVYAAHEIDRIARVAFETARKRRGKLCSVDKANVLEASILWRKRVTALASEYPDVELSHMYVDNAAMQLVRDPKQFDTIVTNNIFGDILSDEASMITGSIGMLPSASLSDSGPGLFEPIHGSAPDIAGQDKANPLATILSAAMLLKYGLGEEKAAKRIEDAVLVALNNGFRTGDIYSAGTKLVGCKEMGEEVLKSVDSQVPASV

SEQ ID NO: 8860 - protein, 235 aa, Arabidopsis thaliana
MVVRELTGGIYFGEPRGIKTNENGEEVGFNTEVYAAHEIDRIARVAFETARKRRGKLCSVDKANVLEASILWRKRVTALASEYPDVELSHMYVDNAAMQLVRDPKQFDTIVTNNIFGDILSDEASMITGSIGMLPSASLSDSGPGLFEPIHGSAPDIAGQDKANPLATILSAAMLLKYGLGEEKAAKRIEDAVLVALNNGFRTGDIYSAGTKLVGCKEMGEEVLKSVDSQVPASV

SEQ ID NO: 8861 - DNA, 1440 bp, Arabidopsis thaliana
gaggggacaaaaaaaatcaagaagaaaaaatgcagaagacattgctctcatgtctcatcacgacgctcctcctaatcaccgtcgcagattccatgaaagacacctcggtgcggctaaaattagcgcacagggacactctcttgccgaaacctctcagccgcattgaggacgttatcggcgccgaccagaagcgtcatagtttgatatctcggaagcgtaactccacagtaggagtgaaaatggatttgggatcagggattgattacggaacggcgcagtatttcacggagattagagttggaactccggcgaagaagttcagagtggtggttgatacaggaagcgagcttacttgggtgaattgtagataccgtgcgagaggcaaagacaatcggagagtgtttagagctgacgaatcaaagagctttaagaccgttggatgtttaactcagacttgtaaagttgatctgatgaatctcttctcactcactacttgtcctactccttccactccttgctcctatgattacagatatgcagatgggtcagcagcacaaggcgtattcgcaaaggagactatcacagttggtctcactaatggtcgtatggctagactccctggtcacctcattggttgtagtagttcctttacaggacagagcttccaaggagccgatggggttcttggtttagcctttagcgatttctccttcacttccacagccactagtctctatggtgccaaattttcatactgccttgttgaccatctttccaacaaaaacgtctccaactatctcatcttcggctcctccagatccaccaaaaccgccttccgacgaaccactccgcttgatctcactcgcatcccacccttctacgcaatcaacgtcattggaatctccctcggatacgacatgcttgatatcccctcgcaagtatgggacgcaacttccggtggtgggactatcttagactctggaaccagcctcacgttattggctgacgccgcgtacaaacaggtggttacagggctcgcacgctaccttgttgagttgaaaagagtcaaaccagaaggagtaccaatagagtactgttttagtttcacttccggatttaacgtgagcaagttaccgcagctgacatttcatttaaaaggcggtgcacgatttgagccacatcgtaaaagttacctagtagatgcagcgcctggagtcaagtgtttaggatttgtgtcggctggaacgccggcgactaatgtgatcggtaatataatgcagcagaattatttgtgggagtttgatctcatggcctcaactttgtcttttgctccctctgcttgcacttagctgtcttgtccatctctcgtgtttattattattgatttgttcgaatatttattgtttgctagtgaatgaataaaaaacatgtttgttagtg

SEQ ID NO: 8862 - protein, 448 aa, Arabidopsis thaliana
GDKKNQEEKMQKTLLSCLITTLLLITVADSMKDTSVRLKLAHRDTLLPKPLSRIEDVIGADQKRHSLISRKRNSTVGVKMDLGSGIDYGTAQYFTEIRVGTPAKKFRVVVDTGSELTWVNCRYRARGKDNRRVFRADESKSFKTVGCLTQTCKVDLMNLFSLTTCPTPSTPCSYDYRYADGSAAQGVFAKETITVGLTNGRMARLPGHLIGCSSSFTGQSFQGADGVLGLAFSDFSFTSTATSLYGAKFSYCLVDHLSNKNVSNYLIFGSSRSTKTAFRRTTPLDLTRIPPFYAINVIGISLGYDMLDIPSQVWDATSGGGTILDSGTSLTLLADAAYKQVVTGLARYLVELKRVKPEGVPIEYCFSFTSGFNVSKLPQLTFHLKGGARFEPHRKSYLVDAAPGVKCLGFVSAGTPATNVIGNIMQQNYLWEFDLMASTLSFAPSACT

SEQ ID NO: 8863 - protein, 439 aa, Arabidopsis thaliana
MQKTLLSCLITTLLLITVADSMKDTSVRLKLAHRDTLLPKPLSRIEDVIGADQKRHSLISRKRNSTVGVKMDLGSGIDYGTAQYFTEIRVGTPAKKFRVVVDTGSELTWVNCRYRARGKDNRRVFRADESKSFKTVGCLTQTCKVDLMNLFSLTTCPTPSTPCSYDYRYADGSAAQGVFAKETITVGLTNGRMARLPGHLIGCSSSFTGQSFQGADGVLGLAFSDFSFTSTATSLYGAKFSYCLVDHLSNKNVSNYLIFGSSRSTKTAFRRTTPLDLTRIPPFYAINVIGISLGYDMLDIPSQVWDATSGGGTILDSGTSLTLLADAAYKQVVTGLARYLVELKRVKPEGVPIEYCFSFTSGFNVSKLPQLTFHLKGGARFEPHRKSYLVDAAPGVKCLGFVSAGTPATNVIGNIMQQNYLWEFDLMASTLSFAPSACT

SEQ ID NO: 8864 - protein, 418 aa, Arabidopsis thaliana
MKDTSVRLKLAHRDTLLPKPLSRIEDVIGADQKRHSLISRKRNSTVGVKMDLGSGIDYGTAQYFTEIRVGTPAKKFRVVVDTGSELTWVNCRYRARGKDNRRVFRADESKSFKTVGCLTQTCKVDLMNLFSLTTCPTPSTPCSYDYRYADGSAAQGVFAKETITVGLTNGRMARLPGHLIGCSSSFTGQSFQGADGVLGLAFSDFSFTSTATSLYGAKFSYCLVDHLSNKNVSNYLIFGSSRSTKTAFRRTTPLDLTRIPPFYAINVIGISLGYDMLDIPSQVWDATSGGGTILDSGTSLTLLADAAYKQVVTGLARYLVELKRVKPEGVPIEYCFSFTSGFNVSKLPQLTFHLKGGARFEPHRKSYLVDAAPGVKCLGFVSAGTPATNVIGNIMQQNYLWEFDLMASTLSFAPSACT

SEQ ID NO: 8865 - DNA, 970 bp, Arabidopsis thaliana
gacgccgctcatttttagggtttcagatataggcagattctcacatttgcaaacatgacgactcagatcagcaagaagagaaagtttgtagcggacggtgtgttctacgctgaattgaatgaggttcttacaagagagctagcagaggatggttactctggtgttgaggttagggttactcctatgaggactgagattatcatcagagctacacgtactcagaatgttctcggtgagaaggggaggagaattagggaattgacttcccttgttcagaagagattcaagtttccagttgacagtgttgagctttatgccgagaaggttaacaacagaggtctctgtgccatcgctcaggctgagtctttacgttacaagcttcttggtggtctcgctgttcgtagggcttgctatggtgtgttgaggtttgttatggagagtggagctaagggatgcgaggttatcgtgagtggaaagcttcgtgctgccagagccaagtctatgaagttcaaagatggctacatggtgtcatctggtcaaccaactaaggaatacatagactctgcagtgagacatgttttgcttagacaaggtgtgttgggaatcaaggtgaaggttatgcttgattgggaccctaagggcatatcaggaccaaagacaccattgcctgatgttgtgatcattcattctcctaaagaagaagaggccatctatgcacctgctcaggttgctgccccggctgctctcgtagcagatgcaccactcacagccgtagattaccctgcgatgatcccagtcgcctaaaagaatcctttgtactagtcgatgtgattttgttttcaactgttcttgctcttttgacagattatagcttctcgtatcttcgaatcagacacgtttcctctgttcttattcgaaaattatctcaagtttccattgttgaaaaagccctttttagtttcataaatcg

SEQ ID NO: 8866 - protein, 249 aa, Arabidopsis thaliana
MTTQISKKRKFVADGVFYAELNEVLTRELAEDGYSGVEVRVTPMRTEIIIRATRTQNVLGEKGRRIRELTSLVQKRFKFPVDSVELYAEKVNNRGLCAIAQAESLRYKLLGGLAVRRACYGVLRFVMESGAKGCEVIVSGKLRAARAKSMKFKDGYMVSSGQPTKEYIDSAVRHVLLRQGVLGIKVKVMLDWDPKGISGPKTPLPDVVIIHSPKEEEAIYAPAQVAAPAALVADAPLTAVDYPAMIPVA

SEQ ID NO: 8867 - protein, 206 aa, Arabidopsis thaliana
MRTEIIIRATRTQNVLGEKGRRIRELTSLVQKRFKFPVDSVELYAEKVNNRGLCAIAQAESLRYKLLGGLAVRRACYGVLRFVMESGAKGCEVIVSGKLRAARAKSMKFKDGYMVSSGQPTKEYIDSAVRHVLLRQGVLGIKVKVMLDWDPKGISGPKTPLPDVVIIHSPKEEEAIYAPAQVAAPAALVADAPLTAVDYPAMIPVA

SEQ ID NO: 8868 - DNA, 588 bp, Arabidopsis thaliana
aaagtcgtaacggaggaagaagaagatctgcttctgcaaaaaaccttatcctgctatggcttccactttcgtctgctctctaccaaatcctttctttgcttttccggtcaaagcaactactccttcgacggctaaccatacgcttctcggaagtcgaagaggttgtcttagaatcaaagcgatttccactaaatgggaaccgacaaaggttgttcctcaggcagacagagttcttgttcgtcttgaagatcttcctattaaatcctcaggtggagtattgttgcctaaagcagctgtgaagtttgagagatacctaacaggagagattatatctgttggttctgaggttggacaacaagttggacctggaaagagggttttgttctctgatgtgagcgcttatgaggtcgatttgggaaccgatgctaggcattgcttctgtaaagagagtgacttgttggccctcgttgagtgaagtcttgtccaagagggagagatttgaagattttacaagttttctgtaattttcagacagcaattgttgtttctagttaatccttcaatttaatatcaattgagatcactttc

SEQ ID NO: 8869 - protein, 139 aa, Arabidopsis thaliana
MASTFVCSLPNPFFAFPVKATTPSTANHTLLGSRRGCLRIKAISTKWEPTKVVPQADRVLVRLEDLPIKSSGGVLLPKAAVKFERYLTGEIISVGSEVGQQVGPGKRVLFSDVSAYEVDLGTDARHCFCKESDLLALVE

SEQ ID NO: 8870 - protein, 98 aa, Arabidopsis thaliana
SRNGGRRRSASAKNLILLWLPLSSALYQILSLLFRSKQLLLRRLTIRFSEVEEVVLESKRFPLNGNRQRLFLRQTEFLFVLKIFLLNPQVEYCCLKQL

SEQ ID NO: 8871 - DNA, 738 bp, Arabidopsis thaliana
gatcctcattcatctctaatactaaaatctaatctcttccttgctcactcaccaatcaaactcaaaaaactcttgaatttttcaagaacaaaagaaaaagacatctttaatggcggccatgaactcgagtgttctcacttgcagctacgcaattgctggctctggctcggtagagcttaaccagaaagttggtttggtgaattcatcagttgggtttggtcagaagaaacagatgattatgcctgtgatcaaagctcaacgcgttgttggtgatgatgttgatggatctaatggaagacgatcagccatggttttcttagcagctacactcttctccactgctgctgtttctgcttctgctaatgctggcgtcattgacgaatacctcgagaggagcaaaaccaacaaagaacttaatgataagaagagattggcaacaagtggagcaaactttgcgagagcattcactgttcaattcggaagctgcaagttccctgagaatttcactggctgccaagatcttgccaagcaaaagaaagttccatttatctcagaagatattgctttggaatgcgaaggcaaggacaagtacaagtgtggttccaatgttttctggaaatggtgaagaactttgtttgttttcatctattcttatataaatccaacaatgtatctatctctctctattcatgaaagttctcgcatccatttgaatctatcaagctaaaactctattga

SEQ ID NO: 8872 - protein, 171 aa, Arabidopsis thaliana
MAAMNSSVLTCSYAIAGSGSVELNQKVGLVNSSVGFGQKKQMIMPVIKAQRVVGDDVDGSNGRRSAMVFLAATLFSTAAVSASANAGVIDEYLERSKTNKELNDKKRLATSGANFARAFTVQFGSCKFPENFTGCQDLAKQKKVPFISEDIALECEGKDKYKCGSNVFWKW

SEQ ID NO: 8873 - protein, 168 aa, Arabidopsis thaliana
MNSSVLTCSYAIAGSGSVELNQKVGLVNSSVGFGQKKQMIMPVIKAQRVVGDDVDGSNGRRSAMVFLAATLFSTAAVSASANAGVIDEYLERSKTNKELNDKKRLATSGANFARAFTVQFGSCKFPENFTGCQDLAKQKKVPFISEDIALECEGKDKYKCGSNVFWKW

SEQ ID NO: 8874 - protein, 130 aa, Arabidopsis thaliana
MIMPVIKAQRVVGDDVDGSNGRRSAMVFLAATLFSTAAVSASANAGVIDEYLERSKTNKELNDKKRLATSGANFARAFTVQFGSCKFPENFTGCQDLAKQKKVPFISEDIALECEGKDKYKCGSNVFWKW

SEQ ID NO: 8875 - DNA, 1349 bp, Arabidopsis thaliana
ggacggagcttcacatcgccgagagcttcgtcacgagatccatggcggccatttctcctctcttccttctcttcctcattcccattatcccactatcgcttctcgctatcttagccctaattgtacgtcctcgtcccattaagatccctatcaagtcccgtcacgtcttcatcaccggtggatctagcggcatcggtcttgctctcgcccaccgcgccgcttccgagggcgctcgtgtctcaatcctcgcccgatccggatcaaagctcgaggaggctaagaaatcgatccagctcgccactggtgtcgaagtcgccacattctctgcagacgttcgcgattacgatgcagtctcgaaggcgatagatgaatcgggaccgatcgatgtgttgattgttaaccaaggtgtgtttacggcgcaggagctggtgaaacatagtcctgaagatgtcaaattcacgattgacgtaaatctttttgggagcttcaatgtgattaaagccgctttgcctgccatgaaagcaaggaaagatcgtggacctgcttccatcagtctcgtctcctctcaagctggtcaggttggtgtctatggttatgctgcatattcagcaagcaagtttggtcttcagggtttagcgcaagcattgcaacaggaagttatatctgatgatattcatgtcactcttatttttcctcctgacactaatacacccggctttgaagaagaacagaagagcagacctgaagtcactgccataatagctgcatcctctggttcaatggaaacagaagaagtagcaaaaaaggctatggatggcataaaagcaggaaacttcaccgtctcatgcaactttgagggattcttactgtctctcgcgacaaccggcatgtcccctcaaagatcattttggcttgcttttcttgaagtttataaccgcagggcctataagattaatcgctctcttctttcaatgggattggtataaagccattgaaaaatggagcaaaaccaaaaccaaatgacagcccgacaatgtatcttgaagtgcttttggcagaagcttaaacattgatgggtattctcaaaccttcttctcagtccggtaccacgccagctagtcgactataccaattcagaatatcgacattgctgatagttttgtagaaactcgtcaagattcatgtttccggtctttgaacaagctctgttttttcttttttttatagagaaatcaaagaactcatttgaatgtattttttacttggtcaagaagtgaatgtttttcacaagatgaaatgtaaatgatgtatttgaaagaagtaaaaacttcaaaaccaaaatttgagtg

SEQ ID NO: 8876 - protein, 327 aa, Arabidopsis thaliana
TELHIAESFVTRSMAAISPLFLLFLIPIIPLSLLAILALIVRPRPIKIPIKSRHVFITGGSSGIGLALAHRAASEGARVSILARSGSKLEEAKKSIQLATGVEVATFSADVRDYDAVSKAIDESGPIDVLIVNQGVFTAQELVKHSPEDVKFTIDVNLFGSFNVIKAALPAMKARKDRGPASISLVSSQAGQVGVYGYAAYSASKFGLQGLAQALQQEVISDDIHVTLIFPPDTNTPGFEEEQKSRPEVTAIIAASSGSMETEEVAKKAMDGIKAGNFTVSCNFEGFLLSLATTGMSPQRSFWLAFLEVYNRRAYKINRSLLSMGLV

SEQ ID NO: 8877 - protein, 314 aa, Arabidopsis thaliana
MAAISPLFLLFLIPIIPLSLLAILALIVRPRPIKIPIKSRHVFITGGSSGIGLALAHRAASEGARVSILARSGSKLEEAKKSIQLATGVEVATFSADVRDYDAVSKAIDESGPIDVLIVNQGVFTAQELVKHSPEDVKFTIDVNLFGSFNVIKAALPAMKARKDRGPASISLVSSQAGQVGVYGYAAYSASKFGLQGLAQALQQEVISDDIHVTLIFPPDTNTPGFEEEQKSRPEVTAIIAASSGSMETEEVAKKAMDGIKAGNFTVSCNFEGFLLSLATTGMSPQRSFWLAFLEVYNRRAYKINRSLLSMGLV

SEQ ID NO: 8878 - DNA, 1444 bp, Arabidopsis thaliana
gattccctctattctcaatccacaccaaagactatatggcctcccattgctccatgagagtaatcctcctcagattctccaatggcgtctcttccagatccattctcaactccactaaccatcgtcttcttagtcttaccatgaccaacactctctcgtctctttcctcaatctctccccacactactacttcgcatttcacggctgcgtcacaacaatcagatgaccagaactgcttccgcaagcttcaactcagaaagatttcgatttcaactcctctttgtatgggtcgtcgttcttccaaaatcgctggtcgaaagggcgctcaagattcaaagaaggcgaagctatactgtagaattggcaaggaggttgtatctgctgtcaagaaagggggtccaaacccagtttcaaatacgactctagctactattcttgacaaagctaaagaactggatgtaccgaaagacattgtggagcgtaatattaagagggcttctgagaaggggcaagaagcttttatagagaagatttacgaggtatatggctacggtggtgttagtatggtagtcgaggtcttaacagacaaaattaatcgatcagtggcagctattagatcggttgttaaggattatgggggaaaaatggctgattcaggatctgtcatgttcaagtttaaaagagttagggtagtgaatataaaggtcaccgaagctgacaaagatcagctccttattattgctttagatgctggagcagaggatgttattgaacccccaacttatgaagatgatactgatgaagacagggaagagaggtactacaaaattgtaacttctaatgagaactactcaacaatattatcaaagctacgtgatgaaggagtgaacttcgagcctgacaatggctctgaactgctccctctgactacagttgaggtggatgatgaggccatggaattgaacaaagagctaatgcagaaactactagaacttgatgatgttgatgctgtttatatcgaccaaaaatgaaaagaatatacattacaggaagctccacttcaagatctgtgaattcacagctcacgagaaagttattatgtcaatctctgaactggttctgctgaactctgcatatattctgaagaaggaataatggtttttggtagacacttacatttcacttcttctagtttccagtttgaagccataaaatcaaaactattataaaagcccaaatcttataatgccgaagggtcttttaatctaaattttgggctgtttcgatttttgggaaattatgaatctaaacattattttagaaattatgagtgatactaggagtgattgtgggctactaccaaacgttattttagaaccacaaataaattcaaaacattattttagaaaaaaaaaaaaaaaaaaaactcgagggggggcccggt

SEQ ID NO: 8879 - protein, 342 aa, Arabidopsis thaliana
FPLFSIHTKDYMASHCSMRVILLRFSNGVSSRSILNSTNHRLLSLTMTNTLSSLSSISPHTTTSHFTAASQQSDDQNCFRKLQLRKISISTPLCMGRRSSKIAGRKGAQDSKKAKLYCRIGKEVVSAVKKGGPNPVSNTTLATILDKAKELDVPKDIVERNIKRASEKGQEAFIEKIYEVYGYGGVSMVVEVLTDKINRSVAAIRSVVKDYGGKMADSGSVMFKFKRVRVVNIKVTEADKDQLLIIALDAGAEDVIEPPTYEDDTDEDREERYYKIVTSNENYSTILSKLRDEGVNFEPDNGSELLPLTTVEVDDEAMELNKELMQKLLELDDVDAVYIDQK

SEQ ID NO: 8880 - protein, 331 aa, Arabidopsis thaliana
MASHCSMRVILLRFSNGVSSRSILNSTNHRLLSLTMTNTLSSLSSISPHTTTSHFTAASQQSDDQNCFRKLQLRKISISTPLCMGRRSSKIAGRKGAQDSKKAKLYCRIGKEVVSAVKKGGPNPVSNTTLATILDKAKELDVPKDIVERNIKRASEKGQEAFIEKIYEVYGYGGVSMVVEVLTDKINRSVAAIRSVVKDYGGKMADSGSVMFKFKRVRVVNIKVTEADKDQLLIIALDAGAEDVIEPPTYEDDTDEDREERYYKIVTSNENYSTILSKLRDEGVNFEPDNGSELLPLTTVEVDDEAMELNKELMQKLLELDDVDAVYIDQK

SEQ ID NO: 8881 - protein, 325 aa, Arabidopsis thaliana
MRVILLRFSNGVSSRSILNSTNHRLLSLTMTNTLSSLSSISPHTTTSHFTAASQQSDDQNCFRKLQLRKISISTPLCMGRRSSKIAGRKGAQDSKKAKLYCRIGKEVVSAVKKGGPNPVSNTTLATILDKAKELDVPKDIVERNIKRASEKGQEAFIEKIYEVYGYGGVSMVVEVLTDKINRSVAAIRSVVKDYGGKMADSGSVMFKFKRVRVVNIKVTEADKDQLLIIALDAGAEDVIEPPTYEDDTDEDREERYYKIVTSNENYSTILSKLRDEGVNFEPDNGSELLPLTTVEVDDEAMELNKELMQKLLELDDVDAVYIDQK

SEQ ID NO: 8882 - DNA, 1382 bp, Arabidopsis thaliana
cgaatcacctccgatctcaaatctcacaatcttttctctccaaattctcttctctctgaatcaatccaatcatggttgagccggcgaacaccgttggaattccggtgaaccacatcccattgttgaaggatgagctcgatatcgtgatccccacgatccgtaacctcgatttcctggagatgtggaggccttttcttcagccttaccatctgattatcgtccaagatggagatccatcgaagaccattgctgtccctgaagggttcgattacgaactctacaacaggaacgacatcaaccgtatccttggtcctaaagcttcctgcatttccttcaaggactctgcttgtcgttgcttcggctacatggtctccaagaagaagtacatcttcactattgatgacgattgcttcgttgctaaggatccatctggaaaagctgtgaacgctcttgagcaacacatcaagaaccttctctgcccatcaactccatttttcttcaacaccttgtacgacccataccgtgaaggtgctgacttcgtccgtggataccctttcagtctccgtgagggtgtttccaccgctgtttcccacggtctgtggctcaacatccctgattacgatgcccctacccaacttgtgaagcctaaggaaaggaacacaaggtatgtggatgctgtcatgaccatcccaaagggaactcttttccctatgtgtggtatgaacttggcctttgaccgtgagctcattggtccggctatgtactttggtctcatgggtgatggtcagcctattggtcgctacgacgatatgtgggctggatggtgtatcaaggtgatctgtgaccatttgggattgggagtgaagacaggtttgccctacatttaccacagcaaagccagcaacccgtttgtgaacttgaagaaggagtacaagggaatcttctggcaggaggatatcattcctttcttccagagcgcaaagctcacgaaagaagctgtgacagttcaacaatgctacatggagctgtccaagttggtgaaggagaagctaagccccattgatccttactttgacaagcttgcagatgctatggtcacttggattgaagcttgggatgagcttaacccacccactaaagcttgagcagcaaaaaaaccaccaccgcagttttggttattagctcaacatatcatctatcttctccgttttgtttttgttttgtcttttctcaaattttccggcgattcttcagttcgtttttaagttgccggagtttatttaaatagtgaatggtgtagttctatttatgaccgagacaatctctcttttgaggtttttcgtttttgtttcaataataaaaaatcataagagagaactagt

SEQ ID NO: 8883 - protein, 357 aa, Arabidopsis thaliana
MVEPANTVGIPVNHIPLLKDELDIVIPTIRNLDFLEMWRPFLQPYHLIIVQDGDPSKTIAVPEGFDYELYNRNDINRILGPKASCISFKDSACRCFGYMVSKKKYIFTIDDDCFVAKDPSGKAVNALEQHIKNLLCPSTPFFFNTLYDPYREGADFVRGYPFSLREGVSTAVSHGLWLNIPDYDAPTQLVKPKERNTRYVDAVMTIPKGTLFPMCGMNLAFDRELIGPAMYFGLMGDGQPIGRYDDMWAGWCIKVICDHLGLGVKTGLPYIYHSKASNPFVNLKKEYKGIFWQEDIIPFFQSAKLTKEAVTVQQCYMELSKLVKEKLSPIDPYFDKLADAMVTWIEAWDELNPPTKA

SEQ ID NO: 8884 - protein, 321 aa, Arabidopsis thaliana
MWRPFLQPYHLIIVQDGDPSKTIAVPEGFDYELYNRNDINRILGPKASCISFKDSACRCFGYMVSKKKYIFTIDDDCFVAKDPSGKAVNALEQHIKNLLCPSTPFFFNTLYDPYREGADFVRGYPFSLREGVSTAVSHGLWLNIPDYDAPTQLVKPKERNTRYVDAVMTIPKGTLFPMCGMNLAFDRELIGPAMYFGLMGDGQPIGRYDDMWAGWCIKVICDHLGLGVKTGLPYIYHSKASNPFVNLKKEYKGIFWQEDIIPFFQSAKLTKEAVTVQQCYMELSKLVKEKLSPIDPYFDKLADAMVTWIEAWDELNPPTKA

SEQ ID NO: 8885 - protein, 259 aa, Arabidopsis thaliana
MVSKKKYIFTIDDDCFVAKDPSGKAVNALEQHIKNLLCPSTPFFFNTLYDPYREGADFVRGYPFSLREGVSTAVSHGLWLNIPDYDAPTQLVKPKERNTRYVDAVMTIPKGTLFPMCGMNLAFDRELIGPAMYFGLMGDGQPIGRYDDMWAGWCIKVICDHLGLGVKTGLPYIYHSKASNPFVNLKKEYKGIFWQEDIIPFFQSAKLTKEAVTVQQCYMELSKLVKEKLSPIDPYFDKLADAMVTWIEAWDELNPPTKA

SEQ ID NO: 8886 - DNA, 1936 bp, Arabidopsis thaliana
ggcacgagaaaggattcattaagagcaaaaactagttttgctttcatttttttttggtaggaaagggttaattatacgtaacacagaaacaaaaacaattctctttttcctctagaaaaagagattaaaaaaaaaatggaggggaggttattgacggtgttggtctgcctcgtctctacggtggcgatcgtgaacgccggtgatccttacttcttccatacatggaacgtgacttacggaactgcctcacctctcggtgttcctcaaaaggtgattctcatcaacggtcaattccctggtcctaaccttaactcaacctctaacaacaacgtcgtcatcaatgtcttcaaccacctagacgaacctttcctcttgacctggagtgggattcagcatcggaagaactgctggcaagatggtgtggctggaacttcatgccccatcccagctggacagaactttacttaccatttccaacctaaggaccagattggttcctacttctattacccaaccacttctctccaccgctttgctggtggttttggtggtctccgtgtcaacagccgtctcctaattcccgttccttatgctgatcctgaagatgactacactgtccttctcggtgactggtacacagctggccacactgctctcaagaacttccttgacagtggacgcacccttggattgcctaacggtgttttgatcaatggaaagtctggaaaggttggaggaaagaacgagcctttgttcacaatgaagcctggaaagacttacaagtacaggctctgcaatgttgggttcaagtctacacttaacttcaggatccagaaccacaagatgaagctcgtggagatggaaggatcccatgttattcagaacgactatgactctctcgatgtccatgttggccagtgcttttcagttcttgtgactgctaaccaagcagctaaggattactacatggttgcatcgactaggttcctcaagaaggagttgagcaccgtgggtgtgatccggtatgagggaagcaacgttcaggcttcaactgagctacccaaggctcctgttggatgggcttggtctttgaaccagttcaggtctttcaggtggaaccttacctctaacgctgcaaggcctaacccccaaggctcataccattacggaaagatcaatattacccgtagcatcaagcttgtcaactctaaaagtgtggttgacggtaaagtccggtttggtttcaatggtgtatcacacgttgacaccgagactcctttgaagcttgctgagtacttccaaatgtcagagaaggttttcaagtacaatgtgatcaaggacgagcctgcagccaaaatcacagcattgactgtacaacctaatgttctcaacatcactttccgtacctttgtagagatcattttcgagaaccacgagaagaccatgcagtcattccatttggatggctactccttcttcgctgtcgcttctgagccagggaggtggacgcctgaaaagagagagaactacaacttgctcgatgcggttagcagacacaccgtgcaagtctaccccaagtcttggtcagctatccttttgacattcgacaacgccggtatgtggaacatcaggtctgagaacttggagaggaaatacctaggcgagcaattgtatgtcagtgttctatcaccggagaaatcgctaagggacgagtacaacatccccctcaacacaaacctctgtggcatcgtcaagggcttgccattacctgcacactactcctaaatcaatattcaattaactactactctacaaagtggggtgcaatattaaattaactaattaaccctttcctagattttaagtgtaatttgtaaaccccttctttcatatactatcattaaaccataatcatataccaagttttgctttcatt

SEQ ID NO: 8887 - protein, 549 aa, Arabidopsis thaliana
MEGRLLTVLVCLVSTVAIVNAGDPYFFHTWNVTYGTASPLGVPQKVILINGQFPGPNLNSTSNNNVVINVFNHLDEPFLLTWSGIQHRKNCWQDGVAGTSCPIPAGQNFTYHFQPKDQIGSYFYYPTTSLHRFAGGFGGLRVNSRLLIPVPYADPEDDYTVLLGDWYTAGHTALKNFLDSGRTLGLPNGVLINGKSGKVGGKNEPLFTMKPGKTYKYRLCNVGFKSTLNFRIQNHKMKLVEMEGSHVIQNDYDSLDVHVGQCFSVLVTANQAAKDYYMVASTRFLKKELSTVGVIRYEGSNVQASTELPKAPVGWAWSLNQFRSFRWNLTSNAARPNPQGSYHYGKINITRSIKLVNSKSVVDGKVRFGFNGVSHVDTETPLKLAEYFQMSEKVFKYNVIKDEPAAKITALTVQPNVLNITFRTFVEIIFENHEKTMQSFHLDGYSFFAVASEPGRWTPEKRENYNLLDAVSRHTVQVYPKSWSAILLTFDNAGMWNIRSENLERKYLGEQLYVSVLSPEKSLRDEYNIPLNTNLCGIVKGLPLPAHYS

SEQ ID NO: 8888 - protein, 341 aa, Arabidopsis thaliana
MKPGKTYKYRLCNVGFKSTLNFRIQNHKMKLVEMEGSHVIQNDYDSLDVHVGQCFSVLVTANQAAKDYYMVASTRFLKKELSTVGVIRYEGSNVQASTELPKAPVGWAWSLNQFRSFRWNLTSNAARPNPQGSYHYGKINITRSIKLVNSKSVVDGKVRFGFNGVSHVDTETPLKLAEYFQMSEKVFKYNVIKDEPAAKITALTVQPNVLNITFRTFVEIIFENHEKTMQSFHLDGYSFFAVASEPGRWTPEKRENYNLLDAVSRHTVQVYPKSWSAILLTFDNAGMWNIRSENLERKYLGEQLYVSVLSPEKSLRDEYNIPLNTNLCGIVKGLPLPAHYS

SEQ ID NO: 8889 - protein, 313 aa, Arabidopsis thaliana
MKLVEMEGSHVIQNDYDSLDVHVGQCFSVLVTANQAAKDYYMVASTRFLKKELSTVGVIRYEGSNVQASTELPKAPVGWAWSLNQFRSFRWNLTSNAARPNPQGSYHYGKINITRSIKLVNSKSVVDGKVRFGFNGVSHVDTETPLKLAEYFQMSEKVFKYNVIKDEPAAKITALTVQPNVLNITFRTFVEIIFENHEKTMQSFHLDGYSFFAVASEPGRWTPEKRENYNLLDAVSRHTVQVYPKSWSAILLTFDNAGMWNIRSENLERKYLGEQLYVSVLSPEKSLRDEYNIPLNTNLCGIVKGLPLPAHYS

SEQ ID NO: 8890 - DNA, 1452 bp, Arabidopsis thaliana
gtctgtgtctcttcgtcctcattagcttaagcatcatcattctctcacctaacaactccacacaagattcttcgcatggaaagttgttcttcgacttctcttctctaactcgctatcttttaactcacccagctccactgagtcgaaaatttcaaacctttactcgtttccttcatggctaataacaacaacatcccacatgatagcatctccgatccatctcctaccgacgatttcttcgagcagatcctcgggctttccaacttctccggttcttcaggttctggtctctctggaatcggcggcgtgggtccacctccgatgatgcttcagcttggttcaggcaacgaagggaatcataatcatatgggtgccattggaggaggtggacctgtagggtttcataatcagatgtttccgttgggattaagtctcgatcaagggaaaggacatggctttcttaaacctgatgaaactggtaaacgtttccaagacgatgttcttgataatcgatgttcctctatgaaacctattttccatgggcagccaatgtcacagccagctccaccaatgccgcatcaacagtctactattcggcctagagttagggctaggcgaggtcaagctaccgatccacatagcatcgctgagaggctccgaagggaaagaatagcagaacggatcaggtcgttgcaggaacttgtacctaccgttaacaagacagatagggctgctatgatcgacgagattgtcgattatgtaaagtttctcaggctccaagttaaggtcctgagcatgagccgtcttggtggagccggtgctgtcgcaccactagtcactgaaatgccattatcttcatcagttgaggatgagacgcaggccgtgtgggagaaatggtcaaacgatgggacagagaggcaagtggctaagctgatggaagaaaacgttggagcagcgatgcaacttttgcaatcaaaggctctttgcataatgccgatctcattggcaatggcgatttaccattctcagccaccagacacatcttcttcaatcgtcaaaccagagatgaatcctccaccgtagatttttgttcatccaacggtccccagctgatgattgacattttgctctgtttcccactactagacttttgtgactcatgaaaggtaagtaaaaaggcattggagatggaatctaagtaggatttgtgcagtaaagaagtaaaacgggatctgtcaaaagaaggaaaaagctctcgcttgcttggctagtatttatcattttgatgaaagtaactcttttttgttcaaagactttagtgtgattttcaggaccaagggctttgagggtagtgctagctgtagtaatagtaatgaaggtgtgggatcgtgtttctgaattatgtaaaaaaggaagaaaaaacaaatgttggtattatattatggttttgcc

SEQ ID NO: 8891 - protein, 302 aa, Arabidopsis thaliana
MANNNNIPHDSISDPSPTDDFFEQILGLSNFSGSSGSGLSGIGGVGPPPMMLQLGSGNEGNHNHMGAIGGGGPVGFHNQMFPLGLSLDQGKGHGFLKPDETGKRFQDDVLDNRCSSMKPIFHGQPMSQPAPPMPHQQSTIRPRVRARRGQATDPHSIAERLRRERIAERIRSLQELVPTVNKTDRAAMIDEIVDYVKFLRLQVKVLSMSRLGGAGAVAPLVTEMPLSSSVEDETQAVWEKWSNDGTERQVAKLMEENVGAAMQLLQSKALCIMPISLAMAIYHSQPPDTSSSIVKPEMNPPP

SEQ ID NO: 8892 - protein, 253 aa, Arabidopsis thaliana
MMLQLGSGNEGNHNHMGAIGGGGPVGFHNQMFPLGLSLDQGKGHGFLKPDETGKRFQDDVLDNRCSSMKPIFHGQPMSQPAPPMPHQQSTIRPRVRARRGQATDPHSIAERLRRERIAERIRSLQELVPTVNKTDRAAMIDEIVDYVKFLRLQVKVLSMSRLGGAGAVAPLVTEMPLSSSVEDETQAVWEKWSNDGTERQVAKLMEENVGAAMQLLQSKALCIMPISLAMAIYHSQPPDTSSSIVKPEMNPPP

SEQ ID NO: 8893 - protein, 252 aa, Arabidopsis thaliana
MLQLGSGNEGNHNHMGAIGGGGPVGFHNQMFPLGLSLDQGKGHGFLKPDETGKRFQDDVLDNRCSSMKPIFHGQPMSQPAPPMPHQQSTIRPRVRARRGQATDPHSIAERLRRERIAERIRSLQELVPTVNKTDRAAMIDEIVDYVKFLRLQVKVLSMSRLGGAGAVAPLVTEMPLSSSVEDETQAVWEKWSNDGTERQVAKLMEENVGAAMQLLQSKALCIMPISLAMAIYHSQPPDTSSSIVKPEMNPPP

SEQ ID NO: 8894 - DNA, 743 bp, Arabidopsis thaliana
gaagtcagtaagtaaacgagcaaaagaagaagagaaacaacaagaagtagtaatggcttcctctatgctctcctccgccgctgtggttacatccccggctcaggccaccatggtcgctccattcaccggcttgaagtcatccgctgcattcccggtcacccgcaagaccaacaaggacatcacttccatcgcaagcaacgggggaagagttagctgcatgaaggtgtggccaccaattggaaagaagaagtttgagactctatcttacctccctgaccttagtgacgtcgaattggctaaggaagttgactaccttctccgcaacaagtggattccttgtgttgaattcgagttagagcacggatttgtgtaccgtgagcacggaaacactcccggatactacgatggacggtactggacaatgtggaagcttccattgttcggatgcaccgactccgctcaagtgttgaaggaagttgaagaatgcaagaaggagtacccgggcgccttcattaggatcatcggattcgacaacacacgtcaagtccaatgcatcagtttcattgcctacaagcccccaagcttcaccgaagcttaatttcttttctaaaacattcttatgaattatctctgctcatttcatttcctattgtctgtgttctttttctctttatgagacaatttctatcggattgtcaaatgtctgatttatgaatatgtaatttatatatccgtgcgtcttg

SEQ ID NO: 8895 - protein, 198 aa, Arabidopsis thaliana
KSVSKRAKEEEKQQEVVMASSMLSSAAVVTSPAQATMVAPFTGLKSSAAFPVTRKTNKDITSIASNGGRVSCMKVWPPIGKKKFETLSYLPDLSDVELAKEVDYLLRNKWIPCVEFELEHGFVYREHGNTPGYYDGRYWTMWKLPLFGCTDSAQVLKEVEECKKEYPGAFIRIIGFDNTRQVQCISFIAYKPPSFTEA

SEQ ID NO: 8896 - protein, 181 aa, Arabidopsis thaliana
MASSMLSSAAVVTSPAQATMVAPFTGLKSSAAFPVTRKTNKDITSIASNGGRVSCMKVWPPIGKKKFETLSYLPDLSDVELAKEVDYLLRNKWIPCVEFELEHGFVYREHGNTPGYYDGRYWTMWKLPLFGCTDSAQVLKEVEECKKEYPGAFIRIIGFDNTRQVQCISFIAYKPPSFTEA

SEQ ID NO: 8897 - protein, 177 aa, Arabidopsis thaliana
MLSSAAVVTSPAQATMVAPFTGLKSSAAFPVTRKTNKDITSIASNGGRVSCMKVWPPIGKKKFETLSYLPDLSDVELAKEVDYLLRNKWIPCVEFELEHGFVYREHGNTPGYYDGRYWTMWKLPLFGCTDSAQVLKEVEECKKEYPGAFIRIIGFDNTRQVQCISFIAYKPPSFTEA

SEQ ID NO: 8898 - DNA, 677 bp, Arabidopsis thaliana
attacctagaacatcctaatcgaaaaacacaatcatcaagaaaacaaaactcgcttcctgataatcaaatcaaaagcttctctatcaagcttatcgaaaagtcacatcttttggaagaaacaatggctcgtaccaagcaaaccgctaggaaatccaccggaggtaaagctcccaggaagcagcttgccaccaaggcggcgaggaaatcagcaccaaccaccggaggagtcaagaagcctcaccgttaccgtccaggaaccgtcgctcttcgtgagattcgtaagtaccagaagagtactgaattgttgatccgcaagcttcccttccagcgtctcgttcgggaaatagctcaggacttcaagacggatctgaggtttcagagtcacgcggtgttagctcttcaagaggcggctgaggcatacctagttggacttttcgaggatactaatctctgcgctattcacgccaagagggttacgatcatgcctaaggacattcaattggctagaagaattcgtggagaacgtgcttaagcttttatttacctaattcaagtttagatttttacgatgatgtattagtattctggattcttgtttcctatcgctcttttatttgcttaccaagtacatggtgttaattgttgaacttacagctcttttaagcaaacagttatg

SEQ ID NO: 8899 - protein, 176 aa, Arabidopsis thaliana
YLEHPNRKTQSSRKQNSLPDNQIKSFSIKLIEKSHLLEETMARTKQTARKSTGGKAPRKQLATKAARKSAPTTGGVKKPHRYRPGTVALREIRKYQKSTELLIRKLPFQRLVREIAQDFKTDLRFQSHAVLALQEAAEAYLVGLFEDTNLCAIHAKRVTIMPKDIQLARRIRGERA

SEQ ID NO: 8900 - protein, 136 aa, Arabidopsis thaliana; identical to SEQ ID NO: 8056

SEQ ID NO: 8901 - DNA, 973 bp, Arabidopsis thaliana
atcgaaaaataattctccgtcgagatcgcttctctccccgttgccgtccgtccccaccgctgagtgatagatcgaaacagagaaacacacacggcgaagaagatttcaccatattttgtctaagtggattctgttgagagagagagatggctatgtctcaggtggtgaacacgtacccgctttcgaactacagcttcggaactaaggaacccaagctggaaaaggacacctccgtcgccgaccggctcgctcgtatgaaaatcaactatatgaaagagggcatgaggactagcgttgaagggattctactggtgcaagaacacaaccatcctcatatacttctgctacaaattggtaacacattctgcaaacttccaggtggacgcctgaagcctggtgaaaatgaagctgatggtctgaaaagaaagctgaccagtaaacttggaggcaattcggctgctcttgtacctgactggacggtaggagaatgtgttgcgacatggtggcgtccaaactttgaaaccatgatgtacccgtattgccctcctcacatcacgaaaccaaaggaatgcaagagactctacattgttcacttgtctgagaaagagtactttgctgtgcccaaaaatttgaagctcttggccgtccctttgttcgaactctatgacaatgttcagagatatggaccggttatatcaaccattccgcagcagctatccagattccatttcaacatgattagttcgtgatttcgactcggtgtgttcaagaacaaggaacctatcagatgggtaagttacttaggtacggtagagagctgtagctaccggattagagatggggttttccaatgatgcgagttgggttttttgcattatagacttgttggcttttatgtagaaccggttcaaagtgtcagcacaaaaaacaaagattattgtatctcatttttaaaagcatttgtcattgtttg

SEQ ID NO: 8902 - protein, 200 aa, Arabidopsis thaliana
MAMSQVVNTYPLSNYSFGTKEPKLEKDTSVADRLARMKINYMKEGMRTSVEGILLVQEHNHPHILLLQIGNTFCKLPGGRLKPGENEADGLKRKLTSKLGGNSAALVPDWTVGECVATWWRPNFETMMYPYCPPHITKPKECKRLYIVHLSEKEYFAVPKNLKLLAVPLFELYDNVQRYGPVISTIPQQLSRFHFNMISS

SEQ ID NO: 8903 - protein, 198 aa, Arabidopsis thaliana
MSQVVNTYPLSNYSFGTKEPKLEKDTSVADRLARMKINYMKEGMRTSVEGILLVQEHNHPHILLLQIGNTFCKLPGGRLKPGENEADGLKRKLTSKLGGNSAALVPDWTVGECVATWWRPNFETMMYPYCPPHITKPKECKRLYIVHLSEKEYFAVPKNLKLLAVPLFELYDNVQRYGPVISTIPQQLSRFHFNMISS

SEQ ID NO: 8904 - protein, 164 aa, Arabidopsis thaliana
MKINYMKEGMRTSVEGILLVQEHNHPHILLLQIGNTFCKLPGGRLKPGENEADGLKRKLTSKLGGNSAALVPDWTVGECVATWWRPNFETMMYPYCPPHITKPKECKRLYIVHLSEKEYFAVPKNLKLLAVPLFELYDNVQRYGPVISTIPQQLSRFHFNMISS

SEQ ID NO: 8905 - DNA, 461 bp, Arabidopsis thaliana
gcaagtgcggcaatggttgcggaggttgcaaaaggtaccctgacttggagaacaccgccaccgagactctcgtcctcggtgttgctccgccgatgaactctcagtacgaggcttccggcgagactttcgctaccgagaatgatccctgcaaatgcggatctgactgcaagtgcaacccttgttcctgcaaatgaagagcttcataaaccctaagtctgtaataaccctaatgttatgttaggtttgcttatatgtaataattggctgatttttccggtagttttgccggcgacgttggtctttctcttcttcttcttcttctgctgtgtgtttttatggcttggtcattaagatatctctgcaaagttttatccttgtgactttattaatcctaagactattatgggtttgtattaaagtacgcttctttcttgctcactacacaattaagattcaagccc

SEQ ID NO: 8906 - protein, 63 aa, Arabidopsis thaliana
KCGNGCGGCKRYPDLENTATETLVLGVAPPMNSQYEASGETFATENDPCKCGSDCKCNPCSCK

SEQ ID NO: 8907 - protein, 38 aa, Arabidopsis thaliana
MLGLLICNNWLIFPVVLPATLVFLFFFFFCCVFLWLGH

SEQ ID NO: 8908 - protein, 33 aa, Arabidopsis thaliana
MNSQYEASGETFATENDPCKCGSDCKCNPCSCK

SEQ ID NO: 8909 - DNA, 1044 bp, Arabidopsis thaliana
agaatcctcttttaagtctctgtttcataaataaaactaataaagaagaagaagaaaacagagcaattaaagtccttaaatcttcttcttctccaattcaatggctcttccgttgccattgatcttccttatcttctctcatttgttcgtttctggagttagatcaacgagcttcattatggtgaacaaatgcgaatacacagtctggcctggacttttatcaaacgccggagttccaccacttccgacgaccggattcgttctccaaaaaggcgaagaacgaacaatcagcgctccaacttcatgggtaggaagattctgggggagaactcaatgttccaccgacaccgacggaaaattcacttgtctcaccggagattgcggatctggtaccctcgaatgctccggatccggagcaacaccaccagcaacactagcggaattcacactagacggatctaacggactcgatttctacgacgttagtctcgtcgacggttacaacgtcccgatgctagtggctccacaaggaggctcgggtttaaactgtagcagcaccggatgcgttgtagatctgaacggttcgtgtccgtcggagcttaaagtgacgagtttagacggcagaggtaaacaatccatgggatgtaaaagcgcgtgtgaagcttttcgtacgccggagtattgttgcagcggcgcccacggtacacctgacacgtgtaaaccgtcgtcgtactcgttgatgtttaaaactgcgtgtccacgtgcttacagctacgcttacgatgatcagagtagtaccttcacatgtgctgaatctcctaattacgttatcacgttttgccctactcctaacaccaggtgattattccatttatacccttttataactattaacacaccttgcctatgagggtagttttgtcaatatagaatgtatcttcttcactgttgcaccaaattagcatggatagtagtttatgattatggttattttcgtcaattactgcagacaccatatttactaaccattaattaccttttgcc

SEQ ID NO: 8910 - protein, 253 aa, Arabidopsis thaliana
MALPLPLIFLIFSHLFVSGVRSTSFIMVNKCEYTVWPGLLSNAGVPPLPTTGFVLQKGEERTISAPTSWVGRFWGRTQCSTDTDGKFTCLTGDCGSGTLECSGSGATPPATLAEFTLDGSNGLDFYDVSLVDGYNVPMLVAPQGGSGLNCSSTGCVVDLNGSCPSELKVTSLDGRGKQSMGCKSACEAFRTPEYCCSGAHGTPDTCKPSSYSLMFKTACPRAYSYAYDDQSSTFTCAESPNYVITFCPTPNTR

SEQ ID NO: 8911 - protein, 227 aa, Arabidopsis thaliana
MVNKCEYTVWPGLLSNAGVPPLPTTGFVLQKGEERTISAPTSWVGRFWGRTQCSTDTDGKFTCLTGDCGSGTLECSGSGATPPATLAEFTLDGSNGLDFYDVSLVDGYNVPMLVAPQGGSGLNCSSTGCVVDLNGSCPSELKVTSLDGRGKQSMGCKSACEAFRTPEYCCSGAHGTPDTCKPSSYSLMFKTACPRAYSYAYDDQSSTFTCAESPNYVITFCPTPNTR

SEQ ID NO: 8912 - DNA, 805 bp, Arabidopsis thaliana
acttaaacgtcgccgtttccgtgttcgaagcttcgtgaaaatcttcaatctcgcgagagagaagaagaagaagaagaagaagaagaagcgatgttcctggtggattggttctatggagttctggcaactctgggactatggcagaaagaagcgaagattctgtttctaggtctcgacaacgccggcaaaaccaccttgcttcacatgttaaaggacgagagactggtccagcatcagccgacacagcatccgacatcgaaagagcttagtatcggcaaaatcaagttcaaagccttcgatttgggaggtcatcagattgctcgtagagtctggaaggactattacgctaaggttgatgcagtggtatacctagttgatgcatatgacaaagagaggtttgcagaatcaaagaaagagcttgacgctcttctctctgatgaatccctagcaaatgtccctttcctcatccttggaaacaaaatcgacattccgtacgctgcatcagaagacgagctgcgttatcatctaggcctcaccagtttcaccactgggaaaggtaaagtgaatctagcaggaacaaatgttcgtcctcttgaggtgttcatgtgcagcattgtcagaaagatgggttacggcgaaggatttaaatgggtttctcaatatatcgactagatcaatcatatttaagtcttatctatctatactgtgtgattggtatctgtacgtgttataacctaatgtataattacgattaatgtgtgtatacaacaagatttgacggcttttaaattatcaattttgtgtt

SEQ ID NO: 8913 - protein, 193 aa, Arabidopsis thaliana
MFLVDWFYGVLATLGLWQKEAKILFLGLDNAGKTTLLHMLKDERLVQHQPTQHPTSKELSIGKIKFKAFDLGGHQIARRVWKDYYAKVDAVVYLVDAYDKERFAESKKELDALLSDESLANVPFLILGNKIDIPYAASEDELRYHLGLTSFTTGKGKVNLAGTNVRPLEVFMCSIVRKMGYGEGFKWVSQYID

SEQ ID NO: 8914 - protein, 155 aa, Arabidopsis thaliana
MLKDERLVQHQPTQHPTSKELSIGKIKFKAFDLGGHQIARRVWKDYYAKVDAVVYLVDAYDKERFAESKKELDALLSDESLANVPFLILGNKIDIPYAASEDELRYHLGLTSFTTGKGKVNLAGTNVRPLEVFMCSIVRKMGYGEGFKWVSQYID

SEQ ID NO: 8915 - DNA, 713 bp, Arabidopsis thaliana
gaacatcctaatcgaaaagcttcttcgacgacgttggttcttcttcctttgtcctgcgccgcgatctctccttctccaacttcccccgtcctgtccaaagaaaatgccaaaggttaaaactaaccgagtcaagtacccagaaggatgggagttgatcgagcctactcttcgagagcttgatgccaagatgagagaagctgagacagattcacacgatggtaagagaaagtgtgaaactttatggccaatcttcaaagtctctcatcagaggagtcggtatgtatatgacctttattaccgaagggaagaaatatctaaagagctctatgagttctgcttggaccagggctatgcagatcgcagtctgattgccaaatggaaaaagtcgggatatgaacgtttatgctgcttgcgctgcatacagccaagagaccacaactatggaacaacatgtgtatgccgtgttcccaaacacttgcgtgaagagaaagtggtcgaatgcgttcactgcggctgtcaaggatgcgcgagtggcgattaaattcaacatagctttattcgcaatctctgactgtttgttacaatcttgtcacttgttaaatctggattatgtattattccataaaggctttaaaaccctgactaaaaatccccttgctcttacttatcaactctgggtggtattgcaaataaaaagaacgttccggtttggt

SEQ ID NO: 8916 - protein, 179 aa, Arabidopsis thaliana
NILIEKLLRRRWFFFLCPAPRSLLLQLPPSCPKKMPKVKTNRVKYPEGWELIEPTLRELDAKMREAETDSHDGKRKCETLWPIFKVSHQRSRYVYDLYYRREEISKELYEFCLDQGYADRSLIAKWKKSGYERLCCLRCIQPRDHNYGTTCVCRVPKHLREEKVVECVHCGCQGCASGD

SEQ ID NO: 8917 - protein, 145 aa, Arabidopsis thaliana
MPKVKTNRVKYPEGWELIEPTLRELDAKMREAETDSHDGKRKCETLWPIFKVSHQRSRYVYDLYYRREEISKELYEFCLDQGYADRSLIAKWKKSGYERLCCLRCIQPRDHNYGTTCVCRVPKHLREEKVVECVHCGCQGCASGD

SEQ ID NO: 8918 - protein, 117 aa, Arabidopsis thaliana
MREAETDSHDGKRKCETLWPIFKVSHQRSRYVYDLYYRREEISKELYEFCLDQGYADRSLIAKWKKSGYERLCCLRCIQPRDHNYGTTCVCRVPKHLREEKVVECVHCGCQGCASGD

SEQ ID NO: 8919 - DNA, 1460 bp, Arabidopsis thaliana
ctctttgctctcactatcaaaactctgaatttcgatttcaatggagtcacgcgtgctgttacgcgccaccgcgaatgtcgttggaattccgaaattgagacgaccaatcggagcgatccaccgtcaattcagcactgcatcgtcttcctcgttctcggttaaaccaatcggaggaatcggagagggagcgaatctgatctccggtcgtcagcttcgtccaattcttcttctcgattcgtcggcgatcaacggaggagagaaaagagagattctcaaaccggttaaagccgccgctgctgaaggtggagataccgctggggaagctaaagttggattcctcgccaagtatccatggctagtcactggattcttcttcttcatgtggtacttcttaaatgtgattttcaacatccttaacaagaagatctataattacttcccttatccctattttgtatcggtgatacacttgttcgtgggagttgtttactgcttgatcagctggtccgtgggtcttcctaaacgtgccccgattgactcgaacctcctcaaggtattgataccagtcgcagtctgtcacgccttaggccatgtcactagcaatgtctctttcgctgcggttgctgtctccttcactcacaccatcaaagcacttgagccattcttcaatgcggctgcttctcaattcattatgggacaatccatccccataacactatggttgtctctagctcctgttgttcttggtgttgcaatggcttcactaactgagctatcattcaactggctcggtttcatcagtgctatgatatcaaacatttctttcacttaccgaagcatcttctccaagaaagccatgactgatatggacagtacaaatgtctacgcttacatctccatcatcgcactcttcgtctgcattcctcctgccatcatcgttgaaggtcctaaactacttaaccatggtttcgccgacgcgattgctaaagttggaatgactaaattcatctctgatctcttctgggttggaatgttttaccatctctacaatcagctggctaccaataccttggagagggttgcaccgctgactcacgcggttggaaacgttctgaaacgtgtgttcgtgatcggtttctccatcgttatcttcggaaacaagatatcgacacagacaggtataggaacaggaatagccattgctggagttgcaatgtactctatcattaaggccaagatcgaagaagagaaacggcaaggaaagaaagcatagaaagcagctgaagacggcggtcgacagttgcataaacaagttctccgatggatatatatatctatataataaataaccaaatgcaatagtatgttgtattgtaccatcaaccattgttttcgagtttttcctttctttgttttttttttgctttctgaaaagttatatataaattttttattctgcc

SEQ ID NO: 8920 - protein, 410 aa, Arabidopsis thaliana
MESRVLLRATANVVGIPKLRRPIGAIHRQFSTASSSSFSVKPIGGIGEGANLISGRQLRPILLLDSSAINGGEKREILKPVKAAAAEGGDTAGEAKVGFLAKYPWLVTGFFFFMWYFLNVIFNILNKKIYNYFPYPYFVSVIHLFVGVVYCLISWSVGLPKRAPIDSNLLKVLIPVAVCHALGHVTSNVSFAAVAVSFTHTIKALEPFFNAAASQFIMGQSIPITLWLSLAPVVLGVAMASLTELSFNWLGFISAMISNISFTYRSIFSKKAMTDMDSTNVYAYISIIALFVCIPPAIIVEGPKLLNHGFADAIAKVGMTKFISDLFWVGMFYHLYNQLATNTLERVAPLTHAVGNVLKRVFVIGFSIVIFGNKISTQTGIGTGIAIAGVAMYSIIKAKIEEEKRQGKKA

SEQ ID NO: 8921 - protein, 297 aa, Arabidopsis thaliana
MWYFLNVIFNILNKKIYNYFPYPYFVSVIHLFVGVVYCLISWSVGLPKRAPIDSNLLKVLIPVAVCHALGHVTSNVSFAAVAVSFTHTIKALEPFFNAAASQFIMGQSIPITLWLSLAPVVLGVAMASLTELSFNWLGFISAMISNISFTYRSIFSKKAMTDMDSTNVYAYISIIALFVCIPPAIIVEGPKLLNHGFADAIAKVGMTKFISDLFWVGMFYHLYNQLATNTLERVAPLTHAVGNVLKRVFVIGFSIVIFGNKISTQTGIGTGIAIAGVAMYSIIKAKIEEEKRQGKKA

SEQ ID NO: 8922 - DNA, 722 bp, Arabidopsis thaliana
cacacaccaacgttgattcttcttcttcttcttcttctctctttctcatctaaaccaaaaaatggcagatcagctcaccgatgatcagatctctgagttcaaggaagcttttagccttttcgacaaagacggagatggttgcatcacaacgaaagagctaggaacagtgatgagatcattaggtcaaaatccaacagaagcagagttacaagatatgataaacgaagtagatgctgatggtaacggaaccatagacttccctgagtttctgaacctaatggctaggaagatgaaggacactgactctgaagaagagctgaaagaagctttcagggttttcgataaggaccagaacggtttcatctcggcagctgagttaagacatgtaatgacaaatcttggtgagaagttaactgatgaagaagttgatgagatgatcaaagaagctgatgttgatggagatggtcagatcaattatgaagagtttgtcaaagttatgatggcaaagagaagagggaagagagttatggcagcaaagcgtagtagcaattctgctgaatacaaagaaaagaatggtcgccggaaaagtcactgccgtattctctgagctccgaccatttgcttcttaattccttttctttatatgtttgtgtgcaataagagatttgtacctctcacacccattaaacggattttaaatgtcatatcttgtttgaatagtc

SEQ ID NO: 8923 - protein, 181 aa, Arabidopsis thaliana
MADQLTDDQISEFKEAFSLFDKDGDGCITTKELGTVMRSLGQNPTEAELQDMINEVDADGNGTIDFPEFLNLMARKMKDTDSEEELKEAFRVFDKDQNGFISAAELRHVMTNLGEKLTDEEVDEMIKEADVDGDGQINYEEFVKVMMAKRRGKRVMAAKRSSNSAEYKEKNGRRKSHCRIL

SEQ ID NO: 8924 - protein, 145 aa, Arabidopsis thaliana
MRSLGQNPTEAELQDMINEVDADGNGTIDFPEFLNLMARKMKDTDSEEELKEAFRVFDKDQNGFISAAELRHVMTNLGEKLTDEEVDEMIKEADVDGDGQINYEEFVKVMMAKRRGKRVMAAKRSSNSAEYKEKNGRRKSHCRIL

SEQ ID NO: 8925 - protein, 130 aa, Arabidopsis thaliana
MINEVDADGNGTIDFPEFLNLMARKMKDTDSEEELKEAFRVFDKDQNGFISAAELRHVMTNLGEKLTDEEVDEMIKEADVDGDGQINYEEFVKVMMAKRRGKRVMAAKRSSNSAEYKEKNGRRKSHCRIL

SEQ ID NO: 8926 - DNA, 1778 bp, Arabidopsis thaliana
atatctttttcaatttatttggtttttctttgggtgcaacttcacctcacaaaattttctctctttttttatattaatttgagttaggcctttttgatttcatagatgagtcgtctagtcgtctggatttgatgtggttatagtcttacagagacctttgattgaaataagaacaaaagcaagaatacatacatcctcttcatcttacacccatccttttttatttttctagggttttatttttttttaatttattttttttctttgatttttatattctctctctctctcaaatctttactcatctgggtatggaagaataccagcatgacaacagctccactcctcaaagagtaagtttcttgtactctccaatctcttcttccaacaaaaacgataacacaagtgataccaacaataacaacaacaataataatagtagcaattatggtcctggttacaataatactaacaacaacaatcatcaccaccaacacatgttgtttccacatatgagctctcttctccctcaaacaaccgagaattgcttccgatctgatcatgatcaacccaacaacaacaacaacaacccatctgttaaatctgaagctagctcctcaagaatcaatcattactccatgttaatgagagccatccacaatactcaagaagctaacaacaacaacaatgacaacgtaagcgatgttgaagccatgaaggctaaaatcattgctcatcctcactactctaccctcctacaagcttacttggactgccaaaagattggagctccacctgatgtggttgatagaattacggcggcacggcaagactttgaggctcgacaacagcggtcaacaccgtctgtctctgcctcctctagagacccggagttagatcaattcatggaagcatactgtgacatgttggttaaatatcgtgaggagctaacaaggcccattcaggaagcaatggagtttatacgtcgtattgaatctcagcttagcatgttgtgtcagagtcccattcacatcctcaacaatcctgatgggaagagtgacaatatgggatcatcagacgaagaacaagagaataacagcggaggggaaacagaattaccggaaatagacccgagggccgaagatcgggaactcaagaaccatttgctgaagaagtatagtggatacttaagcagtttgaagcaagaactatccaagaagaaaaagaaaggtaaacttcctaaagaagcacggcagaagcttctcacgtggtgggagttgcattacaagtggccatatccttctgagtcagagaaggtagcgttggcggaatcaacggggttagatcagaaacaaatcaacaattggttcataaaccaaagaaagcgtcactggaaaccatctgaagacatgcagttcatggtgatggatggtctgcagcacccgcaccacgcagctctgtacatggatggtcattacatgggtgatggaccttatcgtctcggtccataagacatccaaaagctttagccacataataacaacctcttgttgctttcttgttacaactcatgttttgaattcccctacatcagtttgctacttatagctttctttgttttcacgccttttgtaatgtcttatgtcgtcggggagtttgagacttcctagtcagaaatatcccttcattttattttctctttttttcggtgtattttgtttttttgttttctcactaatgtttttatttaataatgtgtgaaaggaaaatgctattcc

SEQ ID NO: 8927 - protein, 399 aa, Arabidopsis thaliana
MEEYQHDNSSTPQRVSFLYSPISSSNKNDNTSDTNNNNNNNNSSNYGPGYNNTNNNNHHHQHMLFPHMSSLLPQTTENCFRSDHDQPNNNNNNPSVKSEASSSRINHYSMLMRAIHNTQEANNNNNDNVSDVEAMKAKIIAHPHYSTLLQAYLDCQKIGAPPDVVDRITAARQDFEARQQRSTPSVSASSRDPELDQFMEAYCDMLVKYREELTRPIQEAMEFIRRIESQLSMLCQSPIHILNNPDGKSDNMGSSDEEQENNSGGETELPEIDPRAEDRELKNHLLKKYSGYLSSLKQELSKKKKKGKLPKEARQKLLTWWELHYKWPYPSESEKVALAESTGLDQKQINNWFINQRKRHWKPSEDMQFMVMDGLQHPHHAALYMDGHYMGDGPYRLGP

SEQ ID NO: 8928 - protein, 337 aa, Arabidopsis thaliana
MLFPHMSSLLPQTTENCFRSDHDQPNNNNNNPSVKSEASSSRINHYSMLMRAIHNTQEANNNNNDNVSDVEAMKAKIIAHPHYSTLLQAYLDCQKIGAPPDVVDRITAARQDFEARQQRSTPSVSASSRDPELDQFMEAYCDMLVKYREELTRPIQEAMEFIRRIESQLSMLCQSPIHILNNPDGKSDNMGSSDEEQENNSGGETELPEIDPRAEDRELKNHLLKKYSGYLSSLKQELSKKKKKGKLPKEARQKLLTWWELHYKWPYPSESEKVALAESTGLDQKQINNWFINQRKRHWKPSEDMQFMVMDGLQHPHHAALYMDGHYMGDGPYRLGP

SEQ ID NO: 8929 - protein, 332 aa, Arabidopsis thaliana
MSSLLPQTTENCFRSDHDQPNNNNNNPSVKSEASSSRINHYSMLMRAIHNTQEANNNNNDNVSDVEAMKAKIIAHPHYSTLLQAYLDCQKIGAPPDVVDRITAARQDFEARQQRSTPSVSASSRDPELDQFMEAYCDMLVKYREELTRPIQEAMEFIRRIESQLSMLCQSPIHILNNPDGKSDNMGSSDEEQENNSGGETELPEIDPRAEDRELKNHLLKKYSGYLSSLKQELSKKKKKGKLPKEARQKLLTWWELHYKWPYPSESEKVALAESTGLDQKQINNWFINQRKRHWKPSEDMQFMVMDGLQHPHHAALYMDGHYMGDGPYRLGP

SEQ ID NO: 8930 - DNA, 1826 bp, Arabidopsis thaliana
aattcattccattgtcgttacctttttgtttctcagactgttaccttacctgtaaagaagagagttaaagatctattgcaaaaaaactcaacctttaatctctctgcttcttctaattaagtaatttcaactacccttttggcgaaacctctcgatctattggtttggtactgaagaaaccgacttgagtctgatttgtttttggtgaaagccatggaagctataagaaagcaagctgcgaagctcagagagcaagtcgcgaggcaacagcaagcggttttgaagcatttagggcatgttaatgctgatgctgttgttgttgatgaagaagagcttcattgtcatcagaaacttcaagatctttatagctctactaaagctgctaagcgtttgcaaaggaacattgttcgtggacttgaaggtttcattgcgactggcacaaaggttgttgagatagggttgaagtttgctgaagattttaagaaatatggagatgagaatcctgatgctaatactcctctatcaagagtcgcacatcactttgggacctcttacaagtcggtggaagacgagagggaaactctcctcggagttcttagtgagcaggtttgtgagccaattcgtacgatgatatatagtgcgcctttggaggatgctcggcatttggtgaatcactatgacaggctgagacaagaagtcgaagctcaggcaactgatgtactgaggagaagatctaagttgaaggaatctgatatttctgaagaagcctacataaaacttaagaattccgaatcgagattagctgagctcaaatcaagtatgaaaactcttggcaaagaagctactaaggccatgttggaagtcgacgatcagcaacagaacgttacttctcagcgcctccgtgctctggttgaagccgagagatcataccatcgtaatgccctcgatatccttgacaagctacatgctgagatgattgctgaggaagaagctataggagcatcaccaaagtcactgcctttacatttagaggatagtgcttctcttccccaagaagaaccgatttcaaaaccctcgggagaggtcaaatcaaaccccttgggaaagatcaaaggaagtcgtcgagaagaagtcaagtctaatccccaagaagtaaccaaacccaatcccaaggacgaaatgaagtccagtccccaagaagaaaccaaatccaatcatcagaaagaaatcaagtctagtccacaggaagagatcaagaagtccaatggatctgatgatcatcacaatcatcaacttctcagtcagaatgattcctactttcttgcaaaggttgtgcacccgtttgatgctcaagccccaggggaactcagtctcgctgtcgatgattatgtaattgtgcgacaggtggctgggacaggctggtcagaaggagaatacaagggcaaagccggatggttcccgtctgcttacgttgagaaacaagagaaagctccggcgagcaagatcgtggaatcaaacgccaagtaacaatgatccctttctttaacatatacatacaaaaagtatgtgtaagatatgattgtgtttttcttccttcttacctatcttcgtaagtaaagatatgtttccacgagtaaatatgatcttgtaagagttatgatttgtgtgttttcttccttttcttcttatgtatcaacatgagtctaactctagactcttgagtcatatctctacgcagttgtgagaatcctgttttatcttttgtttgataagatcctctgtttcttctgtaatttactctgataatgataatgatctttcttgct

SEQ ID NO: 8931 - protein, 437 aa, Arabidopsis thaliana
MEAIRKQAAKLREQVARQQQAVLKHLGHVNADAVVVDEEELHCHQKLQDLYSSTKAAKRLQRNIVRGLEGFIATGTKVVEIGLKFAEDFKKYGDENPDANTPLSRVAHHFGTSYKSVEDERETLLGVLSEQVCEPIRTMIYSAPLEDARHLVNHYDRLRQEVEAQATDVLRRRSKLKESDISEEAYIKLKNSESRLAELKSSMKTLGKEATKAMLEVDDQQQNVTSQRLRALVEAERSYHRNALDILDKLHAEMIAEEEAIGASPKSLPLHLEDSASLPQEEPISKPSGEVKSNPLGKIKGSRREEVKSNPQEVTKPNPKDEMKSSPQEETKSNHQKEIKSSPQEEIKKSNGSDDHHNHQLLSQNDSYFLAKVVHPFDAQAPGELSLAVDDYVIVRQVAGTGWSEGEYKGKAGWFPSAYVEKQEKAPASKIVESNAK

SEQ ID NO: 8932 - protein, 299 aa, Arabidopsis thaliana
MIYSAPLEDARHLVNHYDRLRQEVEAQATDVLRRRSKLKESDISEEAYIKLKNSESRLAELKSSMKTLGKEATKAMLEVDDQQQNVTSQRLRALVEAERSYHRNALDILDKLHAEMIAEEEAIGASPKSLPLHLEDSASLPQEEPISKPSGEVKSNPLGKIKGSRREEVKSNPQEVTKPNPKDEMKSSPQEETKSNHQKEIKSSPQEEIKKSNGSDDHHNHQLLSQNDSYFLAKVVHPFDAQAPGELSLAVDDYVIVRQVAGTGWSEGEYKGKAGWFPSAYVEKQEKAPASKIVESNAK

SEQ ID NO: 8933 - protein, 235 aa, Arabidopsis thaliana
MKTLGKEATKAMLEVDDQQQNVTSQRLRALVEAERSYHRNALDILDKLHAEMIAEEEAIGASPKSLPLHLEDSASLPQEEPISKPSGEVKSNPLGKIKGSRREEVKSNPQEVTKPNPKDEMKSSPQEETKSNHQKEIKSSPQEEIKKSNGSDDHHNHQLLSQNDSYFLAKVVHPFDAQAPGELSLAVDDYVIVRQVAGTGWSEGEYKGKAGWFPSAYVEKQEKAPASKIVESNAK

SEQ ID NO: 8934 - DNA, 1479 bp, Arabidopsis thaliana
acacacatataacaatctcttcttctctgacattacacaatggtggtttgagtttacagaagataataatggggaaaactagcaaatggtttcgaagtctcttaaccggaaagaaagagagaacaaaggaacatatcattcaaagcgagtgtgtattcacttcttccattccaggcactcctaaggagaaacgtcgatggagttttcgacgttcttcagcaactggaccaccgccaccagcttgtgctattacactgaaagattcaccaccaccgccgccaccaccacctccacctccaccgctacaacaaccatttgtggtcgaaatcgtggacaatgaagatgaacaaatcaagaacgtttcagctgaagagattgaagaatttgcagcaataaagattcaagcgtgctatcgttctcatttggcgaggaaagcattaagagcattaaaagggttagtgaaattacaagcactagtgagaggtcatttagtaaggaaacaagcaacagctacacttagatgtatgcaagcattaataacacttcaagccaaagctcgagaacagaggattcgtatgatcggaggagattcaacaaatccaagaacatcgattcacaaaaccaggatcaataacttttaccacgagaatgaagaaaacatcaagattgtggaaatggacattcaatcgaaaatgtactctccggctccttcggctttaaccgagatgagtcctcgcgcgtatagtagccatttcgaggattgtaactcattcaacacagctcaaagtagtccacaatgtttcagcagattcaaagagtattacaatggagatactttgtcttcttatgattaccctctcttccctaattacatggctaatactcagtcttctaaagccaaggctcggtctcaaagtgcgccgaagcagagacctcctgagatctatgagaagcagatgagtgggaggagaagatcttcgatggaagcaccgaggaataacggtgtcccgagagctgtaaggatgcagagatcttcatctcaactagggtcaaacacagccaaggaaagtcaacaacatcatcatcatcagtactatccgtggatggcgataaagctcgatagatctaatatttcgcttatggagagcgaatgcggatctacaagtaccgttatgactaataccaactacggtagacatgttgatgttcagggaaacaacaacatgtactgaacactgtgctttagaatttgagagattgctggaaaaataggcaagcctaaaaaacgaagaggacaggtttataggagtttttttatgatgatggagatttaacaatctctatatgtaaagcaaaaaatgtagtagactgtagaagtgactcatctcgtcttaaattttgatttttcctttttaattatcattcgaattaacgttaacagtatttgtcaaattcatggatgttactatgttcaaaacc

SEQ ID NO: 8935 - protein, 409 aa, Arabidopsis thaliana
THITISSSLTLHNGGLSLQKIIMGKTSKWFRSLLTGKKERTKEHIIQSECVFTSSIPGTPKEKRRWSFRRSSATGPPPPACAITLKDSPPPPPPPPPPPPLQQPFVVEIVDNEDEQIKNVSAEEIEEFAAIKIQACYRSHLARKALRALKGLVKLQALVRGHLVRKQATATLRCMQALITLQAKAREQRIRMIGGDSTNPRTSIHKTRINNFYHENEENIKIVEMDIQSKMYSPAPSALTEMSPRAYSSHFEDCNSFNTAQSSPQCFSRFKEYYNGDTLSSYDYPLFPNYMANTQSSKAKARSQSAPKQRPPEIYEKQMSGRRRSSMEAPRNNGVPRAVRMQRSSSQLGSNTAKESQQHHHHQYYPWMAIKLDRSNISLMESECGSTSTVMTNTNYGRHVDVQGNNNMY

SEQ ID NO: 8936 - protein, 387 aa, Arabidopsis thaliana
MGKTSKWFRSLLTGKKERTKEHIIQSECVFTSSIPGTPKEKRRWSFRRSSATGPPPPACAITLKDSPPPPPPPPPPPPLQQPFVVEIVDNEDEQIKNVSAEEIEEFAAIKIQACYRSHLARKALRALKGLVKLQALVRGHLVRKQATATLRCMQALITLQAKAREQRIRMIGGDSTNPRTSIHKTRINNFYHENEENIKIVEMDIQSKMYSPAPSALTEMSPRAYSSHFEDCNSFNTAQSSPQCFSRFKEYYNGDTLSSYDYPLFPNYMANTQSSKAKARSQSAPKQRPPEIYEKQMSGRRRSSMEAPRNNGVPRAVRMQRSSSQLGSNTAKESQQHHHHQYYPWMAIKLDRSNISLMESECGSTSTVMTNTNYGRHVDVQGNNNMY

SEQ ID NO: 8937 - protein, 235 aa, Arabidopsis thaliana
MQALITLQAKAREQRIRMIGGDSTNPRTSIHKTRINNFYHENEENIKIVEMDIQSKMYSPAPSALTEMSPRAYSSHFEDCNSFNTAQSSPQCFSRFKEYYNGDTLSSYDYPLFPNYMANTQSSKAKARSQSAPKQRPPEIYEKQMSGRRRSSMEAPRNNGVPRAVRMQRSSSQLGSNTAKESQQHHHHQYYPWMAIKLDRSNISLMESECGSTSTVMTNTNYGRHVDVQGNNNMY

SEQ ID NO: 8938 - DNA, 1093 bp, Arabidopsis thaliana
accgaaagctccacaaaccccattaattaacaaaaaaccaaaagaaggcggcgcaaacaaaagataatgcaaccagagacctcagatcagatgttgtactcgtttcttgccggaaacgaagtcggcggtggagggtactgcgtctccggcgactacatgacgactatgcagagcttatgtgggtcttcgtcgtcgacgtcatcgtattacccactggcgatctccggcatcggagaaacgatggctcaagacagagctttagctgctttgaggaaccacaaagaagctgagagaagaaggagagagaggatcaattctcatctcaacaagcttcgtaacgtactctcttgtaattctaagaccgataaagccacactgctcgccaaagtagttcaacgagtcagagaacttaaacagcaaaccctagagacctccgactccgaccaaacattattaccatcagagaccgacgaaattagtgttctacactttggagactattcaaacgacggtcatataatcttcaaagcctctctatgttgtgaagatagatcagatctcttgccggaccttatggagattctcaagtctcttaacatgaagactctccgagctgagatggtaaccattggtggtcggacaagaagtgttcttgtcgtagctgctgacaaagagatgcacggcgtcgagtctgtgcattttttgcaaaatgctctcaagtcgctgcttgagcggtcaagcaagtcgttgatggaacgtagttctggtggtggaggaggagaacggtcaaagcggcgtcgtgcgctggatcacatcataatggtgtgaaatgatgagaattgagcacactaaaaagtctataattgattaatatatatagggtatgatcataattaacttggttataattaccaaaaccttttttattcctctttaataatatatatgttatatggttttagttactaagtcttgggagtgtaagcaaatgttgtaagtaggtttggtgtgttctttttcttttcttttttttctttttcaagaaaaagaaaaagatctatattatatataaagaatatttgtcatgttattt

SEQ ID NO: 8939 - protein, 253 aa, Arabidopsis thaliana
MQPETSDQMLYSFLAGNEVGGGGYCVSGDYMTTMQSLCGSSSSTSSYYPLAISGIGETMAQDRALAALRNHKEAERRRRERINSHLNKLRNVLSCNSKTDKATLLAKVVQRVRELKQQTLETSDSDQTLLPSETDEISVLHFGDYSNDGHIIFKASLCCEDRSDLLPDLMEILKSLNMKTLRAEMVTIGGRTRSVLVVAADKEMHGVESVHFLQNALKSLLERSSKSLMERSSGGGGGERSKRRRALDHIIMV

SEQ ID NO: 8940 - protein, 245 aa, Arabidopsis thaliana
MLYSFLAGNEVGGGGYCVSGDYMTTMQSLCGSSSSTSSYYPLAISGIGETMAQDRALAALRNHKEAERRRRERINSHLNKLRNVLSCNSKTDKATLLAKVVQRVRELKQQTLETSDSDQTLLPSETDEISVLHFGDYSNDGHIIFKASLCCEDRSDLLPDLMEILKSLNMKTLRAEMVTIGGRTRSVLVVAADKEMHGVESVHFLQNALKSLLERSSKSLMERSSGGGGGERSKRRRALDHIIMV

SEQ ID NO: 8941 - protein, 223 aa, Arabidopsis thaliana
MTTMQSLCGSSSSTSSYYPLAISGIGETMAQDRALAALRNHKEAERRRRERINSHLNKLRNVLSCNSKTDKATLLAKVVQRVRELKQQTLETSDSDQTLLPSETDEISVLHFGDYSNDGHIIFKASLCCEDRSDLLPDLMEILKSLNMKTLRAEMVTIGGRTRSVLVVAADKEMHGVESVHFLQNALKSLLERSSKSLMERSSGGGGGERSKRRRALDHIIMV

SEQ ID NO: 8942 - DNA, 1608 bp, Arabidopsis thaliana
ctaatccaaaaacttcctagaaaagtaagtatatacctttctctgtatttccttcacctccggctaaatctccggcgaccgcgtaacttgttctccggtctgaatagtgaataaacacacacacggagccaaatccaggagaaattaggtttgaattagagagattaggagaatacaaattggtttggtggttttcaagtatgctaccaagtgggttgaaagaaacccaactccgtgagagcaacaacaaccaaaaagtccatcctcaaccaatggaagagtctatcaatcagaatcctgaagctatggaagcacttatctccaatctcttcggaaacatctcgtctttgaaatctgcttatatcgagcttcaaagtgctcatactccttacgatcccgagaagattcaggcagcggacaaagttgtcatttctgaactcaagaatctttccgaaatgaagcatttttacagagagaataaccccaaacctgtatgtgtctctccacaagactctcgtttagctgcagagatccaagagcagcagagtttgttgaagacttatgaggttatggtgaagaagtttcagtctgagattcagaacaaggattctgagatcacgcagatgctacagaagattgaggaagcaaaccagaaacggcttaagcttgataagaatcttaagttaagaggaatgtctacaaacgaaggttctaatggagatggaaatatgcagtttcctgacttaactactgaactctatgtatctacttacgaagctgctgctaaagccgtgcacgatttctccaagccgctaatcaacatgatgaaagcagcaggatgggatcttgattctgcagccaattctattgagcctgatgttgtttacgccaagaggcctcacaagaaatatgcatttgaatcatacatatgccaaaggatgttcagtgggtttcagcagaagaacttctcagtaaactcagagagtgctgcggttatggccgatgatgacacagacacctttttccgccagtttcttgctctcaaggacatggatccactagatgctctaggtacaaaccctgattccaactttggtatattctgcaggagcaagtatctcctcttggtccacccaaagatggaagcttctttctttggaaatctagaccagcgtgactacgtgacaggaggtgggcacccgaggactgcgttttaccaggccttcttaaaacttgcaaagtcgatatggatcttgcacaggcttgcttactcttttgatccagctgcaaagatcttccaagtgaaaaagggtagtgagttctctgattcatacatggaaagtgttgtgaagaacatagttgtggatgaaaaagaagagaacccaagagttggtcttatggttatgcctgggttttggattggtggcagtgtcattcaaagccgagtttatgtttctggtgtgaaggtccttgagtgaaggatctcaggaactctcttaatgcttcttcccactttgttgtgcaacttttattttctctttgttataagcaagcctatatgtatcatctattgttaaaaaaaaatggaattaatatcttcttcgtctc

SEQ ID NO: 8943 - protein, 425 aa, Arabidopsis thaliana
MLPSGLKETQLRESNNNQKVHPQPMEESINQNPEAMEALISNLFGNISSLKSAYIELQSAHTPYDPEKIQAADKVVISELKNLSEMKHFYRENNPKPVCVSPQDSRLAAEIQEQQSLLKTYEVMVKKFQSEIQNKDSEITQMLQKIEEANQKRLKLDKNLKLRGMSTNEGSNGDGNMQFPDLTTELYVSTYEAAAKAVHDFSKPLINMMKAAGWDLDSAANSIEPDVVYAKRPHKKYAFESYICQRMFSGFQQKNFSVNSESAAVMADDDTDTFFRQFLALKDMDPLDALGTNPDSNFGIFCRSKYLLLVHPKMEASFFGNLDQRDYVTGGGHPRTAFYQAFLKLAKSIWILHRLAYSFDPAAKIFQVKKGSEFSDSYMESVVKNIVVDEKEENPRVGLMVMPGFWIGGSVIQSRVYVSGVKVLE

SEQ ID NO: 8944 - protein, 401 aa, Arabidopsis thaliana
MEESINQNPEAMEALISNLFGNISSLKSAYIELQSAHTPYDPEKIQAADKVVISELKNLSEMKHFYRENNPKPVCVSPQDSRLAAEIQEQQSLLKTYEVMVKKFQSEIQNKDSEITQMLQKIEEANQKRLKLDKNLKLRGMSTNEGSNGDGNMQFPDLTTELYVSTYEAAAKAVHDFSKPLINMMKAAGWDLDSAANSIEPDVVYAKRPHKKYAFESYICQRMFSGFQQKNFSVNSESAAVMADDDTDTFFRQFLALKDMDPLDALGTNPDSNFGIFCRSKYLLLVHPKMEASFFGNLDQRDYVTGGGHPRTAFYQAFLKLAKSIWILHRLAYSFDPAAKIFQVKKGSEFSDSYMESVVKNIVVDEKEENPRVGLMVMPGFWIGGSVIQSRVYVSGVKVLE

SEQ ID NO: 8945 - protein, 390 aa, Arabidopsis thaliana
MEALISNLFGNISSLKSAYIELQSAHTPYDPEKIQAADKVVISELKNLSEMKHFYRENNPKPVCVSPQDSRLAAEIQEQQSLLKTYEVMVKKFQSEIQNKDSEITQMLQKIEEANQKRLKLDKNLKLRGMSTNEGSNGDGNMQFPDLTTELYVSTYEAAAKAVHDFSKPLINMMKAAGWDLDSAANSIEPDVVYAKRPHKKYAFESYICQRMFSGFQQKNFSVNSESAAVMADDDTDTFFRQFLALKDMDPLDALGTNPDSNFGIFCRSKYLLLVHPKMEASFFGNLDQRDYVTGGGHPRTAFYQAFLKLAKSIWILHRLAYSFDPAAKIFQVKKGSEFSDSYMESVVKNIVVDEKEENPRVGLMVMPGFWIGGSVIQSRVYVSGVKVLE

SEQ ID NO: 8946 - DNA, 1049 bp, Arabidopsis thaliana
atgatatcatcatcatcatcatccaacatggcatcatcatcaatcctcatccctccgattctcacccgtcgtaatctcctcctctccaccacaatcgccaccgtaactccaccaccaccagctaaaccaccttcccccgacatcacaataaccgatcgagtcttcctcgacttctccctctgccccacctacttccgctcagatccctccgcgacactctcctccaccacaccttgctccgattcaactcctctcggccgcgtcgttctcggattatacggccgtcacgttcccataaccgtctcaactttcaaacgtatgtgtacttcatcttccacatcttacaaaaacacacctgtccacaaaatcttccctggtcagtattttctcgccggaagacaaggaggaggacggcgagatacggcggaggttggttattcactcagagacttacctcgtaacaccgacgttgttaattccaaagcttttttacttcctcatgctcgtgctggtgttgtttctctttgtttatctgagaatgatgatgatgatgatattagactcgatcctgattatagaaatgttgaattcttaatcactactggtcctggaccgtctccgcagctcgatggcggtaacattgtattcggaactgttcttgaaggattagatgtagtgacgagtatttcttcgattccgacgtataagccgtcggagaatattaaacagtttaacgattttgcggagtttcttggagacgagagagctcaaaacgcgagatctttgtggaatagacctttgaagacggttttcattagtggctgtggagagcttaaggtcactaatccttcactctctccaactttgccttaattatcgtatcttcgtatatatatatatgtgtgtgtgtcaaatcttgtttataatcatgcttctgcttcttctactatatgaaaatgaaattgtaatttaatcctactctggtggttgctaaagattagtatagagaagagcttatataatcataacattgaggttgttgttgtttg

SEQ ID NO: 8947 - protein, 290 aa, Arabidopsis thaliana
MISSSSSSNMASSSILIPPILTRRNLLLSTTIATVTPPPPAKPPSPDITITDRVFLDFSLCPTYFRSDPSATLSSTTPCSDSTPLGRVVLGLYGRHVPITVSTFKRMCTSSSTSYKNTPVHKIFPGQYFLAGRQGGGRRDTAEVGYSLRDLPRNTDVVNSKAFLLPHARAGVVSLCLSENDDDDDIRLDPDYRNVEFLITTGPGPSPQLDGGNIVFGTVLEGLDVVTSISSIPTYKPSENIKQFNDFAEFLGDERAQNARSLWNRPLKTVFISGCGELKVTNPSLSPTLP

SEQ ID NO: 8948 - protein, 281 aa, Arabidopsis thaliana
MASSSILIPPILTRRNLLLSTTIATVTPPPPAKPPSPDITITDRVFLDFSLCPTYFRSDPSATLSSTTPCSDSTPLGRVVLGLYGRHVPITVSTFKRMCTSSSTSYKNTPVHKIFPGQYFLAGRQGGGRRDTAEVGYSLRDLPRNTDVVNSKAFLLPHARAGVVSLCLSENDDDDDIRLDPDYRNVEFLITTGPGPSPQLDGGNIVFGTVLEGLDVVTSISSIPTYKPSENIKQFNDFAEFLGDERAQNARSLWNRPLKTVFISGCGELKVTNPSLSPTLP

SEQ ID NO: 8949 - protein, 184 aa, Arabidopsis thaliana
MCTSSSTSYKNTPVHKIFPGQYFLAGRQGGGRRDTAEVGYSLRDLPRNTDVVNSKAFLLPHARAGVVSLCLSENDDDDDIRLDPDYRNVEFLITTGPGPSPQLDGGNIVFGTVLEGLDVVTSISSIPTYKPSENIKQFNDFAEFLGDERAQNARSLWNRPLKTVFISGCGELKVTNPSLSPTLP

SEQ ID NO: 8950 - DNA, 871 bp, Arabidopsis thaliana
atcgcatttcagttgttcaacttcttcgtcgtcgtcttcttcctttgctccgtcgtcgagatctcgtcgatcctcaaatctcaaatctcctgtaaccagatcgtctaattatccgatctgcgtttcgaatctcagatcgaagatgccggtggctgcttccgccatctattttctgaatctccgtggcgatgtactcataaatcgcacctaccgagatgacgtcgggggaaacatggtggatgcatttcgtacgcatataatgcagacgaaagagttagggaattgtcctgtgcgtcagattggtggctgctcctttgtttatatgcgaatcagcaatgtctacattgtcattgttgtcagtagcaatgctaacgttgcttgtggattcaaattcgttgttgaggctgttgctttgttcaaatcatactttggtggagcttttgatgaagacgctattagaaataactttgttctgatttatgaattgttggacgagattatggactttggctatccacaaaatctctcccctgaaattttgaaactttatatcactcaggaaggtgtacggtcaccattttcatcgaagccaaaggacaagcctgttccaaatgcaacattacaagttacgggtgctgttggttggagaagagagggccttgcttataaaaagaatgaggtgtttctggatattgtggaaagtgtaaaccttctgatgtcctctaaaggcaacgttcttcggtgtgatgtgaccgggaaagttttaatgaaatgtttcctttcgggaatgcctgatttgaagttggggttgaatgataaaattggtcttgagaaggaatcagaaatgaaatctcgcccagctaagagtggt

SEQ ID NO: 8951 - protein, 290 aa, Arabidopsis thaliana
SHFSCSTSSSSSSSFAPSSRSRRSSNLKSPVTRSSNYPICVSNLRSKMPVAASAIYFLNLRGDVLINRTYRDDVGGNMVDAFRTHIMQTKELGNCPVRQIGGCSFVYMRISNVYIVIVVSSNANVACGFKFVVEAVALFKSYFGGAFDEDAIRNNFVLIYELLDEIMDFGYPQNLSPEILKLYITQEGVRSPFSSKPKDKPVPNATLQVTGAVGWRREGLAYKKNEVFLDIVESVNLLMSSKGNVLRCDVTGKVLMKCFLSGMPDLKLGLNDKIGLEKESEMKSRPAKSG

SEQ ID NO: 8952 - protein, 243 aa, Arabidopsis thaliana
MPVAASAIYFLNLRGDVLINRTYRDDVGGNMVDAFRTHIMQTKELGNCPVRQIGGCSFVYMRISNVYIVIVVSSNANVACGFKFVVEAVALFKSYFGGAFDEDAIRNNFVLIYELLDEIMDFGYPQNLSPEILKLYITQEGVRSPFSSKPKDKPVPNATLQVTGAVGWRREGLAYKKNEVFLDIVESVNLLMSSKGNVLRCDVTGKVLMKCFLSGMPDLKLGLNDKIGLEKESEMKSRPAKSG

SEQ ID NO: 8953 - protein, 213 aa, Arabidopsis thaliana
MVDAFRTHIMQTKELGNCPVRQIGGCSFVYMRISNVYIVIVVSSNANVACGFKFVVEAVALFKSYFGGAFDEDAIRNNFVLIYELLDEIMDFGYPQNLSPEILKLYITQEGVRSPFSSKPKDKPVPNATLQVTGAVGWRREGLAYKKNEVFLDIVESVNLLMSSKGNVLRCDVTGKVLMKCFLSGMPDLKLGLNDKIGLEKESEMKSRPAKSG

SEQ ID NO: 8954 - DNA, 1669 bp, Arabidopsis thaliana
actagtttcctttccttagtaaaaccctacatttctccgcccgcctttgatttctccccggccgttcccgccgccggtctccgatttaaccagggttgagtctaattccttctttttgtgctcattgctgtcggattctctaccggcgttacatcgaccagccagactcttccccatttgactgctttagtgattcaatcgctcttttagattctggaagttgtgactcagtatctccccttcaacgaattagcatcctgcgcaagaatgtctattgcatcatcacttacttcagccacactttgcggcgcctcagtttttcctaaagcattagcctgcagctctgagttccctatcaatcttcccagcccttttgaaagttcaaagatttgtttgacttcgtttcctgcctctagggatctcaagaaaaatgctactttgaatctgactcgaaatgttggtccagtcaggtgtcatgctatgcaagctgggacgagggagttgaagaaatttgaacttagtgatgtgattgaagggaaacagtttgatagagagatgctaagcgctatattcgatgttgcacgcgaaatggaaaagatagaaaagagctcttcacaaagcgaaatcctcaagggttatttaaaggctaccctcttttatgagccttctacccgtaccaggctttcatttgaatctgctatgaaacgccttggaggtgaagtcttaactactgagaacgctagagagttttcgtctgccgcgaaaggggaaacacttgaagacacaataagaacagtggagggttattcagatataattgtgatgcgacattttgaaagcggtgctgcaagaaaagctgcagctactgccaatatacctgtcattaatgcaggtgatggtcctggagagcatcctactcaggctctattggacgtctataccatccaaagtgaaattggaaaattagatggcatcagtgtagccttagttggagaccttgccaacggaaggactgtgcggtctcttgcatacttgcttgccaagttcaaagacgtgaagatctactttgtttcccctgaaattgtgaaaatgaaggatgatataaaagactatttgacatcaagcggggttgaatgggaagaaagttcagatttaatggaagtagcatccaagtgtgatgtagtttatcaaacacgaatccaaagagagaggtttggagaaaggctggacctttacgaagcagctcgtgggaagtatatcgtagacaaggatctgttaggagtgatgcagaaaaaagctattatcatgcatcctttaccgagattggatgaaatcaccgcagatgttgatgctgatccaagagctgcctacttcagacaagcaaagaacggtttgttcattagaatggctcttctaaagctactgcttgtcggttggtgattggatagttcatggtcgttaagttaaatcctttaatggactgattctcaagcctaccatgagctcaaggaatctgcaataataaaatccgaagctttagtgatttttgagtgttaagcacaaaagctgtgatcttgatgttaattaaaagaaggatctgttggtttgttggttaaaagactgatatgaggaagagttgttgaacttaatgaataaattgatttgagct

SEQ ID NO: 8955 - protein, 390 aa, Arabidopsis thaliana
MSIASSLTSATLCGASVFPKALACSSEFPINLPSPFESSKICLTSFPASRDLKKNATLNLTRNVGPVRCHAMQAGTRELKKFELSDVIEGKQFDREMLSAIFDVAREMEKIEKSSSQSEILKGYLKATLFYEPSTRTRLSFESAMKRLGGEVLTTENAREFSSAAKGETLEDTIRTVEGYSDIIVMRHFESGAARKAAATANIPVINAGDGPGEHPTQALLDVYTIQSEIGKLDGISVALVGDLANGRTVRSLAYLLAKFKDVKIYFVSPEIVKMKDDIKDYLTSSGVEWEESSDLMEVASKCDVVYQTRIQRERFGERLDLYEAARGKYIVDKDLLGVMQKKAIIMHPLPRLDEITADVDADPRAAYFRQAKNGLFIRMALLKLLLVGW

SEQ ID NO: 8956 - protein, 319 aa, Arabidopsis thaliana
MQAGTRELKKFELSDVIEGKQFDREMLSAIFDVAREMEKIEKSSSQSEILKGYLKATLFYEPSTRTRLSFESAMKRLGGEVLTTENAREFSSAAKGETLEDTIRTVEGYSDIIVMRHFESGAARKAAATANIPVINAGDGPGEHPTQALLDVYTIQSEIGKLDGISVALVGDLANGRTVRSLAYLLAKFKDVKIYFVSPEIVKMKDDIKDYLTSSGVEWEESSDLMEVASKCDVVYQTRIQRERFGERLDLYEAARGKYIVDKDLLGVMQKKAIIMHPLPRLDEITADVDADPRAAYFRQAKNGLFIRMALLKLLLVGW

SEQ ID NO: 8957 - protein, 294 aa, Arabidopsis thaliana
MLSAIFDVAREMEKIEKSSSQSEILKGYLKATLFYEPSTRTRLSFESAMKRLGGEVLTTENAREFSSAAKGETLEDTIRTVEGYSDIIVMRHFESGAARKAAATANIPVINAGDGPGEHPTQALLDVYTIQSEIGKLDGISVALVGDLANGRTVRSLAYLLAKFKDVKIYFVSPEIVKMKDDIKDYLTSSGVEWEESSDLMEVASKCDVVYQTRIQRERFGERLDLYEAARGKYIVDKDLLGVMQKKAIIMHPLPRLDEITADVDADPRAAYFRQAKNGLFIRMALLKLLLVGW

SEQ ID NO: 8958 - DNA, 627 bp, Arabidopsis thaliana
tctctctcgaatctctctctataatccgatctgagaaatttcgccggagctaggttttgttgtttaccgatcaatcctttaatttgactcatatgagattgaaggtggggaaacaaagggagaaatattgcagaatctggccgagttccaattctcttgtgtgatgttcaatgcggttctggagaatgcatgtagtgagatgggagcaagaatgtctgccatggacagctcaagcagaaacgcaggagaaatgctcgaccgtctcaccctcacatacaacaggactcgtcaagcttctattacaacagagcttattgagattatctctggagcttctgctcttgaagctgctaaataagcccatccgtgttagttctcttttcttcgctttgatatttacccccaccttgaaggagaagaatgtgttaaaattttactgaatcagtttcctttgctggcttcttgttgagacctaccaatgtttgctcaacgatttttaataaacatacctgtaatttccagcaggatttcgaataattgcattaacattttgttctgattcagactcgcttcctccagagtctgtagtgttgttttgtgcaaacaccatgtactccggtttatttg

SEQ ID NO: 8959 - protein, 89 aa, Arabidopsis thaliana
MRFWRMHVVRWEQECLPWTAQAETQEKCSTVSPSHTTGLVKLLLQQSLLRLSLELLLLKLLNKPIRVSSLFFALIFTPTLKEKNVLKFY

SEQ ID NO: 8960 - protein, 84 aa, Arabidopsis thaliana
MHVVRWEQECLPWTAQAETQEKCSTVSPSHTTGLVKLLLQQSLLRLSLELLLLKLLNKPIRVSSLFFALIFTPTLKEKNVLKFY

SEQ ID NO: 8961 - protein, 64 aa, Arabidopsis thaliana
MFNAVLENACSEMGARMSAMDSSSRNAGEMLDRLTLTYNRTRQASITTELIEIISGASALEAAK

SEQ ID NO: 8962 - DNA, 1145 bp, Arabidopsis thaliana
agaacatcctaatcgaaaaaattttgggtggaatgtttacaaaaacttcttcgatcgaacacatactagagagattcaaagctctccttcgtagattcgtgtattgtacagatttgtagagaacgagagagagaggagaacaaaatggtaggcgaagaggagacgaagaagagagtagtcactgaatcgctaggatggttaacggaatcttcgattatgccaaagaagcatcgcgccatcgaaggtgttggtccttcctcaatcatggagcttaaagctcagctctataagtctcaggaagaagctaaacagacgaaggattttacgggatccgatgctcaataccatcgcgccaaggaaaggattgccgccaaagattctttcgccgcgaaaaactccggcgtcgagagtcgcaatttaaaggacaagcttgagcacaaagctgtaaaagatggagcagttagttatgccgcattggagaaaaaggctcagttgtatgataaacttgctagaggagagctttctgatgaagaaggtgaagagaagtactgtgttgacttctttaggaaaggaattcaacatgaagatccaaaaccatcaagcacttacaacagttccatttcagcaccacctgaagatttcaagcaagatggtgaagatgatggttctctttttagcaccaaatttgctggacttggacatgcaattgggacagctgatgtaggtcaacacgtgcgcatggtcagggaggttcatgaggaagtcaatcaagcgagagaaaaggcaaccgagttaaagcaaaggagacaagagcaagcaacaaatcgtcgggagaaactcaaacaagcttatcttcggaagcagctcgagaaactaaaggctcaacaacaacaacaagaagatgaacaaaaaacttgattttcgctccccaagctattgcattttgagttgcggcctgaacgcagagaagacaatgacagagttgtccaccgaacccgaatgagtaatatggctgcaacaagaacacgtaagccatcattaagggatgaagctgtatccatatgctcttaaaagcgatttatgtactgtggattgttgtcaatcaacagattctatacaaagttaccaatatatagataatcctt

SEQ ID NO: 8963 - protein, 257 aa, Arabidopsis thaliana
MVGEEETKKRVVTESLGWLTESSIMPKKHRAIEGVGPSSIMELKAQLYKSQEEAKQTKDFTGSDAQYHRAKERIAAKDSFAAKNSGVESRNLKDKLEHKAVKDGAVSYAALEKKAQLYDKLARGELSDEEGEEKYCVDFFRKGIQHEDPKPSSTYNSSISAPPEDFKQDGEDDGSLFSTKFAGLGHAIGTADVGQHVRMVREVHEEVNQAREKATELKQRRQEQATNRREKLKQAYLRKQLEKLKAQQQQQEDEQKT

SEQ ID NO: 8964 - protein, 233 aa, Arabidopsis thaliana
MPKKHRAIEGVGPSSIMELKAQLYKSQEEAKQTKDFTGSDAQYHRAKERIAAKDSFAAKNSGVESRNLKDKLEHKAVKDGAVSYAALEKKAQLYDKLARGELSDEEGEEKYCVDFFRKGIQHEDPKPSSTYNSSISAPPEDFKQDGEDDGSLFSTKFAGLGHAIGTADVGQHVRMVREVHEEVNQAREKATELKQRRQEQATNRREKLKQAYLRKQLEKLKAQQQQQEDEQKT

SEQ ID NO: 8965 - protein, 217 aa, Arabidopsis thaliana
MELKAQLYKSQEEAKQTKDFTGSDAQYHRAKERIAAKDSFAAKNSGVESRNLKDKLEHKAVKDGAVSYAALEKKAQLYDKLARGELSDEEGEEKYCVDFFRKGIQHEDPKPSSTYNSSISAPPEDFKQDGEDDGSLFSTKFAGLGHAIGTADVGQHVRMVREVHEEVNQAREKATELKQRRQEQATNRREKLKQAYLRKQLEKLKAQQQQQEDEQKT

SEQ ID NO: 8966 - DNA, 1798 bp, Arabidopsis thaliana
attcttttgagctaccgattttgccgttttcgtgcagtaatttcgagaaagcgtggaccatttctggattccaaagctgaagaagatccaaacattgtgaagatagaatccgtttactaatgttagaagcatcgaagaatgaaaatgtgctgcaagtgaaggaatgaaagtgcgttgtagttcttcgtatcacgactttggcgtgcatagactgtagatagatatcagataacaacctgtagtggaaatatgagaagacctagtcaaatgatgaggcttctattaacatcctttttcggtgttattgttggtttccttatgggtattacttttccaaccttgactttaactaagatgaatcttccatccacattgtttccctcgattgatcttgcatacattgaggataaatactctgacatatcaagacaaagactatttggttcttggtcttcgacaaaaggcctcaaactcaagaatgacatccctgaccctccatataactataatgacactaagatatgggtttcgactaacccccgtggtgctgagaggctaccaccagatatagtcacgcctgaatcagatttttacctccgtcgactgtggggcgaccctaatgaggatttaacagtcaagcagcggtatctagtaacatttacggttggctatgatcagaggaaaaatatagacactgtgttgaagaagttctcagataacttctctataatgctgtttcactacgatggccgggcagcgaatgggaagagtttgaatggtccaagcgagccattcatgtgagcattcggaaacaaacaaaatggtggtacgctaagcgatttcttcatcctgacatagttgccccctatgaatatatcttcatatgggatgaggatcttggcgtggaacactttgattcggaaaaatatctggcggtggtgaagaagcatggtttggaaatctcacagcctggattagagccatatgaagggctcacatgggagatgaccaagaaaagagacgacactgaagtccacaagcatgctgaggaaaggaatgggtggtgcactgatcccaatttacccccttgtgcagcgtttgtggagattatggctcctgttttctcccgcaaggcatggcgctgtgtgtcgcatatgattcagaacgatttgattcatggatggggtctggactttgccgttcggaaatgtgttcagaacgcacacgagaaaattggagttgtagatgctcaatggattatacatcaaggtgttccatcattagggaattaaggacaaccagagcaagggaaacaaccatgggaaggggtgagagaacgatgcaggagagagtggacaatgtttcaagacagattggatgatgctgaaaaagcttattttgaagcatctgctcacaagaatgcttcttcacggcctcacgggtaataaggaaacatatagtctctccctccgacttccactctctttgtttaccctgttaattttgttcccggagctgtgctttgatttcgtgtttatggaagagaatagtctggtcgagagaagataaattgttagcagctaagcacattcattaacatctgattagtctttcttttttcttttcttttcttaactctgttaactcttattgttgatgagaactccggtggagagtagagttagaggtagacaacaataaaaaaagggagattaactgtgatgggtaagaaattaggtgttattaccagaacacgacagaactttttttaattactgttatatttcgagtttttttt

SEQ ID NO: 8967 - protein, 183 aa, Arabidopsis thaliana
MRRPSQMMRLLLTSFFGVIVGFLMGITFPTLTLTKMNLPSTLFPSIDLAYIEDKYSDISRQRLFGSWSSTKGLKLKNDIPDPPYNYNDTKIWVSTNPRGAERLPPDIVTPESDFYLRRLWGDPNEDLTVKQRYLVTFTVGYDQRKNIDTVLKKFSDNFSIMLFHYDGRAANGKSLNGPSEPFM

SEQ ID NO: 8968 - protein, 177 aa, Arabidopsis thaliana
MMRLLLTSFFGVIVGFLMGITFPTLTLTKMNLPSTLFPSIDLAYIEDKYSDISRQRLFGSWSSTKGLKLKNDIPDPPYNYNDTKIWVSTNPRGAERLPPDIVTPESDFYLRRLWGDPNEDLTVKQRYLVTFTVGYDQRKNIDTVLKKFSDNFSIMLFHYDGRAANGKSLNGPSEPFM

SEQ ID NO: 8969 - protein, 176 aa, Arabidopsis thaliana
MRLLLTSFFGVIVGFLMGITFPTLTLTKMNLPSTLFPSIDLAYIEDKYSDISRQRLFGSWSSTKGLKLKNDIPDPPYNYNDTKIWVSTNPRGAERLPPDIVTPESDFYLRRLWGDPNEDLTVKQRYLVTFTVGYDQRKNIDTVLKKFSDNFSIMLFHYDGRAANGKSLNGPSEPFM

SEQ ID NO: 8970 - DNA, 453 bp, Arabidopsis thaliana
tcactgattattgttttaaggcaaattaagatcatcttcaaaatcttctcagatctcttccaattttctagaaaaaacatgtcttgctgtggtggaagctgtggttgtggatctgcctgcaagtgcggcaatggttgcggaggttgcaaaaggtaccctgacttggagaacaccgccaccgagactcttgtcctcggtgttgctccggcgatgaactctcagtacgaggcttccggcgagactttcgttgccgagaatgatgcctgcaaatgcggatctgactgcaagtgcaacccttgtacctgcaaatgaagaacttcataaaccctaagtctgtaataaccctaatgttatgttaggtttgcttatatgtaataattggctgatttttccggtagttttgccggcgaacaacaaccaaaaaaaaaaaaaaaaaagcttatcgataccgtc

SEQ ID NO: 8971 - protein, 103 aa, Arabidopsis thaliana
SLIIVLRQIKIIFKIFSDLFQFSRKNMSCCGGSCGCGSACKCGNGCGGCKRYPDLENTATETLVLGVAPAMNSQYEASGETFVAENDACKCGSDCKCNPCTCK

SEQ ID NO: 8972 - protein, 77 aa, Arabidopsis thaliana; identical to SEQ ID NO: 5667

SEQ ID NO: 8973 - DNA, 1569 bp, Arabidopsis thaliana
agttattcaatcctcctcttacacgtctctctctcattccccccggagtaactaacaatggcgaaaatgcccctctccgtcgtcgtcttcctcctcttctccgccgctttcctcgccgtatctatggcggagatcaaatcactcgtcatctccgatgacgctcgtccgatgatcctcttcgagaaattcggattcacacacaccggccacgtcacggtctcaatctcctccgtctccgtcgtgtccacttcctcagatccgaatccagaagcatcgcgtctcggattcttcctcctctccgaagaatctcttctccaggtcctcctcgagatccaacagaaccctagattctgcgttctagattcgcactacgtcactcatctcttcacattcagagatctatctcctcctccaaactccagattcaaccaatcttacccagtcacttccccaaacgaatactctctcttcttcgcgaattgtgtccctgaaaccaaagtttccatggcggttcgtacagagatgtataacaaagatccaaacggatctaaagactatttaccagctggatctactcaattaccaactctctactctttcttcttcctctgctacgttgctttcctcggtttctggagctacacttgctggactaacaaacaaaccgttcatcggatccatcttctcatggcaggtcttcttcttatcaaatcgttgaatctcatctgtgcagctgaagataaacattacgtgaagatcactggaacgccacatggctgggatattctcttctacatcttccaattcatccgtgttgttcttctcttcaccgtcatcatcttgatcggaactggctggtcgtttttgaaacctttcttgcaggagaaggagaagaatgtgttgatcattgtgatcccacttcaggtattagccaacattgcttccattgtcattggtgaaactggaccttttatcaaagattgggttacatggaaccaagtgtttttgcttgtggatatcatctgttgctgtgctattatcttcccgattgtttggtcgattcgatctttgagagaaacctcgaaaaccgatggtaaagctgcgaggaacttgtcgaagctcacgttgtttagacagttctacattgttgtcatcggatatctttacttcacgagaatcgtggtgtttgcgcttaaaaccattgcggcttataagtaccagtgggtgagctttgcagctgaggagattgtgagtttggtgttctatgtgatcatgtttcatatgtttaggcctgaggagaagaatgagtactttgctgttgatgatgatgaagaagaagctgctgctttggcccttagggacgaagagtttgagctttgaaaagcatacaatggaggatttttcttggtaagcaaggatttattctttttctcagtatgtctatgtttaaagtcgtctaatactgcaactgttattgttccctttttgttaaattttgttctttacatttaaattttctctgttatcaacaccttttatggctttatatcaatgtggattttggggctg

SEQ ID NO: 8974 - protein, 440 aa, Arabidopsis thaliana
MAKMPLSVVVFLLFSAAFLAVSMAEIKSLVISDDARPMILFEKFGFTHTGHVTVSISSVSVVSTSSDPNPEASRLGFFLLSEESLLQVLLEIQQNPRFCVLDSHYVTHLFTFRDLSPPPNSRFNQSYPVTSPNEYSLFFANCVPETKVSMAVRTEMYNKDPNGSKDYLPAGSTQLPTLYSFFFLCYVAFLGFWSYTCWTNKQTVHRIHLLMAGLLLIKSLNLICAAEDKHYVKITGTPHGWDILFYIFQFIRVVLLFTVIILIGTGWSFLKPFLQEKEKNVLIIVIPLQVLANIASIVIGETGPFIKDWVTWNQVFLLVDIICCCAIIFPIVWSIRSLRETSKTDGKAARNLSKLTLFRQFYIVVIGYLYFTRIVVFALKTIAAYKYQWVSFAAEEIVSLVFYVIMFHMFRPEEKNEYFAVDDDEEEAAALALRDEEFEL

SEQ ID NO: 8975 - protein, 437 aa, Arabidopsis thaliana
MPLSVVVFLLFSAAFLAVSMAEIKSLVISDDARPMILFEKFGFTHTGHVTVSISSVSVVSTSSDPNPEASRLGFFLLSEESLLQVLLEIQQNPRFCVLDSHYVTHLFTFRDLSPPPNSRFNQSYPVTSPNEYSLFFANCVPETKVSMAVRTEMYNKDPNGSKDYLPAGSTQLPTLYSFFFLCYVAFLGFWSYTCWTNKQTVHRIHLLMAGLLLIKSLNLICAAEDKHYVKITGTPHGWDILFYIFQFIRVVLLFTVIILIGTGWSFLKPFLQEKEKNVLIIVIPLQVLANIASIVIGETGPFIKDWVTWNQVFLLVDIICCCAIIFPIVWSIRSLRETSKTDGKAARNLSKLTLFRQFYIVVIGYLYFTRIVVFALKTIAAYKYQWVSFAAEEIVSLVFYVIMFHMFRPEEKNEYFAVDDDEEEAAALALRDEEFEL

SEQ ID NO: 8976 - protein, 418 aa, Arabidopsis thaliana
MAEIKSLVISDDARPMILFEKFGFTHTGHVTVSISSVSVVSTSSDPNPEASRLGFFLLSEESLLQVLLEIQQNPRFCVLDSHYVTHLFTFRDLSPPPNSRFNQSYPVTSPNEYSLFFANCVPETKVSMAVRTEMYNKDPNGSKDYLPAGSTQLPTLYSFFFLCYVAFLGFWSYTCWTNKQTVHRIHLLMAGLLLIKSLNLICAAEDKHYVKITGTPHGWDILFYIFQFIRVVLLFTVIILIGTGWSFLKPFLQEKEKNVLIIVIPLQVLANIASIVIGETGPFIKDWVTWNQVFLLVDIICCCAIIFPIVWSIRSLRETSKTDGKAARNLSKLTLFRQFYIVVIGYLYFTRIVVFALKTIAAYKYQWVSFAAEEIVSLVFYVIMFHMFRPEEKNEYFAVDDDEEEAAALALRDEEFEL

SEQ ID NO: 8977 - DNA, 1353 bp, Arabidopsis thaliana
aaaccctaaatctttttcttattcgaatctgttagccatccaaaacctctctctttgccgcaaaaaatgactagtacggagaacaacaacaacggctctgatgaaactcagacgacgaagttacacttcgaggatgctgatgaatcaatgcacgatggagatgacaacaatgccgatgttgctgatgacattaccagcgccgattactacttcgattcttactctcatttcggtattcatgaagaaatgttaaaggatgtagtgaggacaaagagttatcaagatgttatttacaagaacaagtttcttatcaaggacaaaattgttcttgatgttggagctggaactggaatcttgtctctcttctgtgctaaagcaggagcagctcacgtttacgcagttgagtgttctcaaatggctgacacaacaaaggagattgttaagtcgaatggattctcagatgttataacggttttgaaagggaagattgaggagatcgaacttccagttcctaaagtggatgtgattatctctgaatggatgggttactttctgttgtatgaaaatatgcttgacaccgtcttgtatgctcgcaataaatggcttgttgatggtggaattgttctaccagataaagcttctctttatgttactgccattgaggatgctcattataaagacgacaaagtagagttttgggacgacgtgtatgggtttgacatgtcgtgcatcaagagaagagcaattacagaaccgcttgttgacaccgttgatggtaaccaaatcgtgactgatagcaagctgctgaagacaatggatatctctaagatggctgctggagatgcttccttcacagctccgtttaagctcgtcgcacaacgaaatgaccatatccatgcccttgtagcctacttcgatgtgtcattcactatgtgtcacaagaagatgggtttctcaacaggaccgaaatcgcgggctacgcattggaaacaaactgtgctgtacctggaagatgtgttaaccatatgcgagggtgaaacaatcacaggaagcatgaccattgcacaaaacaaaaagaatcccagagacgtcgacataaagctcagctattctttgaacggccaacattgcaatatctcaaggacccacttctataagatgcgctaaaagctctcagaggatgtaaaatcccccacaagtacctttcatcatcttgaggctgagatggacaaatctcatttgtatctctactgtttccattattgctgcttatgtttcagaattagatattaaccatctctctttctctctcactgtgcgtctcttcctctatgatagtttcttgttcctctc

SEQ ID NO: 8978 - protein, 366 aa, Arabidopsis thaliana
MTSTENNNNGSDETQTTKLHFEDADESMHDGDDNNADVADDITSADYYFDSYSHFGIHEEMLKDVVRTKSYQDVIYKNKFLIKDKIVLDVGAGTGILSLFCAKAGAAHVYAVECSQMADTTKEIVKSNGFSDVITVLKGKIEEIELPVPKVDVIISEWMGYFLLYENMLDTVLYARNKWLVDGGIVLPDKASLYVTAIEDAHYKDDKVEFWDDVYGFDMSCIKRRAITEPLVDTVDGNQIVTDSKLLKTMDISKMAAGDASFTAPFKLVAQRNDHIHALVAYFDVSFTMCHKKMGFSTGPKSRATHWKQTVLYLEDVLTICEGETITGSMTIAQNKKNPRDVDIKLSYSLNGQHCNISRTHFYKMR

SEQ ID NO: 8979 - protein, 339 aa, Arabidopsis thaliana
MHDGDDNNADVADDITSADYYFDSYSHFGIHEEMLKDVVRTKSYQDVIYKNKFLIKDKIVLDVGAGTGILSLFCAKAGAAHVYAVECSQMADTTKEIVKSNGFSDVITVLKGKIEEIELPVPKVDVIISEWMGYFLLYENMLDTVLYARNKWLVDGGIVLPDKASLYVTAIEDAHYKDDKVEFWDDVYGFDMSCIKRRAITEPLVDTVDGNQIVTDSKLLKTMDISKMAAGDASFTAPFKLVAQRNDHIHALVAYFDVSFTMCHKKMGFSTGPKSRATHWKQTVLYLEDVLTICEGETITGSMTIAQNKKNPRDVDIKLSYSLNGQHCNISRTHFYKMR

SEQ ID NO: 8980 - protein, 306 aa, Arabidopsis thaliana
MLKDVVRTKSYQDVIYKNKFLIKDKIVLDVGAGTGILSLFCAKAGAAHVYAVECSQMADTTKEIVKSNGFSDVITVLKGKIEEIELPVPKVDVIISEWMGYFLLYENMLDTVLYARNKWLVDGGIVLPDKASLYVTAIEDAHYKDDKVEFWDDVYGFDMSCIKRRAITEPLVDTVDGNQIVTDSKLLKTMDISKMAAGDASFTAPFKLVAQRNDHIHALVAYFDVSFTMCHKKMGFSTGPKSRATHWKQTVLYLEDVLTICEGETITGSMTIAQNKKNPRDVDIKLSYSLNGQHCNISRTHFYKMR

SEQ ID NO: 8981 - DNA, 812 bp, Arabidopsis thaliana
tgaagttaaaagcctaaaattttggtttcaaccttctacaataaatccaaatcactaaccatgatgaagcacttgctaagcatcttcttcataggagctttgttgcttggaaacatcaaaacaagtgaagggtctttgtcttctgcacttgaaactactccaggcagcttgctatccgatctttggctagaccggttccctgatccattcaagatcttggagagaatcccattaggactcgagagggacacaagcgtggctctgtctccagcgagagtagactggaaagaaacagcagaagggcatgagataatgctcgatatccccggtttgaagaaggatgaagtaaagatagaagtggaggagaacggagttttacgagtcagtggagagaggaaaagagaagaagagaagaaaggagatcaatggcatagagttgagagatcatatggaaaattctggagacagttcaaactacctgataatgtagatatggaatcagtcaaggccaagcttgagaatggtgtgctcactattaacctcatgaaactatctcctgaaaaagtcaagggtccaagagttgttaacattgcagctgaagaagaccaaactgcaaaaatcagctcttctgaatccaaagaactctgatattgaagaaactatatattactttctgagtctgaagagagttattataaatccaagagttttgagtttcatattgtgtaagctaaatggagtgtcatgttttgtaacctatctaccaaaatctctgtaaccttctctatatgcaataaaatgttcatttcttc

SEQ ID NO: 8982 - protein, 195 aa, Arabidopsis thaliana
MMKHLLSIFFIGALLLGNIKTSEGSLSSALETTPGSLLSDLWLDRFPDPFKILERIPLGLERDTSVALSPARVDWKETAEGHEIMLDIPGLKKDEVKIEVEENGVLRVSGERKREEEKKGDQWHRVERSYGKFWRQFKLPDNVDMESVKAKLENGVLTINLMKLSPEKVKGPRVVNIAAEEDQTAKISSSESKEL

SEQ ID NO: 8983 - protein, 194 aa, Arabidopsis thaliana
MKHLLSIFFIGALLLGNIKTSEGSLSSALETTPGSLLSDLWLDRFPDPFKILERIPLGLERDTSVALSPARVDWKETAEGHEIMLDIPGLKKDEVKIEVEENGVLRVSGERKREEEKKGDQWHRVERSYGKFWRQFKLPDNVDMESVKAKLENGVLTINLMKLSPEKVKGPRVVNIAAEEDQTAKISSSESKEL

SEQ ID NO: 8984 - protein, 111 aa, Arabidopsis thaliana
MLDIPGLKKDEVKIEVEENGVLRVSGERKREEEKKGDQWHRVERSYGKFWRQFKLPDNVDMESVKAKLENGVLTINLMKLSPEKVKGPRVVNIAAEEDQTAKISSSESKEL

SEQ ID NO: 8985 - DNA, 1133 bp, Arabidopsis thaliana
aacagatcaaggatgaattagatgtgttttccaaggaagctgtgctttctgaagccaagcgcatcaaaggtctaagagcagtgtttggagaagtctaccccgatcccgtcagagtggtgtcaattgggaggaaggttgaggatctcttggctgatcctgaaaacaatgaatggtcattgctttcttccgagttttgtggaggaacccacataacaaacacccgcgaagccaaagcatttgctcttctatcggagaagggaattgctaaaggtattcgtagggtaactgctgtgactactgaatgtgcttttgatgcattgaatgcggcgtccttacttgaaagagaagtagaggatgcctccagagcggagggaagtgcattggaaaagaaagtttctgctttgaaaagccgagtagatgcagcaattatcccagcagctaaaaaggcagatattaggactaagattgcttcgcttcagaatgaagtaagaaaagctcagaagaaaatagcggaacaaaacctgaaaaaatctgtcaaattagcaacagaggcagctgagtccgcagcatcagatgggaagactttctgcataatccagctggatgtgggtcttgatgcagcagctgtgcgagaggccgtttcaaaagtcatggaaaagaagggtatgtcgataatggtgttcagcacagatgaaagcacaaacaaggcggttgtgtgtgcaggagtgccagaaaaatcagaccagtttaagccgttagacgtcactgaatggttgacaactgcattgggtcctctaaaaggaaggtgcgggaaagggaaaggtggtcttgcatcagggcagggaacggatgcttctcaagtgcaggcggctttggatatggcttcatcatttgcatcaatgaagctcaactgatttggtcgggaggttacataatctgtgaggtcagaataacctctacttaatttgctttcattgtacaccgttttacacatgttttaagaatctgttaaatttctctgttcttgtgatggaatttgtggtatgacactcttttagtcaaagttaccaatggctgttataattccttgtgaaatgatcctttcccgtttgcgttgaaatggttattttttt

SEQ ID NO: 8986 - protein, 303 aa, Arabidopsis thaliana
QIKDELDVFSKEAVLSEAKRIKGLRAVFGEVYPDPVRVVSIGRKVEDLLADPENNEWSLLSSEFCGGTHITNTREAKAFALLSEKGIAKGIRRVTAVTTECAFDALNAASLLEREVEDASRAEGSALEKKVSALKSRVDAAIIPAAKKADIRTKIASLQNEVRKAQKKIAEQNLKKSVKLATEAAESAASDGKTFCIIQLDVGLDAAAVREAVSKVMEKKGMSIMVFSTDESTNKAVVCAGVPEKSDQFKPLDVTEWLTTALGPLKGRCGKGKGGLASGQGTDASQVQAALDMASSFASMKLN

SEQ ID NO: 8987 - DNA, 1925 bp, Arabidopsis thaliana
ctcctccatttttgctacatttttttttctttgattaaaaacattttttctatttttcgttttttgctatttccttgtaacttaaaagaagaaaaaatgagaggtagcggagcaaagatcgccggcgttttgccgttgtttatgctattcatcgccggaacaatctccgcctttgaagacatagagaggttgaggatttggccgttaccggcacaagttagccacggtggccggagaatgtatctaagtggagatttcaagcttgttacggagggaagcaaatatggagacgcctcagggattttgaaagaaggatttgatagaatgcttggtgttgtgaggctgagccacgtcatctccggtgaccggaattcttcaggcaccggtggatctgctttgcttcagggacttcacgtcatcatctcctcctctaccgatgagttggaatatggagcagacgagtcgtacaaattagtggttccatctccagagaagccgtcttatgcacaacttgaggccaagagtgtttatggtgcattgcacggtctacagacatttagccagttatgtcattttaatttgaagaaaaaggtcatagagattctaatgactccatggaatatcatagaccagcctagattctcttaccgtggccttttaatcgatacatcccgacattatttgccacttccggttataaagaacgtgattgattccatgacatatgccaaacttaatgtgttacattggcacattgtggatacacaatcatttcctttagagataccttcttacccaaagctatggaacggcgcttactcttcctctcagcgatacaccttcgaagacgctgctgaaatcgtcaattatgctcggcgacgagggatccatgtcttggctgagattgatgttccaggacatgctctctcatggggaaagggatatcctgccttgtggccctccaagaattgtcaagaaccacttgacgtgagcagtgacttcacattcaaagtcattgatggcattctctctgatttcagcaagatctttaagtttaaatttgtccacttgggtggtgatgaagtaaatacaacttgttggtctgcaacaccgcgaatagcccaatggcttaaaaaacatcggatgagtgaaaaagaagcctatcaatatttcgtgttgcgggcgcaaaaaatcgccttgtctcacggatatgaaattatcaactgggaagagaccttcatcaattttggaagcaaattaaaccggaaaaccgtggttcacaactggcttaacacaggacttgttgagaatgtgactgcgtccggtttaaggtgtatagttagtaaccaagaattttggtatttggatcatatagacgcaccttggcaaggcttttacgcaaacgagccatttcaaaacataacggataaaaagcaacaaagtctagtacttggtggcgaggtttgcatgtggggtgaacatattgatgcttctgacattgaacaaaccatttggcctcgcgctgccgcagctgcagagcggttgtggacaccctatgcaaaattggctaaaaatcccaacaatgtaacgacgaggttggctcacttcagatgtctattgaatcaaagaggagttgcagctgcacctttggttggtggcggacgagttgtgccttttgaaccaggttcttgtctcgctcagtgattcgaaagattagcattgtagaatatattacagtcagcaacaccttggtcaattcaggttgaaatgaacccctacaaaaaagggatactttgaatttttttcttggttgattttttagtggtagaaatattccttcttacaatttgggaataattgttgcaacattcatgtataaaaggccttaccaatttcaggcttgaataagaatacatagtttgcac

SEQ ID NO: 8988 - protein, 567 aa, Arabidopsis thaliana
LLHFCYIFFSLIKNIFSIFRFLLFPCNLKEEKMRGSGAKIAGVLPLFMLFIAGTISAFEDIERLRIWPLPAQVSHGGRRMYLSGDFKLVTEGSKYGDASGILKEGFDRMLGVVRLSHVISGDRNSSGTGGSALLQGLHVIISSSTDELEYGADESYKLVVPSPEKPSYAQLEAKSVYGALHGLQTFSQLCHFNLKKKVIEILMTPWNIIDQPRFSYRGLLIDTSRHYLPLPVIKNVIDSMTYAKLNVLHWHIVDTQSFPLEIPSYPKLWNGAYSSSQRYTFEDAAEIVNYARRRGIHVLAEIDVPGHALSWGKGYPALWPSKNCQEPLDVSSDFTFKVIDGILSDFSKIFKFKFVHLGGDEVNTTCWSATPRIAQWLKKHRMSEKEAYQYFVLRAQKIALSHGYEIINWEETFINFGSKLNRKTVVHNWLNTGLVENVTASGLRCIVSNQEFWYLDHIDAPWQGFYANEPFQNITDKKQQSLVLGGEVCMWGEHIDASDIEQTIWPRAAAAAERLWTPYAKLAKNPNNVTTRLAHFRCLLNQRGVAAAPLVGGGRVVPFEPGSCLAQ

SEQ ID NO: 8989 - protein, 535 aa, Arabidopsis thaliana
MRGSGAKIAGVLPLFMLFIAGTISAFEDIERLRIWPLPAQVSHGGRRMYLSGDFKLVTEGSKYGDASGILKEGFDRMLGVVRLSHVISGDRNSSGTGGSALLQGLHVIISSSTDELEYGADESYKLVVPSPEKPSYAQLEAKSVYGALHGLQTFSQLCHFNLKKKVIEILMTPWNIIDQPRFSYRGLLIDTSRHYLPLPVIKNVIDSMTYAKLNVLHWHIVDTQSFPLEIPSYPKLWNGAYSSSQRYTFEDAAEIVNYARRRGIHVLAEIDVPGHALSWGKGYPALWPSKNCQEPLDVSSDFTFKVIDGILSDFSKIFKFKFVHLGGDEVNTTCWSATPRIAQWLKKHRMSEKEAYQYFVLRAQKIALSHGYEIINWEETFINFGSKLNRKTVVHNWLNTGLVENVTASGLRCIVSNQEFWYLDHIDAPWQGFYANEPFQNITDKKQQSLVLGGEVCMWGEHIDASDIEQTIWPRAAAAAERLWTPYAKLAKNPNNVTTRLAHFRCLLNQRGVAAAPLVGGGRVVPFEPGSCLAQ

SEQ ID NO: 8990 - protein, 520 aa, Arabidopsis thaliana
MLFIAGTISAFEDIERLRIWPLPAQVSHGGRRMYLSGDFKLVTEGSKYGDASGILKEGFDRMLGVVRLSHVISGDRNSSGTGGSALLQGLHVIISSSTDELEYGADESYKLVVPSPEKPSYAQLEAKSVYGALHGLQTFSQLCHFNLKKKVIEILMTPWNIIDQPRFSYRGLLIDTSRHYLPLPVIKNVIDSMTYAKLNVLHWHIVDTQSFPLEIPSYPKLWNGAYSSSQRYTFEDAAEIVNYARRRGIHVLAEIDVPGHALSWGKGYPALWPSKNCQEPLDVSSDFTFKVIDGILSDFSKIFKFKFVHLGGDEVNTTCWSATPRIAQWLKKHRMSEKEAYQYFVLRAQKIALSHGYEIINWEETFINFGSKLNRKTVVHNWLNTGLVENVTASGLRCIVSNQEFWYLDHIDAPWQGFYANEPFQNITDKKQQSLVLGGEVCMWGEHIDASDIEQTIWPRAAAAAERLWTPYAKLAKNPNNVTTRLAHFRCLLNQRGVAAAPLVGGGRVVPFEPGSCLAQ

SEQ ID NO: 8991 - DNA, 1569 bp, Arabidopsis thaliana
acctctctctttctttctctaacttcttcttcttctcctttcagaaacccagcgaccatcttcttcaccggttatggtgacttcggagggattagcaagcgttgattcttggttatatcgccaaggtttcaacgttgattcatggttgctttctgataccttctctcacgacaacgatttgctcgcaagagctctccataccaccgtcacagcccctcatactctcactccttcctctgctttcttcgattcctccgctgtttctcacccttcttccactaacacactctcctctaccgtctccggtgcttctgatccagaaatcatcggcggaggagctaaacggaaacgtaactgccttcttaccgacggtaaagccgccaagcgccgcgctcgtgcttccaagaaatctcagactactttcataacggcggatccgtccaactttcgtcagatggttcagcaagtgactggcgccaagtacatcgatgactcttcttcctttggtattttcgatccgattgtcaagccggagccgcttaggttcgttaacaaactgccttgtggtccttcggatcgatccacggcggttccaatgctcgacacatcagcatttttgtctaatcatcaccaggagaatctcgcagtgggaaatgctttctccggtaacagcagcagtgtaggattaccgtcggggaagccaagtgcaacggccgaccccggtggttctgccgtggagtttgataattacccaacatttccaacgcttgaatcgtggaaggttatgtgatctgtttctttcagtcttagacgtaatctttaactttttaggtttgttttctttgcatcccttcatgaataatcttgttcatagtttttgtttatcgatgtaatggaaacaaagagatttactttcaacattatggaagattcaagatcgataagatatggcgggacgacatcttaccttgtcgtctctatctaagacactgtgtgttggctgctaagaatctgggagatgaagcttataataactttctggatcatacattcttgggagatcgaaaaacaaccatcagagagtatttaagcagcacagggtctggtatcatggaagaagaaccaccggaggctctaaagtctagatatggaggttgatcaaaaaccaacaaaaaaagttaaactgatttttatcaagcttcaaacgttttcgaagctagttttaaaattaaggaaacaaaaatcccccaatgtcccccctcgggagttttagagaagggtagcgtttttttggggtatataagagaaagagttttgtcatattatgtaacccctttctgtcagaggggaaggatgatccctcaatgatcgtttagagacggcggatcgtgccgccccagaattttgcgaacataattttcaaggggagggggccttgcctttaaaaaaaaaaaaaaaaaaaaaaaaaaaaaaaaaaaaaaaaaaaaaaaaaaaaaaaaccaaaaaaaaaaaaaaaaaagcttatcgataccgtcgacctcgagggggggcccggtacccaattcgggg

SEQ ID NO: 8992 - protein, 238 aa, Arabidopsis thaliana
MVTSEGLASVDSWLYRQGFNVDSWLLSDTFSHDNDLLARALHTTVTAPHTLTPSSAFFDSSAVSHPSSTNTLSSTVSGASDPEIIGGGAKRKRNCLLTDGKAAKRRARASKKSQTTFITADPSNFRQMVQQVTGAKYIDDSSSFGIFDPIVKPEPLRFVNKLPCGPSDRSTAVPMLDTSAFLSNHHQENLAVGNAFSGNSSSVGLPSGKPSATADPGGSAVEFDNYPTFPTLESWKVM

SEQ ID NO: 8993 - DNA, 1254 bp, Arabidopsis thaliana
attccatcaatttctcatccttgttgttttcttcttcttcttcttcctcttcttttatgtccatcgccgtcgaagtttctccggtaatggaagacatcacacggcagagcaaaaaaacttcggttgagaatgaaaccggcgatgatcagtcagcaacatcagtagtccttaaagctaaacgcaaacgccgatcgcaaccacgagacgctccaccccaacgtagctccgtccatagaggcgtcacaaggcatcgatggactggaaggtacgaagcacatttgtgggataagaatagttggaacgaaactcagaccaagaaaggaagacaagtatatttaggggcatatgacgaggaagatgcagcagcacgtgcctacgacttagcagcattgaaatattggggacgagacaccatcttgaacttccctttgtgtaattatgaagaagacatcaaagaaatggaaagccagtcaaaggaagagtatattggatctttgagaagaaaaagtagtgggttttcacgaggtgtatcaaaatacagaggcgttgcaaagcatcaccacaatgggagatgggaagctcgaatcggaagagtgtttggcaataaatatttataccttggaacttacgcgacgcaagaagaagcagctatagcgtacgatatcgcagctatcgagtaccgtggactcaacgccgttactaacttcgacatcagccgttatctgaaactcccggtgccggagaaccctatcgataccgcgaataatctcctcgagagtccgcattctgatcttagcccatttataaaacctaaccacgagtctgacttatcacagagtcaatcttcgtcagaggacaacgatgatcggaaaacaaagctcttgaagtcgtcacctttagtggcagaggaggtaatcggaccatcgacgccacctgagattgctccgcctcgtcggagcttcccggaagatatccagacgtatttcgggtgtcaaaactccggcaagttaacggcggaggaagatgatgttatcttcggtgatttagattctttccttacgcctgatttctacagcgagttaaatgattgctaaagtgttgttcttctgataagttttgttttttagttgttcagaatctcggttgtgaaaatcaacattgacacatcgattattctttcttgtgacaatcttatataataaagtttgaatctttctaaaaaaaaaaaaaaaaaagcttatcgataccgtcgac

SEQ ID NO: 8994 - protein, 363 aa, Arabidopsis thaliana
SINFSSLLFSSSSSSSSFMSIAVEVSPVMEDITRQSKKTSVENETGDDQSATSVVLKAKRKRRSQPRDAPPQRSSVHRGVTRHRWTGRYEAHLWDKNSWNETQTKKGRQVYLGAYDEEDAAARAYDLAALKYWGRDTILNFPLCNYEEDIKEMESQSKEEYIGSLRRKSSGFSRGVSKYRGVAKHHHNGRWEARIGRVFGNKYLYLGTYATQEEAAIAYDIAAIEYRGLNAVTNFDISRYLKLPVPENPIDTANNLLESPHSDLSPFIKPNHESDLSQSQSSSEDNDDRKTKLLKSSPLVAEEVIGPSTPPEIAPPRRSFPEDIQTYFGCQNSGKLTAEEDDVIFGDLDSFLTPDFYSELNDC

SEQ ID NO: 8995 - protein, 345 aa, Arabidopsis thaliana
MSIAVEVSPVMEDITRQSKKTSVENETGDDQSATSVVLKAKRKRRSQPRDAPPQRSSVHRGVTRHRWTGRYEAHLWDKNSWNETQTKKGRQVYLGAYDEEDAAARAYDLAALKYWGRDTILNFPLCNYEEDIKEMESQSKEEYIGSLRRKSSGFSRGVSKYRGVAKHHHNGRWEARIGRVFGNKYLYLGTYATQEEAAIAYDIAAIEYRGLNAVTNFDISRYLKLPVPENPIDTANNLLESPHSDLSPFIKPNHESDLSQSQSSSEDNDDRKTKLLKSSPLVAEEVIGPSTPPEIAPPRRSFPEDIQTYFGCQNSGKLTAEEDDVIFGDLDSFLTPDFYSELNDC

SEQ ID NO: 8996 - protein, 335 aa, Arabidopsis thaliana
MEDITRQSKKTSVENETGDDQSATSVVLKAKRKRRSQPRDAPPQRSSVHRGVTRHRWTGRYEAHLWDKNSWNETQTKKGRQVYLGAYDEEDAAARAYDLAALKYWGRDTILNFPLCNYEEDIKEMESQSKEEYIGSLRRKSSGFSRGVSKYRGVAKHHHNGRWEARIGRVFGNKYLYLGTYATQEEAAIAYDIAAIEYRGLNAVTNFDISRYLKLPVPENPIDTANNLLESPHSDLSPFIKPNHESDLSQSQSSSEDNDDRKTKLLKSSPLVAEEVIGPSTPPEIAPPRRSFPEDIQTYFGCQNSGKLTAEEDDVIFGDLDSFLTPDFYSELNDC

SEQ ID NO: 8997 - DNA, 1173 bp, Arabidopsis thaliana
aaaacagagcaagcaaaaaccctttaatcattcattcagtcaccaaatctcttgttctgtttttctgtctctctgcttcagtgttcttcgcggcctttaccagtttttcagttctttgacgagcttctttcattggtcctgaactcagggttagagcagcatttgcatatatacaaggtgttttggtgacaattgatagactctaagatgggttctgggaatttgattaaggcaataattagattgaagaagagtaaacaaggaactgaaaagaaaaaactagtgctgtgaaaccaaaaaaaggttccaagaagaagggtacatcactagttactcgtagtgaggattgggctgctactcggattcagactgcttttaaagcctataaggctagaaaaagcttacggcgtctaaaaggaattgcaagagcaaagttatcaactgagaaacaatctgtgaagaaccaagctgtggtcacattgaggtatcttcactcatggagtaaaatacagtcagagataaaggctcgccgagtttgcatggtaaccgaatggcgactgaagaataaaagattagagcatcagcaaaagcttgaggcaaagcttcatgatgttgaggttgaatggaatggtgggtcagagacaaaagatgaaatcttggagaggatacttcaaagggaagaagcgacgattaagcgagaaagagccttggcatatgctttctctcatcagtggaaagctgatggtaagactcagtggttgggaagttatgagctaggaaacactaattggggttggagctggaaagagcgttggatatctgctcggccttgggaagtaagatattcagtgactcctaagaaaccaaagagctcaaagacagactcaaattcaccagcaaagagaacagtgtcattatcatcagttccagccaaaactccgtttcctggagctagaaacacagtgaaaccgcggagattgtcatttccaggtgcttgaagtgaagttaaactttgtttgcatctaaagagtatacacgtacacttgaagatttgagggtatatttatttggtctatgttctgtctctggtgtgatgtaaatacatgtatttgttatgtaggcaacgacctttgtgatttttcgtttgttttaatacatgctactgtttgtctc

SEQ ID NO: 8998 - protein, 152 aa, Arabidopsis thaliana
MVTEWRLKNKRLEHQQKLEAKLHDVEVEWNGGSETKDEILERILQREEATIKRERALAYAFSHQWKADGKTQWLGSYELGNTNWGWSWKERWISARPWEVRYSVTPKKPKSSKTDSNSPAKRTVSLSSVPAKTPFPGARNTVKPRRLSFPGA

SEQ ID NO: 8999 - DNA, 1246 bp, Arabidopsis thaliana
gatctctctctctctctctccaccggcgtttcccattgattagtttctctctctcttttcctttgtctccagagccgatgataaacgacggcggttttcaccggaactgagggaaattaagctggtaaacatggcgggtgaagatgtttcaagcaatttccgagctttggtggagaacgcagaccggaaattcgcaagagttcgcgatcttccggcgtttggaagagcacagagtcattacttccaaaaggtgttcaaagcttatatgaaactatggaactatcagcaatctcataggtcaaagctggtcgagtccggtttaaaccgatgggaaatcggcgagatcgcgagccggattggtcagctttactttagtcaatacatgaggactagtgaagctaggtttcttcttgaggcttttgttttctatgaagcgattttgaaaaggagctactttgatgaagctcaggggaaagatcttggtgctcgatttaaggagttacgcttctatgccaggtttctgcttgtttcgttgattgttgatcggaaacaaatgcttttgcacttagctgacaagcttaggcttttggttgatcacagcatatccaattttagggagacaaactttaaggagtggaggctagttgtgcaagaaatcactcgctttatagaatctgatacaaatttaacttatctcaggcctctacgttactgtgcaatgcttgattcatatccagcttctcaaacttatcttgcgcgcttccacgctaagaaattgtttaagtttcgtgatgctctcttggcaagttatcaccgtaatgaggtgaaatatgctgaagtgacgttggatacgtatagaatgatgcagtgtttagaatgggaacccagtggatctttttaccaaaaaaagcctgttgaagccaaggagaatgggtttgtggttgatcatactttaacttctgggcttatagatatgaacttggctgctgatatggctgatccatcattacctcctaatcctaggaaagctattctttatcgtcccacagtatcacacttactagcggtcttggcaatgatttgtgatgagctctctccagagactgtgatgctgttatatttgtcagcttcaggtggtcctgctcgtgaaaatgttgcgcaaccagagaactctgtcggttcaagcagaacatcaaaaagcaagctgcttgcccgagcttcccaagaacagagtcttattgaagcc

SEQ ID NO: 9000 - protein, 372 aa, Arabidopsis thaliana
MAGEDVSSNFRALVENADRKFARVRDLPAFGRAQSHYFQKVFKAYMKLWNYQQSHRSKLVESGLNRWEIGEIASRIGQLYFSQYMRTSEARFLLEAFVFYEAILKRSYFDEAQGKDLGARFKELRFYARFLLVSLIVDRKQMLLHLADKLRLLVDHSISNFRETNFKEWRLVVQEITRFIESDTNLTYLRPLRYCAMLDSYPASQTYLARFHAKKLFKFRDALLASYHRNEVKYAEVTLDTYRMMQCLEWEPSGSFYQKKPVEAKENGFVVDHTLTSGLIDMNLAADMADPSLPPNPRKAILYRPTVSHLLAVLAMICDELSPETVMLLYLSASGGPARENVAQPENSVGSSRTSKSKLLARASQEQSLIEA

SEQ ID NO: 9001 - protein, 327 aa, Arabidopsis thaliana
MKLWNYQQSHRSKLVESGLNRWEIGEIASRIGQLYFSQYMRTSEARFLLEAFVFYEAILKRSYFDEAQGKDLGARFKELRFYARFLLVSLIVDRKQMLLHLADKLRLLVDHSISNFRETNFKEWRLVVQEITRFIESDTNLTYLRPLRYCAMLDSYPASQTYLARFHAKKLFKFRDALLASYHRNEVKYAEVTLDTYRMMQCLEWEPSGSFYQKKPVEAKENGFVVDHTLTSGLIDMNLAADMADPSLPPNPRKAILYRPTVSHLLAVLAMICDELSPETVMLLYLSASGGPARENVAQPENSVGSSRTSKSKLLARASQEQSLIEA

SEQ ID NO: 9002 - protein, 288 aa, Arabidopsis thaliana
MRTSEARFLLEAFVFYEAILKRSYFDEAQGKDLGARFKELRFYARFLLVSLIVDRKQMLLHLADKLRLLVDHSISNFRETNFKEWRLVVQEITRFIESDTNLTYLRPLRYCAMLDSYPASQTYLARFHAKKLFKFRDALLASYHRNEVKYAEVTLDTYRMMQCLEWEPSGSFYQKKPVEAKENGFVVDHTLTSGLIDMNLAADMADPSLPPNPRKAILYRPTVSHLLAVLAMICDELSPETVMLLYLSASGGPARENVAQPENSVGSSRTSKSKLLARASQEQSLIEA

SEQ ID NO: 9003 - DNA, 694 bp, Arabidopsis thaliana
cataagtctctctcttacattttgaaaccctaatttctcaaaaaaatgtctgaagttgagtaccggtgctttgtcggcggccttgcctgggccaccaatgatgaagatcttcaaaggacgttctcacagttcggcgacgttatcgattctaagatcattaacgaccgcgagagtggaagatcaaggggattcggattcgtcaccttcaaggacgagaaagccatgagggatgcgattgaagagatgaacggtaaagagctcgatggacgtgtcatcaccgtgaacgaggctcagtcgagaggtagcggcggtggcggaggaggccgtggtggaagcggtggtggttaccgcagcggaggcggtggtggatactcaggaggcggtggcggcggatactcaggaggaggcggtggtggttacgagagacgtagcggaggttacggatctggtggaggcggtggtggccgaggatacggtggtggtggacgccgtgagggaggtggctacggaggcggtgatggtggaagttacggcggcggtggtggcggctggtaatcaaagatagagttgtttgcgtgctgctgctctgtttttggtttagatttggatttgtgtcaccacttctggtttggttatcgttcgtttggtttacttttttgatgaaacagttttatcgataccgtcgacctcgagg

SEQ ID NO: 9004 - protein, 169 aa, Arabidopsis thaliana
MSEVEYRCFVGGLAWATNDEDLQRTFSQFGDVIDSKIINDRESGRSRGFGFVTFKDEKAMRDAIEEMNGKELDGRVITVNEAQSRGSGGGGGGRGGSGGGYRSGGGGGYSGGGGGGYSGGGGGGYERRSGGYGSGGGGGGRGYGGGGRREGGGYGGGDGGSYGGGGGGW

SEQ ID NO: 9005 - protein, 110 aa, Arabidopsis thaliana; identical to SEQ ID NO: 1304

SEQ ID NO: 9006 - protein, 103 aa, Arabidopsis thaliana; identical to SEQ ID NO: 1305

SEQ ID NO: 9007 - DNA, 818 bp, Arabidopsis thaliana
atgttacagtcttcatttattcgcgtaaagatttcaaaaagtagtgaatatattcttgtaggaagctgcaggggttaaggagagaaaagagatggtgaaactgagagaaacagaagtgatcctgagactctgcatcgtcttttttcttctcctcacttcttgtttgatcggtttggattctcagaccaaagagattgcttatatccacaagaacgtcagtttcagatatttgttagctctcgaggctgagttatacatagatgttgtggttgctgcgtataatttggttcaactagggcttggttggtacaatgttgaacaaaagacctccaatcccaaatggttctcttacctcttggatcagacggcggcatacgtggttttcgccgggacatcagccgcggcgcaacactcattgctagtggtgacgggttcaagggagcttcagtggatgaaatggtgctacaagttcacaaggttctgttttcagatgggaagtgccatcatcttaaactacattgcggcagctctcatggtcctcctctcttccatctccgccttcaacctcttccgtctctattcccctaaacgtttttttcgctttaagtcatcctcctaattaactactgtgggagtcatttcttaatctgaaataatgttgatcaatgtgaagtaaatggctgaaaaattgatttgtgtgatcttccactatgaacaataaatatcatcagtctattgcttgagaaaaaaatataggtgtctcagtgtatgtacgtatgtaaacttatttttgtctaaaactaataacttttccttgc

SEQ ID NO: 9008 - protein, 175 aa, Arabidopsis thaliana
MVKLRETEVILRLCIVFFLLLTSCLIGLDSQTKEIAYIHKNVSFRYLLALEAELYIDVVVAAYNLVQLGLGWYNVEQKTSNPKWFSYLLDQTAAYVVFAGTSAAAQHSLLVVTGSRELQWMKWCYKFTRFCFQMGSAIILNYIAAALMVLLSSISAFNLFRLYSPKRFFRFKSSS

SEQ ID NO: 9009 - DNA, 1063 bp, Arabidopsis thaliana
cctaatcgaaaagttttgttctttcatagtcttctagatctgtagtttttttccgcgaccgcccaaaaaattctctgatcagacggtcgattggatcggagatttaaggtaaagaaaaaatggcgcaacaatcgttgatctacagtttcgtagctcgccacggtgatcctcgttgagttcactgatttcaaaggtaatttcacctcaatcgctgctcagtgcctccagaagcttccgtcttcgaacaacaagttcacctacaactgcgacggtcataccttcaattaccttgtcgaagatggattcacctattgtgttgttgcggttgattctgctgggaggcaaattcccatgtcctttttggaaagagtaaaagaagattttaacaagcgatatggtggtggaaaagctgcaactgctcaagcaaacagcttgaataaggagtttggctctaaactgaaagagcatatgcagtattgcatggatcatcctgatgagattagcaagcttgctaaggtgaaggcgcaagtgtcagaagttaagggtgtaatgatgaaaacattgagaaggttcttgaccgtggtgagaaaattgagcttttggtggacaaaaccgaaaatcttcgctcacaggcacaagatttcagaacaacaggaacgcagatgagaagaaagatgtggcttcagaacatgaagataaaactcatagtgctcgccatcattatcgcactgattctcatcatcgtgctctcagtttgccatgggtttaagtgttaagcccagaaaattcaaaacttctgagatctttctcactcggtacatcgtagtgccttctcttttattgttcgatcttcaatctaatgtttctgcttgaattggttttgtatagatagacatatatgtatgctactcatttgctatattgcttgcatctgatgacattgatcccttgcgaaccagtcagtacttgacaagagatccgaaactattaaatgattttgttgactgaagattgcattgtggtggtgatgataaaaatttgagattgtattgacgattaaaat

SEQ ID NO: 9010 - protein, 104 aa, Arabidopsis thaliana
MSFLERVKEDFNKRYGGGKAATAQANSLNKEFGSKLKEHMQYCMDHPDEISKLAKVKAQVSEVKGVMMKTLRRFLTVVRKLSFWWTKPKIFAHRHKISEQQERR

SEQ ID NO: 9011 - protein, 65 aa, Arabidopsis thaliana
MQYCMDHPDEISKLAKVKAQVSEVKGVMMKTLRRFLTVVRKLSFWWTKPKIFAHRHKISEQQERR

SEQ ID NO: 9012 - protein, 61 aa, Arabidopsis thaliana
MDHPDEISKLAKVKAQVSEVKGVMMKTLRRFLTVVRKLSFWWTKPKIFAHRHKISEQQERR

SEQ ID NO: 9013 - DNA, 2716 bp, Arabidopsis thaliana
atggagaagacacagatgcctgtagcccgagaagagaagatactggttctcgtgagattgaggcctctaaaccagaaagagattgccgctaatgaagctgcggattgggaatgtatcaatgataccaccatattgtacagaaacacattgcgcgaaggctcgaactttccttctgcatattcatttgataaagtctaccgaggtgaatgtcccaccagacaagtttacgaggatggaaccaaggaaatcgctctgtctgttgtcaaaggaatcaattgtagtattttcgcatatggccagacgagtagtggaaagacatacaccatgactggtattactgagtttgctgtggctgatatatttgactatatatttcagcatgaagaaagggcgttttccgtgaagttttcagctatagagatctacaatgaggccatacgagatctgcttagctcggatggtacatcactgaggctacgagacgatcctgagaaagggacagttgttgaaaaagccacagaggaaactctgcgagactggaaccatctgaaggaacttctatctatttgtgaaggtaaaactcaaaaaacatgttttctgaaaagtaaacttacatgcttctacattttcgcagcacagcgtaagataggtgaaacctcattgaatgagagaagttccagatctcatcaaatgatcagactgaatttcatcgatctagcaggaagcgagcgtgcttcacaagctatgtcagctggtacaagactcaaggaaggctgccatatcaatagaagtttgctgactcttggaacagtgatccgtaaacttagtaagggaagacaagggcacatcaactttagagactcgaagctcacacgaattctacagccatgcttggggggtaatgcaagaacagctatcatctgcactctgagcccagcaaggagtcatgtagagctaacgaagaacactctcttgtttgcgtgttgtgcaaaggaagtcaccacaaaggcgcggatcaatgttgttatgtcagacaaggctctgctaaagcaactacagcgtgagcttgcgaggctcgagactgagctgagaaaccctgcctcctcacctgcctcaaactgtgattgtgcaatgacggtgaggaagaaagatcttcagatacaaaagatggaaaaggagatcgcagagttgagaaaacagagggatcttgctcaatcccggcttgaagatttcatgagaatgattgaacacaatgtggcgtcaaagcctggaactccacatttcggcaaccacacagacaagtgggaggatggttcagtatcggagacatcaggcgtggtcgattcagacagaaggagttttatatcagatggaatgtctacaccgctgtcaatatcaagagcttatgttcattctcactctgacgatgatgatctggatgaagacttgcctaggcgttcggaagatctatcagaagaatattgcagagaagttcaatgcattgagactgaggaatcagtcacagtctataataacaagaaagacaagagagcagaacctgaaaacgttttaggctgtggtgaggatgctaatggtgaaacgagtgtaagccagaacgtcagggtgagaagttggaaccgcagagagactgtgtcaggcccgagcactccgcctgaaaacatagggacaggtttcctcggaagaccagagagtcacaagattgcgtttcctgatttagagttcggttctactgtatcgaggaatgattctatgtcttcttgcgggagcgattccacagggactcagagcatcagaacgccgttgggagaagagggtggtattactagtatccggactttcgttgaagggcttaaagagatggctaagcgtcaaggcgaggtctcaaatgctgaggattctggtaaaatgaggagggacattggtctggactccatggacagagaatttgagagacagcggcaagagattctggagctatggcaaacttgtaacatctctttggtgcatagaacatacttttacttgctcttcaaaggagatgaggcggattcaatctacatcggagtagagctaagaagacttttgtttatgaaagatagcttctctcagggaaaccaagcattggaaggaggagaaaccttaacattggcctcaagccggaaagagcttcacagggagagaaagatgctgagcaagcttgtggggaaaaggttttcaggagaagagaggaaaagaatctaccacaagtttgggattgcgattaactccaaacgcaggcggttacaacttgtgaatgagctctggagcaatcccaaggacatgactcaggttatggaaagcgcagatgttgtagcgaagcttgtgaggttcgctgagcaaggcagagccatgaaggagatgtttggtctgaccttcacacctccttcgttcttgacaactcggagatcgcatagttggagaaaaagcatgcctgcacttttctaacttctgtttggtccaatgacattttacttttgggtttcttgtagcagaagccatgtcttgtatatcttcttggtgtcatttcatttcctctgtcttttgatttttcaaaacagacaatgttgtaattgaatttttcttttccatcaaattcttttctttttacccgtaaaaattgttattaatgttatgaaaactcataatattttgaccc

SEQ ID NO: 9014 - protein, 834 aa, Arabidopsis thaliana
MEKTQMPVAREEKILVLVRLRPLNQKEIAANEAADWECINDTTILYRNTLREGSNFPSAYSFDKVYRGECPTRQVYEDGTKEIALSVVKGINCSIFAYGQTSSGKTYTMTGITEFAVADIFDYIFQHEERAFSVKFSAIEIYNEAIRDLLSSDGTSLRLRDDPEKGTVVEKATEETLRDWNHLKELLSICEGKTQKTCFLKSKLTCFYIFAAQRKIGETSLNERSSRSHQMIRLNFIDLAGSERASQAMSAGTRLKEGCHINRSLLTLGTVIRKLSKGRQGHINFRDSKLTRILQPCLGGNARTAIICTLSPARSHVELTKNTLLFACCAKEVTTKARINVVMSDKALLKQLQRELARLETELRNPASSPASNCDCAMTVRKKDLQIQKMEKEIAELRKQRDLAQSRLEDFMRMIEHNVASKPGTPHFGNHTDKWEDGSVSETSGVVDSDRRSFISDGMSTPLSISRAYVHSHSDDDDLDEDLPRRSEDLSEEYCREVQCIETEESVTVYNNKKDKRAEPENVLGCGEDANGETSVSQNVRVRSWNRRETVSGPSTPPENIGTGFLGRPESHKIAFPDLEFGSTVSRNDSMSSCGSDSTGTQSIRTPLGEEGGITSIRTFVEGLKEMAKRQGEVSNAEDSGKMRRDIGLDSMDREFERQRQEILELWQTCNISLVHRTYFYLLFKGDEADSIYIGVELRRLLFMKDSFSQGNQALEGGETLTLASSRKELHRERKMLSKLVGKRFSGEERKRIYHKFGIAINSKRRRLQLVNELWSNPKDMTQVMESADVVAKLVRFAEQGRAMKEMFGLTFTPPSFLTTRRSHSWRKSMPALF

SEQ ID NO: 9015 - protein, 829 aa, Arabidopsis thaliana
MPVAREEKILVLVRLRPLNQKEIAANEAADWECINDTTILYRNTLREGSNFPSAYSFDKVYRGECPTRQVYEDGTKEIALSVVKGINCSIFAYGQTSSGKTYTMTGITEFAVADIFDYIFQHEERAFSVKFSAIEIYNEAIRDLLSSDGTSLRLRDDPEKGTVVEKATEETLRDWNHLKELLSICEGKTQKTCFLKSKLTCFYIFAAQRKIGETSLNERSSRSHQMIRLNFIDLAGSERASQAMSAGTRLKEGCHINRSLLTLGTVIRKLSKGRQGHINFRDSKLTRILQPCLGGNARTAIICTLSPARSHVELTKNTLLFACCAKEVTTKARINVVMSDKALLKQLQRELARLETELRNPASSPASNCDCAMTVRKKDLQIQKMEKEIAELRKQRDLAQSRLEDFMRMIEHNVASKPGTPHFGNHTDKWEDGSVSETSGVVDSDRRSFISDGMSTPLSISRAYVHSHSDDDDLDEDLPRRSEDLSEEYCREVQCIETEESVTVYNNKKDKRAEPENVLGCGEDANGETSVSQNVRVRSWNRRETVSGPSTPPENIGTGFLGRPESHKIAFPDLEFGSTVSRNDSMSSCGSDSTGTQSIRTPLGEEGGITSIRTFVEGLKEMAKRQGEVSNAEDSGKMRRDIGLDSMDREFERQRQEILELWQTCNISLVHRTYFYLLFKGDEADSIYIGVELRRLLFMKDSFSQGNQALEGGETLTLASSRKELHRERKMLSKLVGKRFSGEERKRIYHKFGIAINSKRRRLQLVNELWSNPKDMTQVMESADVVAKLVRFAEQGRAMKEMFGLTFTPPSFLTTRRSHSWRKSMPALF

SEQ ID NO: 9016 - protein, 726 aa, Arabidopsis thaliana
MTGITEFAVADIFDYIFQHEERAFSVKFSAIEIYNEAIRDLLSSDGTSLRLRDDPEKGTVVEKATEETLRDWNHLKELLSICEGKTQKTCFLKSKLTCFYIFAAQRKIGETSLNERSSRSHQMIRLNFIDLAGSERASQAMSAGTRLKEGCHINRSLLTLGTVIRKLSKGRQGHINFRDSKLTRILQPCLGGNARTAIICTLSPARSHVELTKNTLLFACCAKEVTTKARINVVMSDKALLKQLQRELARLETELRNPASSPASNCDCAMTVRKKDLQIQKMEKEIAELRKQRDLAQSRLEDFMRMIEHNVASKPGTPHFGNHTDKWEDGSVSETSGVVDSDRRSFISDGMSTPLSISRAYVHSHSDDDDLDEDLPRRSEDLSEEYCREVQCIETEESVTVYNNKKDKRAEPENVLGCGEDANGETSVSQNVRVRSWNRRETVSGPSTPPENIGTGFLGRPESHKIAFPDLEFGSTVSRNDSMSSCGSDSTGTQSIRTPLGEEGGITSIRTFVEGLKEMAKRQGEVSNAEDSGKMRRDIGLDSMDREFERQRQEILELWQTCNISLVHRTYFYLLFKGDEADSIYIGVELRRLLFMKDSFSQGNQALEGGETLTLASSRKELHRERKMLSKLVGKRFSGEERKRIYHKFGIAINSKRRRLQLVNELWSNPKDMTQVMESADVVAKLVRFAEQGRAMKEMFGLTFTPPSFLTTRRSHSWRKSMPALF

SEQ ID NO: 9017 - DNA, 2605 bp, Arabidopsis thaliana
gttgttaggaataaaccctaaattctgccatggataaggagagatattccaggagccaccgtgacgatcgtgatcgagattcgagtcccgaccattctccacaacgtgaaggaggacgccgccgtgaccgcgatgttgattcgaagcgtcgtgattcagatcactaccgttcatcgaggcgcggcgatagggaagatgagagagataggaccaaggatagaagagggagatctgtagagcgaggcgagagagaagggagtagagatagggaaaagcatcaccatgagaggtctcacgaaggtagtaaagagaaggaatcgaggagcaagaggaaagatagagaggaagagaatggggctagggatgggaagaagaaatctaggtttgctgatgggaatggtgagaggaggagcaggtttgaggatgtggctattgaagttgagaacaaagatgctcaagtctctgagggttctggggctacgaatccaaccagtggcgttacgatgggagcctctacatatagttctattccatcggaagcttctgctgcccctagtcaaacactgctcactaaggtatcttcgatatctacaacggatgaaaataaggctagtgttgtcagatctcatgaggttcctggaaaatctagtacagatggaagaccattgtccacagctgggaaaagtagtgcaaacttgcctcttgattcatcagcgttagcagcgaaagctaggaaagcactacaattgcaaaagggattggctgatagattgaagaaccttcctttgctgaagaaggctactaagccaacttcagaaggtagcccacataccagagtgccaccatcgactaccactcctgctgtctctacaggcacatcttttgcttcaacattaccacatactggccttgctggctttgggagtattgccaacattgaagctgttaagcgagcccaggagctggcagctaatatgggatttcatcaggatcgagagttcgctcccgttattaacctatttccaggacaggcaccctcagatatgactgttgcacagagaccggaaaagccccctgttctgcgcgtggatgcactaggaagggagatagatgaacacggaaatgtgattagtgtgactaaaccaagcaatcttagtacattgaaggttaacataaacaaaaagaagaaagatgcttttcagattcttaaacctcaactggaagcagatctaaaagaaaacccctattttgacacaaggatgggtattgatgaaaaaaagattctgagacctaaacgtatgagtttccagtttgttgaggaaggtaaatggacaagagatgctgaaaatttgaagtttaagagtcattttggtgaagcaaaagcgaaggagctgaaggtgaagcaagcacaactggctaaggcaaacgatgatataaatccaaatttgatagaggtatccgaacgtgtcccgagaaaagagaagcccaaggagccaattccagatgttgagtggtgggatgcaaatgtcctcaccaatggcgaatacggcgaaataactgatggcaccattactgaaagccatctgaagatagaaaaacttactcattacattgagcatcctcgtcccatagagccacctgcagaggcagctcctccaccaccccaacctcttaaactgacaaagaaggaacagaagaaactgcgaacccagaggcgtctagcaaaagaaaaggagaaacaggagatgatcagacaagggttgctggaaccaccaaaagcaaaggtgaagatgagcaacttaatgaaggttcttggttctgaagcgacccaagacccaacaaagcttgaaaaagagatccgcacagcagctgctgagcgtgaacaggctcatacagataggaatgctgcccggaagctaactcctgcagagaaacgtgagaagaaagagaggaagcttttcgatgatccaacaacggttgagacgattgtgtcggtgtacaagatcaaaaagttatcgcaccctaaaacaagattcaaagtggagatgaatgcaagagagaacagattaacagggtgtagtgtgatgacggatgaaatgagtgtggttgtggttgagggcaagagcaaagcgataaagagatacgggaagctgatgatgaagcgaataaactgggaagaggcagagaggaaggaagggaatgaagacgaggaagaagaagtgaatggcggaaacaagtgttggttggtttggcaaggaagtattgggaaaccgagttttcataggtttcatgtacacgaatgcgtgacggaatccactgccaagaaagttttcatggatgctggtgttgttcactactgggatctcgctgtcaattactcagacgactaaatcctctctccctcatatcatcatcatcaccttgaaatgcgttaactatttggacatgttattgcacttctatgaacatatattcccctggtgtctggtattttagtttttgaacaagaaatcatctgttttttactaggtaaactgtttaaggttgatgatacaacatgaattatctgagtcacagccaaaaaaagtaccattggttaagtacg

SEQ ID NO: 9018 - protein, 786 aa, Arabidopsis thaliana
MDKERYSRSHRDDRDRDSSPDHSPQREGGRRRDRDVDSKRRDSDHYRSSRRGDREDERDRTKDRRGRSVERGEREGSRDREKHHHERSHEGSKEKESRSKRKDREEENGARDGKKKSRFADGNGERRSRFEDVAIEVENKDAQVSEGSGATNPTSGVTMGASTYSSIPSEASAAPSQTLLTKVSSISTTDENKASVVRSHEVPGKSSTDGRPLSTAGKSSANLPLDSSALAAKARKALQLQKGLADRLKNLPLLKKATKPTSEGSPHTRVPPSTTTPAVSTGTSFASTLPHTGLAGFGSIANIEAVKRAQELAANMGFHQDREFAPVINLFPGQAPSDMTVAQRPEKPPVLRVDALGREIDEHGNVISVTKPSNLSTLKVNINKKKKDAFQILKPQLEADLKENPYFDTRMGIDEKKILRPKRMSFQFVEEGKWTRDAENLKFKSHFGEAKAKELKVKQAQLAKANDDINPNLIEVSERVPRKEKPKEPIPDVEWWDANVLTNGEYGEITDGTITESHLKIEKLTHYIEHPRPIEPPAEAAPPPPQPLKLTKKEQKKLRTQRRLAKEKEKQEMIRQGLLEPPKAKVKMSNLMKVLGSEATQDPTKLEKEIRTAAAEREQAHTDRNAARKLTPAEKREKKERKLFDDPTTVETIVSVYKIKKLSHPKTRFKVEMNARENRLTGCSVMTDEMSVVVVEGKSKAIKRYGKLMMKRINWEEAERKEGNEDEEEEVNGGNKCWLVWQGSIGKPSFHRFHVHECVTESTAKKVFMDAGVVHYWDLAVNYSDD

SEQ ID NO: 9019 - protein, 628 aa, Arabidopsis thaliana
MGASTYSSIPSEASAAPSQTLLTKVSSISTTDENKASVVRSHEVPGKSSTDGRPLSTAGKSSANLPLDSSALAAKARKALQLQKGLADRLKNLPLLKKATKPTSEGSPHTRVPPSTTTPAVSTGTSFASTLPHTGLAGFGSIANIEAVKRAQELAANMGFHQDREFAPVINLFPGQAPSDMTVAQRPEKPPVLRVDALGREIDEHGNVISVTKPSNLSTLKVNINKKKKDAFQILKPQLEADLKENPYFDTRMGIDEKKILRPKRMSFQFVEEGKWTRDAENLKFKSHFGEAKAKELKVKQAQLAKANDDINPNLIEVSERVPRKEKPKEPIPDVEWWDANVLTNGEYGEITDGTITESHLKIEKLTHYIEHPRPIEPPAEAAPPPPQPLKLTKKEQKKLRTQRRLAKEKEKQEMIRQGLLEPPKAKVKMSNLMKVLGSEATQDPTKLEKEIRTAAAEREQAHTDRNAARKLTPAEKREKKERKLFDDPTTVETIVSVYKIKKLSHPKTRFKVEMNARENRLTGCSVMTDEMSVVVVEGKSKAIKRYGKLMMKRINWEEAERKEGNEDEEEEVNGGNKCWLVWQGSIGKPSFHRFHVHECVTESTAKKVFMDAGVVHYWDLAVNYSDD

SEQ ID NO: 9020 - protein, 471 aa, Arabidopsis thaliana
MGFHQDREFAPVINLFPGQAPSDMTVAQRPEKPPVLRVDALGREIDEHGNVISVTKPSNLSTLKVNINKKKKDAFQILKPQLEADLKENPYFDTRMGIDEKKILRPKRMSFQFVEEGKWTRDAENLKFKSHFGEAKAKELKVKQAQLAKANDDINPNLIEVSERVPRKEKPKEPIPDVEWWDANVLTNGEYGEITDGTITESHLKIEKLTHYIEHPRPIEPPAEAAPPPPQPLKLTKKEQKKLRTQRRLAKEKEKQEMIRQGLLEPPKAKVKMSNLMKVLGSEATQDPTKLEKEIRTAAAEREQAHTDRNAARKLTPAEKREKKERKLFDDPTTVETIVSVYKIKKLSHPKTRFKVEMNARENRLTGCSVMTDEMSVVVVEGKSKAIKRYGKLMMKRINWEEAERKEGNEDEEEEVNGGNKCWLVWQGSIGKPSFHRFHVHECVTESTAKKVFMDAGVVHYWDLAVNYSDD

SEQ ID NO: 9021 - DNA, 843 bp, Arabidopsis thaliana
actcaaaacataatttgctctcaataagacattaacaaagtcccagaggcagagagagagaatcagagagagagaagtcgagatgtttttccacatagtattggagcggaacatgcagttgcatcctcgtttctttggtcgtaacctaaaagaaaacctcgtatctaagctcatgaaagatgtcgaaggcacttgcagtggccgacatggatttgtagtggcgataactggaatagatacaataggaaagggtttgatcagagatgggactggttttgtcacctttccagttaaataccaatgcgtcgttttcagacctttcaaaggcgagattttggaagctgttgtcactttggtcaataagatgggattcttcgctgaagctggccctgttcagatttttgtgtctaagcatttgattccagatgatatggagtttcaagctggagacatgcctaactataccacatcagatggatcagttaagatccagaaggagtgtgaagtgagactaaagattattggaacaagagttgatgccactgcgattttttgtgtgggtaccatcaaagacgattttttgggagtcataaacgaccctgcagcggcataaaaagtttcaagcagatttcaattttggtcttctttctttcacagagaatgctgtcttgtgataaagttgtattatagttgaagttttggatctatttaatccgaaagattggaaccacgcttgttggatttaacttatatgcaagtttagtgaactttgtatttgttcaaaactgttgtcattttgagaacaatatagtaccgagtggtggatcaaattctacatgtcac

SEQ ID NO: 9022 - protein, 176 aa, Arabidopsis thaliana
MFFHIVLERNMQLHPRFFGRNLKENLVSKLMKDVEGTCSGRHGFVVAITGIDTIGKGLIRDGTGFVTFPVKYQCVVFRPFKGEILEAVVTLVNKMGFFAEAGPVQIFVSKHLIPDDMEFQAGDMPNYTTSDGSVKIQKECEVRLKIIGTRVDATAIFCVGTIKDDFLGVINDPAAA

SEQ ID NO: 9023 - protein, 166 aa, Arabidopsis thaliana
MQLHPRFFGRNLKENLVSKLMKDVEGTCSGRHGFVVAITGIDTIGKGLIRDGTGFVTFPVKYQCVVFRPFKGEILEAVVTLVNKMGFFAEAGPVQIFVSKHLIPDDMEFQAGDMPNYTTSDGSVKIQKECEVRLKIIGTRVDATAIFCVGTIKDDFLGVINDPAAA

SEQ ID NO: 9024 - protein, 146 aa, Arabidopsis thaliana
MKDVEGTCSGRHGFVVAITGIDTIGKGLIRDGTGFVTFPVKYQCVVFRPFKGEILEAVVTLVNKMGFFAEAGPVQIFVSKHLIPDDMEFQAGDMPNYTTSDGSVKIQKECEVRLKIIGTRVDATAIFCVGTIKDDFLGVINDPAAA

SEQ ID NO: 9025 - DNA, 851 bp, Arabidopsis thaliana
aagaactttcgtacgtttctcgcaaacaaaacacgaaaacttacgcttctggaattgaatccaaatcgagaatttcctttacaatgctctaaattcgtctgttatgttgaatccttcgtaagagagtagaatcgaagacgaatcaaatgaactttcgaagggagaatcgtgcttcgagaacgtctctctttgatggccttgatggacttgaagaaggtcgcttgagagcttcttcttcgtatgctcatgacgaacgtgataatgatgaagctttggaaaatcttcaggacagagtttcgtttctcaagagagtgactggagacatacatgaagaagttaagaatcataaccgcttgcttgacaaagtggggaacaaaatggactccgcgagggggataatgtcgggaacgatcaaccgcttcaagttggtctttgagaagaagtctaatcgaaaaagttgcaaactcatagcttattttgtgctcctgttcttgatcatgtattaccttattaggctattaaactacatcaaagggtaaatttggatacaagaagaaagtagagtgttaaatgaatagtttcgtttgggacttccatttttggatttctcctgatgaatgaatgattcagacatagtaaacaagtcaagggaccctattgaaaccctattgaaaccctattgaaacaagacaaagaaagagattgtgaagagactagtgaaccaaccgaaagaaaaaatgtttgatagagacttgtttgtcacaagcaaaatcatctcatgtcatttcatgtaatgtagcaaaagcttctttatcatttgtcaactatttgatcttgggttcatgttaaag

SEQ ID NO: 9026 - protein, 130 aa, Arabidopsis thaliana
MNFRRENRASRTSLFDGLDGLEEGRLRASSSYAHDERDNDEALENLQDRVSFLKRVTGDIHEEVKNHNRLLDKVGNKMDSARGIMSGTINRFKLVFEKKSNRKSCKLIAYFVLLFLIMYYLIRLLNYIKG

SEQ ID NO: 9027 - DNA, 784 bp, Arabidopsis thaliana
actcaagatcatctctcatggcttcttcttcttcctcacctcgcaactggagatacaatgtcttcacgagcttccatggaccagacgtccgtattaaatttctcagtcatttacgtcaacagtttatttacaatggaattactatgttcgatgacaacgggatcgaaagaagccaaattatcgctccagctctcaaaaaagccattggagaatcgaggatcgcgatcttattgctctcgaagaactatgcttcttccagttggtctttggatgagctcttggagattttaaagtgcaaagaagatatagggcaaatagtgatgactgtcttctacgaagttgatccttctgatgtccgcaaccaaaccggagattttgggcttgctttcaaagaaacttgtgctcataaaacagaggaggagaggagcaaatggagccaagctttgacctatgtgggcaacatagccggagaagacttcatacactggtttgtatttagttaattacagtttatttttcttatgatgaataatggtgtttttatgattttatatgggaagatatggattgtgaagtttggaattcgattattctgataaatttgagacttcaagtatattggatagaattttgctatggtatgttatagcgtgtgataaattggagtttgatatagacatatagttataaatatcaattcttgaggtatatttgatcaaaatttgtagtggtttcaattactgttatgtttctttgtgtttaatcttaaagaatgtgtttggtg

SEQ ID NO: 9028 - protein, 166 aa, Arabidopsis thaliana
SRSSLMASSSSSPRNWRYNVFTSFHGPDVRIKFLSHLRQQFIYNGITMFDDNGIERSQIIAPALKKAIGESRIAILLLSKNYASSSWSLDELLEILKCKEDIGQIVMTVFYEVDPSDVRNQTGDFGLAFKETCAHKTEEERSKWSQALTYVGNIAGEDFIHWFVFS

SEQ ID NO: 9029 - protein, 161 aa, Arabidopsis thaliana
MASSSSSPRNWRYNVFTSFHGPDVRIKFLSHLRQQFIYNGITMFDDNGIERSQIIAPALKKAIGESRIAILLLSKNYASSSWSLDELLEILKCKEDIGQIVMTVFYEVDPSDVRNQTGDFGLAFKETCAHKTEEERSKWSQALTYVGNIAGEDFIHWFVFS

SEQ ID NO: 9030 - protein, 119 aa, Arabidopsis thaliana
MFDDNGIERSQIIAPALKKAIGESRIAILLLSKNYASSSWSLDELLEILKCKEDIGQIVMTVFYEVDPSDVRNQTGDFGLAFKETCAHKTEEERSKWSQALTYVGNIAGEDFIHWFVFS

SEQ ID NO: 9031 - DNA, 915 bp, Arabidopsis thaliana
aacctctctttatttttgtttcttatattatagagaaaaagagctttttcccggaaagttgttctcatcttggaaaatcaaatctcggaaacgcagtcttcagctaaatcatgagcaacgagtacgattatctgttcaagcttttgttgatcggtgactcctctgttggaaaatcgtgtcttcttctccgattcgctgatgatgcttacattgacagctacataagcaccattggtgttgacttcaaaattaggacgattgagcaggatgggaagacgattaagctgcaaatttgggatactgctggacaggagcgtttcaggaccatcactagcagctattacagaggagctcatggaatcattattgtttatgactgtactgagatggaaagcttcaacaatgtgaagcagtggttgagtgagatcgatagatatgccaatgagagtgtttgcaagcttttaatcggtaacaagaatgatatggttgaaagcaaagttgtttccaccgaaactggaagggccttagcagatgagcttggaattccctttcttgagaccagtgccaaggattctattaacgttgaacaggcattcttaactattgctggcgagatcaaaaagaaaatgggaagccaaacgaatgcaaacaagacatctggtcctggaactgtccaaatgaaaggtcagccaatccaacagaacaatggcggttgctgcggtcagtagtttaaaaaatgttttaatcaaaactatctgagactctttttttacttcctttttaactaagtgttgtgaaaaccaatggctgtttaaaacaactaagaaatgtaatattccatgtcgctgtgtcttgaataagctatggtgttagttgcaagatacttcactttaatatagttcagtcttgactttg

SEQ ID NO: 9032 - protein, 205 aa, Arabidopsis thaliana
MSNEYDYLFKLLLIGDSSVGKSCLLLRFADDAYIDSYISTIGVDFKIRTIEQDGKTIKLQIWDTAGQERFRTITSSYYRGAHGIIIVYDCTEMESFNNVKQWLSEIDRYANESVCKLLIGNKNDMVESKVVSTETGRALADELGIPFLETSAKDSINVEQAFLTIAGEIKKKMGSQTNANKTSGPGTVQMKGQPIQQNNGGCCGQ

SEQ ID NO: 9033 - protein, 113 aa, Arabidopsis thaliana
MESFNNVKQWLSEIDRYANESVCKLLIGNKNDMVESKVVSTETGRALADELGIPFLETSAKDSINVEQAFLTIAGEIKKKMGSQTNANKTSGPGTVQMKGQPIQQNNGGCCGQ

SEQ ID NO: 9034 - DNA, 903 bp, Arabidopsis thaliana
gcacacagttctcagataaatactaaactcactgttaaaactttctcaacaaagcttcctgtttagatacaaatggcatctgctctcgctcttaagagactcctatcatcctccatcgctccacgttcccgtagtgttcttcgtccagctgtttcctctcgcctcttcaacaccaacgccgttaggagctacgacgacgacggcgaaaatggagacggcgttgatttatatcgccgctctgttcctcgccgccgtggtgatttcttctcagatgtgtttgatccgttttcgccgacgaggagcgttagtcaagtgctgaatctgatggaccagttcatggagaatcctctgttatcagctactcgtggcatgggagcttcaggagctcgtcgtggttgggatataaaagagaaagacgatgctctgtacctgagaatcgacatgcctgggctgagcagagaggatgtgaagctggctttggagcaggacactctggtgattagaggagaaggaaaaaacgaggaagatggtggcgaggaaggagagagcggtaatcggagattcacaagcaggattggattaccggataagatttacaagatcgatgagattaaggcggagatgaagaacggagtgttgaaagttgtgatcccgaagatgaaagaacaagagagaaatgatgttcgtcagatcgagatcaactaaaaacgtcgacgtttttttctgttctagttatgttgataggtctttgaataagatgtgtgtgtagtttggcacggtcgatgttgagtcatgtagtctctaaagactaaaaggttatatgtttctttcttgagacggtggttttttgtcttgcttaaaccaaaatttgcattccaaatcaaagcactaattaaataaaac

SEQ ID NO: 9035 - protein, 210 aa, Arabidopsis thaliana
MASALALKRLLSSSIAPRSRSVLRPAVSSRLFNTNAVRSYDDDGENGDGVDLYRRSVPRRRGDFFSDVFDPFSPTRSVSQVLNLMDQFMENPLLSATRGMGASGARRGWDIKEKDDALYLRIDMPGLSREDVKLALEQDTLVIRGEGKNEEDGGEEGESGNRRFTSRIGLPDKIYKIDEIKAEMKNGVLKVVIPKMKEQERNDVRQIEIN

SEQ ID NO: 9036 - protein, 126 aa, Arabidopsis thaliana
MDQFMENPLLSATRGMGASGARRGWDIKEKDDALYLRIDMPGLSREDVKLALEQDTLVIRGEGKNEEDGGEEGESGNRRFTSRIGLPDKIYKIDEIKAEMKNGVLKVVIPKMKEQERNDVRQIEIN

SEQ ID NO: 9037 - protein, 122 aa, Arabidopsis thaliana
MENPLLSATRGMGASGARRGWDIKEKDDALYLRIDMPGLSREDVKLALEQDTLVIRGEGKNEEDGGEEGESGNRRFTSRIGLPDKIYKIDEIKAEMKNGVLKVVIPKMKEQERNDVRQIEIN

SEQ ID NO: 9038 - DNA, 1047 bp, Arabidopsis thaliana
ctcttcctctcttctctctcaaatctagaaagagaaaaagtcttaaatttgtctcatttatgcgataagaaccacaattcctctatcaaaatctctctctctgacatacccagttggaaaaattcaatcttttatccctaagattcgatctttcttcttgggaagttgataaatgttcaaggaaacataaaaaagagaagatttttgaataaaggttgaagaaaaatgcaggatccagcagcatattaccagacgatgatggcgaagcaacaacaacaacaacaaccacagtttgcagagcaagaacagttaaagtgtcctcgttgtgactcaccaaacactaaattctgttactacaacaactacaatctctcacagcctcgtcacttttgcaaaagctgtcgtcgttactggactaaaggcggcgctctccgtaacgttcccgtcggtggtggttctcgtaagaacgcaaccaaacgatccacttcttcttcttcttctgcttcctctccttccaacagtagccaaaacaagaagacgaaaaacccggatccggatcctgatccacgtaattctcaaaaaccggatttggatccgacccggatgctttacgggtttccgatcggtgaccaagacgtgaagggtatggagattggtggaagctttagctcgttgttggcgaataatatgcagcttggtctcggaggaggagggatcatgcttgacgggtcgggttgggatcatccgggtatgggtttgggtttgaggagaaccgaaccgggtaataataataataacccatggaccgatctggctatgaacagagcggagaaaaactgaagaagaaaagaagagaggggtattttggtaaattacagcaaactgattttgggtgacttgagccatcacgtagacactgaacagtttcgatcatgtttatgtcattttggtaatattattattattcctcctcctactttatttctatttatataatcggttttgtcgtaattttaatcctgtgtaatagaaagaaatttctcagtt

SEQ ID NO: 9039 - protein, 204 aa, Arabidopsis thaliana
MQDPAAYYQTMMAKQQQQQQPQFAEQEQLKCPRCDSPNTKFCYYNNYNLSQPRHFCKSCRRYWTKGGALRNVPVGGGSRKNATKRSTSSSSSASSPSNSSQNKKTKNPDPDPDPRNSQKPDLDPTRMLYGFPIGDQDVKGMEIGGSFSSLLANNMQLGLGGGGIMLDGSGWDHPGMGLGLRRTEPGNNNNNPWTDLAMNRAEKN

SEQ ID NO: 9040 - protein, 194 aa, Arabidopsis thaliana
MMAKQQQQQQPQFAEQEQLKCPRCDSPNTKFCYYNNYNLSQPRHFCKSCRRYWTKGGALRNVPVGGGSRKNATKRSTSSSSSASSPSNSSQNKKTKNPDPDPDPRNSQKPDLDPTRMLYGFPIGDQDVKGMEIGGSFSSLLANNMQLGLGGGGIMLDGSGWDHPGMGLGLRRTEPGNNNNNPWTDLAMNRAEKN

SEQ ID NO: 9041 - protein, 193 aa, Arabidopsis thaliana
MAKQQQQQQPQFAEQEQLKCPRCDSPNTKFCYYNNYNLSQPRHFCKSCRRYWTKGGALRNVPVGGGSRKNATKRSTSSSSSASSPSNSSQNKKTKNPDPDPDPRNSQKPDLDPTRMLYGFPIGDQDVKGMEIGGSFSSLLANNMQLGLGGGGIMLDGSGWDHPGMGLGLRRTEPGNNNNNPWTDLAMNRAEKN

SEQ ID NO: 9042 - DNA, 739 bp, Arabidopsis thaliana
agaacatcctaatcgaaaaatagtttcgagtttcttcgacagtggcaatgttttcatcttcgattaggttaatcgtatctgggttccaccggactcaacccctaaaatcgccggtaaattctccgagcgtcttcatctccgtacctaaattcttcaactctgagtcaaaatcgacgggaactggttcaagatccgtagcaatgagcagcgtcgagaaaaccgggtcggattctggagcaatagagaatcgagcgagcaggatgagagagaagcttcaaaaagagctcgaaccagtggagttagtgatcgaagatgtttcgtatcagcacgctggtcacgccggaatgaaaggtagaaccgacgatgagacgcatttcaatgtgaagatcgtttctaaaggattcgagggaatgaatttggtgaagagacacaggttggtctatcatttgctccgggaagagttggatactggattgcacgctctttctatcgtctccaagacgccgtctgagtctccttctaaagactagtgtactggtactgtttaatgtatcttctgtttctgttatcagagtttctcatcaaactctgttcgattcaaagattgaatttttaccatcaaagtgctctgttttggaatttattgcggagccaaagtcttcatttttacatacgcttgaggttgtgtgttggtgtttctggaattgtgtgttggaacaaagacacttgcttttagtcc

SEQ ID NO: 9043 - protein, 160 aa, Arabidopsis thaliana
MFSSSIRLIVSGFHRTQPLKSPVNSPSVFISVPKFFNSESKSTGTGSRSVAMSSVEKTGSDSGAIENRASRMREKLQKELEPVELVIEDVSYQHAGHAGMKGRTDDETHFNVKIVSKGFEGMNLVKRHRLVYHLLREELDTGLHALSIVSKTPSESPSKD

SEQ ID NO: 9044 - protein, 109 aa, Arabidopsis thaliana
MSSVEKTGSDSGAIENRASRMREKLQKELEPVELVIEDVSYQHAGHAGMKGRTDDETHFNVKIVSKGFEGMNLVKRHRLVYHLLREELDTGLHALSIVSKTPSESPSKD

SEQ ID NO: 9045 - protein, 89 aa, Arabidopsis thaliana
MREKLQKELEPVELVIEDVSYQHAGHAGMKGRTDDETHFNVKIVSKGFEGMNLVKRHRLVYHLLREELDTGLHALSIVSKTPSESPSKD

SEQ ID NO: 9046 - DNA, 2055 bp, Arabidopsis thaliana
atggttcagaggaagaagacttgtctaacaatcgagtcttcttccaatctccaacctgaaactcggtttgggcaagaacatctcaagaatcttggaccagagatgatgatgatgaagagaactaaacctaggaggaagcttaaagacaatcatgtttcttctcaatcaggtaagtcacaagaactaccaaagcatgaccttgttgttaaagtgataggtggttcacctaattacatgaaaggcaccagtagttctgaggcaaggaaggagaacaagaaaaaatttaatctttctaggaatcagaagaaccaaaccggttcaaaacatgattctcgttatggagttaacaaggaaagaagttgtaacaagtcgagttcgaggaacggtagaggtttgacaaaggctccgattttcaagagatgttcacagagagctacttgttcttcaactctaaaagattccaagtttccagagtatttgatgcttaaccatggcgagacttttgaccaagttaatggaacctctgtcttgaaagtctgtccttacacgtattgttcactcaacggtcatcttcatgcagcgcagtatcctcctctgaaaagcttcatatcgttgaggagacagagtttgaagtcacaaaagagtgtgaaaatggaagcttctgaggaagagtttgtgaagatggatgatctagaggagaagaaagagtttgagaatggtaatggaggttcttgtgaggttgatattgatagtcaaatatcggaaactgtttctgaaggagcacctcgttctgaaactgattctgatgattactctgatagtgctgagatggtgattgagttaaaagaatcttgtttggaggagactttggtggatgactctgagaatgaggtccaagagaaagcaaacagagatggagatacctacctattaaaagaatctgacttggaggagactttggttgaggattctatgaatcaagatgaaggaaacagagatggagatgctgatcactctggttgctttgattctgaagttattggtataatcaagaactcagaagcagatattgttattgatgagactttgatagatgactctgtgaaagatttcgaagatacaacaaacatatatggggatgctaatgaatttggttgctttaattctgaagttatcgatatgatgaagaacacagaagcagatactgcaatcggggagactttggtagatgagtctatgaaagagatccaggagaaagaaaacaaagatgaagatgctgatgaatctagttgctttgtttcagaacttatcgatatgataaagaactcagctgcaagtgatgctattgaggataaagatgctactggtgaagagacactaaaggataaagctgaagattgcaaagaggtgtctaaaggccagactgaagttatattgatgacagaagaaaatgcaaaggttccatttaaccgtacacgaaaaccctgcaaacaagaagagtcaggctctaccatttcatggactatcatcaaatgcaagaaacccgttgcagagaccgaggatttaagagaatttaatccaagagaaccaaattaccttccagctgtaatggatgaggatgctgaaaaagtggacctcaagcatcaagacatagatgagaggagaaattcagaggattggatgtttgattatgctctgcagcgtgctgttagcaaacttgccccagcaaggaagaggaaagttgcattactcgtagaggcatttgaaaccgtgcaaccacatggtagagaacctgaacaggttttaagttatggaagacaccttcaagcctgcaattaacgaaggtccagggatgatccaaggaagccaactaaaggaaagatgagtgacctttgtttatttacttacaagaatcaaacccaagtgtaaactttgatggtttatttcctagttctttgtgtggtatttatgctcttcaatgtattaatgactctgtgtgtgcttttgcttgtggactaatttctgggacaatcatatgcgtttgtctagttctat

SEQ ID NO: 9047 - protein, 612 aa, Arabidopsis thaliana
MVQRKKTCLTIESSSNLQPETRFGQEHLKNLGPEMMMMKRTKPRRKLKDNHVSSQSGKSQELPKHDLVVKVIGGSPNYMKGTSSSEARKENKKKFNLSRNQKNQTGSKHDSRYGVNKERSCNKSSSRNGRGLTKAPIFKRCSQRATCSSTLKDSKFPEYLMLNHGETFDQVNGTSVLKVCPYTYCSLNGHLHAAQYPPLKSFISLRRQSLKSQKSVKMEASEEEFVKMDDLEEKKEFENGNGGSCEVDIDSQISETVSEGAPRSETDSDDYSDSAEMVIELKESCLEETLVDDSENEVQEKANRDGDTYLLKESDLEETLVEDSMNQDEGNRDGDADHSGCFDSEVIGIIKNSEADIVIDETLIDDSVKDFEDTTNIYGDANEFGCFNSEVIDMMKNTEADTAIGETLVDESMKEIQEKENKDEDADESSCFVSELIDMIKNSAASDAIEDKDATGEETLKDKAEDCKEVSKGQTEVILMTEENAKVPFNRTRKPCKQEESGSTISWTIIKCKKPVAETEDLREFNPREPNYLPAVMDEDAEKVDLKHQDIDERRNSEDWMFDYALQRAVSKLAPARKRKVALLVEAFETVQPHGREPEQVLSYGRHLQACN

SEQ ID NO: 9048 - protein, 578 aa, Arabidopsis thaliana
MMMMKRTKPRRKLKDNHVSSQSGKSQELPKHDLVVKVIGGSPNYMKGTSSSEARKENKKKFNLSRNQKNQTGSKHDSRYGVNKERSCNKSSSRNGRGLTKAPIFKRCSQRATCSSTLKDSKFPEYLMLNHGETFDQVNGTSVLKVCPYTYCSLNGHLHAAQYPPLKSFISLRRQSLKSQKSVKMEASEEEFVKMDDLEEKKEFENGNGGSCEVDIDSQISETVSEGAPRSETDSDDYSDSAEMVIELKESCLEETLVDDSENEVQEKANRDGDTYLLKESDLEETLVEDSMNQDEGNRDGDADHSGCFDSEVIGIIKNSEADIVIDETLIDDSVKDFEDTTNIYGDANEFGCFNSEVIDMMKNTEADTAIGETLVDESMKEIQEKENKDEDADESSCFVSELIDMIKNSAASDAIEDKDATGEETLKDKAEDCKEVSKGQTEVILMTEENAKVPFNRTRKPCKQEESGSTISWTIIKCKKPVAETEDLREFNPREPNYLPAVMDEDAEKVDLKHQDIDERRNSEDWMFDYALQRAVSKLAPARKRKVALLVEAFETVQPHGREPEQVLSYGRHLQACN

SEQ ID NO: 9049 - protein, 577 aa, Arabidopsis thaliana
MMMKRTKPRRKLKDNHVSSQSGKSQELPKHDLVVKVIGGSPNYMKGTSSSEARKENKKKFNLSRNQKNQTGSKHDSRYGVNKERSCNKSSSRNGRGLTKAPIFKRCSQRATCSSTLKDSKFPEYLMLNHGETFDQVNGTSVLKVCPYTYCSLNGHLHAAQYPPLKSFISLRRQSLKSQKSVKMEASEEEFVKMDDLEEKKEFENGNGGSCEVDIDSQISETVSEGAPRSETDSDDYSDSAEMVIELKESCLEETLVDDSENEVQEKANRDGDTYLLKESDLEETLVEDSMNQDEGNRDGDADHSGCFDSEVIGIIKNSEADIVIDETLIDDSVKDFEDTTNIYGDANEFGCFNSEVIDMMKNTEADTAIGETLVDESMKEIQEKENKDEDADESSCFVSELIDMIKNSAASDAIEDKDATGEETLKDKAEDCKEVSKGQTEVILMTEENAKVPFNRTRKPCKQEESGSTISWTIIKCKKPVAETEDLREFNPREPNYLPAVMDEDAEKVDLKHQDIDERRNSEDWMFDYALQRAVSKLAPARKRKVALLVEAFETVQPHGREPEQVLSYGRHLQACN

SEQ ID NO: 9050 - DNA, 507 bp, Arabidopsis thaliana
tacctagaacatcctaatcgaaaaaacaacttcttcatctaatctgataagctaaaggagacttctaagctgaatctttttccaggatccatcagagcagaacaaaaaaatgggagtgttccgaggtcttatgggcgcaaagaagatctttcaaggtcgatcaatggcagcttcgacaccaaaagggtttcttgcagtgtacgttggagaaagccagatgaaaagatacatagtgccagtctcatatttgaaccagccttcatttcaagctttgttgagtaaatctgaacaagagtttgggtttgatcatccaatgggcggcttgaccatcccttgccctgtagatacatttatcaccgtcacttctcagcttcattagatccaattcacaaggatcacatatatgtaacaatttttgaggtcattaattagatgtagaagatatttagaacccagctgtgtaattacttacatagaagataacatttatcgtctgatatttgcccc

SEQ ID NO: 9051 - protein, 89 aa, Arabidopsis thaliana
MGVFRGLMGAKKIFQGRSMAASTPKGFLAVYVGESQMKRYIVPVSYLNQPSFQALLSKSEQEFGFDHPMGGLTIPCPVDTFITVTSQLH

SEQ ID NO: 9052 - protein, 82 aa, Arabidopsis thaliana
MGAKKIFQGRSMAASTPKGFLAVYVGESQMKRYIVPVSYLNQPSFQALLSKSEQEFGFDHPMGGLTIPCPVDTFITVTSQLH

SEQ ID NO: 9053 - protein, 71 aa, Arabidopsis thaliana
MAASTPKGFLAVYVGESQMKRYIVPVSYLNQPSFQALLSKSEQEFGFDHPMGGLTIPCPVDTFITVTSQLH

SEQ ID NO: 9054 - DNA, 619 bp, Arabidopsis thaliana
actccgatgacaaaacctctaagcatctagaaagaaaaaatgaaaaatacttcaatctttctagttgtctttgccctatgcatgattagcaatgcatatggccattcgaatccatttaaaggaaaaaagacgtcgttgttattcaggaacagtctttctcacaacaaatggctcaaggtacgttgtaaatctggggacaatgatgttcgtgaaagatatatgaaacctggagaagattggggttttagtttccacgatgacgttatgggagaaacacttttctggtgtaaaatgtataaaggagctgattacaaggtacaaaagaagttttgacgcatatgttcaagacaagagaatgcctcatggtggctcgtataattatgttgctcaagaagatgggatctatcacagtactttgatacaccgtatgcggaagatgtatgattggaattagggatgttggataaaactctcctatgtttatccaatatttataaaatgcttattcaaatctttgatttgatatagttgtaaagtattattattactctttgttttcatgtaagaatcactctttacattcaaagaaaagtgtaagggagaagtttcagaatgattc

SEQ ID NO: 9055 - protein, 97 aa, Arabidopsis thaliana
MKNTSIFLVVFALCMISNAYGHSNPFKGKKTSLLFRNSLSHNKWLKVRCKSGDNDVRERYMKPGEDWGFSFHDDVMGETLFWCKMYKGADYKVQKKF

SEQ ID NO: 9056 - protein, 83 aa, Arabidopsis thaliana
MISNAYGHSNPFKGKKTSLLFRNSLSHNKWLKVRCKSGDNDVRERYMKPGEDWGFSFHDDVMGETLFWCKMYKGADYKVQKKF

SEQ ID NO: 9057 - protein, 65 aa, Arabidopsis thaliana
MTLWEKHFSGVKCIKELITRYKRSFDAYVQDKRMPHGGSYNYVAQEDGIYHSTLIHRMRKMYDWN

SEQ ID NO: 9058 - DNA, 810 bp, Arabidopsis thaliana
caattctctttaacattctccttgatttctgacactaccctcatcgggtctccaagaggccaagaaagacctctttctcggcttctaggagtctcatcattctcttttttcacatttgcttcctccacacgcaacctccaaaaagccctaaatttattaaaacaaatggattccacggagctgaaccgtgtgttccaaatgttcgacaaggacggagacgggaagatcactacgaaggagctgaacgagtcattcaagaacctcggtatcataatacccgaagacgaactaacacaaattatccaaaagatcgatgttaatggtgacggttgtgttgacattgaagagtttggagagctctacaagacgataatggtagaagatgaggacgaggtaggagaagaagatatgaaggaagcgttcaacgtatttgatcggaacggagatgggtttataacggtggatgaattgaaagcggttttatcttccttgggactcaagcaaggtaagaccttggaggaatgtaggaagatgataatgcaagtggatgttgatggtgatggtagggttaattacatggagtttagacaaatgatgaaaaagggtcgcttttttagctctttgagctgataataactttttttcttctttttttaccttctcttgtttttaattttggttatttgcttaaccattttctcttgcggtctaaatggaaaatacatgatcatagactaattattttatcttcaagacatgcgagagcacattgtaaaaaaaaaaaaaaaaaagcttatcgataccgtcgac

SEQ ID NO: 9059 - protein, 209 aa, Arabidopsis thaliana
QFSLTFSLISDTTLIGSPRGQERPLSRLLGVSSFSFFTFASSTRNLQKALNLLKQMDSTELNRVFQMFDKDGDGKITTKELNESFKNLGIIIPEDELTQIIQKIDVNGDGCVDIEEFGELYKTIMVEDEDEVGEEDMKEAFNVFDRNGDGFITVDELKAVLSSLGLKQGKTLEECRKMIMQVDVDGDGRVNYMEFRQMMKKGRFFSSLS

SEQ ID NO: 9060 - protein, 154 aa, Arabidopsis thaliana
MDSTELNRVFQMFDKDGDGKITTKELNESFKNLGIIIPEDELTQIIQKIDVNGDGCVDIEEFGELYKTIMVEDEDEVGEEDMKEAFNVFDRNGDGFITVDELKAVLSSLGLKQGKTLEECRKMIMQVDVDGDGRVNYMEFRQMMKKGRFFSSLS

SEQ ID NO: 9061 - protein, 143 aa, Arabidopsis thaliana
MFDKDGDGKITTKELNESFKNLGIIIPEDELTQIIQKIDVNGDGCVDIEEFGELYKTIMVEDEDEVGEEDMKEAFNVFDRNGDGFITVDELKAVLSSLGLKQGKTLEECRKMIMQVDVDGDGRVNYMEFRQMMKKGRFFSSLS

SEQ ID NO: 9062 - DNA, 767 bp, Arabidopsis thaliana
acttgaagatgatgaccggaaacttgaacggcggtggaagaggaggagaaggaccatgcggggcttgcaagttcttgagaagaaagtgtgtgaaagggtgcgttttcgctccttatttcgatgcagagcaaggaactgcgagatttgcagcagttcacaaagtatttggggccagcaatgcctctaagatgttactgagattgcctctgcacaagagacttgatgcagtcgtcacgctctgttacgaggccatggcaaggattcgtgatcctgtctatggctctgttggccatctcttctctcttcaacaccaggtgatgaatctacaagcagagcttgctcatgttcaagctcgtctttcaacaattcagcggtttcctctacagtcgccacaacaaatgcagccaccgtcttttgatcctgcgcataacaatgaatatgcgatggaaccgagtaacttggatagtgtgtggggggaagaacatttacttcaagatggaactggagatggggatttccaagaactggcgtcgcagttcgtctcaaggtatttaccggcggtcaaacttccggcttgcacttaggtcaaactacaagtcaagaatttatgtattatagcaatggagagtagaagcgagggaggtgtctctgttcccaatagttgaccattccgcttaagatcatcttaagagatatatagctaattatgtatcaatgtatgcatgttaagagttaaaattggttcttgcatgaagtgtttctttgac

SEQ ID NO: 9063 - protein, 193 aa, Arabidopsis thaliana
LKMMTGNLNGGGRGGEGPCGACKFLRRKCVKGCVFAPYFDAEQGTARFAAVHKVFGASNASKMLLRLPLHKRLDAVVTLCYEAMARIRDPVYGSVGHLFSLQHQVMNLQAELAHVQARLSTIQRFPLQSPQQMQPPSFDPAHNNEYAMEPSNLDSVWGEEHLLQDGTGDGDFQELASQFVSRYLPAVKLPACT

SEQ ID NO: 9064 - protein, 191 aa, Arabidopsis thaliana
MMTGNLNGGGRGGEGPCGACKFLRRKCVKGCVFAPYFDAEQGTARFAAVHKVFGASNASKMLLRLPLHKRLDAVVTLCYEAMARIRDPVYGSVGHLFSLQHQVMNLQAELAHVQARLSTIQRFPLQSPQQMQPPSFDPAHNNEYAMEPSNLDSVWGEEHLLQDGTGDGDFQELASQFVSRYLPAVKLPACT

SEQ ID NO: 9065 - protein, 190 aa, Arabidopsis thaliana
MTGNLNGGGRGGEGPCGACKFLRRKCVKGCVFAPYFDAEQGTARFAAVHKVFGASNASKMLLRLPLHKRLDAVVTLCYEAMARIRDPVYGSVGHLFSLQHQVMNLQAELAHVQARLSTIQRFPLQSPQQMQPPSFDPAHNNEYAMEPSNLDSVWGEEHLLQDGTGDGDFQELASQFVSRYLPAVKLPACT

SEQ ID NO: 9066 - DNA, 1601 bp, Arabidopsis thaliana
actttaagctcttcttcactcacactctctcaaaaatcaccaaacgaaactcttcactctctccaacaatggccaagaagatgagttctctcatcatcatcttcaacattctccttctcctcacaactcaaacccacgcgcacaacgtcacgcgcctcctagcaaaccacccatcattctcttccttcagccatttcctaacacaaacacacctcgccgacgaaatcaaccggagaagaaccataaccgtttgcgcagtagataacgccgccatgtcagcattaacctctaaaggctatacactctcaactctcaaaaacattctctccctccacgtccttttagattacttcggaaccaaaaaactccaccagatccgtgacggctctgctctcgccgctactctgtttcaagccaccggagctgctcctggaacctcaggattcgttaacataacggatctgagaggtggtaaagttgggtttggtcctgacggtggagatctgtcttctttctttgttaaatctattgaagaagttccgtataacatctccattattcagatcagtagagttttaccgtcggagactgcggcggctccgactcctgctccggcggagatgaatcttaccggaataatgtcggctcatggatgcaaagtgtttgctgagactcttctcactaaccctggagcttcaaaaacctatcaggagagtttagaaggaggcatgacagtgttctgtccaggagatgatgcaatgaaaggtttcttgcccaaatacaagaacttgacagctccaaagaaagaagcatttctcgatttcctcgctgtcccgacatattactcaatggcgatgctcaaatccaacaatggtccgatgaacacacttgcgacagatggagctaacaagtttgagcttactgtacagaacgatggagagaaggttaccctcaagacaaggatcaacactgtcaagatcgttgatactcttattgatgagcagcctttagctatatatgcgactgataaggttttgttgcctaaagagttgtttaaggcttcggctgttgaagctccggctcctgctccggcaccagaggatggtgatgttgcggattctccaaaagcggctaaagggaaagcgaaaggaaagaagaagaaggctgcaccgtcgccagataatgatccttttggtgactcggattcgcctgccgaagggcctgacggagaggccgatgatgcgacggcagatgatgcttgtgcggttaggatcatcggaggagctaaggctggtttggtggtgagcttgctctgcttgtttgcttcttcttggcttctatagtttcacttcttgtttcttcgattcttccatgttttttttttttttgtgaatcttttatttatggtttttgggggagagtaaatgaggattatttatttccctctattgttgagtttttttatttatttaaaagttggttgtcgaattaaatagtcggtagtttatatatttgtgtgttcttgtttcacgtgtttgtttagttgatgatgtaaacaagtcctgattttggtgatcttgtcatatttttcttgtttttgt

SEQ ID NO: 9067 - protein, 446 aa, Arabidopsis thaliana
FKLFFTHTLSKITKRNSSLSPTMAKKMSSLIIIFNILLLLTTQTHAHNVTRLLANHPSFSSFSHFLTQTHLADEINRRRTITVCAVDNAAMSALTSKGYTLSTLKNILSLHVLLDYFGTKKLHQIRDGSALAATLFQATGAAPGTSGFVNITDLRGGKVGFGPDGGDLSSFFVKSIEEVPYNISIIQISRVLPSETAAAPTPAPAEMNLTGIMSAHGCKVFAETLLTNPGASKTYQESLEGGMTVFCPGDDAMKGFLPKYKNLTAPKKEAFLDFLAVPTYYSMAMLKSNNGPMNTLATDGANKFELTVQNDGEKVTLKTRINTVKIVDTLIDEQPLAIYATDKVLLPKELFKASAVEAPAPAPAPEDGDVADSPKAAKGKAKGKKKKAAPSPDNDPFGDSDSPAEGPDGEADDATADDACAVRIIGGAKAGLVVSLLCLFASSWLL

SEQ ID NO: 9068 - protein, 424 aa, Arabidopsis thaliana
MAKKMSSLIIIFNILLLLTTQTHAHNVTRLLANHPSFSSFSHFLTQTHLADEINRRRTITVCAVDNAAMSALTSKGYTLSTLKNILSLHVLLDYFGTKKLHQIRDGSALAATLFQATGAAPGTSGFVNITDLRGGKVGFGPDGGDLSSFFVKSIEEVPYNISIIQISRVLPSETAAAPTPAPAEMNLTGIMSAHGCKVFAETLLTNPGASKTYQESLEGGMTVFCPGDDAMKGFLPKYKNLTAPKKEAFLDFLAVPTYYSMAMLKSNNGPMNTLATDGANKFELTVQNDGEKVTLKTRINTVKIVDTLIDEQPLAIYATDKVLLPKELFKASAVEAPAPAPAPEDGDVADSPKAAKGKAKGKKKKAAPSPDNDPFGDSDSPAEGPDGEADDATADDACAVRIIGGAKAGLVVSLLCLFASSWLL

SEQ ID NO: 9069 - protein, 420 aa, Arabidopsis thaliana
MSSLIIIFNILLLLTTQTHAHNVTRLLANHPSFSSFSHFLTQTHLADEINRRRTITVCAVDNAAMSALTSKGYTLSTLKNILSLHVLLDYFGTKKLHQIRDGSALAATLFQATGAAPGTSGFVNITDLRGGKVGFGPDGGDLSSFFVKSIEEVPYNISIIQISRVLPSETAAAPTPAPAEMNLTGIMSAHGCKVFAETLLTNPGASKTYQESLEGGMTVFCPGDDAMKGFLPKYKNLTAPKKEAFLDFLAVPTYYSMAMLKSNNGPMNTLATDGANKFELTVQNDGEKVTLKTRINTVKIVDTLIDEQPLAIYATDKVLLPKELFKASAVEAPAPAPAPEDGDVADSPKAAKGKAKGKKKKAAPSPDNDPFGDSDSPAEGPDGEADDATADDACAVRIIGGAKAGLVVSLLCLFASSWLL

SEQ ID NO: 9070 - DNA, 1259 bp, Arabidopsis thaliana
agattctcatgtgttgatgaaactagttagcctctttttatctactctttttgtcactatcataagctcggaatcgcagtgccggaacttcgagtcgatcatcagtttcggtgattcgattgccgacactggaaacttgctcggtctctcagatcataacaatcttcctatgagcgcgtttccaccgtacggagaaactttcttccaccacccaaccggtcgtttctcagacggtcgcctcattattgacttcatcgctgaatttttggggcttccttatgtgcctccttacttcggatctacaaatggaaactttgagaaaggagttaattttgccgtagcctcagcaactgcattggaaagttctttcttagaagagagaggataccattgtcctcacaacatcagtttaggagttcagcttaacatcttcaaggagagtttaccaaatctatgtggcttaccatcagattgtagagatatgattggaaatggtttgattctcatgggagagattggagctaatgattacaatttcccattcttccaactcagacccttggacgaggtcaaagagctcgttccattggtgattaatacgatatcttctgcaatcacggagttgattggtatgggaggaagaacatttctggtgcccggagggttccctctcggatgctcagtagcatttttgacattacaccaaacatcaaacatggaagaatatgatcctttaacaggatgtttgaaatggctgaacaagtttggagaataccacagtgagcggcttcaggaagaactcaacagactcaggaagcttaaccctcacgtcaacatcatatatgctgactactacaatgcttcattgcgccttggccgagaaccaagtaaatacggattcataaacagacacttgtcagcttgttgcggtgtaggagggccgtacaacttcaacttaagtagaagttgtgggagtgtaggagtggaagcttgtagtgatccttcaaagtatgtggcctgggatggccttcatatgactgaggctgcacacaaatcgatggctgatggattagtcaaaggaccatatgcgattcctcctttcgattggtcatgtctcagctcaatgattaagaagaaggaagtcgttggaaacacaatattctttgatgaatagtagacacaagctaagttgatttcaaaatgtaaaatatctgaataaaaagatctaaggataaaaaatttctaataataaccaattt

SEQ ID NO: 9071 - protein, 390 aa, Arabidopsis thaliana
DSHVLMKLVSLFLSTLFVTIISSESQCRNFESIISFGDSIADTGNLLGLSDHNNLPMSAFPPYGETFFHHPTGRFSDGRLIIDFIAEFLGLPYVPPYFGSTNGNFEKGVNFAVASATALESSFLEERGYHCPHNISLGVQLNIFKESLPNLCGLPSDCRDMIGNGLILMGEIGANDYNFPFFQLRPLDEVKELVPLVINTISSAITELIGMGGRTFLVPGGFPLGCSVAFLTLHQTSNMEEYDPLTGCLKWLNKFGEYHSERLQEELNRLRKLNPHVNIIYADYYNASLRLGREPSKYGFINRHLSACCGVGGPYNFNLSRSCGSVGVEACSDPSKYVAWDGLHMTEAAHKSMADGLVKGPYAIPPFDWSCLSSMIKKKEVVGNTIFFDE

SEQ ID NO: 9072 - protein, 385 aa, Arabidopsis thaliana
MKLVSLFLSTLFVTIISSESQCRNFESIISFGDSIADTGNLLGLSDHNNLPMSAFPPYGETFFHHPTGRFSDGRLIIDFIAEFLGLPYVPPYFGSTNGNFEKGVNFAVASATALESSFLEERGYHCPHNISLGVQLNIFKESLPNLCGLPSDCRDMIGNGLILMGEIGANDYNFPFFQLRPLDEVKELVPLVINTISSAITELIGMGGRTFLVPGGFPLGCSVAFLTLHQTSNMEEYDPLTGCLKWLNKFGEYHSERLQEELNRLRKLNPHVNIIYADYYNASLRLGREPSKYGFINRHLSACCGVGGPYNFNLSRSCGSVGVEACSDPSKYVAWDGLHMTEAAHKSMADGLVKGPYAIPPFDWSCLSSMIKKKEVVGNTIFFDE

SEQ ID NO: 9073 - protein, 334 aa, Arabidopsis thaliana
MSAFPPYGETFFHHPTGRFSDGRLIIDFIAEFLGLPYVPPYFGSTNGNFEKGVNFAVASATALESSFLEERGYHCPHNISLGVQLNIFKESLPNLCGLPSDCRDMIGNGLILMGEIGANDYNFPFFQLRPLDEVKELVPLVINTISSAITELIGMGGRTFLVPGGFPLGCSVAFLTLHQTSNMEEYDPLTGCLKWLNKFGEYHSERLQEELNRLRKLNPHVNIIYADYYNASLRLGREPSKYGFINRHLSACCGVGGPYNFNLSRSCGSVGVEACSDPSKYVAWDGLHMTEAAHKSMADGLVKGPYAIPPFDWSCLSSMIKKKEVVGNTIFFDE

SEQ ID NO: 9074 - DNA, 1504 bp, Arabidopsis thaliana
aagctgaaatctagtttattttttctatttactaaaacctcccaaggaccaaagaacatcgacaaaggaagacgacgaagaagatttcgagcttcgacaaatcatgcggattcttactgctcgcatagctaaccatttttgcagggcacgaaacgcgaatcctcgatctcgaaatttctcctcgtcgaacaagaaagatgaccttacattggaggaagaagctgagaggaaaataggttggtgtctcaaaattttctttgcgggcacagcaacgtatattggataccagtttttcccttacttaggtgataacttaattcatcaatcaatatcgcttttacatgtgaaggatcctttgtttaagagaatgggagcttctcggctttcccgtttcgctattgatgatgaaaggaggatgaaggttgtagagatgggtggggctcaagagctactacatatgttgggaagtgctaaagatgacaagacaaggaaagaagccctaaaggctcttgctgctctctctaaatcaggtgaagctgctaaattcctaggctctaatggagcactctctatcgtcaaatcgactccaaattccttggaagattcagacatttcaacatacaagtcaaacatactcgagaagctagttgagaaaaacctcgctgtctcttccaactgaactacctttttacggacaaggataggtcaagaatcataagagcatgtccattgcagggaccttgcaagttttttaagaaaatccttatgaataatagcaaaaaattaaatcagaatggtgtaataaaccaaggtgcgaaccttgtttaaggtatttttgggtgtattaggtgcgctgacgtggctgtatattattggatgacaacttttcccgtgtttttttttctttcccattcccaaactatttttttctttctctcctctctcctctcctgttttctccgaatttcgacttcgacggatcaaattcttcatcgtctctttttttatcatgtctctcttctcatacgatccacaagattcgtgatcgaagaggtgtcagaaaatccaccggaagagctactcttaccggctttgctgaggtcaacgatgtggcgctgtttttcggtggattggttagaatgttgatgctcataggatcctgcttgtgggttcgtctgctggttgaatttgattgcaagttaaagtctggtgcttttgatctggtaattgcttcttacaagttgatctgtaacaattgatttcgaattcagtatatggatttgtatacagattctgggctttgctttatgttcaaatttgtgtttgatcttttggtttttaagataaaaatgtgactcttttggtgcttattcacttgtatgtcatgttatggtctatgttctctaagtggttttagcttagataacttgtatgtctgttttctttactttaagttcaatatgacttgtatcacttcggctttaatgatattgttgtttaaaag

SEQ ID NO: 9075 - protein, 191 aa, Arabidopsis thaliana
MRILTARIANHFCRARNANPRSRNFSSSNKKDDLTLEEEAERKIGWCLKIFFAGTATYIGYQFFPYLGDNLIHQSISLLHVKDPLFKRMGASRLSRFAIDDERRMKVVEMGGAQELLHMLGSAKDDKTRKEALKALAALSKSGEAAKFLGSNGALSIVKSTPNSLEDSDISTYKSNILEKLVEKNLAVSSN

SEQ ID NO: 9076 - protein, 103 aa, Arabidopsis thaliana
MGASRLSRFAIDDERRMKVVEMGGAQELLHMLGSAKDDKTRKEALKALAALSKSGEAAKFLGSNGALSIVKSTPNSLEDSDISTYKSNILEKLVEKNLAVSSN

SEQ ID NO: 9077 - DNA, 1666 bp, Arabidopsis thaliana
attgcatttgtctctccaaaatgtctaattaatggttttgatcttccaaccagatcttcttctctatctcttcgacaaacccttttttctgggttcttcggagaggtgatttatcaccaaaaaaaagattttaaaagtctaaatccttttttctttctttccttcaacatgcctttaccttggaagaaatctaaatctagtcggatctctagattcgtatcagactttcaacaatctcctaaacatggtggatctctcgttgttgaaactggtttcccaacttctttaatcgatctctttgttaagaatcgcgatcgtctcaaaaaacaatcttcaaaacgtaacaacaagaacaacaaagcccagactgaaacgcgtgttttgtctccacctcctcctcatatgtctttgcagcgtcgtatgtctcttccttccaagcttgatccagctttggttacagaggattctcctttggtgagaaagatcgaggaaacttctgttccggagattatccatgaagacgacggtggtcatcgcggtggaggaggaggagggtgtgttttgatagtggtggtgtttaaggtttttatggtggctgtgcttgccttgagcacgaagaagctcgccgtggggatcacgctctctgcttttgcccttctcttcctcgagcttgcggtggcgcgtgtcttcacgtacttgaatctctgtcccgacgcgcagattcggatagattctttgatcgataagctcatagggaagcgacataaagagaagctagaagaagaagaagaagaagaatcaacatcgacgcatgacagaagaaacaatgtctactttgaaatcatcgaagaacctagagaggagattagagtcactcctcaatcggattcgtcgtcattggagaaggcgaaacttgtggtggatgagaagaaagaaatgcagacgataagagatgttatgtttaagactgagaaaagcaaaagcgcgaagctgaaatcaaagattgtgaagaagattgtgccaaagaagctaaggagttataagaagaagaagaagatgaagaacaaagaaaaagaagaagaagaagttgaacttgaaactgaagaagaagggtctatgacagaagtttctagcttgtattcagatgagagaatcgggagtgaaatctctgagagggatgatttgagttcgaatccgccatttttagagagttgtacagaggttgaagaagaagaagagactggaccaaaagaggatctaacgaaagtgattggtttgatagtgattgttcttgttggattgctgtgtgggaaagtctttgctattggtctgacactctcttggtgtctgattctcagagttttctgttgcaaatctcaaaccagtttctgaaacagaggaaaacatgattcagactttgggttcttttttttttgtggaagtccgtggcagtggtgggccttagggatcgccgttagttgttgacggtgacggtgttgacggtagagagacggtgacgggagtgttgttgttgggggtggttggcagttcgaagctagacaattggtttgcttatgaaactgtgtaaatttgttttgttgttaacagagatatatatcgtgttattatgatggtcaaagagtcaaagttgttgttatgaagaacc

SEQ ID NO: 9078 - protein, 463 aa, Arabidopsis thaliana
IAFVSPKCLINGFDLPTRSSSLSLRQTLFSGFFGEVIYHQKKDFKSLNPFFFLSFNMPLPWKKSKSSRISRFVSDFQQSPKHGGSLVVETGFPTSLIDLFVKNRDRLKKQSSKRNNKNNKAQTETRVLSPPPPHMSLQRRMSLPSKLDPALVTEDSPLVRKIEETSVPEIIHEDDGGHRGGGGGGCVLIVVVFKVFMVAVLALSTKKLAVGITLSAFALLFLELAVARVFTYLNLCPDAQIRIDSLIDKLIGKRHKEKLEEEEEEESTSTHDRRNNVYFEIIEEPREEIRVTPQSDSSSLEKAKLVVDEKKEMQTIRDVMFKTEKSKSAKLKSKIVKKIVPKKLRSYKKKKKMKNKEKEEEEVELETEEEGSMTEVSSLYSDERIGSEISERDDLSSNPPFLESCTEVEEEEETGPKEDLTKVIGLIVIVLVGLLCGKVFAIGLTLSWCLILRVFCCKSQTSF

SEQ ID NO: 9079 - protein, 407 aa, Arabidopsis thaliana
MPLPWKKSKSSRISRFVSDFQQSPKHGGSLVVETGFPTSLIDLFVKNRDRLKKQSSKRNNKNNKAQTETRVLSPPPPHMSLQRRMSLPSKLDPALVTEDSPLVRKIEETSVPEIIHEDDGGHRGGGGGGCVLIVVVFKVFMVAVLALSTKKLAVGITLSAFALLFLELAVARVFTYLNLCPDAQIRIDSLIDKLIGKRHKEKLEEEEEEESTSTHDRRNNVYFEIIEEPREEIRVTPQSDSSSLEKAKLVVDEKKEMQTIRDVMFKTEKSKSAKLKSKIVKKIVPKKLRSYKKKKKMKNKEKEEEEVELETEEEGSMTEVSSLYSDERIGSEISERDDLSSNPPFLESCTEVEEEEETGPKEDLTKVIGLIVIVLVGLLCGKVFAIGLTLSWCLILRVFCCKSQTSF

SEQ ID NO: 9080 - protein, 329 aa, Arabidopsis thaliana
MSLQRRMSLPSKLDPALVTEDSPLVRKIEETSVPEIIHEDDGGHRGGGGGGCVLIVVVFKVFMVAVLALSTKKLAVGITLSAFALLFLELAVARVFTYLNLCPDAQIRIDSLIDKLIGKRHKEKLEEEEEEESTSTHDRRNNVYFEIIEEPREEIRVTPQSDSSSLEKAKLVVDEKKEMQTIRDVMFKTEKSKSAKLKSKIVKKIVPKKLRSYKKKKKMKNKEKEEEEVELETEEEGSMTEVSSLYSDERIGSEISERDDLSSNPPFLESCTEVEEEEETGPKEDLTKVIGLIVIVLVGLLCGKVFAIGLTLSWCLILRVFCCKSQTSF

SEQ ID NO: 9081 - DNA, 618 bp, Arabidopsis thaliana
cccactctgtgcattaggtttcattttagcggcagacgagagagctaaagcaaggagcaaccctaaccatggcgactcaaccagctactgaatctgtgcaatgcttcggaaggaagaagaccgcagtggccgtcactcactgcaagcgtggatctggtttgatcaagctcaacggttgcccaatcgagcttttccagcctgagatcctccgattcaagatcttcgagccggttcttctcctcggaaagcaccgtttcgctggtgtgaacatgaggatccgtgtcaacggtggtggtcacacatcccaggtttacgccatccgtcagagtatcgcgaaggctcttgttgcgtactaccagaagtatgtggatgagcagtcgaagaaggagattaaggatatcttggtgaggtatgataggactctgcttgtggcggatccgaggaggtgtgagactctttagattttataatttctgctttattatgcttgttggattatggtgattctccaagaaacttatgttttgttatgtctactattttcttatttttatttcattgtcttgttggtatttactctcaaaaaaaaaaaaaaaaaagcttatcgataccgtcgac

SEQ ID NO: 9082 - protein, 130 aa, Arabidopsis thaliana
MATQPATESVQCFGRKKTAVAVTHCKRGSGLIKLNGCPIELFQPEILRFKIFEPVLLLGKHRFAGVNMRIRVNGGGHTSQVYAIRQSIAKALVAYYQKYVDEQSKKEIKDILVRYDRTLLVADPRRCETL

SEQ ID NO: 9083 - DNA, 684 bp, Arabidopsis thaliana
gcgttatacttaaaacactctcctcttcttttccttgtccttctctatcgcttctataaactttttcgatctaaggttcgtgatctccttcttctctacgaagtttacactttttcttcaaaggaaacaatgagccagtacaatcaacctcccgttggtgttcctcctcctcaaggttatccaccggagggatatccaaaagatgcttatccaccacaaggatatcctcctcagggatatcctcagcaaggctatccacctcagggatatcctcaacaaggttatcctcagcaaggatatcctccaccgtacgcgcctcaatatcctccaccaccgcagcatcagcaacaacagagcagtcctggctttctagaaggatgtcttgctgctctgtgttgttgctgtctcttggatgcttgcttctgattggagtctctctctctctgcataaagcttcgggatttatttgtaagagggttttggttaaacaaaaaccttaattgatttgtggggcattaaaaatgaatctctcgatgattctctttcgttttatgtgtaatgttcttcggttcataacattttaactattgtctatcgacgttctgccttagtttgtatttgattatgggaatgtaaattggttgggagacactattctatgccatagtttattgcttggatctt

SEQ ID NO: 9084 - protein, 141 aa, Arabidopsis thaliana
ALYLKHSPLLFLVLLYRFYKLFRSKVRDLLLLYEVYTFSSKETMSQYNQPPVGVPPPQGYPPEGYPKDAYPPQGYPPQGYPQQGYPPQGYPQQGYPQQGYPPPYAPQYPPPPQHQQQQSSPGFLEGCLAALCCCCLLDACF

SEQ ID NO: 9085 - protein, 98 aa, Arabidopsis thaliana
MSQYNQPPVGVPPPQGYPPEGYPKDAYPPQGYPPQGYPQQGYPPQGYPQQGYPQQGYPPPYAPQYPPPPQHQQQQSSPGFLEGCLAALCCCCLLDACF

SEQ ID NO: 9086 - DNA, 1812 bp, Arabidopsis thaliana
ggactttcatttgcttcgtctctccggttgttaccaccacacaacgccatggaagctgctcttgctgcatgcgctcttccatcgctccgaattctcaatacgaaacctcgtttcagatgttccttctccaatccaagcctacccatttctcctaattcccttatcacccgcaaatcaagtcgattcacaaccgcagtatcatcaccaccatcatcatcagccgctacgtcaacgaattctccaccggaacctgaagccctattcgaacccgggtcggataagttcgattggtacgctaattggtacccagtgatgccaatttgcgatcttgacaagaaggttcctcatgggaagaaagttatggggattgatttggttgtttggtgggataggaacgagaagcaatggaaagtgatggatgacacgtgtcctcatcgtcttgctcctttgtctgatggaaggattgatcaatgggggaggttgcaatgtgtttatcatggatggtgctttaatggttccggtgactgtaaactcattcctcaagctcctcctgatggtcctccggtccacactttcaagcaagcttgtgtagctgtttacccgagtactgtgcagcatgagatcatttggttttggccaaacagtgatccaaagtacaaaaacattattgaaaccaacaagcctccttacattccagagttagaagacccatcattcactaagttgatggggaatcgtgatattccttacgggtacgatgtcttggtggaaaacctcatggacccggctcatgttccttatgcacattatggactgatgcggtttcctaaaccaaaagagaagattgacagagaaggggggaaaccactcgaaatcaacgttaaaaaactagacaacaaagggttcttttcaaaacaagaatggggttattctaattttattgcaccatgtgtgtatcgctcttccacagaccctctaccagagcaggaacatgagtatcccgcaccagctgcttctgacaaggcggcattgtcaaagcggagattgtctttgatctttatatgtattccggtcagtccaggtcgtagtaggctgatatggacgttcccgaggaattttggtgtatttattgataagattgtccctagatgggtgtttcacattggtcaaaatacgattctagactcagatttgcacctccttcatgtagaggagcggaagatactggagagaggccctgaaaactggcaaaaagcttgctttatcccaacaaaatcagacgctaatgtggttacattcaggagatggtttaacaagtacagcgaggctcgagtcgattggagaggaaagtttgatccatttcttcttcctcctacgcctccccgagaacagctcttaggtattggtcgcatgttgagaactgcagcagctgcaagaaagcttacaaatatctcaatgcgctagaggtgatcttacaaatcgcatccgttgctatgatcggagtcatggcggtgttgaagcaaacgacaatgtcgaatgtggctagaattgcagtgcttgtggcggctgttttaagttttgcagcttcaaagtggctatcacacttcatctacaagacattccattaccatgactacaaccatgctgttgtttgaaatgtatattggtgtttgtacttcgtatatatactcatcggatgtattcagtccacatggtgttgtacataacagttatacagaaactaattcttgaatctataccgtttactaacgaaaaaaaaaaaaaaaaaaaactcgagggggggcccggtac

SEQ ID NO: 9087 - protein, 487 aa, Arabidopsis thaliana
GLSFASSLRLLPPHNAMEAALAACALPSLRILNTKPRFRCSFSNPSLPISPNSLITRKSSRFTTAVSSPPSSSAATSTNSPPEPEALFEPGSDKFDWYANWYPVMPICDLDKKVPHGKKVMGIDLVVWWDRNEKQWKVMDDTCPHRLAPLSDGRIDQWGRLQCVYHGWCFNGSGDCKLIPQAPPDGPPVHTFKQACVAVYPSTVQHEIIWFWPNSDPKYKNIIETNKPPYIPELEDPSFTKLMGNRDIPYGYDVLVENLMDPAHVPYAHYGLMRFPKPKEKIDREGGKPLEINVKKLDNKGFFSKQEWGYSNFIAPCVYRSSTDPLPEQEHEYPAPAASDKAALSKRRLSLIFICIPVSPGRSRLIWTFPRNFGVFIDKIVPRWVFHIGQNTILDSDLHLLHVEERKILERGPENWQKACFIPTKSDANVVTFRRWFNKYSEARVDWRGKFDPFLLPPTPPREQLLGIGRMLRTAAAARKLTNISMR

SEQ ID NO: 9088 - protein, 471 aa, Arabidopsis thaliana
MEAALAACALPSLRILNTKPRFRCSFSNPSLPISPNSLITRKSSRFTTAVSSPPSSSAATSTNSPPEPEALFEPGSDKFDWYANWYPVMPICDLDKKVPHGKKVMGIDLVVWWDRNEKQWKVMDDTCPHRLAPLSDGRIDQWGRLQCVYHGWCFNGSGDCKLIPQAPPDGPPVHTFKQACVAVYPSTVQHEIIWFWPNSDPKYKNIIETNKPPYIPELEDPSFTKLMGNRDIPYGYDVLVENLMDPAHVPYAHYGLMRFPKPKEKIDREGGKPLEINVKKLDNKGFFSKQEWGYSNFIAPCVYRSSTDPLPEQEHEYPAPAASDKAALSKRRLSLIFICIPVSPGRSRLIWTFPRNFGVFIDKIVPRWVFHIGQNTILDSDLHLLHVEERKILERGPENWQKACFIPTKSDANVVTFRRWFNKYSEARVDWRGKFDPFLLPPTPPREQLLGIGRMLRTAAAARKLTNISMR

SEQ ID NO: 9089 - protein, 383 aa, Arabidopsis thaliana
MPICDLDKKVPHGKKVMGIDLVVWWDRNEKQWKVMDDTCPHRLAPLSDGRIDQWGRLQCVYHGWCFNGSGDCKLIPQAPPDGPPVHTFKQACVAVYPSTVQHEIIWFWPNSDPKYKNIIETNKPPYIPELEDPSFTKLMGNRDIPYGYDVLVENLMDPAHVPYAHYGLMRFPKPKEKIDREGGKPLEINVKKLDNKGFFSKQEWGYSNFIAPCVYRSSTDPLPEQEHEYPAPAASDKAALSKRRLSLIFICIPVSPGRSRLIWTFPRNFGVFIDKIVPRWVFHIGQNTILDSDLHLLHVEERKILERGPENWQKACFIPTKSDANVVTFRRWFNKYSEARVDWRGKFDPFLLPPTPPREQLLGIGRMLRTAAAARKLTNISMR

SEQ ID NO: 9090 - DNA, 2145 bp, Arabidopsis thaliana
ctagtccccccccccccccaaatccttttatcctctgaaaaatctcaactttcgaagaaaacgaaaatggcgagccttgtctacgggacgccgtggcttagggttagatctttaccggagcttgctccagcttttctcagacggcgtcaatcttctttattttactgttctcggcgaagcttcgcggtggttgcgtgttccactccagtcaacaatggtgggtctgtcagagttcgtttcgcgccttctcctactggtaatctccatgtaggtggagcaaggactgctcttttcaactacttgttcgcgaggtctaaaggagggaaatttgtgctgagaattgaagatacagatttggagagatcaacacgtgaatctgaagcagctgttcttcaggatctctcatggcttggtcttgattgggatgaaggtcctggggttagtggagactttggtccttatcggcaatctgaaagaaatgctttgtataaacaatatgcagagaagcttttagagtcaggtcatgtctatcgatgcttttgctcaagtgaggaacttgtaaagatgaaggagaatgcaaagttgaaacagttgcctccagtatataccgggaaatgggcaacagcttctgatgctgaaatagagcaagagttagaaaagggaacaccttttacttaccggtttcgtgtgccaaaggaaggctctttgaaaattaatgacctgattcgtggcgagtgtcttgaaggtctgttggaacttggatactcttggggattttgtggtaatgagaagtaatggccaacccgtttacaacttttgtgttacggtagatgatgctaccatggctatatcacatgttataagggctgaagaacacttgcctaatactttgaggcaggctctaatttacaaggctcttaagttcccgatgcctcaatttgcacatgtttctttaattttagctccggatagaagtaaattatcaaagcgacatggggcaacttctgtaggccagtacagagagatgggatatctacctcagggaatggttaactatttggcactcttaggttggggagacgggactgaaaatgaattcttcacactcgaggatcttgttgaaaaattctcgattgaacgtgtcaacaaaagtggcgcgatttttgattcaacaaagttaagatggatgaatggtcaacatctgagggcacttccaaatgagaaactaacaaaacttgttggtgagcgatggaagagcgctggtatcttaatagaatccgaggggagttttgtaaatgaagctgtcgagcttctcaaggatgggattgagttggtgacagattcagacaaagtacttttgaacttgctttcatatcctctacacgctacattggctagccctgaagctaagcctgctgtggaagacaaacttcatgaagtagcagccagcctcatagctgcttatgacagcggagagattccaagcgctttagaagaaggacaaggtgcttggcagaaatgggtgaaagcctttggcaaatccttgaaacgcaaaggtaaatcacttttcatgccactacgagtgttgttaacgggaaaactccatggtcctgagatgggcaccagtattgttctgatttacaaagctggaagtcctggtatagtggttcctcaagctgggtttgtgtccatggaggaacggtttaagattcttagggagatagactgggaagctttgaacaaagatgagagtgtgcctcttgaatctacagccacagtatcaacctgagaaaactcccctttttttttttttttccttcaatatttggttagttggtgagagaaagacagcccagagattttgattcctcgtgcatttcttgtttcccgaaacaaatggcacaaagaaatttgtagattataatgtatcagcaaagcaaacttaggaacaaaccagagagcttgtaacattatcaggccagttttaatttgctttcaatgctctgttttcttaacattttcttctttgtctgtttttttttttggtcattttttttcttatttgtttaactgtactttctctctaaggataaaatcttataatggtaaaaaaaaaaaaaaaaaaaactcgagggggggcccggt

SEQ ID NO: 9091 - protein, 334 aa, Arabidopsis thaliana
MRSNGQPVYNFCVTVDDATMAISHVIRAEEHLPNTLRQALIYKALKFPMPQFAHVSLILAPDRSKLSKRHGATSVGQYREMGYLPQGMVNYLALLGWGDGTENEFFTLEDLVEKFSIERVNKSGAIFDSTKLRWMNGQHLRALPNEKLTKLVGERWKSAGILIESEGSFVNEAVELLKDGIELVTDSDKVLLNLLSYPLHATLASPEAKPAVEDKLHEVAASLIAAYDSGEIPSALEEGQGAWQKWVKAFGKSLKRKGKSLFMPLRVLLTGKLHGPEMGTSIVLIYKAGSPGIVVPQAGFVSMEERFKILREIDWEALNKDESVPLESTATVST

SEQ ID NO: 9092 - protein, 315 aa, Arabidopsis thaliana
MAISHVIRAEEHLPNTLRQALIYKALKFPMPQFAHVSLILAPDRSKLSKRHGATSVGQYREMGYLPQGMVNYLALLGWGDGTENEFFTLEDLVEKFSIERVNKSGAIFDSTKLRWMNGQHLRALPNEKLTKLVGERWKSAGILIESEGSFVNEAVELLKDGIELVTDSDKVLLNLLSYPLHATLASPEAKPAVEDKLHEVAASLIAAYDSGEIPSALEEGQGAWQKWVKAFGKSLKRKGKSLFMPLRVLLTGKLHGPEMGTSIVLIYKAGSPGIVVPQAGFVSMEERFKILREIDWEALNKDESVPLESTATVST

SEQ ID NO: 9093 - protein, 286 aa, Arabidopsis thaliana
MPQFAHVSLILAPDRSKLSKRHGATSVGQYREMGYLPQGMVNYLALLGWGDGTENEFFTLEDLVEKFSIERVNKSGAIFDSTKLRWMNGQHLRALPNEKLTKLVGERWKSAGILIESEGSFVNEAVELLKDGIELVTDSDKVLLNLLSYPLHATLASPEAKPAVEDKLHEVAASLIAAYDSGEIPSALEEGQGAWQKWVKAFGKSLKRKGKSLFMPLRVLLTGKLHGPEMGTSIVLIYKAGSPGIVVPQAGFVSMEERFKILREIDWEALNKDESVPLESTATVST

SEQ ID NO: 9094 - DNA, 1160 bp, Arabidopsis thaliana
ggtcgatgtctccgatctccatcgtaattcagtttccttcaattgatgtgaccttcgattccaaactcgcaaacccagaaacgggttactcatagaaacagtgatagagagatatgaatgttgacgctagagtcggtgttgcggtcgatggagctcagagtgctcttaacactgcaaccactgttcatagtagcgtcgtcatgacgcagattaagccgcaggcaaagctaggaaccttccagaatctcctcgctggtggtattgccggcgccattagcaagacatgtaccgctcctcttgctcgcctcaccatcttgtttcagttgcaagggatgcaatcagaaggtgcagtgttaagccgtccaaacttacggcgtgaagcttcccgtattatcaacgaggaaggatatagagccttttggaaaggaaatttggttactgtagtacacaggattccttatactgcagtaaacttctatgcatatgagaagtacaatctatttttcaattcaaatccagtcgtacagagttttataggaaatacgagtggcaatccgatagtgcattttgttagtggtggcttggctggaattacagctgctacagctacatatcccctcgatcttgtcaggactcgtcttgctgcacagaggaatgcaatttactaccagggtattgagcatactttccgtaccatatgcagagaagagggaattttgggtctatataaaggacttggtgctacattattgggtgttggaccaagtcttgctatcaatttcgccgcgtacgagtctatgaaattgttttggcattctcataggccaaatgattcggatttggttgtttctcttgtttctggaggtctagctggagctgtttcttcaacagatgataaactttttgatgcccataactatgtagctacatacccattggatcttgtgagaagaagaatgcaagtggaaggagctggtggaagagcaagagtatacaacactggactctttggaacattcaaacacatattcaagtcagaaggcttcaaagggatatacagaggaatattgcctgaatattacaaagtagttcctggcgttggcatcgtcttcatgacatacgatgctttgcggagactcttaacttctctccccgattga

SEQ ID NO: 9095 - protein, 348 aa, Arabidopsis thaliana
MNVDARVGVAVDGAQSALNTATTVHSSVVMTQIKPQAKLGTFQNLLAGGIAGAISKTCTAPLARLTILFQLQGMQSEGAVLSRPNLRREASRIINEEGYRAFWKGNLVTVVHRIPYTAVNFYAYEKYNLFFNSNPVVQSFIGNTSGNPIVHFVSGGLAGITAATATYPLDLVRTRLAAQRNAIYYQGIEHTFRTICREEGILGLYKGLGATLLGVGPSLAINFAAYESMKLFWHSHRPNDSDLVVSLVSGGLAGAVSSTDDKLFDAHNYVATYPLDLVRRRMQVEGAGGRARVYNTGLFGTFKHIFKSEGFKGIYRGILPEYYKVVPGVGIVFMTYDALRRLLTSLPD

SEQ ID NO: 9096 - protein, 319 aa, Arabidopsis thaliana
MTQIKPQAKLGTFQNLLAGGIAGAISKTCTAPLARLTILFQLQGMQSEGAVLSRPNLRREASRIINEEGYRAFWKGNLVTVVHRIPYTAVNFYAYEKYNLFFNSNPVVQSFIGNTSGNPIVHFVSGGLAGITAATATYPLDLVRTRLAAQRNAIYYQGIEHTFRTICREEGILGLYKGLGATLLGVGPSLAINFAAYESMKLFWHSHRPNDSDLVVSLVSGGLAGAVSSTDDKLFDAHNYVATYPLDLVRRRMQVEGAGGRARVYNTGLFGTFKHIFKSEGFKGIYRGILPEYYKVVPGVGIVFMTYDALRRLLTSLPD

SEQ ID NO: 9097 - protein, 275 aa, Arabidopsis thaliana
MQSEGAVLSRPNLRREASRIINEEGYRAFWKGNLVTVVHRIPYTAVNFYAYEKYNLFFNSNPVVQSFIGNTSGNPIVHFVSGGLAGITAATATYPLDLVRTRLAAQRNAIYYQGIEHTFRTICREEGILGLYKGLGATLLGVGPSLAINFAAYESMKLFWHSHRPNDSDLVVSLVSGGLAGAVSSTDDKLFDAHNYVATYPLDLVRRRMQVEGAGGRARVYNTGLFGTFKHIFKSEGFKGIYRGILPEYYKVVPGVGIVFMTYDALRRLLTSLPD

SEQ ID NO: 9098 - DNA, 815 bp, Arabidopsis thaliana
tgctatggctatatctatgggacatgctcggtgagcaaaacaataaacaaaagtaatcagaagatatctttgtaacatctttgaatttcgctaaaggaaaagagagagatttggtaaaaatgcagtcgatgaaagaaacagcttcgaatattgcagcttctgcaaaatctggcatggacaaaaccaaagctaccttggaggaaaaggcggagaagatgaagacacgagaccctgttcagaaacagatggctacacaggttaaagaagataagatcaatcaagctgagatgcagaagagagaaacgcgtcagcacaacgcggccatgaaagaagcggctggagccggaaccggtttaggtttggggacggccactcactcgaccactggacaagtcggacacggcactgggacacatcagatgtcggctctgcctggtcacggaacgggacaactgaccgaccgcgttgtggagggcacggctgtgaccgacccgattggaaggaacactggaactggtcggacaaccgctcataacacacacgttggtggtggtggtgccaccgggtacggaaccggcgggggatatactggataaacggtgttgttcacttgttctgttatttgctctatttttgttgaatcgaaatttcgtggttttctgtcttactttcgtgttctgttttttttttttctttttcttgtgcttctgaataattgtaggacttcgatctcatctaggtttttgttgttggatgatagtcttactttatgagtagaatgttcatgcaatgtaacagtaataaaattatccgtt

SEQ ID NO: 9099 - protein, 158 aa, Arabidopsis thaliana
MQSMKETASNIAASAKSGMDKTKATLEEKAEKMKTRDPVQKQMATQVKEDKINQAEMQKRETRQHNAAMKEAAGAGTGLGLGTATHSTTGQVGHGTGTHQMSALPGHGTGQLTDRVVEGTAVTDPIGRNTGTGRTTAHNTHVGGGGATGYGTGGGYTG

SEQ ID NO: 9100 - protein, 155 aa, Arabidopsis thaliana
MKETASNIAASAKSGMDKTKATLEEKAEKMKTRDPVQKQMATQVKEDKINQAEMQKRETRQHNAAMKEAAGAGTGLGLGTATHSTTGQVGHGTGTHQMSALPGHGTGQLTDRVVEGTAVTDPIGRNTGTGRTTAHNTHVGGGGATGYGTGGGYTG

SEQ ID NO: 9101 - protein, 140 aa, Arabidopsis thaliana
MDKTKATLEEKAEKMKTRDPVQKQMATQVKEDKINQAEMQKRETRQHNAAMKEAAGAGTGLGLGTATHSTTGQVGHGTGTHQMSALPGHGTGQLTDRVVEGTAVTDPIGRNTGTGRTTAHNTHVGGGGATGYGTGGGYTG

SEQ ID NO: 9102 - DNA, 1839 bp, Arabidopsis thaliana
gagtaacatcaaaatttacaaaaaacaaaaaaacatgctatctctcaaactcttcctcgtaacactcttcttatctcttcaaacactcttcattgcttctcaaactcttcttccttcttcttcaaacacttcatcaaccatctgcaaaacaacacccgatccaaaattctgcaaatcagtgttcccacaaacatctcaaggcgacgttcgcgaatacggccgcttctccctccgcaaatcgctaacgcaatcgcggaaattcacacgcaccattgacaaatacctcaaacgcaacaatgcactattatctcaatccgccgttggagctctccaagactgccgttacctagcaagcctcacaacagactatctcataacatcgttcgagaccgacaatatcactacatcatccaaaacgttgtcgttttccaaagccgacgaaatccaaacacttctctctgcggctttgactaacgagcaaacatgtcttgatggaatcaacaccgctgcttcctcttcttggactatacgaaacggtgtcgcattgcctctaatcaacgacacgaagctctttagtgtttcgctcgcattattcaccaaaggttgggttccaaagaagaagaaacaagtagccagttactcttgggcccatccaaagaacactcatagtcacacaaaaccattccgtcatttccgtaacggagctttaccgttaaagatgacggaacacacacgcgcagtttacgagtctttaagcaggaggaaactcgctgacgacgataatgacgtaaacacggtgcttgtaagcgacatcgtaacggtgaaccaaaacggaacggggaatttcacgaccataacggaagctgttaattcggcgccgaatataactgacggtaccgccggttatttcgttatctacgtgacgtcaggtgtttatgaggaaaacgtagtgattgccaaaaacaaaagatatctaatgatgattggtgacggaataaaccgtacggtggttaccggtaaccggaatgtcgtcgacggttggaccactttcaactccgccacttttgctgttacatcgccgaacttcgttgccgtgaacatgactttccgaaataccgctggaccagagaagcaccaggccgtagctatgaggagcagtgcagatctttcaatcttctatagttgcagtttcgaagcttatcaagacactttatacacacattcactaagacagttctatagagaatgtgacatttatggaacagtcgatttcatattcggcaatgcagctgttgtgttccaagactgtaatctctatccaagacaaccgatgcagaaccagttcaacgctattacagctcaaggtcgtactgatccgaatcaaaacacgggaatttcgattcacaattgtacgattaaaccggcagatgatttggtttcgagtaactatacggttaaaacgtatttgggacgaccatggaaggagtattcacgtacggtttttatgcaatcgtacatagacgaggttgttgaaccggttggttggagagaatggaacggagatttcgcattgagtacgttgtactatgctgagtataacaataccggttccggttcaagtactacagatcgagtggtttggtccggttatcatgtgattaattctacggatgcgaataatttcacagtcgagaatttcttgttaggagatggttggatggttcagagtggtgtaccttatattagtggtttactttcgtaatttcttgtatctgattatttgttttagctattattatgggtaaaaaaaaaaaaaaaaaactcgagggggggcccggt

SEQ ID NO: 9103 - protein, 586 aa, Arabidopsis thaliana
SNIKIYKKQKNMLSLKLFLVTLFLSLQTLFIASQTLLPSSSNTSSTICKTTPDPKFCKSVFPQTSQGDVREYGRFSLRKSLTQSRKFTRTIDKYLKRNNALLSQSAVGALQDCRYLASLTTDYLITSFETDNITTSSKTLSFSKADEIQTLLSAALTNEQTCLDGINTAASSSWTIRNGVALPLINDTKLFSVSLALFTKGWVPKKKKQVASYSWAHPKNTHSHTKPFRHFRNGALPLKMTEHTRAVYESLSRRKLADDDNDVNTVLVSDIVTVNQNGTGNFTTITEAVNSAPNITDGTAGYFVIYVTSGVYEENVVIAKNKRYLMMIGDGINRTVVTGNRNVVDGWTTFNSATFAVTSPNFVAVNMTFRNTAGPEKHQAVAMRSSADLSIFYSCSFEAYQDTLYTHSLRQFYRECDIYGTVDFIFGNAAVVFQDCNLYPRQPMQNQFNAITAQGRTDPNQNTGISIHNCTIKPADDLVSSNYTVKTYLGRPWKEYSRTVFMQSYIDEVVEPVGWREWNGDFALSTLYYAEYNNTGSGSSTTDRVVWSGYHVINSTDANNFTVENFLLGDGWMVQSGVPYISGLLS

SEQ ID NO: 9104 - protein, 575 aa, Arabidopsis thaliana
MLSLKLFLVTLFLSLQTLFIASQTLLPSSSNTSSTICKTTPDPKFCKSVFPQTSQGDVREYGRFSLRKSLTQSRKFTRTIDKYLKRNNALLSQSAVGALQDCRYLASLTTDYLITSFETDNITTSSKTLSFSKADEIQTLLSAALTNEQTCLDGINTAASSSWTIRNGVALPLINDTKLFSVSLALFTKGWVPKKKKQVASYSWAHPKNTHSHTKPFRHFRNGALPLKMTEHTRAVYESLSRRKLADDDNDVNTVLVSDIVTVNQNGTGNFTTITEAVNSAPNITDGTAGYFVIYVTSGVYEENVVIAKNKRYLMMIGDGINRTVVTGNRNVVDGWTTFNSATFAVTSPNFVAVNMTFRNTAGPEKHQAVAMRSSADLSIFYSCSFEAYQDTLYTHSLRQFYRECDIYGTVDFIFGNAAVVFQDCNLYPRQPMQNQFNAITAQGRTDPNQNTGISIHNCTIKPADDLVSSNYTVKTYLGRPWKEYSRTVFMQSYIDEVVEPVGWREWNGDFALSTLYYAEYNNTGSGSSTTDRVVWSGYHVINSTDANNFTVENFLLGDGWMVQSGVPYISGLLS

SEQ ID NO: 9105 - protein, 347 aa, Arabidopsis thaliana
MTEHTRAVYESLSRRKLADDDNDVNTVLVSDIVTVNQNGTGNFTTITEAVNSAPNITDGTAGYFVIYVTSGVYEENVVIAKNKRYLMMIGDGINRTVVTGNRNVVDGWTTFNSATFAVTSPNFVAVNMTFRNTAGPEKHQAVAMRSSADLSIFYSCSFEAYQDTLYTHSLRQFYRECDIYGTVDFIFGNAAVVFQDCNLYPRQPMQNQFNAITAQGRTDPNQNTGISIHNCTIKPADDLVSSNYTVKTYLGRPWKEYSRTVFMQSYIDEVVEPVGWREWNGDFALSTLYYAEYNNTGSGSSTTDRVVWSGYHVINSTDANNFTVENFLLGDGWMVQSGVPYISGLLS

SEQ ID NO: 9106 - DNA, 1645 bp, Arabidopsis thaliana
actctgtcgcttggcgcgctctctctccatagttccagttctgaaatctcactttcacagtttgtgtctgtgcgataatggccatggcagagctctcaacccccaaaacgacgtcgccttttctcaactcttcgtctcggcttcgtctctcttcaaaattgcacctttcaaaccactttcgccatcttcttcttccacctctccacacaacaactcccaactccaaaatctcttgctccgtttctcaaaatagccaagctcctgttgctgtgcaagaaaatggattggtgaagacgaagaaagagtgttatggagtgttctgcctcacctatgatcttaaagctgaagaagagacaagatcatggaagaagttaattaatattgcagtttcaggtgctgcaggaatgatttctaaccatcttctcttcaaacttgcttcaggggaagtatttggtccagatcaacccattgcattgaaactgctaggatcagagagatcaattcaagctcttgaaggtgttgcaatggaactggaggattcattgttcccattgttgagagaagttgatataggaacagatccaaatgaagtgttccaagatgtggagtgggctattctgattggagcaaaacctcgaggccctggaatggaacgtgctgacttgttggacatcaatggccaaatctttgctgagcagggcaaagctctgaacaaagctgcctctcctaacgtcaaggttcttgtagtgggaaacccttgcaacaccaatgccttgatttgtcttaaaaatgctcccaacattcctgcaaagaacttccatgccctcacgaggttagacgaaaatcgtgccaaatgccagcttgctcttaaagccggtgttttctatgacaaagtgtctaatatgaccatatggggaaatcactccacgactcaggtgccagacttcttaaatgccagaattaatggcctgcctgtgaaggaggttattacagatcacaaatggttagaagagggattcactgagagtgtgcagaagagaggtgggttattaattcagaaatggggtcgatcttctgctgcttctactgctgtttccattgttgatgctataaagtctcttgtaactcctactcctgagggtgattggttttcgactggggtgtacacggatggaaatccttatggtattgaagagggccttgtcttcagtatgccatgccggtcgaagggagatggagattatgaacttgtcaaggatgtagaaattgatgactaccttcgccaacgaatcgccaagtcggaagcggaactgttggctgagaagagatgtgttgcacacctcactggagagggcattgcctactgtgatcttggtccggtagatactatgcttcctggggaagtttgatttttgcaggacgttgaacatctcaagtaagcattctcttccgggttgttagctgtacagagcacagccacattacttatgatgattgttcagaataagaaaatgaaactcttatttcttatttacatgcatctgtatgtgatttttcttgagcaatgctccaaaagtcatatacagtagtatttgtaaacacttgaaacgtttctatgctttattccagtttcagaactcaaact

SEQ ID NO: 9107 - protein, 443 aa, Arabidopsis thaliana
MAMAELSTPKTTSPFLNSSSRLRLSSKLHLSNHFRHLLLPPLHTTTPNSKISCSVSQNSQAPVAVQENGLVKTKKECYGVFCLTYDLKAEEETRSWKKLINIAVSGAAGMISNHLLFKLASGEVFGPDQPIALKLLGSERSIQALEGVAMELEDSLFPLLREVDIGTDPNEVFQDVEWAILIGAKPRGPGMERADLLDINGQIFAEQGKALNKAASPNVKVLVVGNPCNTNALICLKNAPNIPAKNFHALTRLDENRAKCQLALKAGVFYDKVSNMTIWGNHSTTQVPDFLNARINGLPVKEVITDHKWLEEGFTESVQKRGGLLIQKWGRSSAASTAVSIVDAIKSLVTPTPEGDWFSTGVYTDGNPYGIEEGLVFSMPCRSKGDGDYELVKDVEIDDYLRQRIAKSEAELLAEKRCVAHLTGEGIAYCDLGPVDTMLPGEV

SEQ ID NO: 9108 - protein, 441 aa, Arabidopsis thaliana
MAELSTPKTTSPFLNSSSRLRLSSKLHLSNHFRHLLLPPLHTTTPNSKISCSVSQNSQAPVAVQENGLVKTKKECYGVFCLTYDLKAEEETRSWKKLINIAVSGAAGMISNHLLFKLASGEVFGPDQPIALKLLGSERSIQALEGVAMELEDSLFPLLREVDIGTDPNEVFQDVEWAILIGAKPRGPGMERADLLDINGQIFAEQGKALNKAASPNVKVLVVGNPCNTNALICLKNAPNIPAKNFHALTRLDENRAKCQLALKAGVFYDKVSNMTIWGNHSTTQVPDFLNARINGLPVKEVITDHKWLEEGFTESVQKRGGLLIQKWGRSSAASTAVSIVDAIKSLVTPTPEGDWFSTGVYTDGNPYGIEEGLVFSMPCRSKGDGDYELVKDVEIDDYLRQRIAKSEAELLAEKRCVAHLTGEGIAYCDLGPVDTMLPGEV

SEQ ID NO: 9109 - protein, 334 aa, Arabidopsis thaliana
MISNHLLFKLASGEVFGPDQPIALKLLGSERSIQALEGVAMELEDSLFPLLREVDIGTDPNEVFQDVEWAILIGAKPRGPGMERADLLDINGQIFAEQGKALNKAASPNVKVLVVGNPCNTNALICLKNAPNIPAKNFHALTRLDENRAKCQLALKAGVFYDKVSNMTIWGNHSTTQVPDFLNARINGLPVKEVITDHKWLEEGFTESVQKRGGLLIQKWGRSSAASTAVSIVDAIKSLVTPTPEGDWFSTGVYTDGNPYGIEEGLVFSMPCRSKGDGDYELVKDVEIDDYLRQRIAKSEAELLAEKRCVAHLTGEGIAYCDLGPVDTMLPGEV

SEQ ID NO: 9110 - DNA, 750 bp, Arabidopsis thaliana
atcgatctataaaacgatactattggagattagattcttctcatctcactttgttcatctaaaaactcctcctttcatttccaaacaaaaacttctttttattctcacatcttaaagatctctctcatggcgatgtctttctcaggagctgttctcactggtatggcttcttctttccacagcggagccaagcagagcagcttcggcgctgtcagagtcggccagaaaactcagttcgtcgtcgtttctcaacgcaagaagtcgttgatctacgccgctaaaggtgacggcaacatcctcgatgacctcaacgaggccacaaagaaagcttcagatttcgtgacggataaaacaaaagaggcattagcagatggtgagaaagcgaaagactacgttgttgaaaagaacagtgaaaccgcagatacattgggtaaagaagctgagaaagcttcagcgtatgtggaggagaaaggaaaagaagccgcaaacaaggcggctgagttcgcagagggtaaagcaggagaggctaaggatgccacaaagtagggtcttacctaatcagttaatttcaagcacttaaactcgtagatatattgatccatatcctctctcttcatgtttaatagtacttacaataagatgagtctgttgtaatttctattaatttcacatcacaactgaaataagatatggtatccacagtcaccgtcacattctttaatgttttgcaaaatattcaatagacaaatt

SEQ ID NO: 9111 - protein, 139 aa, Arabidopsis thaliana
MAMSFSGAVLTGMASSFHSGAKQSSFGAVRVGQKTQFVVVSQRKKSLIYAAKGDGNILDDLNEATKKASDFVTDKTKEALADGEKAKDYVVEKNSETADTLGKEAEKASAYVEEKGKEAANKAAEFAEGKAGEAKDATK

SEQ ID NO: 9112 - protein, 137 aa, Arabidopsis thaliana
MSFSGAVLTGMASSFHSGAKQSSFGAVRVGQKTQFVVVSQRKKSLIYAAKGDGNILDDLNEATKKASDFVTDKTKEALADGEKAKDYVVEKNSETADTLGKEAEKASAYVEEKGKEAANKAAEFAEGKAGEAKDATK

SEQ ID NO: 9113 - protein, 127 aa, Arabidopsis thaliana
MASSFHSGAKQSSFGAVRVGQKTQFVVVSQRKKSLIYAAKGDGNILDDLNEATKKASDFVTDKTKEALADGEKAKDYVVEKNSETADTLGKEAEKASAYVEEKGKEAANKAAEFAEGKAGEAKDATK

SEQ ID NO: 9114 - DNA, 935 bp, Arabidopsis thaliana
  misc_feature (828)..(828): n is a, c, g, or t
aatttcattttcaatgttaccaacacgagctcagattttcatacaccaatttttctatatgcatcgttatacacagaagcagtcgcggatctcaatttcaggtgtttgcgattccgatttaggtttgatcggttgaaattttttccgatggtggatcattaccaagttctaggcgttacgagaaacgcgacgaagaaggaggttaaagatgcgtttaggagattggcgattaagtatcatccggataagcacgctcagtctccggagcatgttcgtcataacgccaccgtgcggtttaagcttgtatcggaggcgtacgaagttttgaatgatgatctgaaacgcgcgtcttataacgctggtagcgattctgattgctttcgccgtacgagcggttcgtatagtaatccgtatggaaatcgtggtggcagagcgcaaggttctggttacggttatggttatggttactctacgaggaatcgtcaggcctctagcttcagcagcgggtttgattcgacgtttcgttatttgactacgcgagcgtttctattgaatctcgcattagctggtggtctgtactttgcgtttactgcgattgatacaagcggagaaacactatggaaaatgcgtaactcaggggtgagtatcatattttccatcaatgatcgtgttaagctattggctgtgttgataatttgcattcttgcctttttttatcctgtgatatacatacattggtgtttttaactggggtttttttcctgttgatggatgcattttagtgtatgagttctcaaatttatcaaattgaacttcttgtgaactaanaaaaaaaaaaaaaaaaaaaaaaaaaaaaaaaaaaaaaaaaaaaaaaaaaaaaaaaaaaaaaaaaaaaaaaggtttttcgatcccgccaacctcgagggggggcccgg

SEQ ID NO: 9115 - protein, 248 aa, Arabidopsis thaliana
NFIFNVTNTSSDFHTPIFLYASLYTEAVADLNFRCLRFRFRFDRLKFFPMVDHYQVLGVTRNATKKEVKDAFRRLAIKYHPDKHAQSPEHVRHNATVRFKLVSEAYEVLNDDLKRASYNAGSDSDCFRRTSGSYSNPYGNRGGRAQGSGYGYGYGYSTRNRQASSFSSGFDSTFRYLTTRAFLLNLALAGGLYFAFTAIDTSGETLWKMRNSGVSIIFSINDRVKLLAVLIICILAFFYPVIYIHWCF

SEQ ID NO: 9116 - protein, 199 aa, Arabidopsis thaliana
MVDHYQVLGVTRNATKKEVKDAFRRLAIKYHPDKHAQSPEHVRHNATVRFKLVSEAYEVLNDDLKRASYNAGSDSDCFRRTSGSYSNPYGNRGGRAQGSGYGYGYGYSTRNRQASSFSSGFDSTFRYLTTRAFLLNLALAGGLYFAFTAIDTSGETLWKMRNSGVSIIFSINDRVKLLAVLIICILAFFYPVIYIHWCF

SEQ ID NO: 9117 - DNA, 903 bp, Arabidopsis thaliana
acacaatttgattacactgagcaacacaaaactggcgaaccaacgtgactctaacgaagaaaccggcaatggccagtatcactacaatgccgaagaaataacaagaatcataaacgagccagaatattatcccccgggttacaacttgtctaccaccgcaatttcaaacatggtgtctatgctgactaatgttgtctctggtgagaccgaaccctcggcatctgcgacaaggacgatgggtcataagagagaaagagaagagttttctttgcctcctcaaccattgattaccggttcagctgtgactaaagaatgtgaaagctcaatgtccttggagaggccaaaaaaatatagaggagtaaggcaacgaccatggggaaaatgggcggcggagattcgagacccacacaaggcgacacgtgtatggcttgggacattcgagacagccgaggccgccgcaagagcctatgatgcggcagcacttcgctttagaggaagcaaagcaaagcttaatttccccgaaaatgttggaactcagacgattcaacgaaattctcatttcttgcaaaactcaatgcaaccttctctgacatacatcgatcaatgtccaactctattatcttactctcgatgtatggagcaacaacaaccattagtaggcatgttgcagccaacagaagaggaaaatcactttttcgaaaaaccatggaccgaatatgatcaatacaattactcctcttttggttaactaacatattgtcaacgctttgtatttctacttattcgatctaccaattttttctctcccaatacaacttcagtctgattattgccttcttagatatgtcttcgaatgttatgactatacatgggtgtatataaaatttgtgatcaaagtcttgt

SEQ ID NO: 9118 - protein, 248 aa, Arabidopsis thaliana
HNLITLSNTKLANQRDSNEETGNGQYHYNAEEITRIINEPEYYPPGYNLSTTAISNMVSMLTNVVSGETEPSASATRTMGHKREREEFSLPPQPLITGSAVTKECESSMSLERPKKYRGVRQRPWGKWAAEIRDPHKATRVWLGTFETAEAAARAYDAAALRFRGSKAKLNFPENVGTQTIQRNSHFLQNSMQPSLTYIDQCPTLLSYSRCMEQQQPLVGMLQPTEEENHFFEKPWTEYDQYNYSSFG

SEQ ID NO: 9119 - protein, 192 aa, Arabidopsis thaliana
MVSMLTNVVSGETEPSASATRTMGHKREREEFSLPPQPLITGSAVTKECESSMSLERPKKYRGVRQRPWGKWAAEIRDPHKATRVWLGTFETAEAAARAYDAAALRFRGSKAKLNFPENVGTQTIQRNSHFLQNSMQPSLTYIDQCPTLLSYSRCMEQQQPLVGMLQPTEEENHFFEKPWTEYDQYNYSSFG

SEQ ID NO: 9120 - protein, 189 aa, Arabidopsis thaliana
MLTNVVSGETEPSASATRTMGHKREREEFSLPPQPLITGSAVTKECESSMSLERPKKYRGVRQRPWGKWAAEIRDPHKATRVWLGTFETAEAAARAYDAAALRFRGSKAKLNFPENVGTQTIQRNSHFLQNSMQPSLTYIDQCPTLLSYSRCMEQQQPLVGMLQPTEEENHFFEKPWTEYDQYNYSSFG

SEQ ID NO: 9121 - DNA, 1511 bp, Arabidopsis thaliana
aactttagttcaaaaaacttgagaatatccgactacaaagatacgacctttcaatacaaaatcagatcatcgtcgtgtgtttaactttaacgaatctaggttttattgaatctcgacatgtcggaggagaaagtcgtcgctgtgatcatggttggtggtccgaccaaaggaactcgatttcgcccgttatcgttcaatacaccgaaaccattgattcctttggctggtcaacctatgattcatcatcctatctctgcttgtaaaaagatatcaaatctggctcagatttttctgattggattttacgaggaacgagaatttgctttgtatgtgtcttcaatatctaacgagctgaaaattccagtgcgatacttgaaagaagataaaccccatggttcagctggtgctctttattactttcgtgatagaattatggaagagaaaccgtcacatgttttcctcctcaactgtgatgtttgctgttctttccctcttcaaggcatacttgatgcacatcgaagatatggtggtattggaactatgctagtcatcaaggtttctgcagaagcagctagccaatttggagaattgatagctgatcctgatactaaagaactcctgcattatacagagaagcccgagactttcgtcagtgacttgataaactgtggtgtctatgtgcttacctcagatatcttcaatgccattgaagaagtatatagccaaataagagacacatctagcaactaccaatccgctacaaggtctgttcctgcagattttgtgagattagatcaagatatattgtcacctcttgctggaaagaagcaactatacacatatgagaacaaggatttctgggaacagatcaagactccggggaaatctttgaaatgctcggctttatatctctcccaattccgcgaaacatcgcctcatattttagcttcaggagatggtactaataggaaaccgaatataattggtgatgtttatattcacccatccgtaaaactgcatccaactgcaaagatcggtccaaatgtgtcgatatcagcaaatgttcgtgttggacctggtgtaaggcttattagctgcataatcttagacgatgttgaaatcaaggagaatgctgttgttataaactcaatcatcggatggaaatcatctataggtagatggtcaagagttcaagctagtggagattacaatgacaggcttgggattaccattcttggtgaggctgtaactgtggaagatgaagttgcagtcataggaagcattgttctccagaataagactcttaatgttagtgttcaagatgatatcatcttgtgatttatcacaatgattatcgtttggatatttctctttttaaccgaaacagaaaaagaattacagaattgtgtctttcatgaattgagttcacaggattagattttgagttagtggaactatggaagatttgtaaactctcattgtactttttttttagatactagaaatatttt

SEQ ID NO: 9122 - protein, 406 aa, Arabidopsis thaliana
MSEEKVVAVIMVGGPTKGTRFRPLSFNTPKPLIPLAGQPMIHHPISACKKISNLAQIFLIGFYEEREFALYVSSISNELKIPVRYLKEDKPHGSAGALYYFRDRIMEEKPSHVFLLNCDVCCSFPLQGILDAHRRYGGIGTMLVIKVSAEAASQFGELIADPDTKELLHYTEKPETFVSDLINCGVYVLTSDIFNAIEEVYSQIRDTSSNYQSATRSVPADFVRLDQDILSPLAGKKQLYTYENKDFWEQIKTPGKSLKCSALYLSQFRETSPHILASGDGTNRKPNIIGDVYIHPSVKLHPTAKIGPNVSISANVRVGPGVRLISCIILDDVEIKENAVVINSIIGWKSSIGRWSRVQASGDYNDRLGITILGEAVTVEDEVAVIGSIVLQNKTLNVSVQDDIIL

SEQ ID NO: 9123 - protein, 396 aa, Arabidopsis thaliana
MVGGPTKGTRFRPLSFNTPKPLIPLAGQPMIHHPISACKKISNLAQIFLIGFYEEREFALYVSSISNELKIPVRYLKEDKPHGSAGALYYFRDRIMEEKPSHVFLLNCDVCCSFPLQGILDAHRRYGGIGTMLVIKVSAEAASQFGELIADPDTKELLHYTEKPETFVSDLINCGVYVLTSDIFNAIEEVYSQIRDTSSNYQSATRSVPADFVRLDQDILSPLAGKKQLYTYENKDFWEQIKTPGKSLKCSALYLSQFRETSPHILASGDGTNRKPNIIGDVYIHPSVKLHPTAKIGPNVSISANVRVGPGVRLISCIILDDVEIKENAVVINSIIGWKSSIGRWSRVQASGDYNDRLGITILGEAVTVEDEVAVIGSIVLQNKTLNVSVQDDIIL

SEQ ID NO: 9124 - protein, 367 aa, Arabidopsis thaliana
MIHHPISACKKISNLAQIFLIGFYEEREFALYVSSISNELKIPVRYLKEDKPHGSAGALYYFRDRIMEEKPSHVFLLNCDVCCSFPLQGILDAHRRYGGIGTMLVIKVSAEAASQFGELIADPDTKELLHYTEKPETFVSDLINCGVYVLTSDIFNAIEEVYSQIRDTSSNYQSATRSVPADFVRLDQDILSPLAGKKQLYTYENKDFWEQIKTPGKSLKCSALYLSQFRETSPHILASGDGTNRKPNIIGDVYIHPSVKLHPTAKIGPNVSISANVRVGPGVRLISCIILDDVEIKENAVVINSIIGWKSSIGRWSRVQASGDYNDRLGITILGEAVTVEDEVAVIGSIVLQNKTLNVSVQDDIIL

SEQ ID NO: 9125 - DNA, 613 bp, Arabidopsis thaliana
ataatcagtgacttagagatcgaagacgatgatgagctctgcatccgccatgaaagctgttggatttttgcttctgcttaccattctaacattagcttatgcgaagaagtcaggtgatgtgacagagttgcagattggtgttaagtacaagcctcagaaatgtgatctccaggctcacaaaggggataagatcaaggttcactatcggggaaagttaactgatggaactgtctttgattcaagttttgagagaggtgaccctattgagtttgagcttggaactggtcaagtcatcccagaatgggaccagggtttattgggagcttgtgtaggtgagaagagaaagttgaaaatcccatccaagcttggttatggtgataacggctcaccaccaaaaatcccgggtggggcgacactgatattcgacaccgagcttgttgctgtgaacggagaaccatccagcgaagcgaaatcaaagaatgagctttgattacaccataattgtttttcatttaaaaggaaaccttgagtagtcatcgatgttggcatttgaatcttaaacagcctagaatcatttactttgctagttgaagacaataattatattttggtc

SEQ ID NO: 9126 - protein, 153 aa, Arabidopsis thaliana
MMSSASAMKAVGFLLLLTILTLAYAKKSGDVTELQIGVKYKPQKCDLQAHKGDKIKVHYRGKLTDGTVFDSSFERGDPIEFELGTGQVIPEWDQGLLGACVGEKRKLKIPSKLGYGDNGSPPKIPGGATLIFDTELVAVNGEPSSEAKSKNEL

SEQ ID NO: 9127 - protein, 152 aa, Arabidopsis thaliana
MSSASAMKAVGFLLLLTILTLAYAKKSGDVTELQIGVKYKPQKCDLQAHKGDKIKVHYRGKLTDGTVFDSSFERGDPIEFELGTGQVIPEWDQGLLGACVGEKRKLKIPSKLGYGDNGSPPKIPGGATLIFDTELVAVNGEPSSEAKSKNEL

SEQ ID NO: 9128 - protein, 146 aa, Arabidopsis thaliana
MKAVGFLLLLTILTLAYAKKSGDVTELQIGVKYKPQKCDLQAHKGDKIKVHYRGKLTDGTVFDSSFERGDPIEFELGTGQVIPEWDQGLLGACVGEKRKLKIPSKLGYGDNGSPPKIPGGATLIFDTELVAVNGEPSSEAKSKNEL

SEQ ID NO: 9129 - DNA, 1146 bp, Arabidopsis thaliana
catcctaatgaaaattacgctgttcttcccctttccttccgaaattagggcttccgtgtttcgcagtgctctccatcaatccccagcttgacaatgcctcgctatgatgatcgctatgggaacactcgtctctacgttggccgattatcatcgagaactaggacccgagaccttgaacgtctttttagcagatacggaagagtgcgagatgtggatatgaagcgagattatgctttcgttgaatttggtgatccccgtgatgctgatgatgcaagacattacctggacggacgagactttgatggaagtcgcatcactgtggagttttcacgaggggcacctcgtggttctcgggattttgatagcagaggcccaccacctggagctggtcgctgttttaactgtggtgtagatggtcattgggctcgtgactgcacagcaggggactggaagaacaagtgttaccgttgtggagagagaggacacattgagagaaactgcaaaaacagccccaagaagcttaggcgcagtggaagctactccaggtcacctgtaagatcccgttctcctcgtcgtagaagaagcccaagccggagtcttagccgtagccgaagctacagccgatcacgatccccggtgagaagaagagagaggagtgtggaggagagatcacgcagtccaaagcggatggatgactctctatcgccaagagccagagatcgtagtccggttcttgatgatgaaggcagcccaaagatcatagacgggagcccaccaccatcaccaaagcttcaaaaggaagtcggatctgaccgtgacggtggtagcccccaagacaatggcagaaactctgttgtcagtcctgttgtaggagccggtggtgacagttcgaaagaggaccggagccctgttgatgatgattacgagccaaaccgcacttcccctagaggaagtgagtctccttaactttgatggctcatggccacggcttgcaggcattgtagcatgtatactattggatcgactgttcctttctcttttaagtgtgtttgctttagaaccttttaagtttcatgttaccaagagttttttcatttgagacataatgttgttgcgtttcttttggacaagttttcgaagattgtt

SEQ ID NO: 9130 - protein, 290 aa, Arabidopsis thaliana
MPRYDDRYGNTRLYVGRLSSRTRTRDLERLFSRYGRVRDVDMKRDYAFVEFGDPRDADDARHYLDGRDFDGSRITVEFSRGAPRGSRDFDSRGPPPGAGRCFNCGVDGHWARDCTAGDWKNKCYRCGERGHIERNCKNSPKKLRRSGSYSRSPVRSRSPRRRRSPSRSLSRSRSYSRSRSPVRRRERSVEERSRSPKRMDDSLSPRARDRSPVLDDEGSPKIIDGSPPPSPKLQKEVGSDRDGGSPQDNGRNSVVSPVVGAGGDSSKEDRSPVDDDYEPNRTSPRGSESP

SEQ ID NO: 9131 - protein, 249 aa, Arabidopsis thaliana; identical to SEQ ID NO: 2701

SEQ ID NO: 9132 - DNA, 840 bp, Arabidopsis thaliana
aatatatactaacaaagccgtgattagggtttttggttttcgtcagaagatttcaaggtttagggtttctgcaattcaaccatggcagagcagacggagaaggcgtttcttaagcaaccaaaagttttcttaagctcgaagaaatctggtaagggaaagaagcctggtaaaggaggtaatcgtttctggaagaacattggccttggtttcaaaactccaagagaggctattgaaggaacatacattgaccagaaatgtccctttactggtacggtttcaatcaggggtcgcatcttgtctggaacttgtcacagtgcaaagatgcagaggacgatcattgttcgtagggactatcttcattttgtgaagaagtatcgaagatatgagaaaagacactcaaacattcctgctcatgtttccccgtgcttccgtgtcaaagaaggagatcgtgttaccattgggcaatgcaggccattgtcaaagacggtgaggttcaatgtcctgaaggtcattccggctggaagctcttctatcgggaaaaaagcattcactggaatgtaaaagagattcagatttgttgaaaaggtgcgaactagtattctaagagtttagaatttttctagcagagttattggattcgtttcttaagatctatgatcaaaggaaaccagattttctgtttcatttagtgattcaagtatcaagatatgtctatggttatagttttactccaatatatctagtcatgagttgctatctactagtcatgatttcgatgaaaagtggaattatgcttttgctatcttgatatttatctttgtctaatcgatatttcttgct

SEQ ID NO: 9133 - protein, 159 aa, Arabidopsis thaliana
MAEQTEKAFLKQPKVFLSSKKSGKGKKPGKGGNRFWKNIGLGFKTPREAIEGTYIDQKCPFTGTVSIRGRILSGTCHSAKMQRTIIVRRDYLHFVKKYRRYEKRHSNIPAHVSPCFRVKEGDRVTIGQCRPLSKTVRFNVLKVIPAGSSSIGKKAFTGM

SEQ ID NO: 9134 - protein, 79 aa, Arabidopsis thaliana
MQRTIIVRRDYLHFVKKYRRYEKRHSNIPAHVSPCFRVKEGDRVTIGQCRPLSKTVRFNVLKVIPAGSSSIGKKAFTGM

SEQ ID NO: 9135 - DNA, 477 bp, Arabidopsis thaliana
aaaaacaattcagattccaattttctcaaactctaaaatcaatctctcaaatctctcaaccgtgatcaagatgcagatcttcgttaagactctcaccggaaagactatcaccctcgaggtggaaagctctgacaccatcgacaacgttaaggccaagatccaggataaggaaggcattcctccggaccagcagcgtctcatcttcgctggaaagcagcttgaggatggacgtactttggccgactacaacatccagaaggagtctactcttcacttggtcctccgtctccgtggtggtttctaaaccttgtctctctctcttatggttactgaaccaagttcatgtatcgtttcatctagtactttggtggtttatgttttggggccatgtacagcctctgataaataattgatcgactatgtttccgtttctttcatctctcttttctttcaaacaacaaatcgaacttattctcc

SEQ ID NO: 9136 - protein, 100 aa, Arabidopsis thaliana
KTIQIPIFSNSKINLSNLSTVIKMQIFVKTLTGKTITLEVESSDTIDNVKAKIQDKEGIPPDQQRLIFAGKQLEDGRTLADYNIQKESTLHLVLRLRGGF

SEQ ID NO: 9137 - protein, 77 aa, Arabidopsis thaliana
MQIFVKTLTGKTITLEVESSDTIDNVKAKIQDKEGIPPDQQRLIFAGKQLEDGRTLADYNIQKESTLHLVLRLRGGF

SEQ ID NO: 9138 - protein, 62 aa, Arabidopsis thaliana
MDVLWPTTTSRRSLLFTWSSVSVVVSKPCLSLLWLLNQVHVSFHLVLWWFMFWGHVQPLINN

SEQ ID NO: 9139 - DNA, 606 bp, Arabidopsis thaliana
aatttctcttctctgtttcttcttcttcttcaattttcagatttgatagctctcaaaatcgttaaactacagaaacgaaaaaggaaattgcggcgatctaaggttaaatccatggctgatgcacatttgaagcaaagaggctatatctcggcagttgcagctggactcaatgcagctcttgcagcaatctctgctaagttcttcacatctcttgtgattaagtatggattagttgtaatctgcaatgtggttatgtgggcatgttatgtaaacagtttaagagctttgtcctctctacaagctactgtcacaaactttgctgctaattttctatcttctggtttagctggtctctttctttttcaagaatcgttatcgtttcgttggtttgcgggagctttatcgattactatcggagttcttatcctcagtaagtcgagtgtcgataagaaggtaagctcggattaatggagaatcgaatatgatagcttctgttttggagaaggctgcttttggttgaaaggaattagagatgttaagttgttctgagttttgagttttagaggttaagggaaacattatgttttaagtatgccaatttggttc

SEQ ID NO: 9140 - protein, 155 aa, Arabidopsis thaliana
NFSSLFLLLLQFSDLIALKIVKLQKRKRKLRRSKVKSMADAHLKQRGYISAVAAGLNAALAAISAKFFTSLVIKYGLVVICNVVMWACYVNSLRALSSLQATVTNFAANFLSSGLAGLFLFQESLSFRWFAGALSITIGVLILSKSSVDKKVSSD

SEQ ID NO: 9141 - protein, 118 aa, Arabidopsis thaliana
MADAHLKQRGYISAVAAGLNAALAAISAKFFTSLVIKYGLVVICNVVMWACYVNSLRALSSLQATVTNFAANFLSSGLAGLFLFQESLSFRWFAGALSITIGVLILSKSSVDKKVSSD

SEQ ID NO: 9142 - DNA, 558 bp, Arabidopsis thaliana
atataaaccttcctctcctcttcctctcttctcatctcttcaaaccattttctctcttttcaagaaaccacttacttcgaaaatggctcgttctatctctaacgttaagatcgtatctgctttcgtctctcgtgaactctctaatgctatcttccgacgtggttatgcggccacggcggcgcaagggagcgtttcgagcggtggaagaagtggagctgttgcttcggctgtgatgtagaagaagggagtggaagaatcaacccagaagatttcttgggttccagatcccaaaaccggttattacagacccgaaaccggttccaacgagattgacgcggctgagctacgagcagctctcttgaacaacaagcagtgattgattattattacatgtaattttgtcaaggtctttaagaggagattagtgggtaatgatctggtgcagtgaaccctattttcatatgttaagtgcggttctgtaatgaataaaatagagaagcgtttggtttcctctaattgtaacaaaaggatcgttggatgtatgatagagtttttctt

SEQ ID NO: 9143 - protein, 78 aa, Arabidopsis thaliana
YKPSSPLPLFSSLQTIFSLFKKPLTSKMARSISNVKIVSAFVSRELSNAIFRRGYAATAAQGSVSSGGRSGAVASAVM

SEQ ID NO: 9144 - protein, 76 aa, Arabidopsis thaliana
INLPLLFLSSHLFKPFSLFSRNHLLRKWLVLSLTLRSYLLSSLVNSLMLSSDVVMRPRRRKGAFRAVEEVELLLRL

SEQ ID NO: 9145 - protein, 51 aa, Arabidopsis thaliana
MARSISNVKIVSAFVSRELSNAIFRRGYAATAAQGSVSSGGRSGAVASAVM

SEQ ID NO: 9146 - DNA, 536 bp, Arabidopsis thaliana
gcaacgtaggttctggtgaatgatcctaatccgtttagctttttaaaaaataagaagacatatttatcaacttgagcaagttgcagcagatattttcctcggccaagatctagagttttgagaatggcgatggtatcaggaagacgatctactctaaaccccgacgcacctctttttattccggcagctgtacgacaagtggaaacaggagcccgagatcgattgtggaaccagctaagtatgcggaaaagccagcgaaatggggaaaccagagggttgctgctgctccgagaaacatccaccagcctcgctgaagagatatgttgttaactagtcagagaagtcagagcagttcggtctgtgtatctttagccaccactgtacctttgtaatttttagtatttgcttccacaacaaaaatctgtaactttgtatctttatgatgttcgttctcaaacttgctatcacaaaaatgtaaaaacataaaaaaaaaaatgtaaactttgaagagaaatgagaactagagtttatttcct

SEQ ID NO: 9147 - protein, 68 aa, Arabidopsis thaliana
MAMVSGRRSTLNPDAPLFIPAAVRQVETGARDRLWNQLSMRKSQRNGETRGLLLLRETSTSLAEEICC

SEQ ID NO: 9148 - protein, 66 aa, Arabidopsis thaliana
MVSGRRSTLNPDAPLFIPAAVRQVETGARDRLWNQLSMRKSQRNGETRGLLLLRETSTSLAEEICC

SEQ ID NO: 9149 - DNA, 562 bp, Arabidopsis thaliana
aatcgaaacaaaaaaaggcctctcttcttcctcataggtatcacatagcactagtttcaagataaacctaatgggtatctcgaaagctttgcgatctcttctcatcttgctgctccttaacataacattcttcttcggccatgttacaccaggagccaccgtcaagccatgccctccccctcccgcaaaacaagccaccacgaaatgtccaagagacacactcaaatttggagtgtgtgggagctggttaggtctggttagtgaggtcatcggtacaccaccgagccaggagtgttgctcgctcatcaaaggtttggctgactttgaagctgccgtttgtctgtgcactgcacttaaaaccagcattctcggagttgctcctgtcaaaattcccgttgctctcactctgcttctcaactcttgcggcaaaaatgttcctcagggattcgtctgctgatattattatgtgtgctctgtctcccttaatcaaagaaagaacgttccttgtattattgtattcgtttatgcaatattttcagaaaaaagagttatgttttggttc

SEQ ID NO: 9150 - protein, 128 aa, Arabidopsis thaliana
MGISKALRSLLILLLLNITFFFGHVTPGATVKPCPPPPAKQATTKCPRDTLKFGVCGSWLGLVSEVIGTPPSQECCSLIKGLADFEAAVCLCTALKTSILGVAPVKIPVALTLLLNSCGKNVPQGFVC

SEQ ID NO: 9151 - DNA, 762 bp, Arabidopsis thaliana
ctctcacaagtcaccaccatttctctctagaaaaaatctgaaaaacaaaaccatctcaaagtttcttgagaagaaaaaaagggtcaagaaagatgcctaaagacaggaatatcggaatcgccatggatttctcagagagcagcaagaacgctctgaaatgggcgatcgagaacttagcagacaaaggagacacgatttacatcatccacactctaccactctctggcgatgaatctcgtaactccctctggttcaaatccggttctcctctcataccgttggagagtttagggaaccggagattatggagaaatacggtgtcaaaaccgacatcgcatgtcttgatatgctcgacactggttcgaggcagaaagaggtgcatgtagtgaccaagttatactggggagatgcaagagagaagcttgttgatgctgttaaagatcttaaactcgattctattgtcatgggaagcagaggactcagtgctcttcaaaggataataatgggaagcgtgagcagctttgtgatccaacacgcgccttgccctgtcaccgttgtcaaggataacgaataaacgattctcactacaaaaaaaaaaaaaaaactgtctttatcttataagtcctaccaaataatcatcgcaatttatgctttttagtttttattaataaaagaatctttatgttggttttatttgtaatttgactacaacaaaaaaagaacccagagtgttttcatcttctagttttgagagtttcttgc

SEQ ID NO: 9152 - protein, 97 aa, Arabidopsis thaliana
MPKDRNIGIAMDFSESSKNALKWAIENLADKGDTIYIIHTLPLSGDESRNSLWFKSGSPLIPLESLGNRRLWRNTVSKPTSHVLICSTLVRGRKRCM

SEQ ID NO: 9153 - protein, 89 aa, Arabidopsis thaliana
MEKYGVKTDIACLDMLDTGSRQKEVHVVTKLYWGDAREKLVDAVKDLKLDSIVMGSRGLSALQRIIMGSVSSFVIQHAPCPVTVVKDNE

SEQ ID NO: 9154 - protein, 87 aa, Arabidopsis thaliana
MDFSESSKNALKWAIENLADKGDTIYIIHTLPLSGDESRNSLWFKSGSPLIPLESLGNRRLWRNTVSKPTSHVLICSTLVRGRKRCM

SEQ ID NO: 9155 - DNA, 905 bp, Arabidopsis thaliana
atatataaagtcgccattgaagtgaagctgagatcttttcgaagagcggaagctaaggagaggcgaattcgaatcgagaagatggtgtctggctcagggatatgttcaaagcgtgtcgttgttgacgcacgtcaccatatgtgtggtcgtcttgcttcgatcatagctaaagagttgctcaatggacagagtgttgttgttgtccgatgtgaggagatttgtttgtctggtggtttggttcgtcagaagatgaagtacatgaggtttcttaggaaacgcatgaacactaaaccttctcatggtcctattcatttccgtgctccgtctaagatcttctggcgtaccgttcgtgggatgattccacacaagaccaagcgtggtgctgctgctcttgcacgtttgaaggtgtttgagggagtaccacctccttatgacaaggtcaagagaatggtcattcctgatgctctcaaggtgttgaggcttcaggctggtcacaagtactgcttgttgggacgtttgtcttctgaagttggctggaaccattacgataccatcaaggagcttgaggtgaagagaaaggagaggtcacaagctttgtatgagcgtaagaagcaactcaccaagctcagggcaaaggccgagaaggttgcagaggagaaacttggatcccagctcgatgttcttgcatcgatcaagtactgaagaaaatcagcatctatcttttggtttaactcttgttttggtttttatctattcagattttgttttcttccttgtatcactgttgaagtttatcacctcatttcagttttatttatcagttgatacttcaatccttagggatgagctctacaaaaaaaaaaaaaaaaatatcgataccgtcgacctcgagggggggcccggta

SEQ ID NO: 9156 - protein, 233 aa, Arabidopsis thaliana
IYKVAIEVKLRSFRRAEAKERRIRIEKMVSGSGICSKRVVVDARHHMCGRLASIIAKELLNGQSVVVVRCEEICLSGGLVRQKMKYMRFLRKRMNTKPSHGPIHFRAPSKIFWRTVRGMIPHKTKRGAAALARLKVFEGVPPPYDKVKRMVIPDALKVLRLQAGHKYCLLGRLSSEVGWNHYDTIKELEVKRKERSQALYERKKQLTKLRAKAEKVAEEKLGSQLDVLASIKY

SEQ ID NO: 9157 - protein, 206 aa, Arabidopsis thaliana [sequence omitted]

SEQ ID NO: 9158 - protein, 187 aa, Arabidopsis thaliana
MCGRLASIIAKELLNGQSVVVVRCEEICLSGGLVRQKMKYMRFLRKRMNTKPSHGPIHFRAPSKIFWRTVRGMIPHKTKRGAAALARLKVFEGVPPPYDKVKRMVIPDALKVLRLQAGHKYCLLGRLSSEVGWNHYDTIKELEVKRKERSQALYERKKQLTKLRAKAEKVAEEKLGSQLDVLASIKY

SEQ ID NO: 9159 - DNA, 449 bp, Arabidopsis thaliana
ggacgcaaaacgccaccgaatcaggaaccaaaaatagaaagctgcaagatcaagaagacaaaaaccatcgatggcggatcaaaaccgatcagaggagaagactgtgaaatcgccaaatgtgtttgaacgagtcaaagaagaaatagaggcaatgggtcatcatgaaaagtccaagagtcgtcaccatgacaaagagactcatggaacaagtgacgacattgatgagagcactccaattgattatgtgaaaggacctggtttctttcaacgactgaaagaagagattgaagctatctttaatgctgttactcccaagcgttcttcaaagaagtgaaattgtatcatatctgtgttatgttgtgtgtatatatgttaatgcacaagtgagaagaaaatcttagataaactcagtttcttgtaatgaatcgtatcagaatgttaagacttgg

SEQ ID NO: 9160 - protein, 87 aa, Arabidopsis thaliana
MADQNRSEEKTVKSPNVFERVKEEIEAMGHHEKSKSRHHDKETHGTSDDIDESTPIDYVKGPGFFQRLKEEIEAIFNAVTPKRSSKK

SEQ ID NO: 9161 - protein, 60 aa, Arabidopsis thaliana
MGHHEKSKSRHHDKETHGTSDDIDESTPIDYVKGPGFFQRLKEEIEAIFNAVTPKRSSKK

SEQ ID NO: 9162 - DNA, 749 bp, Arabidopsis thaliana
gaagagttgaagaaaatcacagaaagccttagcacagagaagagagattgaagaagtcatggatgtttcaggaagcttgaattgcgttgttgtggcggtagatggaagcgaggtgagtatggaagctctgaggtgggctctagacaacctcaagctctcttcgtcttcttccgattcatcattcgtcgtgctccacgtccagccgtcgccttctgtagccgccggcgtgagtcccggcaccatacctttcggtggtcccagtggtcttgaggttcctgctttcactgctgcaatcgagcaacaccagaagcggatcaccgacaccatcctcgaacacgctagtcaaatttgtgctgaaaaatctgtgaatgtgaaaacacaagtggttattggggatcccaagtataaaatctgcgaagctgtagagaatttgcatgctgatcttcttgtcatgggctcccgggcttatggccgcattaagagaatgtttctgggaagtgtaagcaactactgcaccaaccacgcccattgtcctgttgtgataatcaaaccaaaagaggattcttctgcataaagaggatatatatgtacatatgcaaagggatatcaagaccatctgtaatcttttgaagttttgtgaatgtatagaagtcaagcaggaattatcccggattacttctcaaataagtggtgtgaatgtaaactaataagaggtacagagaacattgattggctcagtatatgtgttg

SEQ ID NO: 9163 - protein, 171 aa, Arabidopsis thaliana
MDVSGSLNCVVVAVDGSEVSMEALRWALDNLKLSSSSSDSSFVVLHVQPSPSVAAGVSPGTIPFGGPSGLEVPAFTAAIEQHQKRITDTILEHASQICAEKSVNVKTQVVIGDPKYKICEAVENLHADLLVMGSRAYGRIKRMFLGSVSNYCTNHAHCPVVIIKPKEDSSA

SEQ ID NO: 9164 - protein, 151 aa, Arabidopsis thaliana
MEALRWALDNLKLSSSSSDSSFVVLHVQPSPSVAAGVSPGTIPFGGPSGLEVPAFTAAIEQHQKRITDTILEHASQICAEKSVNVKTQVVIGDPKYKICEAVENLHADLLVMGSRAYGRIKRMFLGSVSNYCTNHAHCPVVIIKPKEDSSA

SEQ ID NO: 9165 - DNA, 432 bp, Arabidopsis thaliana
aagttgaatcgtcattttctcttgcctggctctagttagggtagtatcgtttatggactaaacgattttacaaaatgagtgtaattcctggatttggtagctggatccatcagaatgttgaagagcctcctgaggccgagtccaagagccctaaatctgaagctgtgtgggcggtagatactaaatattacgacttagatgaagtgaggagagaaggagaaatttggagagctgcagaggagaagcatccatggtatgatgctcctgctaaggtgaaggtgacaacaaaaaatggtctttgccatatgaacatagaattcaaactgggattgcctcctgaaggagtctacgagatgttcactaatccaaacaactatccagtcttcaaaaaggacaaggccgggcgccaacgtctgggcagagagaactagt

SEQ ID NO: 9166 - protein, 118 aa, Arabidopsis thaliana
MSVIPGFGSWIHQNVEEPPEAESKSPKSEAVWAVDTKYYDLDEVRREGEIWRAAEEKHPWYDAPAKVKVTTKNGLCHMNIEFKLGLPPEGVYEMFTNPNNYPVFKKDKAGRQRLGREN

SEQ ID NO: 9167 - DNA, 701 bp, Arabidopsis thaliana
ctcactcactctcatcaaaacctagagaagcacaatatccatataagaaaaatggcacaagctacgcgtcaatcttctctacaaggggaacttgaggtagatattgagatcaacgcatcggcaaagaagttccatcacatgctctctggaagaccacaagatgttgcgaaagccactcctgacatccagggatgtgctttgcatgagggagagtttggcaaagttggcagtgtcatattctggaactatgctattgatgggcagcccaaggtggcgaaggagaggatcgaggcagtagatcaggagaagaatctgttagtgctcagggtaatagatggagatctgacgaaagagttcaagagcttcttggtcactatccaggcaaccccaaagctaagaggaccgggaagtgtggttaagtgtcacttaaaatatgagaggattgacgagaaggtggctcctccggagaagctgctcgagttgtttgccaagctaaccaaatcaatggacgaaatgcttttgtccgaagtctagaggattccttggatatccatctatctatctatctatgtttgtgggtgttttgtaagatatctcaagttttcaataatgtgctctctctatgaagagatctgaactgcaagtattgcagagtttgtgttacgtatgtttgaagtttttaattagttgcaaattatagc

SEQ ID NO: 9168 - protein, 177 aa, Arabidopsis thaliana
LTHSHQNLEKHNIHIRKMAQATRQSSLQGELEVDIEINASAKKFHHMLSGRPQDVAKATPDIQGCALHEGEFGKVGSVIFWNYAIDGQPKVAKERIEAVDQEKNLLVLRVIDGDLTKEFKSFLVTIQATPKLRGPGSVVKCHLKYERIDEKVAPPEKLLELFAKLTKSMDEMLLSEV

SEQ ID NO: 9169 - protein, 160 aa, Arabidopsis thaliana
MAQATRQSSLQGELEVDIEINASAKKFHHMLSGRPQDVAKATPDIQGCALHEGEFGKVGSVIFWNYAIDGQPKVAKERIEAVDQEKNLLVLRVIDGDLTKEFKSFLVTIQATPKLRGPGSVVKCHLKYERIDEKVAPPEKLLELFAKLTKSMDEMLLSEV

SEQ ID NO: 9170 - protein, 131 aa, Arabidopsis thaliana
MLSGRPQDVAKATPDIQGCALHEGEFGKVGSVIFWNYAIDGQPKVAKERIEAVDQEKNLLVLRVIDGDLTKEFKSFLVTIQATPKLRGPGSVVKCHLKYERIDEKVAPPEKLLELFAKLTKSMDEMLLSEV

SEQ ID NO: 9171 - DNA, 1069 bp, Arabidopsis thaliana
ggtgaagccaaaggcatcgtgagcaaaatccgcagttttctacattaatggattgtttctgttctagagcttctcttccgtctctgtgatttctgggtagattctaggatttctatttgcatctctaacctgagagctgctaatagtccacacaactttttagtttgtgagttttcctaatttagggttaggacaaatttctgtatttttcatccaaggggataaagatgtatgctgataaattggaggctgagtctggaagcaggaaggtcgttaaggatcgtatcaatggcggttctggagacatctctactcgcgtgcgacaagtgactgggaagaggcaaaggcaggacgacaaatgggagcatgatcttttcagtagtgacaaacctcaactttcaaatcgcagggttgatcctagagatcttcgtttgaagctccaaaagagacatcatgggtctcaaagtgggcgagaagctggttcaggcgtgcgggatttacgggatcagctctctgggacaatgaatcagcaaccaaaaaacagtgacccaccaaaatccaaagcggaggctgctaggccaagtatgaagagcgtagcgactgaaacagagactagaaaaacttccagtcaagctaccaggaagaaatcacagcaggctgattcatcggttgatagctttcttgaatcattgggtctcgagaaatattcaacagcgtttcaagtggaagaagttgatatggatgctctcatgcatatgacagatgatgacctcaaggctatgctcataccgatgggtccgaggaagaagatacttcttgctttgggatctaaaccctaagagcttagtgccatctacctgatggttggaagctcaggtgaatggtctctggagttgttacattaagaattgtcagaaatgaattggctctttttctcttgattgtattttgcccattttaagagcttagaatttggttagacatctgtaatcgtaaacatggtgaaacatacactgtttgattgcaccacttttgatgtgagagaagccttaagataaacacaacaacg

SEQ ID NO: 9172 - protein, 203 aa, Arabidopsis thaliana
MYADKLEAESGSRKVVKDRINGGSGDISTRVRQVTGKRQRQDDKWEHDLFSSDKPQLSNRRVDPRDLRLKLQKRHHGSQSGREAGSGVRDLRDQLSGTMNQQPKNSDPPKSKAEAARPSMKSVATETETRKTSSQATRKKSQQADSSVDSFLESLGLEKYSTAFQVEEVDMDALMHMTDDDLKAMLIPMGPRKKILLALGSKP

SEQ ID NO: 9173 - protein, 105 aa, Arabidopsis thaliana
MNQQPKNSDPPKSKAEAARPSMKSVATETETRKTSSQATRKKSQQADSSVDSFLESLGLEKYSTAFQVEEVDMDALMHMTDDDLKAMLIPMGPRKKILLALGSKP

SEQ ID NO: 9174 - DNA, 1268 bp, Arabidopsis thaliana
gaatttctcttctctcattcaaaggttactaatttcgctcgtagaattttgccctatttgtattagctgtcgacaacgtctaaggcaagaaaacttgatttggaaccctaatcgattctagctccattgtatcaagatcaagcccccctacgccggatattatagcgtttttgggtcaaattttctcttaattaggatttgctcatcgttgtagctttagcggatcgatttcgaggtgccctaattttctgatttcgtagaaattggttgttctgggaaagatgacgactttatccaaaaaagaaacattgaatatgaacaagtttggatcgcaactgaggaagaccgtgtccaagaaagttcttcctattgctccaatatttggtgaagatgaagaagacaacgatgtggacaaggagatttctcgtcaagcttcaaagaccaagtctcttaagaaatttgaggagcagcataagaaagccttggaggaagacccttgtgcttttgcttacgatgaagtttatgatgatacgaaacaggaagcacttcttccacgactacatgaacgtcaagagtgcaataagcctatatataaccagcttatgagggaaaaggcagaccgtagacagaaagaacgtgagatagtttacgagagaaagcttgcgaaagaggagagccaaagagcaacttcttttttccagatcaagttatgattgtaaccggtagttataaaaggaaactagaggaacgagatcaatggctctcagaagaaagattgcgtgaacttcgagaggaaaaagatgatgttacaaagaagaaggacttgagtgatttctacctcaacattgggaaaaatgtggcgtttggagctcgagatatcaaagctagagagacagagaggctcaaggagcaaagaaaagtaccgaagctagaggagctgagggaaaagatgaaaacagaatcaccagagagggtagtgttgcctgactccagagatattggatcaagttgtaggataattgtggaactgcaagaagcagagcaagtagcatctgagaagaagatgaattcagatgccacagaagagagagacttatcaatcaaaggggcagcaaaagatgagccgagagccacttaccaacactggagaagcgaggatgcgcttgctgcagctaaaaaacggtttttggcccgtaagaaggcaaagatagaagaatagttttgcaagtcttgtagattggttcaattctcttttgattatcaagcac

SEQ ID NO: 9175 - protein, 169 aa, Arabidopsis thaliana
MIVTGSYKRKLEERDQWLSEERLRELREEKDDVTKKKDLSDFYLNIGKNVAFGARDIKARETERLKEQRKVPKLEELREKMKTESPERVVLPDSRDIGSSCRIIVELQEAEQVASEKKMNSDATEERDLSIKGAAKDEPRATYQHWRSEDALAAAKKRFLARKKAKIEE

SEQ ID NO: 9176 - protein, 143 aa, Arabidopsis thaliana
MTTLSKKETLNMNKFGSQLRKTVSKKVLPIAPIFGEDEEDNDVDKEISRQASKTKSLKKFEEQHKKALEEDPCAFAYDEVYDDTKQEALLPRLHERQECNKPIYNQLMREKADRRQKEREIVYERKLAKEESQRATSFFQIKL

SEQ ID NO: 9177 - protein, 132 aa, Arabidopsis thaliana
MNKFGSQLRKTVSKKVLPIAPIFGEDEEDNDVDKEISRQASKTKSLKKFEEQHKKALEEDPCAFAYDEVYDDTKQEALLPRLHERQECNKPIYNQLMREKADRRQKEREIVYERKLAKEESQRATSFFQIKL

SEQ ID NO: 9178 - DNA, 1127 bp, Arabidopsis thaliana
agctacacacgagaaagaaaaagctcacaactttaacctttctggagagagaagaacaaaagagggagagggagagaaatggaaggcaaagaagaagatgtacgagtgggagctaacaagttcccggagaggcaacccatcggtacatcggctcagtccaccgacaaggactacaaagagccacctcctgcgccactgttcgagcccggcgagctcagctcatggtctttctacagagccggaatagctgagtttatcgctactttcttgtttctctacatcactgttttgactgtaatgggagttaagagagcaccaaacatgtgtgcttctgttggaatccaaggtatcgcttgggcttttggtggcatgatctttgctcttgtctactgtactgctggaatttcaggtggacacatcaaccctgctgtaacatttggtctgttcttggctcggaagttgtctctgaccagagctgtgttctacatgattatgcaatgtcttggagccatctgtggtgccggagtcgtcaaaggtttccagccaacgccgtaccagactctcggtggtggtgctaacaccgttgctcatggctacaccaaaggttctggccttggtgctgaaatcatcggaacattcgttctcgtctacactgtcttctccgccaccgacgccaagagaagcgcccgtgactcacacgtcccgattttggcgccgctcccaatcggatttgcagtgttcttggtacacttggcaacaataccgatcaccgggaccggaatcaacccagctagaagtcttggagccgcaattatctacaacaaggaccactcttgggatgaccattggattttctgggttggaccattcattggagcagctctagcagcactatatcaccagattgtcatcagagcgattcctttcaagagcaagagttagagacacacagaaagattccacggtccagaatttgttctttagtagtttctttgcttatctatctaatgtagcttgtgttttgcaatgtaatgagcctttcaagaatatgtatttgggatttctaatcagcttttgtctatgtaaaaaccatggtttatctttaaatgttgtttgaggttggcctc

SEQ ID NO: 9179 - protein, 287 aa, Arabidopsis thaliana
MEGKEEDVRVGANKFPERQPIGTSAQSTDKDYKEPPPAPLFEPGELSSWSFYRAGIAEFIATFLFLYITVLTVMGVKRAPNMCASVGIQGIAWAFGGMIFALVYCTAGISGGHINPAVTFGLFLARKLSLTRAVFYMIMQCLGAICGAGVVKGFQPTPYQTLGGGANTVAHGYTKGSGLGAEIIGTFVLVYTVFSATDAKRSARDSHVPILAPLPIGFAVFLVHLATIPITGTGINPARSLGAAIIYNKDHSWDDHWIFWVGPFIGAALAALYHQIVIRAIPFKSKS

SEQ ID NO: 9180 - protein, 214 aa, Arabidopsis thaliana
MGVKRAPNMCASVGIQGIAWAFGGMIFALVYCTAGISGGHINPAVTFGLFLARKLSLTRAVFYMIMQCLGAICGAGVVKGFQPTPYQTLGGGANTVAHGYTKGSGLGAEIIGTFVLVYTVFSATDAKRSARDSHVPILAPLPIGFAVFLVHLATIPITGTGINPARSLGAAIIYNKDHSWDDHWIFWVGPFIGAALAALYHQIVIRAIPFKSKS

SEQ ID NO: 9181 - protein, 206 aa, Arabidopsis thaliana
MCASVGIQGIAWAFGGMIFALVYCTAGISGGHINPAVTFGLFLARKLSLTRAVFYMIMQCLGAICGAGVVKGFQPTPYQTLGGGANTVAHGYTKGSGLGAEIIGTFVLVYTVFSATDAKRSARDSHVPILAPLPIGFAVFLVHLATIPITGTGINPARSLGAAIIYNKDHSWDDHWIFWVGPFIGAALAALYHQIVIRAIPFKSKS

SEQ ID NO: 9182 - DNA, 687 bp, Arabidopsis thaliana
actcatttttctattactgaaatttttcttagagaagaagaagaagaggcaaaatggccacaagcgcatcagctttgctctcaccaaccacattctccactgcaatctcccacaaaaaccctaactccatctcattccatggccttcgtcccctccgtctaggtggctcctcctccgccctacccaaactatcaaccaccgggagaaaatcctcctccactgtcgtgagagctgagctaagcccttccatcgtcataagtctcaggtctctccctcttcctcggtcgtttcgtcttcttcaacttccagagagagaacgtagcaaaacagggcttaccggagcagaacggaaaaacccatttcgaagctggagatgatcgtgctaaggagtacgtcagtctcttgaaatcgaacgatccaattggattcaacattgttgatgttcttgcttggggttctattggacacatcgttgcttactacatcttggctacttccagcaatggatacgacccaagcttctttggatgattcgtttcaatgtcaatctctcgtatatgtatatgtatatgtttgacttgtgttgcaagctatctaatctgttctctatctctgtttcttcttctgttgttgttgttgttgtctaagacttgtccctctttttgcaaatgttttatttctccattt

SEQ ID NO: 9183 - protein, 107 aa, Arabidopsis thaliana
MATSASALLSPTTFSTAISHKNPNSISFHGLRPLRLGGSSSALPKLSTTGRKSSSTVVRAELSPSIVISLRSLPLPRSFRLLQLPERERSKTGLTGAERKNPFRSWR

SEQ ID NO: 9184 - protein, 53 aa, Arabidopsis thaliana
THFSITEIFLREEEEEAKWPQAHQLCSHQPHSPLQSPTKTLTPSHSMAFVPSV

SEQ ID NO: 9185 - DNA, 2547 bp, Arabidopsis thaliana
aaagaggaaaaaaactcaggaaccgccgacttaagaatttcttcttcatcatctctccaatatcgccgattatatataaatgactcttcgattctgtttcttcttcgtcgtcatcgccggcttagggttttctctataagcaaatcttatcttctccttttcctccgttttttctggtcagcttttgcttttagattacccttgttgcctgcgatcgatctgaaaaaagaggaactttatcttgctgacggctgttataaaaagacgtggcatttcttctctgattgtgtttatttttatgacggagaagatgaacacacttgtaatctatcagactctaactgttactgttggtgttttctaatgctgtcggcaagacactatctttaggactgctagggagtttagaggttacacagttgactttttctatcaaggttataggtttagtattgttaatatatagaaatggaagccaagatcgtcaaggtgttggatagtagtaggtgtgaagatggattcggaaaaaagaggaagcgcgcagcaagctatgctgcatatgttactggagtttcgtgtgcaaagctgcaaaatgtgcccccaccgaacgggcagtgccaaattcctgacaaaagaagaaggctggaaggtgaaaacaagcttagcgcttacgagaatcgctctgggaaggcgctggtcagatattacacttattttaagaagactggaatcgctaaacgtgttatgatgtatgagaatggcgaatggaatgatttgcctgagcacgttatatgcgccatccagaatgaattagaagaaaagagcgccgcaattgagttcaagttatgcggtcacagttttattttggacttcttgcacatgcaaagactagacatggaaacaggagcaaaaacccctcttgcatggattgacaatgcaggaaagtgctttttccctgaaatttatgagagtgatgaaaggaccaattactgccatcataaatgtgtggaagacccaaaacagaatgctcctcatgatatcaaacttcgcctagagattgatgttaatggtggcgagacaccgaggttaaatttggaggagtgcagtgatgagtctggtgataatatgatggacgatgttccccttgctcaacgatcttcaaatgagcactatgacgaggctacggaggatagctgcagccgcaagctcgaagctgctgtttcgaaatgggatgagactgatgctatagtcgtctctggtgccaagcttacgggaagcgaagtacttgataaagatgcagtaaaaaaaatgtttgctgtaggcacagcttctctaggacatgtaccagtgctggatgtgggccgtttttccagtgagattgctgaagctcgtctagcacttttccagaagcaggttgagatcactaagaaacatcgaggggatgcaaacgttaggtatgcctggcttcctgcaaagagggaagttttatcagcagtgatgatgcaaggacttggagttggtggagcatttatcagaaagtccatctatggtgttgggatccatttaaccgctgcagactgcccttatttcagtgctagatactgtgatgttgacgaaaacggagtacgttacatggttttatgccgtgtgattatggggaatatggagcttcttcgtggtgataaagctcagttcttttctggtggagaagaatatgacaatggagtcgatgacattgagagtccaaagaattacattgtctggaacatcaatatgaacacacatatattcccggaatttgttgttaggttcaagctgtctaatctccccaatgctgaaggtaatttgattgctaagcgtgataactcaggggtcactttggaaggacctaaggatcttcctcctcaattggagtcaaacggagcaagaggttcaggaagtgcaaacagtgttggttcaagcactacaagacccaaatctccatggatgccatttcctactctgtttgcagcaatctcacataaggttgcagagaacgacatgttgttgatcaatgctgactaccaacaactgagggataagaagatgacgagagcggagtttgtcaggaaactgcgggtgattgtaggagatgatctgctaaggtccaccataacaacccttcaaaaccagccaaagtcgaaggagattccaggaagcatcagagaccatgaagaaggtgcaggtggattgtaagtaaagtggatgatgatgatgacgaatatcaaaaggaagctgctttttatctatctacctgcctttgtggttctccttttgactttttctaattttagacttttggttttgggtcgggtcgttggtagagtttaaaatgtgtcgacttttctttctgtcgtgaaaaatcgtactatattatatgattctacttagtcaatgatgtcgttgggtctttgtttctttagctgcaagcaaaacattgttgtggaagtcgttgaatcttgacgaaaatttggtcgttaagcctatcgcgtgaaacttttcttcact

SEQ ID NO: 9186 - protein, 588 aa, Arabidopsis thaliana
MEAKIVKVLDSSRCEDGFGKKRKRAASYAAYVTGVSCAKLQNVPPPNGQCQIPDKRRRLEGENKLSAYENRSGKALVRYYTYFKKTGIAKRVMMYENGEWNDLPEHVICAIQNELEEKSAAIEFKLCGHSFILDFLHMQRLDMETGAKTPLAWIDNAGKCFFPEIYESDERTNYCHHKCVEDPKQNAPHDIKLRLEIDVNGGETPRLNLEECSDESGDNMMDDVPLAQRSSNEHYDEATEDSCSRKLEAAVSKWDETDAIVVSGAKLTGSEVLDKDAVKKMFAVGTASLGHVPVLDVGRFSSEIAEARLALFQKQVEITKKHRGDANVRYAWLPAKREVLSAVMMQGLGVGGAFIRKSIYGVGIHLTAADCPYFSARYCDVDENGVRYMVLCRVIMGNMELLRGDKAQFFSGGEEYDNGVDDIESPKNYIVWNINMNTHIFPEFVVRFKLSNLPNAEGNLIAKRDNSGVTLEGPKDLPPQLESNGARGSGSANSVGSSTTRPKSPWMPFPTLFAAISHKVAENDMLLINADYQQLRDKKMTRAEFVRKLRVIVGDDLLRSTITTLQNQPKSKEIPGSIRDHEEGAGGL

SEQ ID NO: 9187 - protein, 496 aa, Arabidopsis thaliana
MMYENGEWNDLPEHVICAIQNELEEKSAAIEFKLCGHSFILDFLHMQRLDMETGAKTPLAWIDNAGKCFFPEIYESDERTNYCHHKCVEDPKQNAPHDIKLRLEIDVNGGETPRLNLEECSDESGDNMMDDVPLAQRSSNEHYDEATEDSCSRKLEAAVSKWDETDAIVVSGAKLTGSEVLDKDAVKKMFAVGTASLGHVPVLDVGRFSSEIAEARLALFQKQVEITKKHRGDANVRYAWLPAKREVLSAVMMQGLGVGGAFIRKSIYGVGIHLTAADCPYFSARYCDVDENGVRYMVLCRVIMGNMELLRGDKAQFFSGGEEYDNGVDDIESPKNYIVWNINMNTHIFPEFVVRFKLSNLPNAEGNLIAKRDNSGVTLEGPKDLPPQLESNGARGSGSANSVGSSTTRPKSPWMPFPTLFAAISHKVAENDMLLINADYQQLRDKKMTRAEFVRKLRVIVGDDLLRSTITTLQNQPKSKEIPGSIRDHEEGAGGL

SEQ ID NO: 9188 - protein, 495 aa, Arabidopsis thaliana
MYENGEWNDLPEHVICAIQNELEEKSAAIEFKLCGHSFILDFLHMQRLDMETGAKTPLAWIDNAGKCFFPEIYESDERTNYCHHKCVEDPKQNAPHDIKLRLEIDVNGGETPRLNLEECSDESGDNMMDDVPLAQRSSNEHYDEATEDSCSRKLEAAVSKWDETDAIVVSGAKLTGSEVLDKDAVKKMFAVGTASLGHVPVLDVGRFSSEIAEARLALFQKQVEITKKHRGDANVRYAWLPAKREVLSAVMMQGLGVGGAFIRKSIYGVGIHLTAADCPYFSARYCDVDENGVRYMVLCRVIMGNMELLRGDKAQFFSGGEEYDNGVDDIESPKNYIVWNINMNTHIFPEFVVRFKLSNLPNAEGNLIAKRDNSGVTLEGPKDLPPQLESNGARGSGSANSVGSSTTRPKSPWMPFPTLFAAISHKVAENDMLLINADYQQLRDKKMTRAEFVRKLRVIVGDDLLRSTITTLQNQPKSKEIPGSIRDHEEGAGGL

SEQ ID NO: 9189 - DNA, 3489 bp, Arabidopsis thaliana
catcgctgtctggaacagcgatgaagggagagcttcaaagagataagatggcctctcttctctctcccgccacccccaccgccacctccgccgcatttcattcctgctccaccgccggattctccactcccactcacatttcatcccagaacagcagcctgtccctcctcagccgccggggttgtatgatgagatgcagtttttctccgcaggacattcctgttgattccctctctcatctccctcctttccttgactttcagaactccctcgccacattttcggatacccagaaatgggggttctttgtctccgccggaatcgtctggttttacctcacggcgaggcctggtgttctcatcggcgccattgacgcctaccttctcgctcccctccagcttggcctcgacactctgattggaaggaggttgaagaggtccgatttcttggtcactgagaaactcggcgaaggctctttcggcgtcgtctatgccggcgtcctactccccaagaattctactcttgttgatgacgttagggttagcaaagcaagagctaaagcgatggactttaccggcgaattcaagcagagagtcatcctcaagaaggtcaaggtgggagtacgaggggccgaggaatttggcgagtacgaagagtggttcaactaccgactctcaagggccgctcctgacacctgcgctgagtttctcggaagctttgtcgccgacaagaccaatactatgtttactaaaggcggcaaatggcttgtctggaggttcgagggagaccgtgatctcgctgattacatgaaagatcggagctttccttctaatttggagtccatcatgtttgggcgcgttctccaaggagtcgagtctgtgaaacgtcgtgcactgatcattaagcagattatgcgccagatcattacatctctcaggaaaatccatggcacgggcattgttcaccgggacgtgaagcctgccaacttggtggttacaaagaagggccagattaagctcatcgactttggtgccgctgctgatcttcgcattggcaagaattacatcccggaacgcactttactcgatcctgactactgtcctcctgagctctatgtcctcccggaggaaacgccaagccctcctccggagcctatagccgctttgctttccccgattctctggcagttgaacagtccggatctgtttgatatgtattctgctgggatagtgcttctccaaatggcggttccgaccttaagatctactgccggtctgaagaattttaatctggagatcaagtctgttgaatatgatcttaataggtggcgggaaaggactcggacgaggccagacttgagcatactagatctggactcgggcagagggtgggacctcgtcactaaactcatatccgagagaggttctctgagacgtggacgcctttcagcagctgctgctctcagacacccttattttttgttgggcggtgatcaagcggccgctgttctttcaaagctcagtttcagcaagtgactctgatttaaattcttatgatgtaaatgtacacaataacacgactctcttccttaaatatatttcttgtatattctctgcttcttgattcatgctcaaacgagtttcgttttgcgtgagcggttttgcatatcaaagtagccgtcatcaggtcagaggctgcagaagtatgtttgttttgatattgatctggaatctccctccaaggtttgttgtaattcacaaaagattgtgatacttaaagctcgtcgtgcgagaggagggcatcaagagcagtctgattctttttcttgcatccccatctgcatctccagctacacaaggagttgaagatggctagtcgctttgactgcagagatatgatttttgaagctgtgtgagctcttgtgaggtaaaccgcatagccgtcatccatgaactctgccccctgagggaagacctgccagaccagactcccggcaccagcccctcctttccttgttgagttgagggtcatcttgtacactgtgttcaacatcatgtcacggaaagacgtgttgaaaccagggtcatgtgcagacacaccaaactctgtgaacagaaccggcattcccaagtacatctctgcgtcctcaacatgagcttgcatccaagagcttgtgaattccaggaaagaatttgatactgccggagatatcctacagttcacaaattatttactgcatttttcagctgttctctgttttcagattcagggcagtctctgtttcttggtattttgcattaaaaaacataccaggaatctggatagacgtgaaccgaggcaaaatcaatgccaagaacctgattatttctgatgaagtcagttccgacttgtgcagcgtaggggttggggttgaatctggttctcgcaggggcagagggaccatagaagccttcaagtccgatctccaccaagtgtttagcgtctaagctcttcacaaacaccgccatttcttgtatccaagactggagtttgtcgccggaaggatcagaggggcaacgaggctcattcataagttcccaggcgaagattgtggggtcgttcttgtaagttatgtttgtgaaggtgttcactctattcagcactgtctgcaatgcaacacgttgaagttacaatttgtccctgatgggtaaataagcaatgagttttcgctgagatggatggaataatcacccggacatgggattggtagaagtttctgagggtggggttggtgaagaagtcgtcatcggaagtgagattaaggccggaggcgtttccccatttaacgtactgagctttgccgccataggcgtcccagttgttgaccaatgacagtataagcctgattttgtactttctggcctcgctcagcacgaagtcgagggcctgcccaattgctcaaaccttttaagtagtagaaaagtcttcaaggaagaagctttaggcgtagagatataccttgaagacctcttcatcgtaaacagagggagatttctggagagctctccattggccatcgttgaaagcccatgtcctgcctaccgtcattccaaccgcagaggcttgttggaacacttccgtcactttgcctctcgtggaattgtcagctgcaagagtcatcatccagtatgtgttgaagccattcacatagaatggttgtccatttagagtgaattgcatccctttcctctgcaccatctcccattgttcttctcctaccgattctgagttaaccctgcaaaagcagcctcaatctgtcattcttctctgcaagtaaataattccgtgaccaaataatcgtaatgttagtactcatgggactcgctgtccaagtctgcgagagctctgttttgagtcagaattatgaaaaccgcagaacagagcacaattctgaatccaagttggtccttcatttttcgttggtttatggatgagaacagattcctctcc

SEQ ID NO: 9190 - protein, 510 aa, Arabidopsis thaliana
SLSGTAMKGELQRDKMASLLSPATPTATSAAFHSCSTAGFSTPTHISSQNSSLSLLSRRGCMMRCSFSPQDIPVDSLSHLPPFLDFQNSLATFSDTQKWGFFVSAGIVWFYLTARPGVLIGAIDAYLLAPLQLGLDTLIGRRLKRSDFLVTEKLGEGSFGVVYAGVLLPKNSTLVDDVRVSKARAKAMDFTGEFKQRVILKKVKVGVRGAEEFGEYEEWFNYRLSRAAPDTCAEFLGSFVADKTNTMFTKGGKWLVWRFEGDRDLADYMKDRSFPSNLESIMFGRVLQGVESVKRRALIIKQIMRQIITSLRKIHGTGIVHRDVKPANLVVTKKGQIKLIDFGAAADLRIGKNYIPERTLLDPDYCPPELYVLPEETPSPPPEPIAALLSPILWQLNSPDLFDMYSAGIVLLQMAVPTLRSTAGLKNFNLEIKSVEYDLNRWRERTRTRPDLSILDLDSGRGWDLVTKLISERGSLRRGRLSAAAALRHPYFLLGGDQAAAVLSKLSFSK

SEQ ID NO: 9191 - protein, 504 aa, Arabidopsis thaliana
MKGELQRDKMASLLSPATPTATSAAFHSCSTAGFSTPTHISSQNSSLSLLSRRGCMMRCSFSPQDIPVDSLSHLPPFLDFQNSLATFSDTQKWGFFVSAGIVWFYLTARPGVLIGAIDAYLLAPLQLGLDTLIGRRLKRSDFLVTEKLGEGSFGVVYAGVLLPKNSTLVDDVRVSKARAKAMDFTGEFKQRVILKKVKVGVRGAEEFGEYEEWFNYRLSRAAPDTCAEFLGSFVADKTNTMFTKGGKWLVWRFEGDRDLADYMKDRSFPSNLESIMFGRVLQGVESVKRRALIIKQIMRQIITSLRKIHGTGIVHRDVKPANLVVTKKGQIKLIDFGAAADLRIGKNYIPERTLLDPDYCPPELYVLPEETPSPPPEPIAALLSPILWQLNSPDLFDMYSAGIVLLQMAVPTLRSTAGLKNFNLEIKSVEYDLNRWRERTRTRPDLSILDLDSGRGWDLVTKLISERGSLRRGRLSAAAALRHPYFLLGGDQAAAVLSKLSFSK

SEQ ID NO: 9192 - protein, 495 aa, Arabidopsis thaliana
MASLLSPATPTATSAAFHSCSTAGFSTPTHISSQNSSLSLLSRRGCMMRCSFSPQDIPVDSLSHLPPFLDFQNSLATFSDTQKWGFFVSAGIVWFYLTARPGVLIGAIDAYLLAPLQLGLDTLIGRRLKRSDFLVTEKLGEGSFGVVYAGVLLPKNSTLVDDVRVSKARAKAMDFTGEFKQRVILKKVKVGVRGAEEFGEYEEWFNYRLSRAAPDTCAEFLGSFVADKTNTMFTKGGKWLVWRFEGDRDLADYMKDRSFPSNLESIMFGRVLQGVESVKRRALIIKQIMRQIITSLRKIHGTGIVHRDVKPANLVVTKKGQIKLIDFGAAADLRIGKNYIPERTLLDPDYCPPELYVLPEETPSPPPEPIAALLSPILWQLNSPDLFDMYSAGIVLLQMAVPTLRSTAGLKNFNLEIKSVEYDLNRWRERTRTRPDLSILDLDSGRGWDLVTKLISERGSLRRGRLSAAAALRHPYFLLGGDQAAAVLSKLSFSK

SEQ ID NO: 9193 - DNA, 1109 bp, Arabidopsis thaliana
aagttcgatttcctaattcctaatccgtttcctttttattccgatcaaagcagcgaaaaaagcatcggagatatgtcgtctaaggacaagaaactatcgaagccaacaagtggtcgtactggtggtatccgtacactttccgatctgaaccgaagatcagaacctgattccgatagtgactccgatggacctcaagaatacttcaccggtggcgaaaaaagtggtatgcttgttcaagatcctacaaaagaaccaaaacacgatgatgttgatgagatatttaatcaagcaagacagctaggagctgtggaaggacctcttgagcatccttcgagttctagaagctttacaggaacaggaagattgctttctggagaaagtgtgccaacggctcttcaacagcctgagcctgtgattcacaatattattttctggtctaatggattcactgtagatgatggacctttgaggaagttggatgatccagagaatgcttcttttcttgatagcattcgaaagtctgaatgtccgaaagagcttgagcctgttgataaaagagctcctgtacatgttaatcttatgagaagagatgagaagtgccctgagaaagaaaagcttaaggtttcatttcaaggagttggaaggactctaggtggtgcaagctcatcaacagcttcaagccaaagtaacctaactgatgtagcagcggttcaatcaccgttacagagccttgtagtagatgaaactcttccatccacatcgatccagcttagactcgcggatgggacacgcatggtagcaaagttcaacaaccatcacacggttaacgacattcgtggtttcattgagttttctcgaccagggaatccaaacaactatacccttcaggtcatggggttcccaccaaagccacttactgacccttctcagaccattgaacaagccggtctagcaagttctgtagtcattcagaaattctagaaaatttcgtttctctttttttgtactagagagagatttcaacaacttggaattgtactgaaaatattcaatcggcttattgttgtggcaagagaaataaaaacatcatatggtttctatgttgtttc

SEQ ID NO: 9194 - protein, 326 aa, Arabidopsis thaliana
KFDFLIPNPFPFYSDQSSEKSIGDMSSKDKKLSKPTSGRTGGIRTLSDLNRRSEPDSDSDSDGPQEYFTGGEKSGMLVQDPTKEPKHDDVDEIFNQARQLGAVEGPLEHPSSSRSFTGTGRLLSGESVPTALQQPEPVIHNIIFWSNGFTVDDGPLRKLDDPENASFLDSIRKSECPKELEPVDKRAPVHVNLMRRDEKCPEKEKLKVSFQGVGRTLGGASSSTASSQSNLTDVAAVQSPLQSLVVDETLPSTSIQLRLADGTRMVAKFNNHHTVNDIRGFIEFSRPGNPNNYTLQVMGFPPKPLTDPSQTIEQAGLASSVVIQKF

SEQ ID NO: 9195 - protein, 302 aa, Arabidopsis thaliana
MSSKDKKLSKPTSGRTGGIRTLSDLNRRSEPDSDSDSDGPQEYFTGGEKSGMLVQDPTKEPKHDDVDEIFNQARQLGAVEGPLEHPSSSRSFTGTGRLLSGESVPTALQQPEPVIHNIIFWSNGFTVDDGPLRKLDDPENASFLDSIRKSECPKELEPVDKRAPVHVNLMRRDEKCPEKEKLKVSFQGVGRTLGGASSSTASSQSNLTDVAAVQSPLQSLVVDETLPSTSIQLRLADGTRMVAKFNNHHTVNDIRGFIEFSRPGNPNNYTLQVMGFPPKPLTDPSQTIEQAGLASSVVIQKF

SEQ ID NO: 9196 - protein, 251 aa, Arabidopsis thaliana
MLVQDPTKEPKHDDVDEIFNQARQLGAVEGPLEHPSSSRSFTGTGRLLSGESVPTALQQPEPVIHNIIFWSNGFTVDDGPLRKLDDPENASFLDSIRKSECPKELEPVDKRAPVHVNLMRRDEKCPEKEKLKVSFQGVGRTLGGASSSTASSQSNLTDVAAVQSPLQSLVVDETLPSTSIQLRLADGTRMVAKFNNHHTVNDIRGFIEFSRPGNPNNYTLQVMGFPPKPLTDPSQTIEQAGLASSVVIQKF

SEQ ID NO: 9197 - DNA, 3725 bp, Arabidopsis thaliana
atatccagataattaattctctcataatatcttctccacaatttcaactcttctaaagtctaaaccatgaagttactctcaaagacctttttgatattaactctcaccttcttcttctttggcattgcactagcgaaacagagctttgaaccagagatcgaagctttgaaatccttcaagaatggtatttccaacgaccctttaggagtattatcagattggaccatcatcggttcgttacgacactgtaattggaccggaatcacctgcgatagtaccggacatgtagtctcggtttccttgctggagaagcaacttgaaggtgttctgtctccagccatagcgaatctcacctatctccaggttcttgatctcacttcaaatagttttaccggcaaaataccggctgaaataggaaagttaaccgagcttaaccagcttattctgtacctaaactatttctctggttcgattccttctggaatctgggagcttaagaatattttctatcttgatcttagaaataatttgttgtccggtgatgttcctgaggaaatctgcaaaaccagttctttggtattgattgggtttgattacaacaacttaaccgggaaaataccagaatgcttaggagatttggttcatctccaaatgtttgtagcagctggtaaccatttaactggttcgattccggtatcaattggtactctggctaatttaacggatttagacctgagtggtaaccagttaaccggaaaaataccgagagattttggaaatctcttgaacttacagtctctcgttttaactgaaaacttgttggaaggagatataccagctgagatcggaaactgctcgagcttggtccaacttgagctttacgataaccagttaaccgggaaaataccagctgaattagggaatttggttcagctgcaagcactccggatatacaagaacaaacttacttcttcaattccatcttcattgttccggttaactcagttaacccatttggggttatcagaaaaccatttggttggaccgatatcagaagaaatcggttttcttgagtcacttgaagtcctcacacttcattccaacaacttcacaggagagtttccacagtccatcacaaacttgaggaacttgacagtcctaacggtggggttcaataatatttccggtgagctcccggcggatctagggcttcttacaaaccttcggaacctttcagcgcacgacaatcttcttaccggaccaataccttccagcataagtaactgcaccggtcttaaactcctggacctgtctcacaaccaaatgactggcgagatcccgcggggtttcggaaggatgaatcttacgttcatttctattgggaggaatcatttcaccggtgaaattccagatgatatcttcaactgttcaaacttggaaactcttagtgtggcagataacaacttaacaggaactctcaagccattaattgggaagcttcaaaaactcaggattttgcaagtttcatataactctctcactggaccgattcctcgagaaatcgggaatctgaaagatttgaatatcttgtaccttcactctaatggtttcacagggagaatcccgagagagatgtcgaatctcactctcctccaggggctaaggatgtattcaaatgatcttgaaggtccaattcctgaagaaatgtttgatatgaagctactctcagttcttgatctttccaacaacaaattctcaggtcaaattcctgccttgttctccaagcttgaatcgcttacctacttgagtcttcaaggaaacaaattcaacgggtctatccctgcaagccttaagtcgctttcgcttctcaacacattcgatatctccgacaatcttctcactggaaccatccctggagagctgttagcttctttgaaaaacatgcagctttacctcaacttctcaaacaacttgttgactggaaccatcccaaaggagcttggaaagcttgaaatggttcaagaaatcgacctttcaaacaatctcttttctgggtctattccaagatctttacaggcctgcaaaaatgtgttcacactggatttttcgcagaacaatctctcgggtcatataccagatgaagtcttccaaggcatggatatgatcataagcttgaacctttcaaggaacagtttctctggagaaatccctcagagcttcgggaacatgacgcatttggtctccttggatctctctagtaacaatctcactggtgaaattccagagagtctcgccaatctttcgactctgaaacatctcaaactagcttcaaacaacctcaaaggccatgttcctgaatccggggtgttcaaaaacatcaacgcctctgatctaatgggaaacacagatctctgtggtagcaagaagcctctcaagccatgtacgatcaagcagaagtcgagccacttctcgaagagaaccagagtcatcctgattattcttggatcagccgcggctcttcttcttgtcctgcttcttgttctgattctaacctgttgcaagaaaaaagaaaaaaagattgaaaattcatcagagtcctcattaccggatttggattcagctctgaaactgaagagatttgaaccaaaagagttggagcaagcaacagattcattcaacagtgccaacatcattggctcaagcagcttaagcacagtgtacaaaggtcagctagaagatgggacagtgattgcagtaaaagtattgaatctaaaggaattctctgcagaatcagacaagtggttctacacagaagctaaaacattgagccaactaaaacatcgaaacctggtgaagatcttagggtttgcgtgggaaagcggcaaaacgaaagctttagtgcttccatttatggagaatggaaacttggaggacaccattcacggctctgcagcaccgattgggtcgcttttagaaaaaatcgatctttgtgttcatatcgcaagcggaatcgattatcttcattctggatatggttttcccatcgttcattgtgatctgaagccagctaatatactccttgacagtgaccgcgttgctcacgtaagcgattttggaactgctcggattctaggtttccgcgaagatggaagcaccacagcttcaacatcagccttcgagggtacaattggatacttagctccagagtttgcttatatgaggaaagtgacaacaaaagccgatgtattcagcttcgggatcataatgatggagctgatgacgaaacagagaccaacttcgttgaatgatgaagattcacaagacatgactttgcgccaattggtggagaaatcgattggaaatggaagaaaagggatggttagggttcttgatatggaactcggggactctattgtttctctgaaacaggaagaggctattgaagactttctgaagctttgtttgttctgtacaagctctagacctgaagatcgacctgatatgaacgagattcttacacatctgatgaaacttagaggcaaagcgaattcatttcgagaagatcgtaacgaggatcgagaagtttagcagcaaagcttttttgatgacattttttcgactttgccaaactctgttacgaaggttgaatactttggacgtaaaacgttctgattttgcttttcgttatgtatttctgttttatataaggttgaaatttggttttg

SEQ ID NO: 9198 - protein, 1173 aa, Arabidopsis thaliana
MKLLSKTFLILTLTFFFFGIALAKQSFEPEIEALKSFKNGISNDPLGVLSDWTIIGSLRHCNWTGITCDSTGHVVSVSLLEKQLEGVLSPAIANLTYLQVLDLTSNSFTGKIPAEIGKLTELNQLILYLNYFSGSIPSGIWELKNIFYLDLRNNLLSGDVPEEICKTSSLVLIGFDYNNLTGKIPECLGDLVHLQMFVAAGNHLTGSIPVSIGTLANLTDLDLSGNQLTGKIPRDFGNLLNLQSLVLTENLLEGDIPAEIGNCSSLVQLELYDNQLTGKIPAELGNLVQLQALRIYKNKLTSSIPSSLFRLTQLTHLGLSENHLVGPISEEIGFLESLEVLTLHSNNFTGEFPQSITNLRNLTVLTVGFNNISGELPADLGLLTNLRNLSAHDNLLTGPIPSSISNCTGLKLLDLSHNQMTGEIPRGFGRMNLTFISIGRNHFTGEIPDDIFNCSNLETLSVADNNLTGTLKPLIGKLQKLRILQVSYNSLTGPIPREIGNLKDLNILYLHSNGFTGRIPREMSNLTLLQGLRMYSNDLEGPIPEEMFDMKLLSVLDLSNNKFSGQIPALFSKLESLTYLSLQGNKFNGSIPASLKSLSLLNTFDISDNLLTGTIPGELLASLKNMQLYLNFSNNLLTGTIPKELGKLEMVQEIDLSNNLFSGSIPRSLQACKNVFTLDFSQNNLSGHIPDEVFQGMDMIISLNLSRNSFSGEIPQSFGNMTHLVSLDLSSNNLTGEIPESLANLSTLKHLKLASNNLKGHVPESGVFKNINASDLMGNTDLCGSKKPLKPCTIKQKSSHFSKRTRVILIILGSAAALLLVLLLVLILTCCKKKEKKIENSSESSLPDLDSALKLKRFEPKELEQATDSFNSANIIGSSSLSTVYKGQLEDGTVIAVKVLNLKEFSAESDKWFYTEAKTLSQLKHRNLVKILGFAWESGKTKALVLPFMENGNLEDTIHGSAAPIGSLLEKIDLCVHIASGIDYLHSGYGFPIVHCDLKPANILLDSDRVAHVSDFGTARILGFREDGSTTASTSAFEGTIGYLAPEFAYMRKVTTKADVFSFGIIMMELMTKQRPTSLNDEDSQDMTLRQLVEKSIGNGRKGMVRVLDMELGDSIVSLKQEEAIEDFLKLCLFCTSSRPEDRPDMNEILTHLMKLRGKANSFREDRNEDREV

SEQ ID NO: 9199 - protein, 978 aa, Arabidopsis thaliana
MFVAAGNHLTGSIPVSIGTLANLTDLDLSGNQLTGKIPRDFGNLLNLQSLVLTENLLEGDIPAEIGNCSSLVQLELYDNQLTGKIPAELGNLVQLQALRIYKNKLTSSIPSSLFRLTQLTHLGLSENHLVGPISEEIGFLESLEVLTLHSNNFTGEFPQSITNLRNLTVLTVGFNNISGELPADLGLLTNLRNLSAHDNLLTGPIPSSISNCTGLKLLDLSHNQMTGEIPRGFGRMNLTFISIGRNHFTGEIPDDIFNCSNLETLSVADNNLTGTLKPLIGKLQKLRILQVSYNSLTGPIPREIGNLKDLNILYLHSNGFTGRIPREMSNLTLLQGLRMYSNDLEGPIPEEMFDMKLLSVLDLSNNKFSGQIPALFSKLESLTYLSLQGNKFNGSIPASLKSLSLLNTFDISDNLLTGTIPGELLASLKNMQLYLNFSNNLLTGTIPKELGKLEMVQEIDLSNNLFSGSIPRSLQACKNVFTLDFSQNNLSGHIPDEVFQGMDMIISLNLSRNSFSGEIPQSFGNMTHLVSLDLSSNNLTGEIPESLANLSTLKHLKLASNNLKGHVPESGVFKNINASDLMGNTDLCGSKKPLKPCTIKQKSSHFSKRTRVILIILGSAAALLLVLLLVLILTCCKKKEKKIENSSESSLPDLDSALKLKRFEPKELEQATDSFNSANIIGSSSLSTVYKGQLEDGTVIAVKVLNLKEFSAESDKWFYTEAKTLSQLKHRNLVKILGFAWESGKTKALVLPFMENGNLEDTIHGSAAPIGSLLEKIDLCVHIASGIDYLHSGYGFPIVHCDLKPANILLDSDRVAHVSDFGTARILGFREDGSTTASTSAFEGTIGYLAPEFAYMRKVTTKADVFSFGIIMMELMTKQRPTSLNDEDSQDMTLRQLVEKSIGNGRKGMVRVLDMELGDSIVSLKQEEAIEDFLKLCLFCTSSRPEDRPDMNEILTHLMKLRGKANSFREDRNEDREV

SEQ ID NO: 9200 - protein, 754 aa, Arabidopsis thaliana
MTGEIPRGFGRMNLTFISIGRNHFTGEIPDDIFNCSNLETLSVADNNLTGTLKPLIGKLQKLRILQVSYNSLTGPIPREIGNLKDLNILYLHSNGFTGRIPREMSNLTLLQGLRMYSNDLEGPIPEEMFDMKLLSVLDLSNNKFSGQIPALFSKLESLTYLSLQGNKFNGSIPASLKSLSLLNTFDISDNLLTGTIPGELLASLKNMQLYLNFSNNLLTGTIPKELGKLEMVQEIDLSNNLFSGSIPRSLQACKNVFTLDFSQNNLSGHIPDEVFQGMDMIISLNLSRNSFSGEIPQSFGNMTHLVSLDLSSNNLTGEIPESLANLSTLKHLKLASNNLKGHVPESGVFKNINASDLMGNTDLCGSKKPLKPCTIKQKSSHFSKRTRVILIILGSAAALLLVLLLVLILTCCKKKEKKIENSSESSLPDLDSALKLKRFEPKELEQATDSFNSANIIGSSSLSTVYKGQLEDGTVIAVKVLNLKEFSAESDKWFYTEAKTLSQLKHRNLVKILGFAWESGKTKALVLPFMENGNLEDTIHGSAAPIGSLLEKIDLCVHIASGIDYLHSGYGFPIVHCDLKPANILLDSDRVAHVSDFGTARILGFREDGSTTASTSAFEGTIGYLAPEFAYMRKVTTKADVFSFGIIMMELMTKQRPTSLNDEDSQDMTLRQLVEKSIGNGRKGMVRVLDMELGDSIVSLKQEEAIEDFLKLCLFCTSSRPEDRPDMNEILTHLMKLRGKANSFREDRNEDREV

SEQ ID NO: 9201 - DNA, 1458 bp, Arabidopsis thaliana
aaagtattattccgaatgtaaatagtggaacaaaaagaacagctgggaggattttgtttaaaaggacactacacttcccagctttccctcactgcccgaaaagaacactgcagaaacactttcctctgttcacagagaaagagagagatgatgctttacagcaacaatagttggagatcgaattccattttaatacttctacttggtctctccattgtggccgccgcagactccgccggcaaaacttcaccggtcgaagacggcttggtggttaacggcgactttgagacaccgccgtcaaacggcttccctgatgacgcaatcatcgaggacacctccgagatcccgagctggcgatccgatggtacggtggagctaatcaagtccggtcaaaaacaaggcgggatgatcttgatcgtgcctgagggccgtcacgctgttagattaggaaacgatgcagagatcagccaagaacttacggtggagaaaggctctatctactccgtcacgttcagtgcagcccgcacatgtgcacaactcgagtcgctgaatgtttcggtagcttcttctgatgaacctatcgcatcgcaaaccattgacttgcaaacggtgtacagcgttcaaggatgggatccatatgcatgggcgtttgaagcggttgtggatcgcgtccggttggtttttaagaaccctggcatggaggatgatcctacttgtggacctatcattgacgacattgccgttaagaagctctttactcctgataaacccaaaggcaatgcagtgattaatggagattttgaagaaggtccatggatgtttaggaacactaccttaggtgttctgcttccaacaaacctcgatgaagaaatatcgtctcttcctggatggaccgtcgaatcgaaccgagcagtacggtttattgactcagaccatttctcggtccccgaggggaagcgagctttggaacttttatcgggcaaagaaggcataatttctcaaatggttgagacaaaggcgaacattccgtacaagatgtctttctctttgggacacgcaggggacaagtgtaaggaacctttggctgtaatggcttttgctggagatcaagcacagaactttcattatatggcgcaagcaaactcgagtttcgaaagatcggagttgaacttcactgcgaaagctgaacgtacgaggatcgccttctacagcatttattacaatacgaggacggacgatatgacttcattgtgtggacctgtgattgatgacgttaaggtttggttctccgggtctagtagaattggatttagttttccgctttttattcttctttctttggttttcatctagattgttccggttcagaaattgtattggtagaccgggaattaagacgggattccacgttgtatgatgtatcgttgtatgatggatcggttcaaggtacaagaaatg

SEQ ID NO: 9202 - protein, 401 aa, Arabidopsis thaliana
MMLYSNNSWRSNSILILLLGLSIVAAADSAGKTSPVEDGLVVNGDFETPPSNGFPDDAIIEDTSEIPSWRSDGTVELIKSGQKQGGMILIVPEGRHAVRLGNDAEISQELTVEKGSIYSVTFSAARTCAQLESLNVSVASSDEPIASQTIDLQTVYSVQGWDPYAWAFEAVVDRVRLVFKNPGMEDDPTCGPIIDDIAVKKLFTPDKPKGNAVINGDFEEGPWMFRNTTLGVLLPTNLDEEISSLPGWTVESNRAVRFIDSDHFSVPEGKRALELLSGKEGIISQMVETKANIPYKMSFSLGHAGDKCKEPLAVMAFAGDQAQNFHYMAQANSSFERSELNFTAKAERTRIAFYSIYYNTRTDDMTSLCGPVIDDVKVWFSGSSRIGFSFPLFILLSLVFI

SEQ ID NO: 9203 - protein, 400 aa, Arabidopsis thaliana
MLYSNNSWRSNSILILLLGLSIVAAADSAGKTSPVEDGLVVNGDFETPPSNGFPDDAIIEDTSEIPSWRSDGTVELIKSGQKQGGMILIVPEGRHAVRLGNDAEISQELTVEKGSIYSVTFSAARTCAQLESLNVSVASSDEPIASQTIDLQTVYSVQGWDPYAWAFEAVVDRVRLVFKNPGMEDDPTCGPIIDDIAVKKLFTPDKPKGNAVINGDFEEGPWMFRNTTLGVLLPTNLDEEISSLPGWTVESNRAVRFIDSDHFSVPEGKRALELLSGKEGIISQMVETKANIPYKMSFSLGHAGDKCKEPLAVMAFAGDQAQNFHYMAQANSSFERSELNFTAKAERTRIAFYSIYYNTRTDDMTSLCGPVIDDVKVWFSGSSRIGFSFPLFILLSLVFI

SEQ ID NO: 9204 - protein, 315 aa, Arabidopsis thaliana
MILIVPEGRHAVRLGNDAEISQELTVEKGSIYSVTFSAARTCAQLESLNVSVASSDEPIASQTIDLQTVYSVQGWDPYAWAFEAVVDRVRLVFKNPGMEDDPTCGPIIDDIAVKKLFTPDKPKGNAVINGDFEEGPWMFRNTTLGVLLPTNLDEEISSLPGWTVESNRAVRFIDSDHFSVPEGKRALELLSGKEGIISQMVETKANIPYKMSFSLGHAGDKCKEPLAVMAFAGDQAQNFHYMAQANSSFERSELNFTAKAERTRIAFYSIYYNTRTDDMTSLCGPVIDDVKVWFSGSSRIGFSFPLFILLSLVFI

SEQ ID NO: 9205 - DNA, 1625 bp, Arabidopsis thaliana
ctctttcggatattccaccagtctctcgcaatcttcgctcttctctttgctctctctctctcaacgcggttcagatccgagtttgggagattcaagctccctgaaaaaagccctttactctcgcttaccaactttgctccagcatggcaggatctgcaccagaaggcacacagtttgatgcacgtcagtttgaccagaaactcaatgaagtacttgagggacaagatgagttcttcacatcctatgatgatgttcatgagagctttgatgccatgggtcttcaagagaaccttctcaggggtatttatgcttatggttttgagaagccttctgctattcagcaaagaggaatcgtccccttctgtaagggtcttgatgtgattcaacaggctcagtctggtactgggaaaacagcaactttctgctctggtgtcttgcagcagctggacttctcccttatccagtgtcaggctttggttctagctccaactagagagcttgctcagcaaattgagaaggtcatgagggcccttggtgattaccttggtgtcaaggttcacgcctgtgttggtggaaccagtgtccgtgaggatcagcgcatcctccaagctggtgtccatgttgttgttggaactccagggcgtgtctttgacatgttgaagaggcagtctcttcgtgctgacaacatcaagatgtttgttctcgatgaagctgatgaaatgctctcccgtggtttcaaggaccagatctatgacatattccagcttcttccaccaaagatccaagttggtgtgttctccgcaacaatgccaccagaagctcttgagatcacaaggaagttcatgagcaagccagtgagaatcttggtgaagcgtgatgagcttacccttgaaggtatcaagcagttctacgtcaacgttgagaaagaagagtggaagctcgagacactctgtgatctctacgagactcttgccatcactcagagtgtcatcttcgtgaacaccaggcgtaaggttgattggctcacagacaaaatgagaagccgtgaccacacagtctctgcaactcacggagacatggaccagaacaccagggacatcatcatgagagagttcaggtctggttcctcccgtgttctcatcaccactgacctcttagctcgtggtattgatgtccaacaagtctccctggttatcaacttcgatctcccaactcagccagagaactaccttcaccgtatcggaagaagtggaaggttcgggagaaagggtgttgcgatcaatttcgtgacccgtgatgatgagaggatgctgtttgatattcagaaattctacaatgtggttgtcgaagagctgccttcgaacgtggccgatctgctgtgaagggagaaaagaagtcggttctgttgctgtgtttgctctgccgtactagtatcaccggagaagaaaggttttcttgttttgcaaggcactctttgatctgattttgacccgtcgtctatcagcgatttacatttcttaaattttcttagttgttgttctctcctctctctcccagctacgaacatatctctctcttcttgaccatttttaagtttaagtcatatggagtatttatttcttcac

SEQ ID NO: 9206 - protein, 412 aa, Arabidopsis thaliana
MAGSAPEGTQFDARQFDQKLNEVLEGQDEFFTSYDDVHESFDAMGLQENLLRGIYAYGFEKPSAIQQRGIVPFCKGLDVIQQAQSGTGKTATFCSGVLQQLDFSLIQCQALVLAPTRELAQQIEKVMRALGDYLGVKVHACVGGTSVREDQRILQAGVHVVVGTPGRVFDMLKRQSLRADNIKMFVLDEADEMLSRGFKDQIYDIFQLLPPKIQVGVFSATMPPEALEITRKFMSKPVRILVKRDELTLEGIKQFYVNVEKEEWKLETLCDLYETLAITQSVIFVNTRRKVDWLTDKMRSRDHTVSATHGDMDQNTRDIIMREFRSGSSRVLITTDLLARGIDVQQVSLVINFDLPTQPENYLHRIGRSGRFGRKGVAINFVTRDDERMLFDIQKFYNVVVEELPSNVADLL

SEQ ID NO: 9207 - protein, 369 aa, Arabidopsis thaliana
MGLQENLLRGIYAYGFEKPSAIQQRGIVPFCKGLDVIQQAQSGTGKTATFCSGVLQQLDFSLIQCQALVLAPTRELAQQIEKVMRALGDYLGVKVHACVGGTSVREDQRILQAGVHVVVGTPGRVFDMLKRQSLRADNIKMFVLDEADEMLSRGFKDQIYDIFQLLPPKIQVGVFSATMPPEALEITRKFMSKPVRILVKRDELTLEGIKQFYVNVEKEEWKLETLCDLYETLAITQSVIFVNTRRKVDWLTDKMRSRDHTVSATHGDMDQNTRDIIMREFRSGSSRVLITTDLLARGIDVQQVSLVINFDLPTQPENYLHRIGRSGRFGRKGVAINFVTRDDERMLFDIQKFYNVVVEELPSNVADLL

SEQ ID NO: 9208 - protein, 286 aa, Arabidopsis thaliana
MRALGDYLGVKVHACVGGTSVREDQRILQAGVHVVVGTPGRVFDMLKRQSLRADNIKMFVLDEADEMLSRGFKDQIYDIFQLLPPKIQVGVFSATMPPEALEITRKFMSKPVRILVKRDELTLEGIKQFYVNVEKEEWKLETLCDLYETLAITQSVIFVNTRRKVDWLTDKMRSRDHTVSATHGDMDQNTRDIIMREFRSGSSRVLITTDLLARGIDVQQVSLVINFDLPTQPENYLHRIGRSGRFGRKGVAINFVTRDDERMLFDIQKFYNVVVEELPSNVADLL

SEQ ID NO: 9209 - DNA, 1377 bp, Arabidopsis thaliana
attcttcaaaactatattatataaacacatttttcgtttcttcacattcacaaaacatctctctctttcttctcccattcactcactatcttgctcctagaaaaagatggcgagaatgagtttgatgatcatgatgattatggttgctgtgaccatgattaacattgctaagagtgatcccattgcaccatgttacttcatatttggtgactctttggttgataatggcaacaataatcagcttcagtcattagctagagctaattactttccttacggtattgactttgctgccggtccaaccggtcggtttagcaacggcttaaccactgtcgatgttatcgctcagcttttgggtttcgaggactacattacaccttacgcttctgcaagaggacaagacattctccgaggagttaactatgcttccgctgctgccggaatccgagacgaaaccggcagacaattgggaggtcgaatagcatttgcagggcaagtagcaaatcacgtgaacactgtgtcacaagtagtgaacatacttggtgatcaaaacgaagcctcgaattacctcagcaaatgcatttactctatcggattaggcagtaacgattatcttaacaactacttcatgcctactttttactctaccggtaaccagttctcccccgaatcctatgccgacgatctcgttgcccgttacaccgaacaactcagggtactgtataccaatggagcgaggaagtttgcgttgataggagtcggggcaatcggttgcagcccgaacgagctagctcaaaacagcagagacggaagaacgtgtgacgaaagaatcaactcagcgaacagaatctttaacagcaaactcatatctatagtcgacgcttttaaccagaacacaccagatgcaaaattcacttacatcaacgcttatggcatcttccaagacattattacaaaccctgctcgctacgggtttagagtgacaaatgcaggatgttgtggagttgggaggaacaatggacagataacttgtcttccaggtcaagcaccatgtctaaataggaatgagtatgtgttttgggatgcgtttcatcccggtgaagctgcgaatattgttattggaagacgatcttttaagcgagaagctgcttctgatgctcatccttatgatattcagcagctagcatctctctaaagagagaaagatcttttggttgtctaagtattttgatagttcttcaatggcagctgagttttggactcaagaagaagtgatttggtttgtgttgtgtgatgtcataactgtttatgtaatgatttggagttactgtttatctctttttctcttaacagttttataaatttgattctttcatt

SEQ ID NO: 9210 - protein, 362 aa, Arabidopsis thaliana; identical to SEQ ID NO: 8173

SEQ ID NO: 9211 - protein, 359 aa, Arabidopsis thaliana; identical to SEQ ID NO: 8174

SEQ ID NO: 9212 - protein, 356 aa, Arabidopsis thaliana; identical to SEQ ID NO: 8175

SEQ ID NO: 9213 - DNA, 201 bp, Arabidopsis thaliana
atgtcacctatctttcctctcgcgtctctcccctttactcagaaatggcgaaatcgaagaatcacacggcgcacaatcagtctgccaaggcgcataagaacggaatcaagaagccaaggagacaccgtcacacaccaaccagaggaatggatcctaaattcctaagaaaccagaggtatgcaaggaagcacaacgtcaaga

SEQ ID NO: 9214 - protein, 66 aa, Arabidopsis thaliana
VTYLSSRVSPLYSEMAKSKNHTAHNQSAKAHKNGIKKPRRHRHTPTRGMDPKFLRNQRYARKHNVK

SEQ ID NO: 9215 - protein, 54 aa, Arabidopsis thaliana
MSPIFPLASLPFTQKWRNRRITRRTISLPRRIRTESRSQGDTVTHQPEEWILNS

SEQ ID NO: 9216 - protein, 52 aa, Arabidopsis thaliana
MAKSKNHTAHNQSAKAHKNGIKKPRRHRHTPTRGMDPKFLRNQRYARKHNVK

SEQ ID NO: 9217 - DNA, 1267 bp, Arabidopsis thaliana
attccaaaagttttttctgttgtgtgtaaaaagcccggatttagagagagatttagttttttttttttttccggcacttgggtccttcaaagtctccgccttctgccgtgttgaagttcgatggcgataggagaccgcaagaagattatcatcgatactgatcctggaatcgatgatgcaatggcgatattcgtagctttaaattcacctgaagttgatgtcattggcctcactactatctttggaaacgtgtataccactctcgccactcgaaacgccttgcatttgttggaggttgcgggtaggaccgatattccggtggctgaaggaacacataaaaccttcttgaacgatacgaagcttcgaatagctgactttgttcatggaaaagatgggcttggcaaccaaaacttccctccacctaaaggaaaaccaattgaaaagtctggacctgagtttttagttgaacaagcaaagctttgccctggtgaaatcacggttgttgctttgggaccactaacaaatctcgcgttggctgttcagcttgatccagagttttcgaaaaatgtcggacaaattgttcttcttggtggagcatttgcagtaaacggaaatgtaaatccagcttcggaagctaatatttttggcgatcccgaagctgcagatattgtgttcacatgtggggccgatataattgctgtgggaatcaatgtgacccatcaagttattatgacagctgatgacaaggacaaactagcatcatcgaaggggaaattagctcaatatctctgtaaaatccttgatgtgtactatgattatcatctcacggcttacgaaatcaaaggtgtgtaccttcatgatcctgcgacgatccttgcggctttccttccttctctattcacttatacagaaggagttgctagagtgcagacaagtggtatcactaggggactcactttactgtacaacaatcttaagaggtttgaggaagcgaacgagtggtcagacaaaccaacggtaaaagtggcagtgacggttgatgctcctgcagtcgtgaagctcataatggataggcttatggagtcttaaaccatcttgggtcgttaattagttatctctttctctttgatgtttcactattgcgagccatttctcttgttaaaaataaggctcctcttgctgcattatttatttattgtttaatctttattaaaacgaatattattatgttaccaattaccaataataaagttaagatttttcctcc

SEQ ID NO: 9218 - protein, 322 aa, Arabidopsis thaliana
MAIGDRKKIIIDTDPGIDDAMAIFVALNSPEVDVIGLTTIFGNVYTTLATRNALHLLEVAGRTDIPVAEGTHKTFLNDTKLRIADFVHGKDGLGNQNFPPPKGKPIEKSGPEFLVEQAKLCPGEITVVALGPLTNLALAVQLDPEFSKNVGQIVLLGGAFAVNGNVNPASEANIFGDPEAADIVFTCGADIIAVGINVTHQVIMTADDKDKLASSKGKLAQYLCKILDVYYDYHLTAYEIKGVYLHDPATILAAFLPSLFTYTEGVARVQTSGITRGLTLLYNNLKRFEEANEWSDKPTVKVAVTVDAPAVVKLIMDRLMES

SEQ ID NO: 9219 - protein, 302 aa, Arabidopsis thaliana
MAIFVALNSPEVDVIGLTTIFGNVYTTLATRNALHLLEVAGRTDIPVAEGTHKTFLNDTKLRIADFVHGKDGLGNQNFPPPKGKPIEKSGPEFLVEQAKLCPGEITVVALGPLTNLALAVQLDPEFSKNVGQIVLLGGAFAVNGNVNPASEANIFGDPEAADIVFTCGADIIAVGINVTHQVIMTADDKDKLASSKGKLAQYLCKILDVYYDYHLTAYEIKGVYLHDPATILAAFLPSLFTYTEGVARVQTSGITRGLTLLYNNLKRFEEANEWSDKPTVKVAVTVDAPAVVKLIMDRLMES

SEQ ID NO: 9220 - DNA, 535 bp, Arabidopsis thaliana
aacctaaaacctttaatagcaaacgaaaaataaaaaagaagaaactaacaaaacaaaaaaaaaaatggaggccgggaaaacaccaccgacgacgacaacaacgacggagaagaaaacggagcaagtgaaagacaacgacttgccgaccgatagcccttacatggcgacgggtactttggaagattacaaattgaaagcttatggagccgaaggtcaccaagagcctactcctggtcttggaggtggctccaccgatgctcctactccttctggcgacgcacccgccgccactaccaccgatgcgaaagctccgtgaaaaaaaagaaagactataataatgaacgggttttgtggatcgtcggaaaacaaacccataattgtagtatgttcaataactgatccagcttcgtttcttaacgtttttatggtttaattaaaaatgtatttgcgtctaatgctgaatgctaaagttcgagtttcgtatcaaatgaagttgtaacgatttaataattaatgtgaagcttatttctttttg

SEQ ID NO: 9221 - protein, 83 aa, Arabidopsis thaliana
MEAGKTPPTTTTTTEKKTEQVKDNDLPTDSPYMATGTLEDYKLKAYGAEGHQEPTPGLGGGSTDAPTPSGDAPAATTTDAKAP

SEQ ID NO: 9222 - protein, 51 aa, Arabidopsis thaliana
MATGTLEDYKLKAYGAEGHQEPTPGLGGGSTDAPTPSGDAPAATTTDAKAP

SEQ ID NO: 9223 - protein, 44 aa, Arabidopsis thaliana
MEPKVTKSLLLVLEVAPPMLLLLLATHPPPLPPMRKLREKKERL

SEQ ID NO: 9224 - DNA, 509 bp, Arabidopsis thaliana
atcacttacttaacatactaagagagttattagaacttgcaaaaaatggcttccaaggctttgattctgttaggtctcttctcagttcttctcgtcgtctccgaagtgtctgccgcaaggcaatcgggcatggtgaagccagagagtgaggaaactgtgcaacctgaaggttatggcggtggccacggaggacatggtggtcacggagggggaggaggccacggacatggaggacacaacggaggagggggccacggacttgacggatacggaggaggtggaggacactatggaggaggtggaggacactacggaggtggtggaggaggatacggaggtggaggaggacaccacggaggaggaggccacgggctaaacgaacctgttcagactaagccgggtgtttaaaactatataatatcttcactaccatgcatgattgcatatatatatatacgcttatgtattatctatatgcctataaataaaccatggtgagtttgtaacgc

SEQ ID NO: 9225 - protein, 120 aa, Arabidopsis thaliana
MASKALILLGLFSVLLVVSEVSAARQSGMVKPESEETVQPEGYGGGHGGHGGHGGGGGHGHGGHNGGGGHGLDGYGGGGGHYGGGGGHYGGGGGGYGGGGGHHGGGGHGLNEPVQTKPGV

SEQ ID NO: 9226 - protein, 92 aa, Arabidopsis thaliana
MVKPESEETVQPEGYGGGHGGHGGHGGGGGHGHGGHNGGGGHGLDGYGGGGGHYGGGGGHYGGGGGGYGGGGGHHGGGGHGLNEPVQTKPGV

SEQ ID NO: 9227 - protein, 67 aa, Arabidopsis thaliana
MAVATEDMVVTEGEEATDMEDTTEEGATDLTDTEEVEDTMEEVEDTTEVVEEDTEVEEDTTEEEATG

SEQ ID NO: 9228 - DNA, 1334 bp, Arabidopsis thaliana
acaaaggaaaacgttaatggtggatctgagcactgtcaatgtcatcaccaccgaagtagagttgactccactcaacagaaactgaaactggaaagtttgagacttttaagatgtcagaaacagaatttaaagtgttgcttgagacattcacatttcctgctgattctgctcccttcaagagttgtcatgcctctaccatagttgaggttgttaaagatcatttcttggctgcgtatttcggaggcaccagggaaggagcacctgatgtcaaaatctggttgcagcatttcaaggatggtcaatgggattcaccggttattgttgatgaagagccaggagttccaatgtataaccctgtcttgttcaaacttccatctcatgagctcttattgttctacaaaatcggccaggaggttcaaaaatggagtggttgcatgaaacgatcatatgataaaggtataacttggactgaaagagaacagcttcctcctgggattctcggtcctatcaaaaacaagcccattttgcttgaagacggtactctcctttgcggatcatctgttgagagttggaattcttggggagcatggatggaggtcacttcagatgcgggtagaacatggagaaagaaagggccaatatacattcaaggcaagagtcttagcgtgatccaaccagttccataccaaaccgcagctgggaacttacggattttactcagatcctttactggcattgacagaatctgtatctcagagtctttggatggcggtgagaactggagttttgcagtaccaacggttctcccaaacccaaattcaggtattgatggagtcaagcttaaggatggtaggctagtgcttgcttacaacacagactcaagaggtgtgctcaaattaggagtttctttagacgacggtgattcatggaccgatattttaacgttggaggaatctccgggaatggagtattcgtacccggctgttatacaagccggagacggcaatgtccacgtcacctatacatataacaggacacaaattaagcatgtggtgctcaagactgcgacagatatcgattcgaagccataccgacatggtgaagcaggaggaggacacgtgaacttggatttgtacgaaccaaacattaattaattagctatttgtctcttgaaccatcgatgtggagtgtgacttccttcttacggaagaacaaagaatgttctctttcttgtcttgtaagttattgattgatcgattcttgagtttgtaaaagttgccactagttgatgaatattattgagattgtttataatatatttattgtaatcatac

SEQ ID NO: 9229 - protein, 347 aa, Arabidopsis thaliana
MSETEFKVLLETFTFPADSAPFKSCHASTIVEVVKDHFLAAYFGGTREGAPDVKIWLQHFKDGQWDSPVIVDEEPGVPMYNPVLFKLPSHELLLFYKIGQEVQKWSGCMKRSYDKGITWTEREQLPPGILGPIKNKPILLEDGTLLCGSSVESWNSWGAWMEVTSDAGRTWRKKGPIYIQGKSLSVIQPVPYQTAAGNLRILLRSFTGIDRICISESLDGGENWSFAVPTVLPNPNSGIDGVKLKDGRLVLAYNTDSRGVLKLGVSLDDGDSWTDILTLEESPGMEYSYPAVIQAGDGNVHVTYTYNRTQIKHVVLKTATDIDSKPYRHGEAGGGHVNLDLYEPNIN

SEQ ID NO: 9230 - protein, 269 aa, Arabidopsis thaliana
MYNPVLFKLPSHELLLFYKIGQEVQKWSGCMKRSYDKGITWTEREQLPPGILGPIKNKPILLEDGTLLCGSSVESWNSWGAWMEVTSDAGRTWRKKGPIYIQGKSLSVIQPVPYQTAAGNLRILLRSFTGIDRICISESLDGGENWSFAVPTVLPNPNSGIDGVKLKDGRLVLAYNTDSRGVLKLGVSLDDGDSWTDILTLEESPGMEYSYPAVIQAGDGNVHVTYTYNRTQIKHVVLKTATDIDSKPYRHGEAGGGHVNLDLYEPNIN

SEQ ID NO: 9231 - protein, 239 aa, Arabidopsis thaliana
MKRSYDKGITWTEREQLPPGILGPIKNKPILLEDGTLLCGSSVESWNSWGAWMEVTSDAGRTWRKKGPIYIQGKSLSVIQPVPYQTAAGNLRILLRSFTGIDRICISESLDGGENWSFAVPTVLPNPNSGIDGVKLKDGRLVLAYNTDSRGVLKLGVSLDDGDSWTDILTLEESPGMEYSYPAVIQAGDGNVHVTYTYNRTQIKHVVLKTATDIDSKPYRHGEAGGGHVNLDLYEPNIN

SEQ ID NO: 9232 - DNA, 2082 bp, Arabidopsis thaliana
gagatacttttcacaaatctttttcttcattgcttcgtcgagaagagaatgaacaatgaagtgaactaataaaacttccatttgcaatttcacgacctccattttcgtgctgagattctctaagctcgatggatctaacgacgacgcgtcagaggcgtccacttatatctgactcttcttcttcgtcttctacgaaatcttactcgaagaccgataaacctggccgatctaatggcggtgatgcggaggatggtggtctccgatggttcttgccgtttatagcgctttgttatcttcgttacatgagcgcgacttctaatatcattcatgactgcgatgaagtgttcaattactgggagcctcttcattatattctctacaagtccggatttcagacctgggaatacagttccaactttgctcttcggtcgtacttatacattctattccatgaattggctggacggcctgcttcttggtggtttggtgatgacaaggttagagttttctatgcagtgagactctttctcggactggtttctgcagtttcagatactgtcctggttgttgcgctctccagaaagtatgggaaacgtatcgctacctatgcagttgcgatgctctgcttaaccagtggctgcttctttgctagtaccagtttcctccccagttcattttctatgtacgccataagcctctcatctggtttattacttttcgagaagtatgccatggctgttgcagtttcggttgtcggggtgattcttggctggccattttctatcttggcctttttacctgtcgttatttactctctggttaagagattcaagcaagcatttatcgctggtgcagtcaccactatatttctccttggagtctcactacttgtggattactattattacaagagatggacatcatcagttttgaatctcttgatatacaatgtgttagggggtggagagagccatctctatgggactgaaggagcgttattttatataagaaatggatttaacaacttcaacttctgtttcattttggcaatgttgtttgtcgcaatatatcctgttatcagaaggaagtatgaccgtgccctgctggttgtgatttccccgatgtatatttggctggcgttcatgtcacttcagccccacaaagaagaaaggttcctttatcctatataccctcttatttgtgtctctgcttctgctgttattgagaacatccctgagctgttccgggaaaagtatagctcacgtgaaagtcttctggtgacaataaccaaatacatgcgacctgtgattcttggttgtatcttatgtgcttcacattctcgcacatttgctcttattaatggctattccgctcccttggaggtctacaaactactggagcatcatgatgatgcaggaccaggttctgttctatgtgtgggaagtgaatggcatcgatacccatcatcgttttttgtgccccactacattagcgaagtacggtggatcgatgatggattccgcggtcttcttccattcccatttaacaatacacttggaggcacttcagcatcacctccatacttcaacaacaagaaccaagcatccgaagaacaatatttaaagaacatcgaaacttgtacattcctcattgagttgcagcttagcagaccgtatcagtatcgaggcagcgacttatctacatgggaggctattgcggtgttgccttatttggacagagagctgtcgccagctaagtatagatcgttcttcatcccgcacatgtggcaggagaaaaatgtgtttggcaaatacgtagcactgagaagagtcccaaaatgatcacaaatcgttaaaactccttagacttgtagctttaactcagttcattgggtagttttgggagaatgtaataactaataactgattagtatcggctttaagttcaggtacgttcacggttcgtagttgtgttgttgtgaaagagactagttttaactttgtaagaaatctccaaatggtcagaagaacgtggaagattatgtttatgacattattgtgcaaagtctatattctttttgtc

SEQ ID NO: 9233 - protein, 570 aa, Arabidopsis thaliana; identical to SEQ ID NO: 1628

SEQ ID NO: 9234 - protein, 512 aa, Arabidopsis thaliana; identical to SEQ ID NO: 1629

SEQ ID NO: 9235 - protein, 407 aa, Arabidopsis thaliana; identical to SEQ ID NO: 1630

SEQ ID NO: 9236 - DNA, 755 bp, Arabidopsis thaliana
agcctatggggtatggtgtaggtaggggctatggaagtggtgggtctggtgttggctatggcgttggaattggctctagtggaggcagtggctttggagaaggtattggctctagtggaggcaacggctttggagaaggaattggctctagtggaggcagcggctttggagaaggaattggctctagtggaggcagcggctttggtgaaggaattggttctggtggtggtacaggtattggcattggagaaggaataggatccgggtctgcccaacccaattgcggccctgtcacgggagctccaggtagcggattcggtgaaggcataggacaaggtagtggtccaggggaagggattggtatcggtataggacagggtggacctagtgtagtagtcccaggcacaagaatccctccgatagtggttccaggcgcacagattcccggttttgtgattccaggtatcacagttcctggctacggtactggatgccaaacaggtggctgcaatccgaacccaccacactactatatcccaccaagctgtccccattgtccacctttcacatcaggacaagacaaacacatgtcagacaaaggagccatgaccgaagctcttgcacccacttcaccggagatacatgtttaagctttaagagtccatgaaacaccagtctaataaatcactcataatgaaatctattttggtttataaaagcttcacagaaagttgaataatacaactttcttgctc

SEQ ID NO: 9237 - protein, 215 aa, Arabidopsis thaliana
PMGYGVGRGYGSGGSGVGYGVGIGSSGGSGFGEGIGSSGGNGFGEGIGSSGGSGFGEGIGSSGGSGFGEGIGSGGGTGIGIGEGIGSGSAQPNCGPVTGAPGSGFGEGIGQGSGPGEGIGIGIGQGGPSVVVPGTRIPPIVVPGAQIPGFVIPGITVPGYGTGCQTGGCNPNPPHYYIPPSCPHCPPFTSGQDKHMSDKGAMTEALAPTSPEIHV

SEQ ID NO: 9238 - protein, 214 aa, Arabidopsis thaliana
MGYGVGRGYGSGGSGVGYGVGIGSSGGSGFGEGIGSSGGNGFGEGIGSSGGSGFGEGIGSSGGSGFGEGIGSGGGTGIGIGEGIGSGSAQPNCGPVTGAPGSGFGEGIGQGSGPGEGIGIGIGQGGPSVVVPGTRIPPIVVPGAQIPGFVIPGITVPGYGTGCQTGGCNPNPPHYYIPPSCPHCPPFTSGQDKHMSDKGAMTEALAPTSPEIHV

SEQ ID NO: 9239 - DNA, 1508 bp, Arabidopsis thaliana
tcctcctcatttggagatgtcactaactcatcttctctgattcaccaacatcctaaaacccttttgatcaaaacatggcttccatttccagaatcttaccaacagatggcagattaagtcaatgcagaatcaacacctcgtgggttccttctacaaccagaactcaaactcacttagattttcccaagttagtttctgttagtaactctgggataagtttgaggattcagaatagtaaacctattagccctgtctttgctcttgaagcaacttcctccaggagggttgtttgcaaagctgctgctggtgtgtcaggtgacttacctgagagtactcctaaggaacttagtcagtatgagaagattattgagcttttgacaaccctttttccactttgggttattttgggaacacttgttggcatcttcaagccatccttggttacatggttggaaacagatctctttactctaggtcttggatttcttatgctttccatgggtttgactcttacgtttgaagatttcagaagatgtttacgtaatccatggacggtgggtgttggttttcttgctcaatatatgatcaagccaattctaggttttctcattgcaatgactcttaagctttcggcacctcttgcgactggccttatcctagtctcatgctgccctggaggacaggcgtcaaacgttgctacttacatttccaaggggaatgtagcgctctctgtactcatgacaacgtgttcaaccattggggctattataatgactcctcttcttactaagcttcttgctggtcagcttgttcccgttgacgctgctggacttgctcttagtacgttccaagtagtgttggttcctaccataattggagttctggcaaatgagttctttcctaaatttacgtctaagatcataacagtgacgcctctaatcggagtcattctgactactctgctctgtgccagccctattggacaagttgcagatgttttgaaaacccaaggagctcaacttatactcccggtggcactccttcatgctgcagcctttgctattggctattggatttcaaagttttctttcggcgagtccacttcgcgtaccatttctatagaatgtggaatgcaaagttcagcgctcgggttcttgcttgcacaaaagcatttcacaaaccctctagttgctgttccttctgcagtcagtgttgtctgtatggcgcttggcgggagcggcctggccgtgttctggagaaacctaccgattccggcagatgacaaggatgacttcaaagagtaaatgaagtaggaaaggcggtttgcatcttctccaaacgatgtgattgttttgttgtaatgttagtaaacattacaaaatttgtgttgaaaaacatgaaacaaaatgtgtttaagagacatagaaacaagggcgtgcatgatgacaactttgtggtcaaccttttttttatttctcaattaatggacaaatcttttttggcacacc

SEQ ID NO: 9240 - protein, 409 aa, Arabidopsis thaliana; identical to SEQ ID NO: 4336

SEQ ID NO: 9241 - protein, 271 aa, Arabidopsis thaliana; identical to SEQ ID NO: 4337

SEQ ID NO: 9242 - protein, 268 aa, Arabidopsis thaliana; identical to SEQ ID NO: 4338

SEQ ID NO: 9243 - DNA, 488 bp, Arabidopsis thaliana
atgatgataaacgcaaagaagcttatgaagatggctaagaaatggcaacaaagagcagccctccacaggaaaagaatctcatttcagagatcaagtgtctttactagcagctcttctactgtagaaaagggttgtttcgtggtttacacggcggataaaatccgctttgcttttccaataagttatctgagcaactctgttgtccaggagctattgaaaatatctgaagaagatttcggtctcccaacggaaggaccaatcacattaccattcgattcggcctttttagagtatctcgtcaaactgatccaaagacgaatggatgaagatacagaaaaggctttgttattgtcaatctcaagtgctagatgctcttttcaaccacaagaacaacaatgtagtactacgcaacagttgcttgtattttagagtttagcaaatttctgtaaagtttatagtggattagatagacagatcatttcagaaat

SEQ ID NO: 9244 - protein, 142 aa, Arabidopsis thaliana
MMINAKKLMKMAKKWQQRAALHRKRISFQRSSVFTSSSSTVEKGCFVVYTADKIRFAFPISYLSNSVVQELLKISEEDFGLPTEGPITLPFDSAFLEYLVKLIQRRMDEDTEKALLLSISSARCSFQPQEQQCSTTQQLLVF

SEQ ID NO: 9245 - protein, 141 aa, Arabidopsis thaliana
MINAKKLMKMAKKWQQRAALHRKRISFQRSSVFTSSSSTVEKGCFVVYTADKIRFAFPISYLSNSVVQELLKISEEDFGLPTEGPITLPFDSAFLEYLVKLIQRRMDEDTEKALLLSISSARCSFQPQEQQCSTTQQLLVF

SEQ ID NO: 9246 - protein, 134 aa, Arabidopsis thaliana
MKMAKKWQQRAALHRKRISFQRSSVFTSSSSTVEKGCFVVYTADKIRFAFPISYLSNSVVQELLKISEEDFGLPTEGPITLPFDSAFLEYLVKLIQRRMDEDTEKALLLSISSARCSFQPQEQQCSTTQQLLVF

SEQ ID NO: 9247 - DNA, 1122 bp, Arabidopsis thaliana
accaatccttcacttcctttcacgatccaaaacaaaacacaagaaaatgcaacaaaatcttctccatctctgaactcaaaaactcattcactgagaaaaatggagacccttctctcccctcgtgcgctctctcctcctctcaatcccaaacctttgtcccttcaccagaccaaacccacttcacattcattgtctctctcaaaacccaccaccttctccggtcctaaacacctctccacccggttcactaaaccggaatcaagaaactggttaatagatgcaaagcaaggactagctgctttagctttatctctaactctcactttctcacctgttggcactgctttagcctctgagttcaatatcctcaacgatggtccacctaaagaaacttacgtagtcgatgacgctggtgttcttagtcgagtgacgaagtcagatcttaagaagcttttgtctgatcttgaatacagaaagaaactgagactcaatttcatcactgtccgaaagctcaccagtaaagcagatgcgtttgagtatgcagaccaggttttggaaaaatggtatccttctattgaagaaggtaacaataagggtattgttgttttgataacaagtcagaaggaaggagctattactggtggtcctgcttttattgaagctgttggtgaaaacattcttgatgctaccgtctccgaaaatcttcccgtactagcaacggacgaaaaatacaacgaggcggtatatagcagtgcgaaaaggttggttgcagctatagacggtcaaccagatcccgggggtccaaccgtaaaggatagcaagagagaatcaaatttcaagacgaaagaagaaaccgatgagaagcgaggacagttcagtcttgtcgttggaggattacttgtaattgcctttgtagttcccatggcacaatactttgcttatgtctccaggaagtaagtaagtaaactcggttcactctcgtaaaccaaaccgatcaggtcagaactttgatttacctcggttatttggttatggtttcttggtaaattggtttatttgaacaatataagtaaataataacagaaaactaaagaatgaatgaaaccatccgattgtaacggc

SEQ ID NO: 9248 - protein, 318 aa, Arabidopsis thaliana; identical to SEQ ID NO: 7743

SEQ ID NO: 9249 - protein, 285 aa, Arabidopsis thaliana; identical to SEQ ID NO: 7744

SEQ ID NO: 9250 - DNA, 1784 bp, Arabidopsis thaliana
acttcttcttcatcatctttaatcgttgggaaaagtttgatgatacggagtggacaattcttggtgtagaaggagaatctgagagagagagagtcatggaagctctgaaaaccgcaacttttagccctatgtcggtgttatccgagaaaagatcagaaccacgaaagcctttctcgctccctaacctctttccaccaaaatcacagagaccaatctcccaagaaagcttcttgaagagattcaatggtggattggctcttctaacttctgttctaagcagtgcaacagctcctgctaaatccctgacgtacgaggaagctctgcaacaatctatgaccacttcttcatcttttgattcggatggtctgattgaagggatatccaattttgtcacagacaatcctttggttattgccggtggagttgctgcattggctgttccatttgttctgtctcaggttctgaacaagaagcccaaatcatggggagttgagtctgctaagaatgcttataccaagttgggtactgatgataatgctcagttgcttgacataagagctactgctgatttcagacaagtgggcagtcctaatattaagggtttgggtaaaaaagcggtttctactgtttataacggtgaagacaagcctggtttcctgaagaagctttctttgaagtttaaagatcctgagaacaccacattatacattctggacaagtttgatggaaactctgagcttgttgctgaattggtggctcttaatggattcaaatctgcttatgcgattaaagatggtgcagagggacctagaggctggttgaatagcagcttgccttggatagagccaaagaagactctcagccttgatttaagcagtttgacggatagcatcagcggtgtatttggtgagagttctgatggtgtatctgtcgctcttggagtagctgctgctgctggattaagtgtttttgcatttacagagattgaaaccatactccaactactaggttcagctgcacttgttcaacttgcaggcaagaaacttctatttgctgaggaccgaaagcaaactctaaaacaggtggatgagttcttgaacacaaaggttgcccctaaagaacttgttgatgagttaaaggaaataggaaaggctcttcttcctcaatcaacaagcaacaaagctctcccagcaccagcaacagtaacagcagaagcagaatcagctacagctacaaccaccacagtcgataaaccagtacctgagccagaaacagttgcagctacaacaaccactgtagataaaccagtacctgagccagagccagtgccagagccagtgccagtgccagcgattgaagctgcagtcgctgcacaagtaatcacagaaccaaccgaaacagaagccaaaccaaaacctcattcaagacctctctctccatatgcatcgtaccctgacttgaagcctccatcttctccgatgccatcgcagccctgaaaacagctaagaacagtctctctctcgttacttagtctggttttgtcctcctgcaaacagaagaacaaaagtggtcgaatattgtaacttgttcttttttctctcgttttttctcccgaacttagatgctactttgtgtcgaatctgagataagtggactttgttttgtttttctccctttataccaccattgagttcaaacaagagtctgtcatcgcgttaaaggggatcagaagctgtgtgaggggtgtattggacgaaataaaagttgtggggaaatttccaaat

SEQ ID NO: 9251 - protein, 497 aa, Arabidopsis thaliana
FFFIIFNRWEKFDDTEWTILGVEGESERERVMEALKTATFSPMSVLSEKRSEPRKPFSLPNLFPPKSQRPISQESFLKRFNGGLALLTSVLSSATAPAKSLTYEEALQQSMTTSSSFDSDGLIEGISNFVTDNPLVIAGGVAALAVPFVLSQVLNKKPKSWGVESAKNAYTKLGTDDNAQLLDIRATADFRQVGSPNIKGLGKKAVSTVYNGEDKPGFLKKLSLKFKDPENTTLYILDKFDGNSELVAELVALNGFKSAYAIKDGAEGPRGWLNSSLPWIEPKKTLSLDLSSLTDSISGVFGESSDGVSVALGVAAAAGLSVFAFTEIETILQLLGSAALVQLAGKKLLFAEDRKQTLKQVDEFLNTKVAPKELVDELKEIGKALLPQSTSNKALPAPATVTAEAESATATTTTVDKPVPEPETVAATTTTVDKPVPEPEPVPEPVPVPAIEAAVAAQVITEPTETEAKPKPHSRPLSPYASYPDLKPPSSPMPSQP

SEQ ID NO: 9252 - protein, 466 aa, Arabidopsis thaliana
MEALKTATFSPMSVLSEKRSEPRKPFSLPNLFPPKSQRPISQESFLKRFNGGLALLTSVLSSATAPAKSLTYEEALQQSMTTSSSFDSDGLIEGISNFVTDNPLVIAGGVAALAVPFVLSQVLNKKPKSWGVESAKNAYTKLGTDDNAQLLDIRATADFRQVGSPNIKGLGKKAVSTVYNGEDKPGFLKKLSLKFKDPENTTLYILDKFDGNSELVAELVALNGFKSAYAIKDGAEGPRGWLNSSLPWIEPKKTLSLDLSSLTDSISGVFGESSDGVSVALGVAAAAGLSVFAFTEIETILQLLGSAALVQLAGKKLLFAEDRKQTLKQVDEFLNTKVAPKELVDELKEIGKALLPQSTSNKALPAPATVTAEAESATATTTTVDKPVPEPETVAATTTTVDKPVPEPEPVPEPVPVPAIEAAVAAQVITEPTETEAKPKPHSRPLSPYASYPDLKPPSSPMPSQP

SEQ ID NO: 9253 - protein, 455 aa, Arabidopsis thaliana
MSVLSEKRSEPRKPFSLPNLFPPKSQRPISQESFLKRFNGGLALLTSVLSSATAPAKSLTYEEALQQSMTTSSSFDSDGLIEGISNFVTDNPLVIAGGVAALAVPFVLSQVLNKKPKSWGVESAKNAYTKLGTDDNAQLLDIRATADFRQVGSPNIKGLGKKAVSTVYNGEDKPGFLKKLSLKFKDPENTTLYILDKFDGNSELVAELVALNGFKSAYAIKDGAEGPRGWLNSSLPWIEPKKTLSLDLSSLTDSISGVFGESSDGVSVALGVAAAAGLSVFAFTEIETILQLLGSAALVQLAGKKLLFAEDRKQTLKQVDEFLNTKVAPKELVDELKEIGKALLPQSTSNKALPAPATVTAEAESATATTTTVDKPVPEPETVAATTTTVDKPVPEPEPVPEPVPVPAIEAAVAAQVITEPTETEAKPKPHSRPLSPYASYPDLKPPSSPMPSQP

SEQ ID NO: 9254 - DNA, 1591 bp, Arabidopsis thaliana
atcgccgagtctgcttcttcttctctctctctctctctagtggtcacactcacttcacacccgtgaaaaaaccctaggaaccaaatatggtgaacctctcgagatccgtcgcgttgatctctgtattcctccttcctttacttagcttctctttctccgtcgataatccgacggatcggcgtgttcttgttcttctcgatgatttatcactcaaatcctctcattctatcttcttcaacactctcaagtctcgtggattcgatctcgatttcaagttagctgaagattcgaagcttgcgcttcaacgatacggccagtacttgtacgatgggttgatcatcttcgccccatcaacagaacggtttggaggatccttggattcgaaatccattgctgattttgttgattccggtcgtgacttgatcttatcggcggatactgctgcatctgatttgattaggggtattgccacagagtgtggggttgatttcgatgaggattcttcagctatggttattgatcatactagcttctccgtctctgatgttgacggcgaccacaccttgattgctgccgacgatttagtgaaatccgatgtcattttgggaaaaaccaagattgaggctcccgtgctcttcagaggagttgcacattcgttgaaccctactaacaatctggttttgaaagttctttcagcctctccatcagcttattctgctaacccaagctcgaagttgtctagtcccccccagctcactgggtcttcaatttcgctagtctcggtcatgcaggccaggaacaatgctagggttgtgatctcaggctcagtgcagttgtttagcgataggttaatcagatctggtgtccagaaagcagggagtccgaaccaatacgaaaaatctggcaacgaacagtttgtgactgaactaagcaaatgggtcttccacgaaaggggccatctgaaggctggtaatcttgtacaccatagggttggagaaacagatgagccagctatatataggataaaggatgacctggaattttctgtagagatatatgagtggtcaggaaagagctgggagccgtatgttgctaacgatgtgcaggttcagttttacatgatgagcccgtatgtgttgaaaaccctgtcaacagacaagaagggtctgtttcatacatctttcaaggttcctgatgtctacggtgtattccagtttaaggttgaatatgaaaagctaggctacactacattatctctttcgaagcagattccggtgcggccttacagacacaatgagtatgagagatttatcccaactgcgtatccttattatggagcctgctttacgacgatggctggtttcttcgtcttcagcttcgtctacctctaccataagtagaatcccttaaatggtggccaagtcccataaagtaagccaaacctccatatttagatgagaaaaaacaactttcgaactagagaccaatatttttgggcagcaaggttttcatatgtttctagttttagccaaacagttgcaaccttctttttgtttcccagatatttctatgttaacgtaactttacaccc

SEQ ID NO: 9255 - protein, 437 aa, Arabidopsis thaliana; identical to SEQ ID NO: 1147

SEQ ID NO: 9256 - protein, 296 aa, Arabidopsis thaliana; identical to SEQ ID NO: 1148

SEQ ID NO: 9257 - DNA, 1828 bp, Arabidopsis thaliana
aggccattctcttttctcctctctctctctctcacacaacacaaacaactcttgagagagagaaacaaatctttcacttgacacttctctccaaatcctcatctcattcttcatcctaaacatttgctcattctcacgatgagccataaccaaaaccaacctcaccggccagtcccggtccatgtcacaaacgccgagccaaaccctaacccaaacaacctcccaaactttctattatccgtccgtctcaaatacgtaaaactcggttaccactacctaatctccaacgctctctacatcctcctccttcctctcctcgccgcaacaatcgctaacctctcttctttcaccatcaacgacctctctctcctctacaacacactccgtttccatttcctctccgccacactcgccaccgcactcttaatctctctctccaccgcttacttcaccacccgtccccgccgtgtcttcctcctcgacttctcgtgttacaaaccagacccttcactgatctgcactcgtgaaacattcatggacagatctcaacgtgtaggcatcttcacagaagacaacttagctttccaacaaaagatcctcgaaagatccggtctaggtcagaaaacttacttccctgaagctcttcttcgtgttcctcctaatccttgtatggaagaagcgagaaaagaggcagaaacagttatgttcggagctattgacgcggttcttgagaagaccggtgtgaaacctaaagatattggaatccttgtggtgaattgtagcttgtttaatccaacaccgtcactttctgctatgattgtgaataagtataagcttagaggcaacattttgagctataatcttggtggaatgggatgtagtgctggccttatctccattgatctcgctaaacagatgcttcaggtgcaaccaaactcatacgcactagtggtgagcacagagaacataaccctaaactggtacttaggcaacgaccgatcaatgcttctatctaactgtatcttccgtatgggcggagccgcggtacttctctcgaaccgctcctctgatcgcagccgttcaaaatatcagctcatccataccgtccgtacccacaaaggagctgatgacaacgcatttggctgtgtttaccaacgagaagacaacaacgcagaagaaaccggcaaaatcggagtgtccctctctaaaaacctaatggcgatagctggagaagctctcaagacaaacatcacaactctcggaccactagttctaccaatgtccgaacaacttctctttttcgcgactcttgtggcccgaaaagtcttcaaagtcaagaaaataaagccttacattcctgatttcaagctagctttcgagcatttctgtatccacgcgggaggtagagccgtgctcgacgagattgagaagaacttggatttatccgaatggcacatggagccatcgaggatgacgttgaaccggtttggtaacacttcgagtagctcactttggtatgagcttgcgtatagtgaagctaaaggaaggattaagagaggagataggacttggcagattgcttttggatcgggttttaagtgtaatagtgcagtttggaaagctttgagaacgattgatccaatggacgagaagactaatccatggattgatgagattgatgactttcctgttcaagttcctaggatcactcccattacatcgtcgtagtgttttaaattcttttggagaactaatttgttatgttttattaaatgtaataacttacgtgatttgatatttttttattatcttaatatatatgattgcc

SEQ ID NO: 9258 - protein, 529 aa, Arabidopsis thaliana [sequence omitted]

SEQ ID NO: 9259 - protein, 397 aa, Arabidopsis thaliana; identical to SEQ ID NO: 2384

SEQ ID NO: 9260 - protein, 352 aa, Arabidopsis thaliana; identical to SEQ ID NO: 2385

SEQ ID NO: 9261 - DNA, 1752 bp, Arabidopsis thaliana
gaatctcacacaccgaaagttattttcgaatccactaacgaatcttccacagcaaacacttttgtgttcctctgtaatttctcagtatatatagataccaaaacaagcagtgaaaaatggctatggcgagtttatatcggcgatctcttccttctcctccggccattgacttttcttccgccgaaggcaagctaatcttcaatgaagcgcttcagaaaggaactatggaaggatttttcaggttgatttcgtattttcagacacaatccgaacctgcgtattgtggtttggctagtctctcagtggtgttgaatgctctttctatcgatcctggacgtaaatggaaagggccttggaggtggtttgatgaatcaatgttggattgctgcgaacctctggaagtagtgaaggaaaaaggcatttcatttggaaaagttgtctgtttggctcattgttcaggagcaaaagttgaggctttccgtacaagtcagagcaccattgatgatttccgcaaatttgtcgtcaaatgcacgagttctgagaattgtcatatgatctcaacatatcaccgaggtgtatttaagcagactgggactggtcacttttcacctattggtggctataatgctgagagagatatggctttgattcttgatgttgctcgtttcaagtatccccctcactgggttcctcttaaacttctttgggaagccatggacagtattgatcagtcaacagggaaacgtagagggttcatgctcatatctagaccacacagagaacccggattgctctatactctgagctgcaaggatgaaagctggatcgaaatagccaagtatttgaaggaagatgttcctcgtcttgtaagttcacagcatgtagattctgtggagaaaatcatatcagttgtgttcaagtcacttccatcaaatttcaaccaattcatcagatgggtggctgagatccgaattacagaggactcaaaccaaaatctcagcgcagaggagaagtctaggctgaaactaaagcaattggtgctgaaggaagtgcacgaaactgaactgttcaaacacatcaataagttcttatccacagtgggttatgaagacagtctgacttatgctgctgcaaaggcttgttgccaaggagctgaaatcttatccggaagcccatcaaaagagttttgttgtcgggaaacttgcgtgaaatgcatcaaaggtcctgatgactctgaaggcacggtggtgactggagttgtggtgcgtgatgggaatgaacaaaaggttgatctgttagtgccatcgacgcaaactgagtgtgaatgtggtcctgaagcaacttatccagcaggaaacgatgtgttcactgcacttctattggctttacctccacagacatggtcagggatcaaagaccaagctcttatgcatgaaatgaagcagctcatttccatggcttccctcccaactttgcttcaagaagaggtattgcatcttcgacggcaacttcagctgctaaaacgatgccaagagaacaaggaagaggatgatctcgctgctcctgcctattagttcattgtcccaaatcctctctcttccccatttgaatcccacgttctcaacacttaattgttagaaagtctctttattctctgtacgattcaaactctatttgcaatgagagatatatgtaacttgcattctataaattgttaatcacaataagttaagaatcctagaatcatatttc

SEQ ID NO: 9262 - protein, 485 aa, Arabidopsis thaliana; identical to SEQ ID NO: 8400

SEQ ID NO: 9263 - protein, 483 aa, Arabidopsis thaliana; identical to SEQ ID NO: 8401

SEQ ID NO: 9264 - protein, 449 aa, Arabidopsis thaliana; identical to SEQ ID NO: 8402

SEQ ID NO: 9265 - DNA, 1072 bp, Arabidopsis thaliana
acaacggccactgaacactatcgatctaatcttttcagctctctccatcgtcgtcgtatctgtgactctcgtgatcatcgcctgaaaaaaatttgagataatggccagaaagttcttcgtcggaggcaactggaaatgtaacggaactgctgaggaggtgaagaagattgtgaacactcttaatgaagctcaggttccttcacaggatgttgtagaggttgtggttagccctccatatgtttttcttcccctggttaagagcacattgaggtctgacttttttgttgcggcacaaaactgttgggttaagaaaggaggtgctttcactggtgaagtgagtgcggagatgcttgtgaacttggatattccatgggttatccttggtcactctgaaaggagggcaatccttaatgaatcaagcgagttcgtcggagacaaggttgcctatgcacttgctcaaggtttgaaagtgattgcttgtgttggtgagactcttgaggagcgggaagctggatcgaccatggatgttgtggctgcccagaccaaggctattgccgatcgggtgacaaactggtcaaatgttgtcatagcctatgaaccagtgtgggccattggaaccggaaaggtcgctagcccagcccaagctcaagaagtacacgatgagctgaggaaatggctggccaagaacgtgagtgctgatgtcgctgctacaacccgcatcatttatggaggatccgtcaatggtggtaactgcaaggagctaggtggacaggccgatgttgatggtttcttggtcggtggtgcttctctaaagcctgagtttatcgacatcattaaggccgcagaggtgaagaaaagtgcctaatgagctcattaagcaatttaaaagtcctttgcttttccagtcgcaactctgaaaaaatgaataagttggtattatgatatgatacattttgcttcagttgtatttggcaaaagtttctctcttactatattgttttgagaacgcaacaatcattttcttcgccatttatttagctgtggacttgcaatttgcaaatcccttcctttt

SEQ ID NO: 9266 - protein, 254 aa, Arabidopsis thaliana
MARKFFVGGNWKCNGTAEEVKKIVNTLNEAQVPSQDVVEVVVSPPYVFLPLVKSTLRSDFFVAAQNCWVKKGGAFTGEVSAEMLVNLDIPWVILGHSERRAILNESSEFVGDKVAYALAQGLKVIACVGETLEEREAGSTMDVVAAQTKAIADRVTNWSNVVIAYEPVWAIGTGKVASPAQAQEVHDELRKWLAKNVSADVAATTRIIYGGSVNGGNCKELGGQADVDGFLVGGASLKPEFIDIIKAAEVKKSA

SEQ ID NO: 9267 - protein, 172 aa, Arabidopsis thaliana
MLVNLDIPWVILGHSERRAILNESSEFVGDKVAYALAQGLKVIACVGETLEEREAGSTMDVVAAQTKAIADRVTNWSNVVIAYEPVWAIGTGKVASPAQAQEVHDELRKWLAKNVSADVAATTRIIYGGSVNGGNCKELGGQADVDGFLVGGASLKPEFIDIIKAAEVKKSA

SEQ ID NO: 9268 - DNA, 838 bp, Arabidopsis thaliana
acacaactgcaaaaccctaatctcaagttttctgtcgattttgatcttttggttgtaattttgtttgtgaaagtttcggacttttggaatttgaggtagaagagatgaacagaggaagaaggaatctgaaacaagcggcgtcggaccaggatttcacgcttgaggaatgtcagagcattgcccaagtcgtctctctcagaggttccaatcaaattgagataatggatgcaaaaggagagaactcattagctttgtttccagccaagtttcgtgagagcatgtggatcagacgaggaagctttgtagtgattgaccatacaggaaaggaaaaggctcaagagtctggtagcaaagttacatctattgtatgtaaagttctattctttgagcaagtccgtcttcttcaaaagtctccggaatggccagaaatcttcaaagatactagaccgattccagctgagaaaagctcacccattgaacagcatgaagatgacggtgaagttgattcgagtgatgatgatgatggtatgcctccattgcaagcaaacacaaacagattgagaccgtttggggtgaagtgtgatgcagaaactgattcagggtcagattccgattcatagaaacatccggtacatttcttttcgcagcctcaacttaatttctcaatataggggatttatagttgcaagctgtattttataaacagtatgtaaccaacacagatctgctgataaagcagagttttgctttgcactaaatcgataattgatttatataacatgcttctcattctcttcttgcaattcttgataagtcttaataaggagtcagaaaagtt

SEQ ID NO: 9269 - protein, 171 aa, Arabidopsis thaliana
MNRGRRNLKQAASDQDFTLEECQSIAQVVSLRGSNQIEIMDAKGENSLALFPAKFRESMWIRRGSFVVIDHTGKEKAQESGSKVTSIVCKVLFFEQVRLLQKSPEWPEIFKDTRPIPAEKSSPIEQHEDDGEVDSSDDDDGMPPLQANTNRLRPFGVKCDAETDSGSDSDS

SEQ ID NO: 9270 - protein, 132 aa, Arabidopsis thaliana
MDAKGENSLALFPAKFRESMWIRRGSFVVIDHTGKEKAQESGSKVTSIVCKVLFFEQVRLLQKSPEWPEIFKDTRPIPAEKSSPIEQHEDDGEVDSSDDDDGMPPLQANTNRLRPFGVKCDAETDSGSDSDS

SEQ ID NO: 9271 - protein, 113 aa, Arabidopsis thaliana
MWIRRGSFVVIDHTGKEKAQESGSKVTSIVCKVLFFEQVRLLQKSPEWPEIFKDTRPIPAEKSSPIEQHEDDGEVDSSDDDDGMPPLQANTNRLRPFGVKCDAETDSGSDSDS

SEQ ID NO: 9272 - DNA, 10570 bp, Arabidopsis thaliana
atgacgtcttcttcgcataatattgagttggaagcagctaagtttctgcataaacttattcaagattctaaagatgaacctgcaaagctagcaactaaactttatgtgatattgcagcacatgaaaaccagtggaaaggaaaacacaatgccctatcaagtcatatctagggccatggacactgtagtcaatcaacacggtcttgacattgaagctttgaagtcctcgtgtcttcctcatcctggtggtacccaaacggaagattctgggtctgcacatttggctgggtcttcccaagcggttggagttagcaatgagggtaaagcaactctagttgaaaatgagatgacaaaatacgatgcattcacttctggtaggcagcttggtggatcaaacagtgcgtcacaaaccttttaccaagggtctggaactcaaagtaacagatcatttgatcgtgagagtccatccaacttggattctacgtctggaatttctcaacctcacaatcgtagtgagacaatgaatcaaagagatgtcaagtcgagtggaaagagaaagagaggtgaatcatcactttcatgggaccagaatatggataactctcaaatatttgatagccacaagattgatgatcaaactggagaagtaagcaaaatagaaatgcccggtaattcaggtgacattaggaatttgcatgttgggttgtcctcagatgcattcacgactccacagtgtggctggcagagcagtgaagccacagcaatcaggcctgcaattcataaagaacctggaaataatgttgcaggagagggattcctgccttcaggttcaccttttagagagcaacaactgaagcagctcagagcccagtgccttgtgtttctagctcttagaaatggtttggtaccgaagaaacttcacgtagagattgcccttcgaaatactttccgcgaagaagatggtttccgcggagaattgtttgatccgaaagggagaacacatacgtccagtgatctgggtggcattcctgacgtctctgcactgttgtcaagaacagacaatcccactggaagattggatgaaatggacttctcatccaaagaaactgagagatcaagactaggggaaaaaagtttcgcaaatactgtattttctgacgggcaaaagcttctagcatctagaattcccagctctcaagcacaaactcaggttgctgttagtcattctcaactaacgttttctcctggtttgaccaaaaacacaccatcagagatggtggggtggactggagtaatcaaaactaatgacctctcaacttctgctgttcaactcgacgaatttcattcttctgatgaagaggaaggtaatttgcaaccgtcgcctaagtacaccatgtcacagaaatggattatgggtcgacagaataagagactattggttgatcgtagttggtcccttaaacagcagaaagccgaccaggcaattggttcacggttcaatgagttgaaggaatctgtgagtttgtctgatgatatatctgcaaagaccaagagtgtaatagaactgaaaaagcttcagctgttaaatctacaacggcgattgaggagtgagttcgtttacaacttcttcaaacctattgcaactgatgttgagcatctaaagtcatataagaaacataagcatggccggagaattaagcagcttgaaaagtatgagcagaagatgaaggaagagagacaacgaagaattcgggagagacagaaggagttctttggagggttagaagttcacaaggaaaaactagaggatttgtttaaagttaggagagaaaggttgaagggtttcaatagatatgcaaaggagttccacaaaagaaaggaacgacttcaccgtgagaagattgacaaaattcaacgtgagaagattaatttgttaaagataaatgatgtggagggttatctccgaatggtgcaggatgccaagtcagatcgagtaaagcaactactcaaagagactgaaaagtaccttcagaaacttggatccaagttaaaagaggctaaattgttgaccagtcgatttgagaatgaggcagatgaaacgcgtacgtcaaatgctaccgacgatgaaactttgattgaaaatgaagatgagagcgaccaagcaaagcattacctggaaagcaacgaaaaatactacttgatggctcacagtataaaagaaaatattaacgagcagccatcgtccctagtgggtggaaagttaagagagtaccaaatgaacggcttaaggtggctagtttcactgtacaacaatcacttaaatggcattttagctgatgagatgggtctcgggaaaactgttcaggttatttctttgatttgctatctgatggagacaaaaaatgatagaggtcccttcttggttgttgtcccatcttcggttctgcctggttggcagtcagaaattaacttctgggccccatcaattcataaaattgtttactgtgggactcctgacgaaaggcgcaaactattcaaggagcaaattgttcatcagaagttcaatgtccttctgacgacatatgagtatctaatgaacaagcatgataggcctaaattaagcaagattcactggcactatattattattgacgaaggacatcgcataaagaatgcatcctgcaagttaaatgcagacctgaaacattatgttagctcccaccgacttctgttaactgggaccccattgcagaacaacctagaagaattgtgggcactgcttaatttcctgctgcctaatatattcaactcgtcagaagacttttcacagtggttcaacaaaccattccaaagtaatggagaaagttctgccgaggaggcattgctatcagaagaggagaatctactgatcatcaatcgacttcaccaagttcttcgaccatttgttctgcgtcggctgaaacataaggttgaaaatgagcttcccgaaaagatagagagattgatacgctgtgaggcttctgcttatcagaagctgttgatgaagagggttgaggataatttgggttcgattggaaatgcgaagtctcgtgcagtgcacaactcagtaatggagcttcggaatatttgcaatcatccatatcttagccaactgcattcagaggaggtcaataacataattcctaagcatttcctgcctccaattgtaagactgtgtggaaagcttgagatgttggatcggatgttgcctaaactcaaagcaacagaccatcgggttcttttcttttccacaatgacaaggcttcttgatgtaatggaggattacctcaccttaaaggggtacaaataccttaggctggacgggcagacatctgggggtgatcgtggtgctcttattgatggtttcaacaagtcgggttccccatttttcatatttctgttgagcattcgggctggtggagtaggagttaatcttcaagctgctgatactgtgatactattcgacactgactggaatcctcaggttgatctgcaagctcaagctagggctcacaggattggccagaaaaaagatgtgcttgttcttcgttttgaaacggtgaattctgttgaggagcaagtcagagcttcagctgagcacaaacttggagttgctaaccagagtataaccgctggcttttttgacaataacacgagtgctgaagatcgtaaggaatatttggaatcccttttgcgtgaatcaaagaaagaggaggatgctccagtattggacgatgatgccttaaatgatcttatagctcgaagggagtcagagattgatatctttgagtccatcgacaaacaaaggaaagaaaatgagatggaaacatggaataccttggtacatgggccagggtcagatagttttgcccacataccatctataccctctcggcttgttactgaagatgatttaaaactactatatgaaacaatgaaactaaatgatgtccccatggttgcaaaagaatcaactgttggcatgaagcggaaggatggttcgatgggaggcctagatactcaccaatatggaagagggaaacgagcaagagaggttcgatcttatgaagagaaattaactgaggaggagtttgagaagctgtgtcagactgagtcacctgattcaccccaaggcaagggcgaaggaagtgaaaggagcttggcgaatgatacatcaaatattccggttgaaaattctagtgacacactactccctacatctccgacacaggcaattactgtacaaccaatggaacctgtaaggccacagtcacatacactgaaagaagaaacacaacctataaaacgtggtcgtggtaggccaaagagaactgataaagccttgactccggtatcattatcagctgtaagcaggacacaggcgacagggaatgctatatcatcggcagcaactggtcttgattttgttagttcagataaaaggctagaagccgcttctcatcctacttcgtctcttgccctgacttcgcctgatttatctggtcctcctggttttcaatcattgccagcatctcctgctcctacgccaataagaggccgaggtaggggaagaagcagggggcgtggagcaggaaggggaagaagagttgaaggtgtattgcatggttccaacagttctattactcagagaactgaaaccgctacatctcttgcaagtgatgcagaagccacaaaatttgctcttcctcgttctgcatctgagattgtttcaagagtccctaaagctaatgaaggaagtacttcgaatcctgaccaagtatctcccgtgcattctgccactactgcactccgatcagacaaagcagcagataaggacctagatgcaccacctggttttgattcgggatcccatgttcagacgctaaatgtacttgaaaattcatcggaaagaaaagcatttgctgtaaagaagaggcctttgatccaaggtgtgagctcccagcatccagggcctaataaacagccacttgacttgccagtctccactagctccactttgttgggtggtggcccagtgcaaaatcagaatgccgtctcttctgtttgtgatggatccaaaagtccttctgagggtcgaacatatacagctttgcaaggtgtgacaactgcaccttctgatgctactctgccaatgagttctcaaccttctgatgctactctgccaatgagttctcaacctgtcggttctacggttgaagctcaagaagccaatgttccttctcttccagcagccttgcctgctaagaggcgagtccgcaatttgccaagcagaggagaaactcctaaacgccaaggaaagaggcgtggccaacctttacctgcaaccgatgcctcttctgcaaggagtacaggattaacaccacaaatagaggtcaaggttggtaatttatcaggcaccaaagctaagtttgatgctgttgccaaagaacaaccccacttcagccagtcagttgcacccgatattcactcttctggtagtttgagtcaggaaattagaagagacacctctggtactggtggttctgctaggaaacaaactgctgatgtaactgatgttgctcgagtcatgaaagagatcttttcagagacttccctattaaaacataaagttggagagccttctgcaacaacgagaacaaatgtgcctgacgcacaatcccctggtgagatgaatttgcacacagttgagacccacaaggcagaggattcttctggtcttaagaatcaagaagctttatataacctgagcaaggcagataaactggtatcagatattcctcatcctgttcctggtgatctgacaacttcaggatcagttgcaaacaaagatgttgacattgggtcgtctaaggttgctgctgaaaatgagcttgtcaaaattccgggtggtgacgtagattcttctgtaatacaactctctttgggaaatactttgactgctaaatcgtctttggaaaagtgcactgcagatcagcttctgggagaaaaactgtctcaagaaggtgaaaccacacctgctagtgatggtgaaacatgtcacctggcagaagaaacggcatcttcattgagttatgttcgatctgagcctactgcatctgcgtcgacaactgcggaacctctacctactgacaagttggaaaaaaatatttcttttcaagatgaagttaaaactctcaatggtgataaaagagaagctatcctcctaagttcggaagagcaaacgaatgttaactccaagattgagacaaattctgaggaacttcaagccagtagaacagatgaagttccacatgtggatggaaaatctgttgatgttgcaaatcagacggtgaaagaagatgaggcaaaacattctgttgaaattcaatcgtctatgctggagcctgatgaactgccaaatgctggacaaaagggtcacagtagcattgacttgcagccattggttttagttacaagcaatgagaatgctatgtcccttgacgataaagattatgatcctatctctaaatctgctgatatagaacaagatcctgaagaatctgtttttgttcaaggtgttggtaggcctaaagttggtactgctgatacacagatggaggataccaatgatgccaaacttctagtgggttgttcagttgagagtgaggaaaaagagaaaactcttcaatccctcatacccggtgatgatgctgatacagaacaagatcctgaagaatctgtttcggatcaaaggcctaaagttggttctgcttacacacagatggaggatacggatgaggcgaaacttctaatgggttgttcagttgagagtgaggaaaaagagaaaactcttcaatcccatatacccggtgatgatgctgatacagaaaaaaatcctgaagaatctgtttccgttcaaggtgttgataggccgaaagttggtactactgacacacagatggaggataccaatgatgccaaacttctagtgggttgttcagttgcgagtgaggagaaagagaaaactcttcaatcccatatacccggtgatgatgctgatacagaacaaaatcctgaagaatctgtttcagttcaaggtgttaataggcctaaagttggtaatgctaacacacagatggaggatacggatgaggccaaagttctagtgggttgttcagttgagagtgaggagaaagagaaaactcttcaatcccacatacctggtgatgatgctgatacagaacaaaatcctgaagaatctgtttcgaattttgataggcctaaagatgggactgctgacacacatatggaggatatcgatgatgccaaacttctagtgggttgttcagttgagagtgaggagaaagagaaaagtcttcaatcccatatgcccagtgatgatgctgttctccatgcgccttttgagaacacaaaagacagtaaaggagatgatttacatggagagtctcttgtttcctgtccaacaatggaagtgatggaacagaaggggtttgaatcagagacacatgctcgtacagattcaggtggtattgataggggaaatgaggtatcagaaaatatgtctgatggcgtcaaaatgaatatttcatctgtgcaggtcccggatgcatcacatgatttaaatgtatcacaggatcaaacagacattcccctagttggtgggatagaccctgaacacgtacaagagaatgtggatgtacctgcatcacctcacggagcagcgccaaacattgtgattttccagtctgagggacatctgtctccaagtatcttaccggacgatgtggcaggacaactagaaagcatgtctaatgacgaaaaaacgaatatttcatctgagcaggtcccagatgtatcacatgatttgaaagtgtctcaggatcaaactgacattcccccagttggtgggatagtgcctgaaaatttgcaagagattgtggatgtacctgcatcacctcatggagtagtgccagacgttgttgtttcccagtctgaggaaattcaatctccaagtattttgcccgacgatgtaccaggacaaccagacgatggcaactgtgagaaaatggataccatgcagaacaatacctctattgatattggcataacttcaggtaagacatgtcagccttcatcttctacccagcctgaggatgagaacagaaatagcttatcacactgtgaaccgtcagaagtagttgaacaaagggattcaagagatcaagtttgcatagggtctgtggaatctcaagtagagatcagctctgctatactggaaaatagatcagctgatatccagcccccgcaatccattttggttgatcaaaaggatattgaagaatccaaagaacctggtatcgagagtgctgatgtgtctttacaccaattagctgatatccaggccgagccatccaatttggttgatcaaatggatattgaagaatccaaagaacctggtaccgagagtgctgatgtgtctttacaccaattagctgatatccagcccgggccatccattttggttgatcaaatggatactgaaaaatccaaagaacctggtaccgagagtgctgatgtgtctttacaccaattagctgatatccagcccgggccatccattttggttgatcaaatggatactgaaaaatccaaagaacctgctgtgcaaaagaatattgaggataaggatcaaagtcacgttgaaactgctggatctgagttagttgatgtctctgccgaatgttcaacagaacctcaagttcaattaccgccatcttcagagccagtgggagatatgcacgttcatttaggggcaagcaaatcagaaatagttgccgaaggtactgacttctcttcatctctcccgaagacggaggaagaaaatgccaagagccaattagctgacaccgagccatcatcgtctcttacagctgtgcaaaagaacattgaagatcaagttgaaactgctggatgtgaatttgttgttgtctctaccggatgttcaacagaaccacaagttcaattaccgccgtccgcagagccagtggttgctgaaggtacagaattcccttcttccctcctaatgaccggggtagataattcttcccatctaatgaccggggtagataatgccaagacccatctcgctgatgttgtgccttcatcgtcacctacaactatggaaaagaacattgaagctcaagatcaagatcaagttacaactggtggatgtggtctagttgatgtcttgaccgaatgttcgtcagaacctcaacttcaactgccgccatccgcagaaccagtgatttctgaaggtacagaactcgctacactcccattgacggaggaagaaaatgctgatagccaattagctaatattgagccctcatcgtctccttcagttgtggaaaagaacattgaggctcaagatcaagatcaagttaaaactgctggatgtgagttagtctcgactggatgttcgtcagaaccacaagttcatttaccgccctccgcagagccagatggagatatacacgttcacttaaaggaaacagagaaatctgaaagcatggttgtggttggcgaaggtacagcattcccttcatctctcccagtgacagaggaaggaaatgctgagagccaattagctgacactgagccctttacgtctcctacagttgtggaaaagaacattaaggatcaagaacaagttgaaactactggatgtgggttagttgatgattctaccggatgttcgtcagaacctcaagttcaattaccgccatccgcagagccaatggaaggtggatgtgatttaattaatgtcccttccggatgttcaacagaacctcaaattcaattatcgtcatccgcagagcccgaggaaggtatgcacattcacttagaggcagcaatgaactctgaaacggtggttactgaaggttcagaactcccttcatctctcccaatgacggaggacgaaaatgctgatggccaattagctgaagtcgagccctcagtgtctcttacagttgagcaaactaacattgaggagaaagatcacattgaaactgccgaatgtgagttagttgatgtctctcccggatgttcatcacaacctgaagttaaatttccgccatccccagatgcagtgggaggtatggacgttcacttagaaaccgttgttactgaagacacagattcaaattcatccctcccgaagacggaggaaaaagatgccgagaatccatcagacaggcttgacggtgaatccgatggtacaactgttgctactgttgaaggaacttgtgttgagtcgaattcattggtcgccgaagagagcaacatagaagtgccaaaagacaatgaagatgtgtagttcatttcatctaatattaagttgtaaaacttttaatatctaatataacaaacccaatgttgaagatgtattgactgcatctgacttatttaacttatcctctcatttgggaatattaatagggcttagaatc

SEQ ID NO: 9273 - protein, 3478 aa, Arabidopsis thaliana
MTSSSHNIELEAAKFLHKLIQDSKDEPAKLATKLYVILQHMKTSGKENTMPYQVISRAMDTVVNQHGLDIEALKSSCLPHPGGTQTEDSGSAHLAGSSQAVGVSNEGKATLVENEMTKYDAFTSGRQLGGSNSASQTFYQGSGTQSNRSFDRESPSNLDSTSGISQPHNRSETMNQRDVKSSGKRKRGESSLSWDQNMDNSQIFDSHKIDDQTGEVSKIEMPGNSGDIRNLHVGLSSDAFTTPQCGWQSSEATAIRPAIHKEPGNNVAGEGFLPSGSPFREQQLKQLRAQCLVFLALRNGLVPKKLHVEIALRNTFREEDGFRGELFDPKGRTHTSSDLGGIPDVSALLSRTDNPTGRLDEMDFSSKETERSRLGEKSFANTVFSDGQKLLASRIPSSQAQTQVAVSHSQLTFSPGLTKNTPSEMVGWTGVIKTNDLSTSAVQLDEFHSSDEEEGNLQPSPKYTMSQKWIMGRQNKRLLVDRSWSLKQQKADQAIGSRFNELKESVSLSDDISAKTKSVIELKKLQLLNLQRRLRSEFVYNFFKPIATDVEHLKSYKKHKHGRRIKQLEKYEQKMKEERQRRIRERQKEFFGGLEVHKEKLEDLFKVRRERLKGFNRYAKEFHKRKERLHREKIDKIQREKINLLKINDVEGYLRMVQDAKSDRVKQLLKETEKYLQKLGSKLKEAKLLTSRFENEADETRTSNATDDETLIENEDESDQAKHYLESNEKYYLMAHSIKENINEQPSSLVGGKLREYQMNGLRWLVSLYNNHLNGILADEMGLGKTVQVISLICYLMETKNDRGPFLVVVPSSVLPGWQSEINFWAPSIHKIVYCGTPDERRKLFKEQIVHQKFNVLLTTYEYLMNKHDRPKLSKIHWHYIIIDEGHRIKNASCKLNADLKHYVSSHRLLLTGTPLQNNLEELWALLNFLLPNIFNSSEDFSQWFNKPFQSNGESSAEEALLSEEENLLIINRLHQVLRPFVLRRLKHKVENELPEKIERLIRCEASAYQKLLMKRVEDNLGSIGNAKSRAVHNSVMELRNICNHPYLSQLHSEEVNNIIPKHFLPPIVRLCGKLEMLDRMLPKLKATDHRVLFFSTMTRLLDVMEDYLTLKGYKYLRLDGQTSGGDRGALIDGFNKSGSPFFIFLLSIRAGGVGVNLQAADTVILFDTDWNPQVDLQAQARAHRIGQKKDVLVLRFETVNSVEEQVRASAEHKLGVANQSITAGFFDNNTSAEDRKEYLESLLRESKKEEDAPVLDDDALNDLIARRESEIDIFESIDKQRKENEMETWNTLVHGPGSDSFAHIPSIPSRLVTEDDLKLLYETMKLNDVPMVAKESTVGMKRKDGSMGGLDTHQYGRGKRAREVRSYEEKLTEEEFEKLCQTESPDSPQGKGEGSERSLANDTSNIPVENSSDTLLPTSPTQAITVQPMEPVRPQSHTLKEETQPIKRGRGRPKRTDKALTPVSLSAVSRTQATGNAISSAATGLDFVSSDKRLEAASHPTSSLALTSPDLSGPPGFQSLPASPAPTPIRGRGRGRSRGRGAGRGRRVEGVLHGSNSSITQRTETATSLASDAEATKFALPRSASEIVSRVPKANEGSTSNPDQVSPVHSATTALRSDKAADKDLDAPPGFDSGSHVQTLNVLENSSERKAFAVKKRPLIQGVSSQHPGPNKQPLDLPVSTSSTLLGGGPVQNQNAVSSVCDGSKSPSEGRTYTALQGVTTAPSDATLPMSSQPSDATLPMSSQPVGSTVEAQEANVPSLPAALPAKRRVRNLPSRGETPKRQGKRRGQPLPATDASSARSTGLTPQIEVKVGNLSGTKAKFDAVAKEQPHFSQSVAPDIHSSGSLSQEIRRDTSGTGGSARKQTADVTDVARVMKEIFSETSLLKHKVGEPSATTRTNVPDAQSPGEMNLHTVETHKAEDSSGLKNQEALYNLSKADKLVSDIPHPVPGDLTTSGSVANKDVDIGSSKVAAENELVKIPGGDVDSSVIQLSLGNTLTAKSSLEKCTADQLLGEKLSQEGETTPASDGETCHLAEETASSLSYVRSEPTASASTTAEPLPTDKLEKNISFQDEVKTLNGDKREAILLSSEEQTNVNSKIETNSEELQASRTDEVPHVDGKSVDVANQTVKEDEAKHSVEIQSSMLEPDELPNAGQKGHSSIDLQPLVLVTSNENAMSLDDKDYDPISKSADIEQDPEESVFVQGVGRPKVGTADTQMEDTNDAKLLVGCSVESEEKEKTLQSLIPGDDADTEQDPEESVSDQRPKVGSAYTQMEDTDEAKLLMGCSVESEEKEKTLQSHIPGDDADTEKNPEESVSVQGVDRPKVGTTDTQMEDTNDAKLLVGCSVASEEKEKTLQSHIPGDDADTEQNPEESVSVQGVNRPKVGNANTQMEDTDEAKVLVGCSVESEEKEKTLQSHIPGDDADTEQNPEESVSNFDRPKDGTADTHMEDIDDAKLLVGCSVESEEKEKSLQSHMPSDDAVLHAPFENTKDSKGDDLHGESLVSCPTMEVMEQKGFESETHARTDSGGIDRGNEVSENMSDGVKMNISSVQVPDASHDLNVSQDQTDIPLVGGIDPEHVQENVDVPASPHGAAPNIVIFQSEGHLSPSILPDDVAGQLESMSNDEKTNISSEQVPDVSHDLKVSQDQTDIPPVGGIVPENLQEIVDVPASPHGVVPDVVVSQSEEIQSPSILPDDVPGQPDDGNCEKMDTMQNNTSIDIGITSGKTCQPSSSTQPEDENRNSLSHCEPSEVVEQRDSRDQVCIGSVESQVEISSAILENRSADIQPPQSILVDQKDIEESKEPGIESADVSLHQLADIQAEPSNLVDQMDIEESKEPGTESADVSLHQLADIQPGPSILVDQMDTEKSKEPGTESADVSLHQLADIQPGPSILVDQMDTEKSKEPAVQKNIEDKDQSHVETAGSELVDVSAECSTEPQVQLPPSSEPVGDMHVHLGASKSEIVAEGTDFSSSLPKTEEENAKSQLADTEPSSSLTAVQKNIEDQVETAGCEFVVVSTGCSTEPQVQLPPSAEPVVAEGTEFPSSLLMTGVDNSSHLMTGVDNAKTHLADVVPSSSPTTMEKNIEAQDQDQVTTGGCGLVDVLTECSSEPQLQLPPSAEPVISEGTELATLPLTEEENADSQLANIEPSSSPSVVEKNIEAQDQDQVKTAGCELVSTGCSSEPQVHLPPSAEPDGDIHVHLKETEKSESMVVVGEGTAFPSSLPVTEEGNAESQLADTEPFTSPTVVEKNIKDQEQVETTGCGLVDDSTGCSSEPQVQLPPSAEPMEGGCDLINVPSGCSTEPQIQLSSSAEPEEGMHIHLEAAMNSETVVTEGSELPSSLPMTEDENADGQLAEVEPSVSLTVEQTNIEEKDHIETAECELVDVSPGCSSQPEVKFPPSPDAVGGMDVHLETVVTEDTDSNSSLPKTEEKDAENPSDRLDGESDGTTVATVEGTCVESNSLVAEESNIEVPKDNEDV

SEQ ID NO: 9274 - protein, 3438 aa, Arabidopsis thaliana
MKTSGKENTMPYQVISRAMDTVVNQHGLDIEALKSSCLPHPGGTQTEDSGSAHLAGSSQAVGVSNEGKATLVENEMTKYDAFTSGRQLGGSNSASQTFYQGSGTQSNRSFDRESPSNLDSTSGISQPHNRSETMNQRDVKSSGKRKRGESSLSWDQNMDNSQIFDSHKIDDQTGEVSKIEMPGNSGDIRNLHVGLSSDAFTTPQCGWQSSEATAIRPAIHKEPGNNVAGEGFLPSGSPFREQQLKQLRAQCLVFLALRNGLVPKKLHVEIALRNTFREEDGFRGELFDPKGRTHTSSDLGGIPDVSALLSRTDNPTGRLDEMDFSSKETERSRLGEKSFANTVFSDGQKLLASRIPSSQAQTQVAVSHSQLTFSPGLTKNTPSEMVGWTGVIKTNDLSTSAVQLDEFHSSDEEEGNLQPSPKYTMSQKWIMGRQNKRLLVDRSWSLKQQKADQAIGSRFNELKESVSLSDDISAKTKSVIELKKLQLLNLQRRLRSEFVYNFFKPIATDVEHLKSYKKHKHGRRIKQLEKYEQKMKEERQRRIRERQKEFFGGLEVHKEKLEDLFKVRRERLKGFNRYAKEFHKRKERLHREKIDKIQREKINLLKINDVEGYLRMVQDAKSDRVKQLLKETEKYLQKLGSKLKEAKLLTSRFENEADETRTSNATDDETLIENEDESDQAKHYLESNEKYYLMAHSIKENINEQPSSLVGGKLREYQMNGLRWLVSLYNNHLNGILADEMGLGKTVQVISLICYLMETKNDRGPFLVVVPSSVLPGWQSEINFWAPSIHKIVYCGTPDERRKLFKEQIVHQKFNVLLTTYEYLMNKHDRPKLSKIHWHYIIIDEGHRIKNASCKLNADLKHYVSSHRLLLTGTPLQNNLEELWALLNFLLPNIFNSSEDFSQWFNKPFQSNGESSAEEALLSEEENLLIINRLHQVLRPFVLRRLKHKVENELPEKIERLIRCEASAYQKLLMKRVEDNLGSIGNAKSRAVHNSVMELRNICNHPYLSQLHSEEVNNIIPKHFLPPIVRLCGKLEMLDRMLPKLKATDHRVLFFSTMTRLLDVMEDYLTLKGYKYLRLDGQTSGGDRGALIDGFNKSGSPFFIFLLSIRAGGVGVNLQAADTVILFDTDWNPQVDLQAQARAHRIGQKKDVLVLRFETVNSVEEQVRASAEHKLGVANQSITAGFFDNNTSAEDRKEYLESLLRESKKEEDAPVLDDDALNDLIARRESEIDIFESIDKQRKENEMETWNTLVHGPGSDSFAHIPSIPSRLVTEDDLKLLYETMKLNDVPMVAKESTVGMKRKDGSMGGLDTHQYGRGKRAREVRSYEEKLTEEEFEKLCQTESPDSPQGKGEGSERSLANDTSNIPVENSSDTLLPTSPTQAITVQPMEPVRPQSHTLKEETQPIKRGRGRPKRTDKALTPVSLSAVSRTQATGNAISSAATGLDFVSSDKRLEAASHPTSSLALTSPDLSGPPGFQSLPASPAPTPIRGRGRGRSRGRGAGRGRRVEGVLHGSNSSITQRTETATSLASDAEATKFALPRSASEIVSRVPKANEGSTSNPDQVSPVHSATTALRSDKAADKDLDAPPGFDSGSHVQTLNVLENSSERKAFAVKKRPLIQGVSSQHPGPNKQPLDLPVSTSSTLLGGGPVQNQNAVSSVCDGSKSPSEGRTYTALQGVTTAPSDATLPMSSQPSDATLPMSSQPVGSTVEAQEANVPSLPAALPAKRRVRNLPSRGETPKRQGKRRGQPLPATDASSARSTGLTPQIEVKVGNLSGTKAKFDAVAKEQPHFSQSVAPDIHSSGSLSQEIRRDTSGTGGSARKQTADVTDVARVMKEIFSETSLLKHKVGEPSATTRTNVPDAQSPGEMNLHTVETHKAEDSSGLKNQEALYNLSKADKLVSDIPHPVPGDLTTSGSVANKDVDIGSSKVAAENELVKIPGGDVDSSVIQLSLGNTLTAKSSLEKCTADQLLGEKLSQEGETTPASDGETCHLAEETASSLSYVRSEPTASASTTAEPLPTDKLEKNISFQDEVKTLNGDKREAILLSSEEQTNVNSKIETNSEELQASRTDEVPHVDGKSVDVANQTVKEDEAKHSVEIQSSMLEPDELPNAGQKGHSSIDLQPLVLVTSNENAMSLDDKDYDPISKSADIEQDPEESVFVQGVGRPKVGTADTQMEDTNDAKLLVGCSVESEEKEKTLQSLIPGDDADTEQDPEESVSDQRPKVGSAYTQMEDTDEAKLLMGCSVESEEKEKTLQSHIPGDDADTEKNPEESVSVQGVDRPKVGTTDTQMEDTNDAKLLVGCSVASEEKEKTLQSHIPGDDADTEQNPEESVSVQGVNRPKVGNANTQMEDTDEAKVLVGCSVESEEKEKTLQSHIPGDDADTEQNPEESVSNFDRPKDGTADTHMEDIDDAKLLVGCSVESEEKEKSLQSHMPSDDAVLHAPFENTKDSKGDDLHGESLVSCPTMEVMEQKGFESETHARTDSGGIDRGNEVSENMSDGVKMNISSVQVPDASHDLNVSQDQTDIPLVGGIDPEHVQENVDVPASPHGAAPNIVIFQSEGHLSPSILPDDVAGQLESMSNDEKTNISSEQVPDVSHDLKVSQDQTDIPPVGGIVPENLQEIVDVPASPHGVVPDVVVSQSEEIQSPSILPDDVPGQPDDGNCEKMDTMQNNTSIDIGITSGKTCQPSSSTQPEDENRNSLSHCEPSEVVEQRDSRDQVCIGSVESQVEISSAILENRSADIQPPQSILVDQKDIEESKEPGIESADVSLHQLADIQAEPSNLVDQMDIEESKEPGTESADVSLHQLADIQPGPSILVDQMDTEKSKEPGTESADVSLHQLADIQPGPSILVDQMDTEKSKEPAVQKNIEDKDQSHVETAGSELVDVSAECSTEPQVQLPPSSEPVGDMHVHLGASKSEIVAEGTDFSSSLPKTEEENAKSQLADTEPSSSLTAVQKNIEDQVETAGCEFVVVSTGCSTEPQVQLPPSAEPVVAEGTEFPSSLLMTGVDNSSHLMTGVDNAKTHLADVVPSSSPTTMEKNIEAQDQDQVTTGGCGLVDVLTECSSEPQLQLPPSAEPVISEGTELATLPLTEEENADSQLANIEPSSSPSVVEKNIEAQDQDQVKTAGCELVSTGCSSEPQVHLPPSAEPDGDIHVHLKETEKSESMVVVGEGTAFPSSLPVTEEGNAESQLADTEPFTSPTVVEKNIKDQEQVETTGCGLVDDSTGCSSEPQVQLPPSAEPMEGGCDLINVPSGCSTEPQIQLSSSAEPEEGMHIHLEAAMNSETVVTEGSELPSSLPMTEDENADGQLAEVEPSVSLTVEQTNIEEKDHIETAECELVDVSPGCSSQPEVKFPPSPDAVGGMDVHLETVVTEDTDSNSSLPKTEEKDAENPSDRLDGESDGTTVATVEGTCVESNSLVAEESNIEVPKDNEDV

SEQ ID NO: 9275 - protein, 3429 aa, Arabidopsis thaliana
MPYQVISRAMDTVVNQHGLDIEALKSSCLPHPGGTQTEDSGSAHLAGSSQAVGVSNEGKATLVENEMTKYDAFTSGRQLGGSNSASQTFYQGSGTQSNRSFDRESPSNLDSTSGISQPHNRSETMNQRDVKSSGKRKRGESSLSWDQNMDNSQIFDSHKIDDQTGEVSKIEMPGNSGDIRNLHVGLSSDAFTTPQCGWQSSEATAIRPAIHKEPGNNVAGEGFLPSGSPFREQQLKQLRAQCLVFLALRNGLVPKKLHVEIALRNTFREEDGFRGELFDPKGRTHTSSDLGGIPDVSALLSRTDNPTGRLDEMDFSSKETERSRLGEKSFANTVFSDGQKLLASRIPSSQAQTQVAVSHSQLTFSPGLTKNTPSEMVGWTGVIKTNDLSTSAVQLDEFHSSDEEEGNLQPSPKYTMSQKWIMGRQNKRLLVDRSWSLKQQKADQAIGSRFNELKESVSLSDDISAKTKSVIELKKLQLLNLQRRLRSEFVYNFFKPIATDVEHLKSYKKHKHGRRIKQLEKYEQKMKEERQRRIRERQKEFFGGLEVHKEKLEDLFKVRRERLKGFNRYAKEFHKRKERLHREKIDKIQREKINLLKINDVEGYLRMVQDAKSDRVKQLLKETEKYLQKLGSKLKEAKLLTSRFENEADETRTSNATDDETLIENEDESDQAKHYLESNEKYYLMAHSIKENINEQPSSLVGGKLREYQMNGLRWLVSLYNNHLNGILADEMGLGKTVQVISLICYLMETKNDRGPFLVVVPSSVLPGWQSEINFWAPSIHKIVYCGTPDERRKLFKEQIVHQKFNVLLTTYEYLMNKHDRPKLSKIHWHYIIIDEGHRIKNASCKLNADLKHYVSSHRLLLTGTPLQNNLEELWALLNFLLPNIFNSSEDFSQWFNKPFQSNGESSAEEALLSEEENLLIINRLHQVLRPFVLRRLKHKVENELPEKIERLIRCEASAYQKLLMKRVEDNLGSIGNAKSRAVHNSVMELRNICNHPYLSQLHSEEVNNIIPKHFLPPIVRLCGKLEMLDRMLPKLKATDHRVLFFSTMTRLLDVMEDYLTLKGYKYLRLDGQTSGGDRGALIDGFNKSGSPFFIFLLSIRAGGVGVNLQAADTVILFDTDWNPQVDLQAQARAHRIGQKKDVLVLRFETVNSVEEQVRASAEHKLGVANQSITAGFFDNNTSAEDRKEYLESLLRESKKEEDAPVLDDDALNDLIARRESEIDIFESIDKQRKENEMETWNTLVHGPGSDSFAHIPSIPSRLVTEDDLKLLYETMKLNDVPMVAKESTVGMKRKDGSMGGLDTHQYGRGKRAREVRSYEEKLTEEEFEKLCQTESPDSPQGKGEGSERSLANDTSNIPVENSSDTLLPTSPTQAITVQPMEPVRPQSHTLKEETQPIKRGRGRPKRTDKALTPVSLSAVSRTQATGNAISSAATGLDFVSSDKRLEAASHPTSSLALTSPDLSGPPGFQSLPASPAPTPIRGRGRGRSRGRGAGRGRRVEGVLHGSNSSITQRTETATSLASDAEATKFALPRSASEIVSRVPKANEGSTSNPDQVSPVHSATTALRSDKAADKDLDAPPGFDSGSHVQTLNVLENSSERKAFAVKKRPLIQGVSSQHPGPNKQPLDLPVSTSSTLLGGGPVQNQNAVSSVCDGSKSPSEGRTYTALQGVTTAPSDATLPMSSQPSDATLPMSSQPVGSTVEAQEANVPSLPAALPAKRRVRNLPSRGETPKRQGKRRGQPLPATDASSARSTGLTPQIEVKVGNLSGTKAKFDAVAKEQPHFSQSVAPDIHSSGSLSQEIRRDTSGTGGSARKQTADVTDVARVMKEIFSETSLLKHKVGEPSATTRTNVPDAQSPGEMNLHTVETHKAEDSSGLKNQEALYNLSKADKLVSDIPHPVPGDLTTSGSVANKDVDIGSSKVAAENELVKIPGGDVDSSVIQLSLGNTLTAKSSLEKCTADQLLGEKLSQEGETTPASDGETCHLAEETASSLSYVRSEPTASASTTAEPLPTDKLEKNISFQDEVKTLNGDKREAILLSSEEQTNVNSKIETNSEELQASRTDEVPHVDGKSVDVANQTVKEDEAKHSVEIQSSMLEPDELPNAGQKGHSSIDLQPLVLVTSNENAMSLDDKDYDPISKSADIEQDPEESVFVQGVGRPKVGTADTQMEDTNDAKLLVGCSVESEEKEKTLQSLIPGDDADTEQDPEESVSDQRPKVGSAYTQMEDTDEAKLLMGCSVESEEKEKTLQSHIPGDDADTEKNPEESVSVQGVDRPKVGTTDTQMEDTNDAKLLVGCSVASEEKEKTLQSHIPGDDADTEQNPEESVSVQGVNRPKVGNANTQMEDTDEAKVLVGCSVESEEKEKTLQSHIPGDDADTEQNPEESVSNFDRPKDGTADTHMEDIDDAKLLVGCSVESEEKEKSLQSHMPSDDAVLHAPFENTKDSKGDDLHGESLVSCPTMEVMEQKGFESETHARTDSGGIDRGNEVSENMSDGVKMNISSVQVPDASHDLNVSQDQTDIPLVGGIDPEHVQENVDVPASPHGAAPNIVIFQSEGHLSPSILPDDVAGQLESMSNDEKTNISSEQVPDVSHDLKVSQDQTDIPPVGGIVPENLQEIVDVPASPHGVVPDVVVSQSEEIQSPSILPDDVPGQPDDGNCEKMDTMQNNTSIDIGITSGKTCQPSSSTQPEDENRNSLSHCEPSEVVEQRDSRDQVCIGSVESQVEISSAILENRSADIQPPQSILVDQKDIEESKEPGIESADVSLHQLADIQAEPSNLVDQMDIEESKEPGTESADVSLHQLADIQPGPSILVDQMDTEKSKEPGTESADVSLHQLADIQPGPSILVDQMDTEKSKEPAVQKNIEDKDQSHVETAGSELVDVSAECSTEPQVQLPPSSEPVGDMHVHLGASKSEIVAEGTDFSSSLPKTEEENAKSQLADTEPSSSLTAVQKNIEDQVETAGCEFVVVSTGCSTEPQVQLPPSAEPVVAEGTEFPSSLLMTGVDNSSHLMTGVDNAKTHLADVVPSSSPTTMEKNIEAQDQDQVTTGGCGLVDVLTECSSEPQLQLPPSAEPVISEGTELATLPLTEEENADSQLANIEPSSSPSVVEKNIEAQDQDQVKTAGCELVSTGCSSEPQVHLPPSAEPDGDIHVHLKETEKSESMVVVGEGTAFPSSLPVTEEGNAESQLADTEPFTSPTVVEKNIKDQEQVETTGCGLVDDSTGCSSEPQVQLPPSAEPMEGGCDLINVPSGCSTEPQIQLSSSAEPEEGMHIHLEAAMNSETVVTEGSELPSSLPMTEDENADGQLAEVEPSVSLTVEQTNIEEKDHIETAECELVDVSPGCSSQPEVKFPPSPDAVGGMDVHLETVVTEDTDSNSSLPKTEEKDAENPSDRLDGESDGTTVATVEGTCVESNSLVAEESNIEVPKDNEDV

SEQ ID NO: 9276 - DNA, 1335 bp, Arabidopsis thaliana
actctttactctttcttccgtttgctcgaaccatctagtctaagagaaagaaaaaatactaaagagaaagaagaagaggacttgaatacggaagcttgagagaatgaaagcgatcgtgatctcggagccaggtaagccggaggttctgcaactccgtgatgtggcagacccagaagttaaagacgatgaggttctcatcagagttctcgctactgctttgaatcgtgcagatactctccaaagacttggcctttataatccaccacctggctcaagcccttaccttggtctcgaatgttctgggaccattgaatccgtcggtaaaggcgtctctcgatggaaagtcggagaccaggtgtgtgctcttctttctggaggaggttatgcagagaaagtttctgttcctgctggacaaattttcccaattcccgctggtatctctctaaaggatgcagcggctttccctgaagtggcatgcactgtttggtctactgtcttcatgatgggccgtctctctgttggtgaatcattcttgattcatggaggttcaagtgggattgggacatttgctattcagatagctaaacatctgggagtgagagtatttgtcacagctgggagtgatgaaaagctagctgcgtgcaaagaactcggggctgatgtttgtataaattacaaaaccgaggattttgttgcaaaggtaaaagcggaaaccgatgggaaaggagtggatgttatcttggactgcattggggcaccgtatttgcagaaaaatctcgacagcttaaactttgatggaaggttatgtattatcggtttaatgggaggagccaatgcagaaataaaactaagtagtctgcttccaaagcgtctcactgtcttaggagctgcattaagaccaagaagccctgaaaacaaagcagttgttgtaagggaagtcgagaagaatgtctggccagcgatagaagcagggaaggtaaaaccagtgatttacaagtatttaccattgtcacaagcagcagaaggtcatagccttatggagagtagcaaccatattggtaagattctccttgagacttgattctctgcaaagggagaaatgttcagagacaagagtcatggtcaataatcaataaaatctggtcgattctgttcatagatatctctttacaagagttctgtttgttggcttttatgtatctctgatttggtcaaaaagacactgtaactatggaacatatatagtatcaaataagctgttgtataccaaacattgatttcgaagtagaatatgattttgtaagaagtttttatttattttgggcttaaaaagtg

SEQ ID NO: 9277 - protein, 325 aa, Arabidopsis thaliana; identical to SEQ ID NO: 5026

SEQ ID NO: 9278 - protein, 193 aa, Arabidopsis thaliana; identical to SEQ ID NO: 5027

SEQ ID NO: 9279 - protein, 192 aa, Arabidopsis thaliana; identical to SEQ ID NO: 5028

SEQ ID NO: 9280 - DNA, 894 bp, Arabidopsis thaliana
aaagtacatttacacttgcaagaaaaaaaacacagagacgaaccaaaacctcactctctcccctgaaactaatcttccactttttcactgtctgcaacttgcaactacaactagcaagcaagaacctttcttcttcttcttcttaatctcagattcttgtctgaaaactttctctttcattttctctcaatttaacactttcaagatgccgatcaacaaagacccatcaacacctcctcctgttatcggaaaaatcggtccttacactgtctttatgactcctcctgcgactcctaaaccacctgaatctccctccgctgtgtctcagaagcctgtgatggcaccaccggttcttcctccgccgcagcagtttaaatcggtggcttcttctgaccaggacggctcagttttggggttctttaaaaacgccgtcacaaaggttcaaaatgcacattcaagtgtggatgatcatttggtgaggtggtttgggttaaaccaatctaagtatcagtgggctttggatgagtactacgaaagcaaagaatcagatatgaagaccgtgaaagcaaaggagatgccggggaaagtacagagtgtataagcaaccatgtataaactcatttcccctttggccaattctaaaatctgtttttctgagagagttcaaaaaagcttgagtcttgaggaaagttctcttcagatgatatttaatcttagagatttcttttggtatatttcaaaacctatgtagtagctctttctagtttcatctaacaatggtgaaatctccaaagcaaaatggagagatgtcattggtcatttggtttgttgtaagtttaatcacattatttactttttaattgtatcgttataatctatatattgtctcaattc

SEQ ID NO: 9281 - protein, 199 aa, Arabidopsis thaliana
KYIYTCKKKNTETNQNLTLSPETNLPLFHCLQLATTTSKQEPFFFFFLISDSCLKTFSFIFSQFNTFKMPINKDPSTPPPVIGKIGPYTVFMTPPATPKPPESPSAVSQKPVMAPPVLPPPQQFKSVASSDQDGSVLGFFKNAVTKVQNAHSSVDDHLVRWFGLNQSKYQWALDEYYESKESDMKTVKAKEMPGKVQSV

SEQ ID NO: 9282 - protein, 131 aa, Arabidopsis thaliana
MPINKDPSTPPPVIGKIGPYTVFMTPPATPKPPESPSAVSQKPVMAPPVLPPPQQFKSVASSDQDGSVLGFFKNAVTKVQNAHSSVDDHLVRWFGLNQSKYQWALDEYYESKESDMKTVKAKEMPGKVQSV

SEQ ID NO: 9283 - protein, 108 aa, Arabidopsis thaliana
MTPPATPKPPESPSAVSQKPVMAPPVLPPPQQFKSVASSDQDGSVLGFFKNAVTKVQNAHSSVDDHLVRWFGLNQSKYQWALDEYYESKESDMKTVKAKEMPGKVQSV

SEQ ID NO: 9284 - DNA, 1334 bp, Arabidopsis thaliana
atctacgcatgaaaatatgattctgtcttttttttgtttgtctatctttcaatactttaaaaagtgtatttctagaggcgatttgtcatttcccgaataggaatttgagtaaaaaaaaacactctgttttttatttccactaatatcaaatcggcgaatatagttcccaccattcttatctccttgtcgtcactcggaattttttaaataataggatcgctttaataatataatctctataatttatagttccttttccaatattggcgtctccgttgaagctttccacaaatctcaaatttgtttggagactctcaaatgtatccttctctcgacgatgatttcgtctctgatttgttttgcttcgatcaaagcaatggagcagaacttgatgattacacacagtttggtgtaaatttgcagactgatcaagaggatacctttccagattttgtgtcatatggtgtgaatttgcagcaggagccagatgaagtctttagtattggagcttctcaattggatttgtcctcgtataatggagttttgtcgctagagccagaacaggtggggcaacaagattgtgaagttgtgcaggaagaagaagtagagatcaattctggttcatctggtggagctgttaaggaagaacaggaacatttagatgacgattgctccagaaagcgggcaaggactggatcgtgtagcagaggaggaggaactaaagcgtgtcgtgaaaggttgaggagggagaagctaaatgagaggtttatggatttgagctcggttttggagcctgggaggactcctaagactgataaaccggctatactcgatgatgcaatccgtatattgaatcaacttagagatgaagctcttaagcttgaagaaactaaccagaagcttttagaggagatcaagagtctcaaggcggagaagaacgagctgagggaggaaaagctggtgttgaaggcggataaagagaagacagaacaacagttaaagtctatgacggctccatcttcagggttcatacctcatattccagctgcatttaaccacaacaaaatggctgtttatccaagttacggttacatgccaatgtggcattatatgcctcaatccgttcgtgacacatctcgtgatcaagaactcaggcctcctgctgcttaaactctcaattgtttttttttggtacccatagggaactcatagagatttctgaatcacttggtttaggattcttccgtttggcaagtgtaaaagctttactcttgatcttgggttgtatttttcttataaaataaatataactccagaaacttgtgattcttctc

SEQ ID NO: 9285 - protein, 283 aa, Arabidopsis thaliana
MYPSLDDDFVSDLFCFDQSNGAELDDYTQFGVNLQTDQEDTFPDFVSYGVNLQQEPDEVFSIGASQLDLSSYNGVLSLEPEQVGQQDCEVVQEEEVEINSGSSGGAVKEEQEHLDDDCSRKRARTGSCSRGGGTKACRERLRREKLNERFMDLSSVLEPGRTPKTDKPAILDDAIRILNQLRDEALKLEETNQKLLEEIKSLKAEKNELREEKLVLKADKEKTEQQLKSMTAPSSGFIPHIPAAFNHNKMAVYPSYGYMPMWHYMPQSVRDTSRDQELRPPAA

SEQ ID NO: 9286 - DNA, 1284 bp, Arabidopsis thaliana
actaattaaattctctataaaacataagagagtctaaacactgtggtagaaaaaaatatagacttttagatatgtgtagtaaaataacattagtgttaactttattttccagttatttcatatcaacagatgctgtgaatggatcatttcctgcgcttttggcttttggagattcaattctcgatactggcaacaacaattttctcctgacttttatgaaaggaaatatctggccatatggaaggagtttcagcatgagaagggcgacaggaagatttggaaatggaagagttttctctgatatagttgctgaaggtttagggatcaagaagattttaccagcttatcgtaagttgttcaattctccaagtgaccttagaactggtgtttgcttcgcatcaggtggtgcaggagttgaccctgttacatccaaattgctgagagttttaacgccaaaggatcaagtaaacgatttcaaagggtacataagaaagctaaaggccacagcaggtccttcaagagcaagtagtatagtttcaaatgcagtgattcttgtttctcaaggaaataatgatattggaatctcatattttggaactccaactgctgctttccgaggattaactcccaatagatataccactaaactagctggttggaacaaacagtttatgaaagaattatacgatcaaggagcgagaaaattcgcggtaatgggagtgataccgttgggatgtttgcctatgacaagaatcttccttggtgggttcgtcatcacgtgtaacttcttcgcgaatagagtcgcagaacagtacaacggaaaattgaggagcggaactaaaagttggggacgtgaagcaggttttaggggtgcaaaatttgtctatgtcgacatgtacaacactcttatggatgttattaaaaattatagaagatacggattttctaatgagaaaaatgggtgttgttgtatgattacggctataataccatgccccaacccagataaatacgtcttctacgacttcgttcatccatccgagaaagcttacagaacaatttctaaaaagcttgtccaggatatcaagaatggccttgcctgatttattatatatacaatgctttattttaattttaataacagccatcgttaataatagaaatgagaagacaaaaatcatacatggcgatctctctgtttttcttatgttaaagaatgtataatccagtttatgtattgttcactttatataatcccagaacaacaaaggagtttgtttacaa

SEQ ID NO: 9287 - protein, 343 aa, Arabidopsis thaliana
MCSKITLVLTLFSSYFISTDAVNGSFPALLAFGDSILDTGNNNFLLTFMKGNIWPYGRSFSMRRATGRFGNGRVFSDIVAEGLGIKKILPAYRKLFNSPSDLRTGVCFASGGAGVDPVTSKLLRVLTPKDQVNDFKGYIRKLKATAGPSRASSIVSNAVILVSQGNNDIGISYFGTPTAAFRGLTPNRYTTKLAGWNKQFMKELYDQGARKFAVMGVIPLGCLPMTRIFLGGFVITCNFFANRVAEQYNGKLRSGTKSWGREAGFRGAKFVYVDMYNTLMDVIKNYRRYGFSNEKNGCCCMITAIIPCPNPDKYVFYDFVHPSEKAYRTISKKLVQDIKNGLA

SEQ ID NO: 9288 - protein, 295 aa, Arabidopsis thaliana
MKGNIWPYGRSFSMRRATGRFGNGRVFSDIVAEGLGIKKILPAYRKLFNSPSDLRTGVCFASGGAGVDPVTSKLLRVLTPKDQVNDFKGYIRKLKATAGPSRASSIVSNAVILVSQGNNDIGISYFGTPTAAFRGLTPNRYTTKLAGWNKQFMKELYDQGARKFAVMGVIPLGCLPMTRIFLGGFVITCNFFANRVAEQYNGKLRSGTKSWGREAGFRGAKFVYVDMYNTLMDVIKNYRRYGFSNEKNGCCCMITAIIPCPNPDKYVFYDFVHPSEKAYRTISKKLVQDIKNGLA

SEQ ID NO: 9289 - protein, 282 aa, Arabidopsis thaliana
MRRATGRFGNGRVFSDIVAEGLGIKKILPAYRKLFNSPSDLRTGVCFASGGAGVDPVTSKLLRVLTPKDQVNDFKGYIRKLKATAGPSRASSIVSNAVILVSQGNNDIGISYFGTPTAAFRGLTPNRYTTKLAGWNKQFMKELYDQGARKFAVMGVIPLGCLPMTRIFLGGFVITCNFFANRVAEQYNGKLRSGTKSWGREAGFRGAKFVYVDMYNTLMDVIKNYRRYGFSNEKNGCCCMITAIIPCPNPDKYVFYDFVHPSEKAYRTISKKLVQDIKNGLA

SEQ ID NO: 9290 - DNA, 1362 bp, Arabidopsis thaliana
gtctccaagcaaaaaaaaaaacctaaaacctccatcaacgccggaggaagaaattttgtgtcatctacaacgaattcgttaatcgcgatgaaggaagacgaagtaaatcgatgccagattcagaattggtatccgagattcaaatccttaaccatcaaaaccaaatttcacaaacttccagaatcattcatcaactatctcatcgacgattctggtccgtttcttctccctcattccgtaacaaacgaagacgcaatgcctaacagagtccacaatttcgaagaagaagatgatttccaagtccccgaagaagcttcagatgacgaaccattgaatcgtccttcttttccagaactcgaaatcgagatcagagaatcaatcgaaaccctaggcggcacaattatcccgaagctgaattggagttcaccaaaagacgcagcttggattagtccatcacagaatctaagctgcacttgtttcaatgagattgctctcttgtttcgttcctctgattcgttaacccatgatctcttcaatgcttatgattcatgtagtgacaaagtctcttcaaggccagaaagtttctaccttgcgttgagaaaatggtacccttcgttgaagcctgagatggaatttagatgctttgtgaaatctaacgagcttgttgggatttgtcagcgtgaggtaactacattttaccctgttcttctcaatgagaaggatttgctcaagggtttgatagaagagttctttgatgataagattaggtttgaatttgaatcagagaattacacttttgatgtttatgtgacgaaagagagaagagttaagctaatagatttcaatacttggtgtggttctactttgccattgatgtatacatgggaagaacttgagaagattcatggagaatgtgatgaattggaattgaggattgttgagagccgtctcagtgtgcttcctggtttgaaaacagctgttccttatgattatcttgacgtgagtgctggtagtggttgggctcaggttcttaagatagtggaagaggagtttcagaaagacgatcagagttctgatgaagttgcttgaagacttagattcttggttattggaagactagacaataattttttgaactatcatagttgtgtgcctaccaataagtgtcgtgttccattgttgttctgaaacggtttaatcacgatgttggaactttgatggtgtctttttcttataagattttctcttctagactgcttttgtatttgtcttgttattcttctgcaaagaattgtgttgagtggcaaattgttcctgattggtttctcattaccaaatttgtacatggatgttggattagtt

SEQ ID NO: 9291 - protein, 362 aa, Arabidopsis thaliana
VSKQKKKPKTSINAGGRNFVSSTTNSLIAMKEDEVNRCQIQNWYPRFKSLTIKTKFHKLPESFINYLIDDSGPFLLPHSVTNEDAMPNRVHNFEEEDDFQVPEEASDDEPLNRPSFPELEIEIRESIETLGGTIIPKLNWSSPKDAAWISPSQNLSCTCFNEIALLFRSSDSLTHDLFNAYDSCSDKVSSRPESFYLALRKWYPSLKPEMEFRCFVKSNELVGICQREVTTFYPVLLNEKDLLKGLIEEFFDDKIRFEFESENYTFDVYVTKERRVKLIDFNTWCGSTLPLMYTWEELEKIHGECDELELRIVESRLSVLPGLKTAVPYDYLDVSAGSGWAQVLKIVEEEFQKDDQSSDEVA

SEQ ID NO: 9292 - protein, 333 aa, Arabidopsis thaliana
MKEDEVNRCQIQNWYPRFKSLTIKTKFHKLPESFINYLIDDSGPFLLPHSVTNEDAMPNRVHNFEEEDDFQVPEEASDDEPLNRPSFPELEIEIRESIETLGGTIIPKLNWSSPKDAAWISPSQNLSCTCFNEIALLFRSSDSLTHDLFNAYDSCSDKVSSRPESFYLALRKWYPSLKPEMEFRCFVKSNELVGICQREVTTFYPVLLNEKDLLKGLIEEFFDDKIRFEFESENYTFDVYVTKERRVKLIDFNTWCGSTLPLMYTWEELEKIHGECDELELRIVESRLSVLPGLKTAVPYDYLDVSAGSGWAQVLKIVEEEFQKDDQSSDEVA

SEQ ID NO: 9293 - protein, 277 aa, Arabidopsis thaliana
MPNRVHNFEEEDDFQVPEEASDDEPLNRPSFPELEIEIRESIETLGGTIIPKLNWSSPKDAAWISPSQNLSCTCFNEIALLFRSSDSLTHDLFNAYDSCSDKVSSRPESFYLALRKWYPSLKPEMEFRCFVKSNELVGICQREVTTFYPVLLNEKDLLKGLIEEFFDDKIRFEFESENYTFDVYVTKERRVKLIDFNTWCGSTLPLMYTWEELEKIHGECDELELRIVESRLSVLPGLKTAVPYDYLDVSAGSGWAQVLKIVEEEFQKDDQSSDEVA

SEQ ID NO: 9294 - DNA, 1329 bp, Arabidopsis thaliana
atggctgatagttgttgtatcagacttcacttattagcctctgttttcttgctcttattttcatccttcaacttgcagggtattgcagcggaaaatctttccaagcagaaactgacctcactgattcttcagaatgagattgtaaaggaagtcaatgagaatccaaacgctggttggaaagctgctttcaatgatcggtttgcaaatgccaccgttgcagagtttaagcgactcctcggtgttatacaaacaccaaagacggcatacttaggtgtacctattgtaagacatgatttatcgttgaagcttcctaaagaatttgatgctagaaccgcttggtcacattgcaccagtattcgaaggatcttagtgggttatatattgaacaatgtgttactctggtcgacgataactttatggttttggtttcttttgggtcattgtggttcttgctgggcatttggtgctgttgaatcactgtccgacaggttctgcatcaaatataacttgaatgtttccttatctgccaatgatgtcatagcatgttgtggattactttgcggttttggttgtaatggtggtttcccaatgggtgcatggttgtactttaagtaccacggtgtagtaacccaagagtgtgatccatactttgacaatactggttgctctcacccgggatgtgaacccacttaccctacaccaaaatgtgagaggaaatgtgtaagcagaaaccagctatggggtgaatcaaaacactatggtgtcggcgcatacagaatcaatcctgaccctcaagacattatggctgaggtttacaagaatggacctgtcgaggttgcttttaccgtttacgaggactttgcacattacaaatcaggagtatacaagtacataacgggtactaagattggaggtcatgcagttaagctcattggctggggaacttctgatgacggcgaagattattggttgcttgcaaatcaatggaaccgaagctggggtgatgatggttacttcaagatcaggagaggaacgaacgaatgtggcattgaacagagtgttgtagctggtttaccttcagagaagaacgtatttaaaggtattaccacttcagatgatcttctggtttcctcagtctaaacaagacgatgtgtccctacttctgtaatatatcatttgcaactgtgttgtaagtttaatataccattgaaagaatcaccttcaatcaaaacaaaagtatgtatagcttctgttaatattcaattttacatgttaccatgcaagaggactgttacagtgtttatttggttttggtaaattatagccacc

SEQ ID NO: 9295 - protein, 379 aa, Arabidopsis thaliana
MADSCCIRLHLLASVFLLLFSSFNLQGIAAENLSKQKLTSLILQNEIVKEVNENPNAGWKAAFNDRFANATVAEFKRLLGVIQTPKTAYLGVPIVRHDLSLKLPKEFDARTAWSHCTSIRRILVGYILNNVLLWSTITLWFWFLLGHCGSCWAFGAVESLSDRFCIKYNLNVSLSANDVIACCGLLCGFGCNGGFPMGAWLYFKYHGVVTQECDPYFDNTGCSHPGCEPTYPTPKCERKCVSRNQLWGESKHYGVGAYRINPDPQDIMAEVYKNGPVEVAFTVYEDFAHYKSGVYKYITGTKIGGHAVKLIGWGTSDDGEDYWLLANQWNRSWGDDGYFKIRRGTNECGIEQSVVAGLPSEKNVFKGITTSDDLLVSSV

SEQ ID NO: 9296 - DNA, 815 bp, Arabidopsis thaliana
gtattcttcgtctttcgtccaccaccatctctattttcttcctttcccctaagtcttggttcttcttctctctaatacgagaagaaaaaggcgaaaacctcgccaatccgattacgcgaaaaatcaaaggtttttggatatggcgtcgaagcggatcttgaaggaattgaaggatctccagaaggatccacctacatcatgtagcgcaggtcctgttgctgaagacatgtttcactggcaggcaacgataatgggtccttcagagagtccttatgctggaggtgttttccttgtaaccatccatttccctccggattacccattcaagcctcctaaggtggcctttaggaccaaggtgttccatcccaacattaacagcaacggtagcatttgcctcgacatcttgaaggagcagtggagtcctgcgctcaccatttccaaggtgctgctatcgatctgttctttgttaaccgatccaaacccggatgatcctttggtgcccgagatagctcacatgtacaagactgacaagaacaagtacgagtccactgcacgaagctggactcagaagtatgccatgggctaaatggaaaatcccacctactaaattatctctttatgaagaaaaaaatctgccttaatttctatgtatgattcgatagacatctctttgtgtccttttaactttctgaagacaggaccaaatgaagtgggtcttgttttaaacgaaacaaaaaaaaacatcatctttgtgaaaactagaatctgatcatcttctgttgtttcttcttgtggtgaaattatgatttgatgtt

SEQ ID NO: 9297 - protein, 148 aa, Arabidopsis thaliana; identical to SEQ ID NO: 6954

SEQ ID NO: 9298 - protein, 119 aa, Arabidopsis thaliana; identical to SEQ ID NO: 6955

SEQ ID NO: 9299 - protein, 111 aa, Arabidopsis thaliana; identical to SEQ ID NO: 6956

SEQ ID NO: 9300 - DNA, 1204 bp, Arabidopsis thaliana
gataattagggtttgaagataaagataaaaaacagagaattgttctctatttcatcaaaatcttctcaatggaaacagcaaagcgtagaaccatgtcaacaatcgtctccaggcttagctctgtctctgagcaaaccagagccgctgctttagctgagcttagactcatctccaaacaagatcctgatagccgtctaatcatcgccgacgccggagctattccgtacctcgccgagactctttactcgtcgtcacactcttctcaggaaaacgccgccgcgactctcctcaacctctcaatcacctctcgcgaacccctaatgtcttcacgcggcttactcgacgcgctttctcacgcgcttcgtcatcacgacaccaccacttcccccgccgcggttcaatcctccgccgctacgatttatagccttttgatagccgaagagtcttaccgacctatcatcggatctaagcgcgatatcatcttctccctcattcacatcattagatatccagattcgcatcctcgatcgatcaaagactcgctcaaggcactcttcgcgatcgctctgtatccgatgaaccgatcgacgatgatctctctcggcgcgattccggctctgttttcgctgatcgtgaaagattcgcggtgcgggatcgttgaagatgcgacggcggttatggcgcaagtcgctggatgcgaagatagcgaggacgggatgaggagagtttcaggagctaacgttctagcggatctgttagatccttgcactggttcgagcctacggatcaaagagaactccgttggtgcgcttttgaatctggcgagatgtggaggagctgcagcgaggtctgaagttgcggcggcggttgcgtctggtgctgatgaaggagccatggaagggatcgtgtatgtagctgagaatggtagtctgaaaggaaggaagaaagcggttgatctgttgaagctcgttgtctccggtaatggcggcggcgattcacgttttgattatttgttcaatgaaaatccaaatagcagaagcagctgattgcacaaatatctcaaatgttactttgtttcactaatacattcattgattcaaacactttatattatacacatatatattgtcattgtacaatgtacactttgaacatactttgttttgtagaactgaatcaatcaatcaaacacagaatctgttac

SEQ ID NO: 9301 - protein, 325 aa, Arabidopsis thaliana
METAKRRTMSTIVSRLSSVSEQTRAAALAELRLISKQDPDSRLIIADAGAIPYLAETLYSSSHSSQENAAATLLNLSITSREPLMSSRGLLDALSHALRHHDTTTSPAAVQSSAATIYSLLIAEESYRPIIGSKRDIIFSLIHIIRYPDSHPRSIKDSLKALFAIALYPMNRSTMISLGAIPALFSLIVKDSRCGIVEDATAVMAQVAGCEDSEDGMRRVSGANVLADLLDPCTGSSLRIKENSVGALLNLARCGGAAARSEVAAAVASGADEGAMEGIVYVAENGSLKGRKKAVDLLKLVVSGNGGGDSRFDYLFNENPNSRSS

SEQ ID NO: 9302 - protein, 317 aa, Arabidopsis thaliana
MSTIVSRLSSVSEQTRAAALAELRLISKQDPDSRLIIADAGAIPYLAETLYSSSHSSQENAAATLLNLSITSREPLMSSRGLLDALSHALRHHDTTTSPAAVQSSAATIYSLLIAEESYRPIIGSKRDIIFSLIHIIRYPDSHPRSIKDSLKALFAIALYPMNRSTMISLGAIPALFSLIVKDSRCGIVEDATAVMAQVAGCEDSEDGMRRVSGANVLADLLDPCTGSSLRIKENSVGALLNLARCGGAAARSEVAAAVASGADEGAMEGIVYVAENGSLKGRKKAVDLLKLVVSGNGGGDSRFDYLFNENPNSRSS

SEQ ID NO: 9303 - protein, 241 aa, Arabidopsis thaliana
MSSRGLLDALSHALRHHDTTTSPAAVQSSAATIYSLLIAEESYRPIIGSKRDIIFSLIHIIRYPDSHPRSIKDSLKALFAIALYPMNRSTMISLGAIPALFSLIVKDSRCGIVEDATAVMAQVAGCEDSEDGMRRVSGANVLADLLDPCTGSSLRIKENSVGALLNLARCGGAAARSEVAAAVASGADEGAMEGIVYVAENGSLKGRKKAVDLLKLVVSGNGGGDSRFDYLFNENPNSRSS

SEQ ID NO: 9304 - DNA, 1494 bp, Arabidopsis thaliana
cattatggtgctgataagtatattgcatcgatggcaaatatgcttaactatcctaacaacgtgctgaacaacggtggaaggctaaggacggttttcgatgttggttgtggtgttgcgagttttggaggttatcttttatcatcggatattctcacaatgtccttggctccaaatgatgtgcatcagaaccaaatccaatttgctcttgagagagggattcctgcctccctcggtgttttagggacaaagaggctcccatacccaagcagatcttttgaactttctcactgttcacgttgcagaatcgattggctacaaagagacgggattcttcttctcgagctagacagagtacttagacctggtggttattttgcatattcatctccagaggcatatgcacaagatgaagaggatcttagaatctggagagaaatgagtgctcttgtggagcgcatgtgttggaagatcgcggcaaaaaggaatcaaaccgttatttggcagaaacctttgacaaatgattgttatctagaaagagaacctggaactcagcctcctctttgccgttctgataatgaccctgatgctgtgtggggcgtaaacatggaagcttgcattacttcttacagtgaccatgaccacaaaaccaagggaagtggattagctccatggccagctcggttaacctctcctcctcccagacttgctgattttggatattcaacgggcatgtttgagaaggacacggaactttggaggcagagagtagatacttattgggatctcttgagtccaagaatcgaatcagatacagtgaggaacataatggacatgaaagcaagcatgggctcttttgctgctgctctgaaagaaaaagatgtctgggtaatgaatgttgttcctgaggacggacctaacacgcttaaactgatatatgacagaggtttaatgggcgcggttcatagctggtgtgaagcattctcgacatatccaaggacatatgatctcctccatgcttgggatattatatcggatatcaagaaaaaaggatgtagtgaagtggatttgttactggagatggatcgaatactgcgcccgagcgggtttataatcataagggataaacaaagagtggtggattttgtgaagaagtatctaaaggcattgcattgggaagaagtaggtaccaagacagactcagattcagatcaagattcagacaatgttgtattcattgtccagaagaagctgtggttgactagtgaaagccttagagatatggagtgatgagtaagccacacgatacacaaaaattacgaccaatgatcatacaaccaacaaatttcattattgtagtagcaacattatttattaacgttgtttttaatttttctaattattgtatctttcttacattcttataagtgatgttgtttgtatgattttggtagagaagagaagacacgtataagtaaagaacgatagattcttttg

SEQ ID NO: 9305 - protein, 428 aa, Arabidopsis thaliana
HYGADKYIASMANMLNYPNNVLNNGGRLRTVFDVGCGVASFGGYLLSSDILTMSLAPNDVHQNQIQFALERGIPASLGVLGTKRLPYPSRSFELSHCSRCRIDWLQRDGILLLELDRVLRPGGYFAYSSPEAYAQDEEDLRIWREMSALVERMCWKIAAKRNQTVIWQKPLTNDCYLEREPGTQPPLCRSDNDPDAVWGVNMEACITSYSDHDHKTKGSGLAPWPARLTSPPPRLADFGYSTGMFEKDTELWRQRVDTYWDLLSPRIESDTVRNIMDMKASMGSFAAALKEKDVWVMNVVPEDGPNTLKLIYDRGLMGAVHSWCEAFSTYPRTYDLLHAWDIISDIKKKGCSEVDLLLEMDRILRPSGFIIIRDKQRVVDFVKKYLKALHWEEVGTKTDSDSDQDSDNVVFIVQKKLWLTSESLRDME

SEQ ID NO: 9306 - protein, 418 aa, Arabidopsis thaliana
MANMLNYPNNVLNNGGRLRTVFDVGCGVASFGGYLLSSDILTMSLAPNDVHQNQIQFALERGIPASLGVLGTKRLPYPSRSFELSHCSRCRIDWLQRDGILLLELDRVLRPGGYFAYSSPEAYAQDEEDLRIWREMSALVERMCWKIAAKRNQTVIWQKPLTNDCYLEREPGTQPPLCRSDNDPDAVWGVNMEACITSYSDHDHKTKGSGLAPWPARLTSPPPRLADFGYSTGMFEKDTELWRQRVDTYWDLLSPRIESDTVRNIMDMKASMGSFAAALKEKDVWVMNVVPEDGPNTLKLIYDRGLMGAVHSWCEAFSTYPRTYDLLHAWDIISDIKKKGCSEVDLLLEMDRILRPSGFIIIRDKQRVVDFVKKYLKALHWEEVGTKTDSDSDQDSDNVVFIVQKKLWLTSESLRDME

SEQ ID NO: 9307 - protein, 415 aa, Arabidopsis thaliana
MLNYPNNVLNNGGRLRTVFDVGCGVASFGGYLLSSDILTMSLAPNDVHQNQIQFALERGIPASLGVLGTKRLPYPSRSFELSHCSRCRIDWLQRDGILLLELDRVLRPGGYFAYSSPEAYAQDEEDLRIWREMSALVERMCWKIAAKRNQTVIWQKPLTNDCYLEREPGTQPPLCRSDNDPDAVWGVNMEACITSYSDHDHKTKGSGLAPWPARLTSPPPRLADFGYSTGMFEKDTELWRQRVDTYWDLLSPRIESDTVRNIMDMKASMGSFAAALKEKDVWVMNVVPEDGPNTLKLIYDRGLMGAVHSWCEAFSTYPRTYDLLHAWDIISDIKKKGCSEVDLLLEMDRILRPSGFIIIRDKQRVVDFVKKYLKALHWEEVGTKTDSDSDQDSDNVVFIVQKKLWLTSESLRDME

SEQ ID NO: 9308 - DNA, 742 bp, Arabidopsis thaliana
ggacttcctgaaaaaaaaaaaatcatttcttctctgaaacgaaaaaccaaagaaacgagaagaagaagctatggcggatcagctaactgatgaacagatctctgagtttaaggaagcttttagcctcttcgacaaagatggagatggttgcatcaccacaaaggagctgggaacagtgatgcggtcactagggcagaacccaacagaagctgagctacaagacatgatcaacgaggttgacgctgatggaaacggaaccattgacttccctgagttcttaaacctaatggctaaaaagatgaaggacacagactcggaggaagagctgaaagaagctttcagggtgttcgacaaagaccagaacggtttcatatccgctgcagagcttcgccatgtgatgacgaatctaggtgagaaactgactgatgaagaggtcgaggagatgattcgtgaagcagatgttgatggagatggtcagataaactacgaggagtttgtcaagattatgatggctaagtgatgatgataagaaaaaaatgaagaataaaagtggtgatgtgatgaccttttaggcttttactatctacaaaagaatgattcgacctttaatgtcttgggtttgatttgagcctagtagtttcttaaggttttaacagactgaatttgtgacttatctttttttattttgttggtttctttctcgttggcataatggcatgtttagatttcggtaaaaaaaacc

SEQ ID NO: 9309 - protein, 149 aa, Arabidopsis thaliana
MADQLTDEQISEFKEAFSLFDKDGDGCITTKELGTVMRSLGQNPTEAELQDMINEVDADGNGTIDFPEFLNLMAKKMKDTDSEEELKEAFRVFDKDQNGFISAAELRHVMTNLGEKLTDEEVEEMIREADVDGDGQINYEEFVKIMMAK

SEQ ID NO: 9310 - protein, 113 aa, Arabidopsis thaliana
MRSLGQNPTEAELQDMINEVDADGNGTIDFPEFLNLMAKKMKDTDSEEELKEAFRVFDKDQNGFISAAELRHVMTNLGEKLTDEEVEEMIREADVDGDGQINYEEFVKIMMAK

SEQ ID NO: 9311 - protein, 98 aa, Arabidopsis thaliana
MINEVDADGNGTIDFPEFLNLMAKKMKDTDSEEELKEAFRVFDKDQNGFISAAELRHVMTNLGEKLTDEEVEEMIREADVDGDGQINYEEFVKIMMAK

SEQ ID NO: 9312 - DNA, 1102 bp, Arabidopsis thaliana
tccatttctcattgtatcttcatcagtctcttcttattccattttttcaaaccacttgcaaaattcgaatcagatcttctcttcaatcgaaaaaaaagaaaggatttgctctagattgttgaatcgaagatgtcgacaagggaagagaatgtttacatggcgaaattagccgaacaagctgaacgttacgaagaaatggttgaattcatggagaaagttgcgaaaactgttgatgttgaggaactttcagttgaagagaggaatcttctctctgttgcttacaagaacgtgattggagcgagaagagcttcgtggagaatcatttcttcgattgagcagaaagaagagagcaaagggaacgaagatcatgttgctattatcaaggattacagaggaaagattgaatccgagcttagcaaaatctgtgatgggattttgaatgttcttgaagctcatcttattccttctgcttcaccagctgaatctaaagtgttttatcttaagatgaagggtgattatcataggtatcttgctgagtttaaggctggtgctgaaaggaaagaagctgctgaaagcactttggttgcttacaagtctgcttccgacattgccactgctgagttagctcctactcacccgataaggcttggtcttgcactcaacttctctgtgttttactatgaaatcctcaactcgcctgatcgtgcttgcagcctcgcaaagcaggcgtttgatgatgcaatcgctgagttagatacattgggtgaggaatcatacaaggacagtacactgattatgcagcttcttagagacaatctcactctctggacttcagatatgactgacgaagcaggagatgagattaaggaggcatcaaagcccgatggtgccgagtaaacccgaagaagaggaagagtcattttataatggtagaaaactttcatgtgataatctgagtgagggatagctcaggattcttataagagacacagttttattgttgtttgtttgttttgaaactacttgcgatttatcattcctcctttagcttcctcaatatttcctattctcctttctaatgaaatcaaaacttggttatttc

SEQ ID NO: 9313 - protein, 255 aa, Arabidopsis thaliana
MSTREENVYMAKLAEQAERYEEMVEFMEKVAKTVDVEELSVEERNLLSVAYKNVIGARRASWRIISSIEQKEESKGNEDHVAIIKDYRGKIESELSKICDGILNVLEAHLIPSASPAESKVFYLKMKGDYHRYLAEFKAGAERKEAAESTLVAYKSASDIATAELAPTHPIRLGLALNFSVFYYEILNSPDRACSLAKQAFDDAIAELDTLGEESYKDSTLIMQLLRDNLTLWTSDMTDEAGDEIKEASKPDGAE

SEQ ID NO: 9314 - protein, 246 aa, Arabidopsis thaliana
MAKLAEQAERYEEMVEFMEKVAKTVDVEELSVEERNLLSVAYKNVIGARRASWRIISSIEQKEESKGNEDHVAIIKDYRGKIESELSKICDGILNVLEAHLIPSASPAESKVFYLKMKGDYHRYLAEFKAGAERKEAAESTLVAYKSASDIATAELAPTHPIRLGLALNFSVFYYEILNSPDRACSLAKQAFDDAIAELDTLGEESYKDSTLIMQLLRDNLTLWTSDMTDEAGDEIKEASKPDGAE

SEQ ID NO: 9315 - protein, 233 aa, Arabidopsis thaliana
MVEFMEKVAKTVDVEELSVEERNLLSVAYKNVIGARRASWRIISSIEQKEESKGNEDHVAIIKDYRGKIESELSKICDGILNVLEAHLIPSASPAESKVFYLKMKGDYHRYLAEFKAGAERKEAAESTLVAYKSASDIATAELAPTHPIRLGLALNFSVFYYEILNSPDRACSLAKQAFDDAIAELDTLGEESYKDSTLIMQLLRDNLTLWTSDMTDEAGDEIKEASKPDGAE

SEQ ID NO: 9316 - DNA, 1439 bp, Arabidopsis thaliana
gttaccaaacctaatttgaagtattaaagccgttcccctgactaaaaacctttgaacactccgatccaaaaaaaagaagagaaaaacctttgcatacagctaaaaacgatgtcgtctctctctcgctttctccttcgtggcaacttcagcttcagcacccacacgaatcgccgcttcttctccgccgttaccgctgctgcagccacaccctcgccacccaaaccgtccctcatcaccctcgtaaatgacgaacgcgaccccaaattcatcacggagaagttcaagaaagcctgccaagcagagtggttccggaagaatatagctgtctatgagagaaccgttcgccgtctcgccgcagccaagaagtttgagtgggtcgaggagatcctggaggagcagaacaagtatccaaacatgtcaaaggaaggattcgtggcgaggattatcaatctctatggacgagtcggtatgtttgagaatgcacagaaagtgttcgacgaaatgcctgagagaaactgcaagagaacagcgttgtctttcaacgcattactgaatgcctgtgtgaactccaagaagtttgatttggttgaaggtatcttcaaggagttgccaggtaagctctcgattgaaccagatgttgcatcttacaatactttgatcaagggattgtgtggaaagggttccttcactgaagctgttgcgttgattgatgagattgagaacaagggtttgaaacctgatcatatcaccttcaatatacttttacatgagtcgtatacaaaagggaagtttgaggaaggagaacagatatgggctagaatggtagagaagaatgttaagcgagacatccgtagttacaatgctcggttgttaggactagccatggagaataaatcagaagagatggttagtctctttgacaaacttaagggtaatgagctcaaacctgatgttttcacattcactgccatgattaaaggatttgtcagtgaaggaaaattagatgaagccataacgtggtacaaggaaatcgagaagaatggttgtcgcccgttgaaatttgtctttaactcattgcttcctgcaatatgtaaggcgggcgatttagagtctgcttatgagctctgcaaggaaatatttgctaagcgtctgctagtcgatgaggctgtcctgcaggaggtagttgatgcattggtgaaagggtccaagcaagacgaagctgaagagattgtcgagctagcaaagacgaatgactatttgcagtgcaagcttcgtctctttcccaaagagtagttaattggcaaggcttattgactagtttttaatttagtctgtgtttccctctttttaatgtcttgttgcaaactgcgagtgcggtgatttaataattgaactatctctatctgtagtgtgtttgtgttgctttcaattctcaaagt

SEQ ID NO: 9317 - protein, 394 aa, Arabidopsis thaliana
MSSLSRFLLRGNFSFSTHTNRRFFSAVTAAAATPSPPKPSLITLVNDERDPKFITEKFKKACQAEWFRKNIAVYERTVRRLAAAKKFEWVEEILEEQNKYPNMSKEGFVARIINLYGRVGMFENAQKVFDEMPERNCKRTALSFNALLNACVNSKKFDLVEGIFKELPGKLSIEPDVASYNTLIKGLCGKGSFTEAVALIDEIENKGLKPDHITFNILLHESYTKGKFEEGEQIWARMVEKNVKRDIRSYNARLLGLAMENKSEEMVSLFDKLKGNELKPDVFTFTAMIKGFVSEGKLDEAITWYKEIEKNGCRPLKFVFNSLLPAICKAGDLESAYELCKEIFAKRLLVDEAVLQEVVDALVKGSKQDEAEEIVELAKTNDYLQCKLRLFPKE

SEQ ID NO: 9318 - protein, 292 aa, Arabidopsis thaliana
MSKEGFVARIINLYGRVGMFENAQKVFDEMPERNCKRTALSFNALLNACVNSKKFDLVEGIFKELPGKLSIEPDVASYNTLIKGLCGKGSFTEAVALIDEIENKGLKPDHITFNILLHESYTKGKFEEGEQIWARMVEKNVKRDIRSYNARLLGLAMENKSEEMVSLFDKLKGNELKPDVFTFTAMIKGFVSEGKLDEAITWYKEIEKNGCRPLKFVFNSLLPAICKAGDLESAYELCKEIFAKRLLVDEAVLQEVVDALVKGSKQDEAEEIVELAKTNDYLQCKLRLFPKE

SEQ ID NO: 9319 - protein, 274 aa, Arabidopsis thaliana
MFENAQKVFDEMPERNCKRTALSFNALLNACVNSKKFDLVEGIFKELPGKLSIEPDVASYNTLIKGLCGKGSFTEAVALIDEIENKGLKPDHITFNILLHESYTKGKFEEGEQIWARMVEKNVKRDIRSYNARLLGLAMENKSEEMVSLFDKLKGNELKPDVFTFTAMIKGFVSEGKLDEAITWYKEIEKNGCRPLKFVFNSLLPAICKAGDLESAYELCKEIFAKRLLVDEAVLQEVVDALVKGSKQDEAEEIVELAKTNDYLQCKLRLFPKE

SEQ ID NO: 9320 - DNA, 1522 bp, Arabidopsis thaliana
attttttgcatattgtctacttttagattttgatatctattggaactcttactagctcattcatccgtcggcctgtgaattgtgtttctgaagtttccccaatggctgcttttggagatgacattgtgattgtagcggcatatcgtaccgccatttgcaaagcgagacgtggaggtttcaaagacactcttcctgatgatcttcttgcttctgttcttaaggctgtagtggaaagaacatctttggatccaagtgaagttggtgatatcgttgttggtaccgtgatagcgcctggttctcagagagcaatggagtgtagagttgcagcttattttgctggttttcctgactccgtgccagttagaactgtcaatagacaatgctcatcaggactacaagcagttgctgatgttgctgcttccattagagctggttattacgacattggtattggtgctggagtggaatcaatgtcaactgatcatattcctggaggcggctttcatggctctaatccaagagcacaggatttcccaaaagcccgtgattgtttgcttccaatgggaattacttctgaaaacgttgcagaaaggttcggtgtcacaagagaagagcaagatatggctgcggtggagtctcacaaacgcgctgcagctgcaatcgcgtctggtaaactcaaggatgaaatcattcctgttgctactaagattgtggaccctgagactaaagcagagaaggcaatcgtcgtatctgttgatgacggtgtacgtccaaactcaaacatggcagatttggcaaagctgaagactgtctttaaacagaacggttccaccacagctggcaatgctagtcagatcagtgatggtgctggagcagtactgctaatgaagagaagtttggctatgaagaagggacttcccattcttggagtattcaggagttttgctgttactggtgtggaaccatctgtaatgggtattggtccagctgttgccattcccgctgcaactaagctcgcagggctcaacgtcagcgatattgatctattcgagatcaatgaggcatttgcatctcagtatgtgtactcttgcaagaagttagagctggatatggaaaaggtcaatgttaatggaggagccattgctattggccatcccctgggtgctacaggagctcgatgtgttgcgacattgttgcacgagatgaagcggagaggaaaagattgccgctttggagtaatctcaatgtgcataggcactggaatgggagctgcagctgtttttgagaggggagactctgttgataacttgtccaacgctcgtgtggctaacggggatagtcattagaacatcgaagagagcttgaataagtagaagtaatgatgcattgagtctaataaatatgatgctttagctctttcacattgctgaacaatgaaaacttttgtcattctgagtttaaaatcaactacttttctctgaacaaagtgttaaatctaaaaccaaaagttacatccttccgc

SEQ ID NO: 9321 - protein, 414 aa, Arabidopsis thaliana
MAAFGDDIVIVAAYRTAICKARRGGFKDTLPDDLLASVLKAVVERTSLDPSEVGDIVVGTVIAPGSQRAMECRVAAYFAGFPDSVPVRTVNRQCSSGLQAVADVAASIRAGYYDIGIGAGVESMSTDHIPGGGFHGSNPRAQDFPKARDCLLPMGITSENVAERFGVTREEQDMAAVESHKRAAAAIASGKLKDEIIPVATKIVDPETKAEKAIVVSVDDGVRPNSNMADLAKLKTVFKQNGSTTAGNASQISDGAGAVLLMKRSLAMKKGLPILGVFRSFAVTGVEPSVMGIGPAVAIPAATKLAGLNVSDIDLFEINEAFASQYVYSCKKLELDMEKVNVNGGAIAIGHPLGATGARCVATLLHEMKRRGKDCRFGVISMCIGTGMGAAAVFERGDSVDNLSNARVANGDSH

SEQ ID NO: 9322 - protein, 345 aa, Arabidopsis thaliana
MECRVAAYFAGFPDSVPVRTVNRQCSSGLQAVADVAASIRAGYYDIGIGAGVESMSTDHIPGGGFHGSNPRAQDFPKARDCLLPMGITSENVAERFGVTREEQDMAAVESHKRAAAAIASGKLKDEIIPVATKIVDPETKAEKAIVVSVDDGVRPNSNMADLAKLKTVFKQNGSTTAGNASQISDGAGAVLLMKRSLAMKKGLPILGVFRSFAVTGVEPSVMGIGPAVAIPAATKLAGLNVSDIDLFEINEAFASQYVYSCKKLELDMEKVNVNGGAIAIGHPLGATGARCVATLLHEMKRRGKDCRFGVISMCIGTGMGAAAVFERGDSVDNLSNARVANGDSH

SEQ ID NO: 9323 - protein, 291 aa, Arabidopsis thaliana
MSTDHIPGGGFHGSNPRAQDFPKARDCLLPMGITSENVAERFGVTREEQDMAAVESHKRAAAAIASGKLKDEIIPVATKIVDPETKAEKAIVVSVDDGVRPNSNMADLAKLKTVFKQNGSTTAGNASQISDGAGAVLLMKRSLAMKKGLPILGVFRSFAVTGVEPSVMGIGPAVAIPAATKLAGLNVSDIDLFEINEAFASQYVYSCKKLELDMEKVNVNGGAIAIGHPLGATGARCVATLLHEMKRRGKDCRFGVISMCIGTGMGAAAVFERGDSVDNLSNARVANGDSH

SEQ ID NO: 9324 - DNA, 1717 bp, Arabidopsis thaliana
aaagaaagagaaagagaagagctggattcacatggtcttgttctttctctctccttcttttctcatcttgcggcttccctttctctctctatcgccacaatgatcattaccaaccaaactgattgaaactcatttgttctctctctctcaaatccactctctctctttcttttctcttctcctctctgtgtctctatcgccatggctgatgataaggagatgcctgctgctgtagttgatggacatgatcaagtcactggtcatattatttccaccacaatcggtggcaaaaatggtgaaccaaaacagacaattagttacatggcggagcgagttgttggtacaggctcgttcgggatcgttttccaagcaaaatgtttggagactggagaaaccgtggcgataaagaaggttttgcaagatagaagatacaagaaccgagaacttcagttgatgcgtgtgatggatcatccgaatgtggtttgtttgaagcattgcttcttttcgactacaagtaaagacgagcttttcttgaacttggttatggagtatgtccctgagagcttgtatcgagttctgaaacattatagtagtgcaaaccaaagaatgcctcttgtctatgttaaactttacatgtatcagatcttccggggacttgcttacattcacaatgttgctggagtttgtcacagagatctaaagcctcaaaatcttctggttgatcctcttactcatcaagtcaaaatctgtgactttggcagtgcgaaacagctcgttaaaggtgaagccaacatttcttacatctgctcacgattctaccgtgcacccgagctcatatttggtgccactgagtacacaacttctattgatatctggtctgctggttgtgttcttgctgagcttcttcttggtcagccattatttcccggagaaaatgctgtggatcagctcgttgaaattataaaagttcttggtacaccaactcgagaagaaatccgttgtatgaatccacattacacagatttcaggtttccacagataaaggcacatccctggcacaagatcttccacaaaaggatgcccccagaagcgattgattttgcatcaaggctgcttcaatactctccaagtctaagatgcacagcgctcgaagcttgtgcacatccgttctttgatgaactcagagaaccaaacgctcgtttaccaaatggacggcctttcccgcctctcttcaacttcaaacaagaagtagctggatcatcacctgaactggtcaacaagttgattccagaccatatcaagagacaattgggtctaagcttcttgaatcaatctggaacttaaaagggatcctgcaaaagacaactacttttttatatataatgtaccattacacgagccacaaggtcgtagttgaaggcaaacgtggaggacacaattcaaagtttttcctcctcaaactcgttcagacaaagccagctgctagcaaaaccaactacccaaatctgcgaaaacaaaaactctccagtgttgtatctgcttatttctcttctcttttcaagtttggtgaaaaacacagtctcctctttgcttcatttcttctttctttcccccttatgtaaatgagtttagtcagaagtttttttatatagtaaagtttgggcagaaggtgaagaatgtaatcaaagtgatactctttcaacgaggagcttctttc

SEQ ID NO: 9325 - protein, 380 aa, Arabidopsis thaliana
MADDKEMPAAVVDGHDQVTGHIISTTIGGKNGEPKQTISYMAERVVGTGSFGIVFQAKCLETGETVAIKKVLQDRRYKNRELQLMRVMDHPNVVCLKHCFFSTTSKDELFLNLVMEYVPESLYRVLKHYSSANQRMPLVYVKLYMYQIFRGLAYIHNVAGVCHRDLKPQNLLVDPLTHQVKICDFGSAKQLVKGEANISYICSRFYRAPELIFGATEYTTSIDIWSAGCVLAELLLGQPLFPGENAVDQLVEIIKVLGTPTREEIRCMNPHYTDFRFPQIKAHPWHKIFHKRMPPEAIDFASRLLQYSPSLRCTALEACAHPFFDELREPNARLPNGRPFPPLFNFKQEVAGSSPELVNKLIPDHIKRQLGLSFLNQSGT

SEQ ID NO: 9326 - protein, 374 aa, Arabidopsis thaliana
MPAAVVDGHDQVTGHIISTTIGGKNGEPKQTISYMAERVVGTGSFGIVFQAKCLETGETVAIKKVLQDRRYKNRELQLMRVMDHPNVVCLKHCFFSTTSKDELFLNLVMEYVPESLYRVLKHYSSANQRMPLVYVKLYMYQIFRGLAYIHNVAGVCHRDLKPQNLLVDPLTHQVKICDFGSAKQLVKGEANISYICSRFYRAPELIFGATEYTTSIDIWSAGCVLAELLLGQPLFPGENAVDQLVEIIKVLGTPTREEIRCMNPHYTDFRFPQIKAHPWHKIFHKRMPPEAIDFASRLLQYSPSLRCTALEACAHPFFDELREPNARLPNGRPFPPLFNFKQEVAGSSPELVNKLIPDHIKRQLGLSFLNQSGT

SEQ ID NO: 9327 - protein, 340 aa, Arabidopsis thaliana
MAERVVGTGSFGIVFQAKCLETGETVAIKKVLQDRRYKNRELQLMRVMDHPNVVCLKHCFFSTTSKDELFLNLVMEYVPESLYRVLKHYSSANQRMPLVYVKLYMYQIFRGLAYIHNVAGVCHRDLKPQNLLVDPLTHQVKICDFGSAKQLVKGEANISYICSRFYRAPELIFGATEYTTSIDIWSAGCVLAELLLGQPLFPGENAVDQLVEIIKVLGTPTREEIRCMNPHYTDFRFPQIKAHPWHKIFHKRMPPEAIDFASRLLQYSPSLRCTALEACAHPFFDELREPNARLPNGRPFPPLFNFKQEVAGSSPELVNKLIPDHIKRQLGLSFLNQSGT

SEQ ID NO: 9328 - DNA, 1350 bp, Arabidopsis thaliana
aagaccacactactctctctatctctctctatctctctatctctctcatttcttcctgcgtcaatggcgactcaaggtcaggttatcacttgcaaagctgcggtggcttacgagccgaacaagcctctggtcatcgaagatgtgcaagtggctccacctcaagctggtgaggttcggatcaagatcctctacactgctctttgtcacaccgacgcttacacttggagcggcaaggatcctgaaggtctctttccttgtattctaggtcatgaggctgctgggattgttgagagtgttggtgaaggagtaactgaagttcaagctggagatcatgttatcccttgttatcaagctgagtgtcgtgaatgcaagttttgcaaatctgggaagactaacctttgtggcaaggtgagatctgctactggtgttgggattatgatgaatgaccgtaagtcgaggttctcggttaatgggaaacccatttatcacttcatgggtacttccacgtttagtcagtatactgttgttcatgatgttagcgtcgccaaaattgatcctactgctcctttggataaagtttgccttcttggatgtggtgttcccactggccttggagcagtttggaatactgcaaaagtagaaccagggtcaaatgttgccattttcggtcttggcactgttggacttgctgttgccgagggtgcgaaaacagctggtgcttcaaggatcattggcattgacatcgatagcaagaagtatgaaactgcaaagaagtttggtgttaacgaatttgtgaacccaaaggatcacgacaagccaattcaggaagtgattgtcgatctcactgatggcggtgttgactacagctttgagtgcatcgggaatgtctccgtgatgagagctgcattggagtgctgtcacaagggatggggaacttcggtcatagttggtgttgcagcatcaggacaagagatatcaactcgtccgttccaactcgtgactggccgtgtgtggaaaggaacagcttttggtggtttcaagagtcgaacccaagtgccttggcttgtagaaaagtacatgaacaaggagataaaagtggatgaatacataacacacaacttgaccttgggagaaatcaataaggctttcgatctattgcacgaaggtacttgccttcgttgtgtcctcgataccagcaaatgactatatgggtcctctctgctttaatctatgtgttcttgtgactttcgtcttttatcggtattgacatttcctaagagcaacagactactctactcttgtgtgtctcgtttctatcttatgcttcaataaaatatcaattaagaccgc

SEQ ID NO: 9329 - protein, 400 aa, Arabidopsis thaliana
KTTLLSLSLSISLSLSFLPASMATQGQVITCKAAVAYEPNKPLVIEDVQVAPPQAGEVRIKILYTALCHTDAYTWSGKDPEGLFPCILGHEAAGIVESVGEGVTEVQAGDHVIPCYQAECRECKFCKSGKTNLCGKVRSATGVGIMMNDRKSRFSVNGKPIYHFMGTSTFSQYTVVHDVSVAKIDPTAPLDKVCLLGCGVPTGLGAVWNTAKVEPGSNVAIFGLGTVGLAVAEGAKTAGASRIIGIDIDSKKYETAKKFGVNEFVNPKDHDKPIQEVIVDLTDGGVDYSFECIGNVSVMRAALECCHKGWGTSVIVGVAASGQEISTRPFQLVTGRVWKGTAFGGFKSRTQVPWLVEKYMNKEIKVDEYITHNLTLGEINKAFDLLHEGTCLRCVLDTSK

SEQ ID NO: 9330 - protein, 379 aa, Arabidopsis thaliana
MATQGQVITCKAAVAYEPNKPLVIEDVQVAPPQAGEVRIKILYTALCHTDAYTWSGKDPEGLFPCILGHEAAGIVESVGEGVTEVQAGDHVIPCYQAECRECKFCKSGKTNLCGKVRSATGVGIMMNDRKSRFSVNGKPIYHFMGTSTFSQYTVVHDVSVAKIDPTAPLDKVCLLGCGVPTGLGAVWNTAKVEPGSNVAIFGLGTVGLAVAEGAKTAGASRIIGIDIDSKKYETAKKFGVNEFVNPKDHDKPIQEVIVDLTDGGVDYSFECIGNVSVMRAALECCHKGWGTSVIVGVAASGQEISTRPFQLVTGRVWKGTAFGGFKSRTQVPWLVEKYMNKEIKVDEYITHNLTLGEINKAFDLLHEGTCLRCVLDTSK

SEQ ID NO: 9331 - protein, 255 aa, Arabidopsis thaliana
MMNDRKSRFSVNGKPIYHFMGTSTFSQYTVVHDVSVAKIDPTAPLDKVCLLGCGVPTGLGAVWNTAKVEPGSNVAIFGLGTVGLAVAEGAKTAGASRIIGIDIDSKKYETAKKFGVNEFVNPKDHDKPIQEVIVDLTDGGVDYSFECIGNVSVMRAALECCHKGWGTSVIVGVAASGQEISTRPFQLVTGRVWKGTAFGGFKSRTQVPWLVEKYMNKEIKVDEYITHNLTLGEINKAFDLLHEGTCLRCVLDTSK

SEQ ID NO: 9332 - DNA, 588 bp, Arabidopsis thaliana
acacttcttcatcgccgtctgcacaaaaccctaatctcacaatctcctacgagatctatcagtctccacgaagatgaaggttgttgccgcatacttgctcgctgttttgagcggaaaagcttcaccaaccagtgccgatatcaagactatccttggatcagttggtgctgagacagaggattctcagattgagcttttgttgaaggaagtgaaaggaaaagatttggctgagttgattgctgctggaagggagaagttagcttcagtgccgtctggtggcggaggtggtgttgcggttgcttctgctacatctggaggtggaggaggtggtggtgcttctgctgctgagtccaagaaagaagagaagaaggaagaaaaggaagaatccgatgatgacatgggtttcagtctattcgagtaagctggtagtagcatgaaaagtccggttttgttgtcctcttttaatattgtaaccttttgaaatctatatgttgttgttgtttagtttgtattcgatcatcttttttagacattgctgaaattctcaagagtttttgacccgaatgtcatttgcactttgttgttagc

SEQ ID NO: 9333 - protein, 115 aa, Arabidopsis thaliana
MKVVAAYLLAVLSGKASPTSADIKTILGSVGAETEDSQIELLLKEVKGKDLAELIAAGREKLASVPSGGGGGVAVASATSGGGGGGGASAAESKKEEKKEEKEESDDDMGFSLFE

SEQ ID NO: 9334 - DNA, 871 bp, Arabidopsis thaliana
attcattcatcacttatacgatcacttcccaaattattgattttttttacccatttctctcatcgcacggtgatattgagaatcgccgacctgaatcgatcggaaaactttctctgattaccggcggtcaacaccgctgaacacatatgtttgtttgacgacctcttctctccgcgatctttacctcaacaacgagatctgtttccacgaaagaaaggaggatgtcgacgccagcaaggaagaggttaatgagggatttcaagaggttgcagcaagacccacctgcgggtattagtggtgctccacaggacaacaacattatgctctggaatgctgtcatatttgggcctgatgacacaccatgggatggaggtactttcaaactctcactgcagttctctgaagattatcccaataaaccaccaacagttcggtttgtgtcacggatgtttcatcctaatatttatgcagatgggagtatctgcttggacattctacaaaaccagtggagtccaatctatgatgttgctgctatacttacctccatccagtccttgctctgtgaccctaatccgaattctcctgcaaactcggaagctgctcggatgtacagcgaaagcaagcgcgagtacaacaggagagtgcgtgatgttgttgagcaaagctggactgctgactagtagtagtttgttgtaagcgttgtagctctctctactttctctcaatcacgattcagcaacagctttcttctcttttcattcatgtcttgtgtttccaaaactatttaagtgattccatgctttgatgtaacccaacatccttaaaaaaacaactttgtaccaaaccatctgaattattcacttttgtgtat

SEQ ID NO: 9335 - protein, 152 aa, Arabidopsis thaliana
MSTPARKRLMRDFKRLQQDPPAGISGAPQDNNIMLWNAVIFGPDDTPWDGGTFKLSLQFSEDYPNKPPTVRFVSRMFHPNIYADGSICLDILQNQWSPIYDVAAILTSIQSLLCDPNPNSPANSEAARMYSESKREYNRRVRDVVEQSWTAD

SEQ ID NO: 9336 - protein, 143 aa, Arabidopsis thaliana
MRDFKRLQQDPPAGISGAPQDNNIMLWNAVIFGPDDTPWDGGTFKLSLQFSEDYPNKPPTVRFVSRMFHPNIYADGSICLDILQNQWSPIYDVAAILTSIQSLLCDPNPNSPANSEAARMYSESKREYNRRVRDVVEQSWTAD

SEQ ID NO: 9337 - protein, 121 aa, Arabidopsis thaliana
MLSYLGLMTHHGMEVLSNSHCSSLKIIPINHQQFGLCHGCFILIFMQMGVSAWTFYKTSGVQSMMLLLYLPPSSPCSVTLIRILLQTRKLLGCTAKASASTTGECVMLLSKAGLLTSSSLL

SEQ ID NO: 9338 - DNA, 3831 bp, Arabidopsis thaliana
gtgtttctctctctctttcacgcgtttctcttcaaaggctacaccggaggcgatttggagtttaatcggaaccactcggacgagtctccgatgtagaaacgaggaagattacttcaattgagattaagaggcatagagagagagatttgtgtattcgatcgaatcaagcttgggtttgttagtaatggcgagaatagctatagttttagatctactgaagaaatctcaatccaagcacagtcttcactcatcttccttctcttccgccgccactgctccctttgcgtctaggtttctattcggttctttcgagcctcgagtttcgtatcgtggtgttgctgctggaatagacgatgattaccttggtgctatacggaaaatgtctgcggatggaaacttctaaagggtaacatcatctttaatatgatttcatttaaagaaaatgtcatgctttatttattaattacactactaaatgatataatttagtgattatgtagaatgtttaatttcttgttgatatataagaatagtaatatcaccaatcaaaatgaagttgcatcaaaaaagggccagagagaaagagctttgtgagcagccaaaaaccaaagtgggcaagtcttctttcttagtcgtcgttactaaaacacaaattgtttattcggcatttgtgtttaattaagttctttaattaatgattaaagatcttaaatttgtgttattaatggctaaagttaaacgattcaacaacggcatccaaaatctttaaatttttccgattcttccgttgcaagtcaacgttttccttcgcttcctcctaccttcttcttcttcttcacaaaaatctgaactttaaatttgaatttgcccatatttttagacccacatttattcatatagatttgatctgagtttgtattatctcaaagttttatccttttgttgaatcttgatctttcgattagtccccaccaagcaccaagtgatcgatcttttgtctcactgaacttggttatgcttgaaatttgatctgacaactaaaagtttcctgctttggaggtttttgattttgtatcatccagtttataacgagactatgtcaatgggaggagggtcaaaccacgagtttggccagtggcttgaccagcaactcgttccgttagctacgagtagtggctctttgatggttgaattgttacatggtaacttagacatttgggttaaggaagctaaacatcttcctaacatgatatgttaccgtaacaagcttgttggtgggatttcgttttctgagttaggtcggaggattcgtaaagtggatggtgagaagtcttctaagttcacaagtgatccttatgttactgtctctatctctggtgctgtcattggtagaacttttgttattagcaatagtgagaatcctgtgtggatgcagcatttcgatgtacccgttgctcatagtgctgctgaagtacattttgttgtgaaagacaatgatcctattggatcaaagatcataggagttgttggaataccaaccaagcagttgtgttccgggaatagaatcgaagggctgtttccgatacttaacagtagtgggaagccttgtagaaaaggtgctatgttgagtctgtctattcagtatactccaatggaaagaatgagactttaccaaaagggtgttggttctggtgttgagtgtgtaggagttcccggtacatacttccctttgaggaaaggcggtagggttactctttatcaggatgctcatgtcgatgacggtactcttccgagtgtacatcttgatggtgggattcagtatagacatggaaaatgctgggaggatatggctgatgcgatacgacgggcaaggaggctgatttatatcacaggttggtcagttttccatccggttaggctggttcgtcgtaacaatgatccgaccgaaggtacattaggggagttacttaaagtcaaatctcaagaaggtgttagagtgttggttttggtgtgggatgatccaacttcaatgagttttccgggattcagtacaaaaggacttatgaacacaagcgatgaggagactcgccgttttttcaagcactcatcggtgcaagttctcctttgtcctagatatggggggaaaggtcacagcttcataaaaaaatctgaagttgaaacaatctacacgcatcatcagaaaactatgattgtagatgctgaagcagctcagaaccgaagaaagattgtagcatttgttggagggctagacttgtgcaacggacgatttgatactcccaagcattctcttttcgggacattaaagacactccataaagatgacttccataacccaaattttgtgactactgaggatgttggaccaagagaaccatggcatgatctgcacagcaaaattgatggtccagctgcatatgatgtgcttgctaatttcgaggaacgctggatggcttcaaaacctcgtggaatagggaaaggaagaacttcttttgacgattctttgcttaggataaacagaattcctgacatcatgggactttctgaagcttcttctgctaatgataatgatccagagtcttggcatgttcaggttttccgttctattgattcgacttcagtcaaagggtttccaaaggacccagaggaagctactggaagaaatcttctatgtgggaagaacattctcatagatatgagcatacatgcagcttatgttaaggcgatacgatctgctcagcacttcatttacattgagaaccaatattttcttggatcttcattcaactgggattcaaacaaggacttgggtgctaataatctaatcccgatggaaatcgcgcttaagattgctaataagattagagcgagggagaatttcgctgcttatattgtcattccaatgtggccagaaggtgctccaacaagtaagcctattcaaagaattctctactggcagcacaaaaccatgcaaatgatgtatcaaaccatctacaaggcacttctggaagttggtcttgatggccagcttgagccacaagactttttgaacttcttctgtcttggaaacagagaggttggaaccagagaggttcctgatggaacagttaatgtatataattgtcctcggaagccacctcagccaaatgctgcacaggtgcaagctttgaagagtcgaagattcatgatatatgttcattccaaaggtatggtagtggatgatgagtttgtcttaattggttccgcgaatatcaaccagagatccttggaaggaactagagacactgaaatcgctatgggagggtatcagccacatcattcatgggctaagaaaggttctcgtcctcgtggtcagatctttggatatagaatgtcgttatgggcagaacatctagggtttctagagcaagaattcgaggaaccagagaacatggaatgcgtgagacgagttaggcaattgagtgagctgaattggggacagtatgcagcagaggaagtcacagagatgtcaggtcatcttcttaagtatccagttcaagtcgataaaacaggcaaagtgagttctcttcctggatgcgagacattcccagatctcggtggcaagatcataggatcattccttactctacaagaaaacctcaccatctgaaaacttaccttatagtgtcaacaattgttctttatttcttctacttcaagaaatctctctaactctgtgtgatctgaatgaaagtgtgtgcttttagggtcctagttgtacttttcaaatttatgagctgtacatcgattcattacaattatttccattgatct

SEQ ID NO: 9339 - protein, 856 aa, Arabidopsis thaliana
MSMGGGSNHEFGQWLDQQLVPLATSSGSLMVELLHGNLDIWVKEAKHLPNMICYRNKLVGGISFSELGRRIRKVDGEKSSKFTSDPYVTVSISGAVIGRTFVISNSENPVWMQHFDVPVAHSAAEVHFVVKDNDPIGSKIIGVVGIPTKQLCSGNRIEGLFPILNSSGKPCRKGAMLSLSIQYTPMERMRLYQKGVGSGVECVGVPGTYFPLRKGGRVTLYQDAHVDDGTLPSVHLDGGIQYRHGKCWEDMADAIRRARRLIYITGWSVFHPVRLVRRNNDPTEGTLGELLKVKSQEGVRVLVLVWDDPTSMSFPGFSTKGLMNTSDEETRRFFKHSSVQVLLCPRYGGKGHSFIKKSEVETIYTHHQKTMIVDAEAAQNRRKIVAFVGGLDLCNGRFDTPKHSLFGTLKTLHKDDFHNPNFVTTEDVGPREPWHDLHSKIDGPAAYDVLANFEERWMASKPRGIGKGRTSFDDSLLRINRIPDIMGLSEASSANDNDPESWHVQVFRSIDSTSVKGFPKDPEEATGRNLLCGKNILIDMSIHAAYVKAIRSAQHFIYIENQYFLGSSFNWDSNKDLGANNLIPMEIALKIANKIRARENFAAYIVIPMWPEGAPTSKPIQRILYWQHKTMQMMYQTIYKALLEVGLDGQLEPQDFLNFFCLGNREVGTREVPDGTVNVYNCPRKPPQPNAAQVQALKSRRFMIYVHSKGMVVDDEFVLIGSANINQRSLEGTRDTEIAMGGYQPHHSWAKKGSRPRGQIFGYRMSLWAEHLGFLEQEFEEPENMECVRRVRQLSELNWGQYAAEEVTEMSGHLLKYPVQVDKTGKVSSLPGCETFPDLGGKIIGSFLTLQENLTI

SEQ ID NO: 9340 - protein, 854 aa, Arabidopsis thaliana
MGGGSNHEFGQWLDQQLVPLATSSGSLMVELLHGNLDIWVKEAKHLPNMICYRNKLVGGISFSELGRRIRKVDGEKSSKFTSDPYVTVSISGAVIGRTFVISNSENPVWMQHFDVPVAHSAAEVHFVVKDNDPIGSKIIGVVGIPTKQLCSGNRIEGLFPILNSSGKPCRKGAMLSLSIQYTPMERMRLYQKGVGSGVECVGVPGTYFPLRKGGRVTLYQDAHVDDGTLPSVHLDGGIQYRHGKCWEDMADAIRRARRLIYITGWSVFHPVRLVRRNNDPTEGTLGELLKVKSQEGVRVLVLVWDDPTSMSFPGFSTKGLMNTSDEETRRFFKHSSVQVLLCPRYGGKGHSFIKKSEVETIYTHHQKTMIVDAEAAQNRRKIVAFVGGLDLCNGRFDTPKHSLFGTLKTLHKDDFHNPNFVTTEDVGPREPWHDLHSKIDGPAAYDVLANFEERWMASKPRGIGKGRTSFDDSLLRINRIPDIMGLSEASSANDNDPESWHVQVFRSIDSTSVKGFPKDPEEATGRNLLCGKNILIDMSIHAAYVKAIRSAQHFIYIENQYFLGSSFNWDSNKDLGANNLIPMEIALKIANKIRARENFAAYIVIPMWPEGAPTSKPIQRILYWQHKTMQMMYQTIYKALLEVGLDGQLEPQDFLNFFCLGNREVGTREVPDGTVNVYNCPRKPPQPNAAQVQALKSRRFMIYVHSKGMVVDDEFVLIGSANINQRSLEGTRDTEIAMGGYQPHHSWAKKGSRPRGQIFGYRMSLWAEHLGFLEQEFEEPENMECVRRVRQLSELNWGQYAAEEVTEMSGHLLKYPVQVDKTGKVSSLPGCETFPDLGGKIIGSFLTLQENLTI

SEQ ID NO: 9341 - protein, 827 aa, Arabidopsis thaliana
MVELLHGNLDIWVKEAKHLPNMICYRNKLVGGISFSELGRRIRKVDGEKSSKFTSDPYVTVSISGAVIGRTFVISNSENPVWMQHFDVPVAHSAAEVHFVVKDNDPIGSKIIGVVGIPTKQLCSGNRIEGLFPILNSSGKPCRKGAMLSLSIQYTPMERMRLYQKGVGSGVECVGVPGTYFPLRKGGRVTLYQDAHVDDGTLPSVHLDGGIQYRHGKCWEDMADAIRRARRLIYITGWSVFHPVRLVRRNNDPTEGTLGELLKVKSQEGVRVLVLVWDDPTSMSFPGFSTKGLMNTSDEETRRFFKHSSVQVLLCPRYGGKGHSFIKKSEVETIYTHHQKTMIVDAEAAQNRRKIVAFVGGLDLCNGRFDTPKHSLFGTLKTLHKDDFHNPNFVTTEDVGPREPWHDLHSKIDGPAAYDVLANFEERWMASKPRGIGKGRTSFDDSLLRINRIPDIMGLSEASSANDNDPESWHVQVFRSIDSTSVKGFPKDPEEATGRNLLCGKNILIDMSIHAAYVKAIRSAQHFIYIENQYFLGSSFNWDSNKDLGANNLIPMEIALKIANKIRARENFAAYIVIPMWPEGAPTSKPIQRILYWQHKTMQMMYQTIYKALLEVGLDGQLEPQDFLNFFCLGNREVGTREVPDGTVNVYNCPRKPPQPNAAQVQALKSRRFMIYVHSKGMVVDDEFVLIGSANINQRSLEGTRDTEIAMGGYQPHHSWAKKGSRPRGQIFGYRMSLWAEHLGFLEQEFEEPENMECVRRVRQLSELNWGQYAAEEVTEMSGHLLKYPVQVDKTGKVSSLPGCETFPDLGGKIIGSFLTLQENLTI

SEQ ID NO: 9342 - DNA, 1683 bp, Arabidopsis thaliana
aaaatctatcaagggtttgccgtacaaaggtatcggaggagagagtaaagggtaaacaaaagagagactggtttacttcttcttcgtgtgcgtgtagctttttcctgcgattctcatcgagttttggttagtgctttgttatcaaggtgaaaatcgatttgaagatggcgagcgaaagtcctgatgttgctgttgtagctccggtggtggagaatggcggcgctgagtcctctaatggtaaagaggaacaattggaatctgagctttcgaagaagcttgagattgcagaagatggtcaagaggagaacgatggagaagaaggaagcaaagctgagacttcaacgaagaagaagaagaagaaaaataaaagcaagaagaagaaggaactccctcaacagactgatccaccttcaattcctgtcgttgagctcttcccatcaggagagtttcctgaaggtgaaatccaagagtataaggatgataatctttggagaacaacatctgaagagaagagagagctggagcgttttgaaaagccaatatataactctgttcgccgagctgcagaagttcatcgccaggttcgtaaatatgtcagaagcatagtgaagcctggaatgttgatgactgatatatgtgagaccctagagaatactgttcgtaagttgatatcagagaatggtcttcaagctggtattgcattccctacaggatgctctttgaattgggtcgctgctcattggacaccaaactctggagataagactgtacttcagtacgacgatgttatgaaattggactttggaacacatattgatgggcatattattgactgtgcatttacagttgccttcaaccctatgttcgatcctctcttagcagcctctcgtgaagctacgtataccggtatcaaggaagctgggatcgatgtccgtctctgtgatatcggtgctgctattcaggaggtcatggagtcttatgaggttgaaatcaacggaaaggtcttccaagttaaaagtatccgaaacttgaatggtcacagcattggaccctatcagatacatgctgggaaatctgttcctatcgtaaaaggaggcgagcagacaaagatggaagagggcgagttttatgccatcgaaacatttggatcaaccgggaaaggatatgtgagagaagacctagaatgtagccattacatgaagaactttgacgctggccacgtccccttgaggttgcctagagcaaaacaactccttgcaaccattaacaagaatttctcgactctcgccttctgcagacgttatttggaccgcattggtgaaaccaaatacttaatggctctaaagaatctttgtgactctggcattgttcagccgtatcctcctctgtgtgatgtgaaaggaagctatgtatcacagtttgaacacaccattttactgcgacctacttgcaaagaagttctctccaagggagacgactactgattcagatcctctgttttgctctgtttacctttatcatctcatactgttgtcgagattgtacacttgcttgtttcttttgtcgtcgttaacacaagctttgaatccttttataaaaagcttcagtgcctctgttaaaaaaaaactatgtatttgccatgaacatgaatttgctcatcaatcttactagaagttgattgat

SEQ ID NO: 9343 - protein, 439 aa, Arabidopsis thaliana
MASESPDVAVVAPVVENGGAESSNGKEEQLESELSKKLEIAEDGQEENDGEEGSKAETSTKKKKKKNKSKKKKELPQQTDPPSIPVVELFPSGEFPEGEIQEYKDDNLWRTTSEEKRELERFEKPIYNSVRRAAEVHRQVRKYVRSIVKPGMLMTDICETLENTVRKLISENGLQAGIAFPTGCSLNWVAAHWTPNSGDKTVLQYDDVMKLDFGTHIDGHIIDCAFTVAFNPMFDPLLAASREATYTGIKEAGIDVRLCDIGAAIQEVMESYEVEINGKVFQVKSIRNLNGHSIGPYQIHAGKSVPIVKGGEQTKMEEGEFYAIETFGSTGKGYVREDLECSHYMKNFDAGHVPLRLPRAKQLLATINKNFSTLAFCRRYLDRIGETKYLMALKNLCDSGIVQPYPPLCDVKGSYVSQFEHTILLRPTCKEVLSKGDDY

SEQ ID NO: 9344 - protein, 288 aa, Arabidopsis thaliana
MLMTDICETLENTVRKLISENGLQAGIAFPTGCSLNWVAAHWTPNSGDKTVLQYDDVMKLDFGTHIDGHIIDCAFTVAFNPMFDPLLAASREATYTGIKEAGIDVRLCDIGAAIQEVMESYEVEINGKVFQVKSIRNLNGHSIGPYQIHAGKSVPIVKGGEQTKMEEGEFYAIETFGSTGKGYVREDLECSHYMKNFDAGHVPLRLPRAKQLLATINKNFSTLAFCRRYLDRIGETKYLMALKNLCDSGIVQPYPPLCDVKGSYVSQFEHTILLRPTCKEVLSKGDDY

SEQ ID NO: 9345 - protein, 286 aa, Arabidopsis thaliana
MTDICETLENTVRKLISENGLQAGIAFPTGCSLNWVAAHWTPNSGDKTVLQYDDVMKLDFGTHIDGHIIDCAFTVAFNPMFDPLLAASREATYTGIKEAGIDVRLCDIGAAIQEVMESYEVEINGKVFQVKSIRNLNGHSIGPYQIHAGKSVPIVKGGEQTKMEEGEFYAIETFGSTGKGYVREDLECSHYMKNFDAGHVPLRLPRAKQLLATINKNFSTLAFCRRYLDRIGETKYLMALKNLCDSGIVQPYPPLCDVKGSYVSQFEHTILLRPTCKEVLSKGDDY

SEQ ID NO: 9346 - DNA, 1187 bp, Arabidopsis thaliana
aatataaataaacatacaattcactttaattgatcatagcaccgatcataatctactctctttaaaagaaattcgtaagtactatcaagaagcagaagatggcccaaaaggtggaagcacaaggagggaaaggagccaacctatgggacgatggatcgacacatgacgccgtgaccaagattcagctcgcagcaggcatagacggaattcaatatgttcagtttgattatgtcaagaacggacaacccgaacaagctcctcttcgtggtaccaaaggccgtgttctcccagctgatccgtttgtgattaaccatccagacgaacatctcgtttctgtagaaggttggtatagccctgaaggtatcattcaaggggttaagttcatctccaacaagaagacttctgatgtcattggatccgatgagggtactcacttcactctccaagttaaagacaagaagatcattggctttcatgggtctgccgggggcaatcttaattctcttggggcttactttgctccgttgactactacaactccgttgactcctgccaagcagctaacggcatttggtagtgatgacggaactgcatgggatgatggtgcttacgttggggttaagaaggtgtacgttggacaagcccaagatggtatctcagctgttaagtttgtgtacgacaaaagccctgaggaggtcacaggagaagaacatggaaagagtactctactcggattcgaagagttcgtacttgactatccaagtgaatacatcaccgcagtcgatggcacttatgataaaatcttcgggagtgatggctcagtcataactatgcttaggttcaagactaataagcaaacgtctcctccctttggacttgaagctggcacagtcttcgaactcaaagaggaaggccacaagatcgttggtttccatggaagagccgatgttctgctccacaaaattggagtccatgttcgtcctttatccaactgatgatggagctctttatccttgattccatgcatctaataagttatcaaatctatcttctaaatttctcatatgaggtctcttcatgcctctggtgaatggtgatctttgataagtgttttacgcgttgtctcttgcgatgttgttttttctttgttcttcttgtgctctattttaataaaggaagtttgttcc

SEQ ID NO: 9347 - protein, 298 aa, Arabidopsis thaliana
MAQKVEAQGGKGANLWDDGSTHDAVTKIQLAAGIDGIQYVQFDYVKNGQPEQAPLRGTKGRVLPADPFVINHPDEHLVSVEGWYSPEGIIQGVKFISNKKTSDVIGSDEGTHFTLQVKDKKIIGFHGSAGGNLNSLGAYFAPLTTTTPLTPAKQLTAFGSDDGTAWDDGAYVGVKKVYVGQAQDGISAVKFVYDKSPEEVTGEEHGKSTLLGFEEFVLDYPSEYITAVDGTYDKIFGSDGSVITMLRFKTNKQTSPPFGLEAGTVFELKEEGHKIVGFHGRADVLLHKIGVHVRPLSN

SEQ ID NO: 9348 - DNA, 2361 bp, Arabidopsis thaliana
gaaatcacaaaagcatcataagaagaagaagaaactacaatagttaatcaatcaaagagaagtaagagaaatggcagattctaactgtggatgtggctcctcctgcaaatgtggtgactcttgcagttgcgagaagaactacaacaaggagtgcgacaactgtagctgtggatcaaactgcagctgtgggtcaaactgtaactgttgatgaaattattatggtctaaaatcatatatatggcagaaaaattggggaaaatatgtgttttatgctaagagatgtgtgtgtgttgttggaataaagacgtgaccgttgtgttgcgtatcaactctcttaagctttgacttttcccagctttgtattttcctatgtatggtaatggtgtgattgtgtaatgttttcatatgtaacgtaaaaaaaatatttatgtgacattgacttttgtgactactaagatttgtatatgtctcctccgttttttatttaggatttaagttcaatcagctaaattaatcataaacaatttaagtaaatattcatatgagaagaagtcaaccatattcttatcgggccttatatgttaatgttaaaaggttacgggccagtaaggtcccaaaaaagaagaagagatgagatccattattgctctcatgaggcaacgagaatatttcgttcaggcaattcgtcgaacaacttgcgtggcctcacctgcgttgaatcaaactaacttccaagcttcgagctttctcactaccctaatatcttcgaagaaatctccggaagagacatgtatcggatcggaggaagaagaagaggagcccaacaagtgtttgtctttgagaatcgagaagcttccgaagggcgtaactgttgggtctgctttacagagctggatgggtgatgggtttccagttcatggtggagatgtttatcacgccattaatcgattgaggaaactcggacgaaacaaacgtgcccttgagttgatggagtggataatcagggaaagaccttaccgtcttggtgagctagagtactcttacttgctcgaatttacagtcaaacttcatggcgtctcgcaaggagaaaagctatttacccgtgtccctcaagagtttcagaacgagcttctttacaacaaccttgtgattgcttgtttagaccaaggtgtcataaggcttgcgctagagtatatgaagaagatgagagaactcggttaccgtacttcccatttggtctacaaccgtcttataattcgcaactctgctcccggacgaagaaagctaatagcaaaagaccttgcgctcatgaaagctgacaaggcgactcctcatgtctcaacgtatcatatcttgatgaagcttgaggctaatgaacataacatcgatggggtgctgaaggcttttgatggtatgaagaaagcgggagttgagccaaatgaggtgtcttactgtatattggctatggcacatgctgttgcgagattgtatacagttgcagaagcctataccgaggaaatagaaaaatctatcacaggggataattggtcgaccttggatatattgatgattctatatgggcgtttagggaaagaaaaagagctagcgagaacgtggaatgtcataagagggtttcatcatgttagatccaagagttacttactggcaaccgaagcgtttgctcgagtagggaaccttgatagagcggaagagctctggttagagatgaaaaacgtaaaaggacttaaagaaactgagcaattcaactctctgctctcggtatactgcaaggacggtttgatagagaaggcaattggtgtattccgcgagatgacaggaaacgggtttaagcctaattccataacgtatagacatcttgctcttggatgtgctaaagccaaactgatgaaggaagctctcaaaaacattgagatgggtttgaatctaaagacgagcaaaagcataggaagctcaacgccgtggctggagacgactctatcgatcatagagtgttttgcagagaaaggtgatgtagagaactcagagaaactgtttgaagaggtgaagaatgcaaagtataataggtatgcgtttgtgtacaacgctctgttcaaagcttatgtgaaggctaaagtgtatgaccctaatctgttcaagaggatggttctaggtggagctaggcctgatgctgagtcatacagtttgttgaaacttgtcgaacaatataagccctgacacaatcaagtctgctccaatttttttgattgattggatagttagtgacttgtgggtttaagaagttgttcgtaaaagtatagtttaagaagttgttcgtaaacttacaattaaaaatcagactcg

SEQ ID NO: 9349 - protein, 534 aa, Arabidopsis thaliana
MRSIIALMRQREYFVQAIRRTTCVASPALNQTNFQASSFLTTLISSKKSPEETCIGSEEEEEEPNKCLSLRIEKLPKGVTVGSALQSWMGDGFPVHGGDVYHAINRLRKLGRNKRALELMEWIIRERPYRLGELEYSYLLEFTVKLHGVSQGEKLFTRVPQEFQNELLYNNLVIACLDQGVIRLALEYMKKMRELGYRTSHLVYNRLIIRNSAPGRRKLIAKDLALMKADKATPHVSTYHILMKLEANEHNIDGVLKAFDGMKKAGVEPNEVSYCILAMAHAVARLYTVAEAYTEEIEKSITGDNWSTLDILMILYGRLGKEKELARTWNVIRGFHHVRSKSYLLATEAFARVGNLDRAEELWLEMKNVKGLKETEQFNSLLSVYCKDGLIEKAIGVFREMTGNGFKPNSITYRHLALGCAKAKLMKEALKNIEMGLNLKTSKSIGSSTPWLETTLSIIECFAEKGDVENSEKLFEEVKNAKYNRYAFVYNALFKAYVKAKVYDPNLFKRMVLGGARPDAESYSLLKLVEQYKP

SEQ ID NO: 9350 - protein, 527 aa, Arabidopsis thaliana
MRQREYFVQAIRRTTCVASPALNQTNFQASSFLTTLISSKKSPEETCIGSEEEEEEPNKCLSLRIEKLPKGVTVGSALQSWMGDGFPVHGGDVYHAINRLRKLGRNKRALELMEWIIRERPYRLGELEYSYLLEFTVKLHGVSQGEKLFTRVPQEFQNELLYNNLVIACLDQGVIRLALEYMKKMRELGYRTSHLVYNRLIIRNSAPGRRKLIAKDLALMKADKATPHVSTYHILMKLEANEHNIDGVLKAFDGMKKAGVEPNEVSYCILAMAHAVARLYTVAEAYTEEIEKSITGDNWSTLDILMILYGRLGKEKELARTWNVIRGFHHVRSKSYLLATEAFARVGNLDRAEELWLEMKNVKGLKETEQFNSLLSVYCKDGLIEKAIGVFREMTGNGFKPNSITYRHLALGCAKAKLMKEALKNIEMGLNLKTSKSIGSSTPWLETTLSIIECFAEKGDVENSEKLFEEVKNAKYNRYAFVYNALFKAYVKAKVYDPNLFKRMVLGGARPDAESYSLLKLVEQYKP

SEQ ID NO: 9351 - protein, 446 aa, Arabidopsis thaliana
MGDGFPVHGGDVYHAINRLRKLGRNKRALELMEWIIRERPYRLGELEYSYLLEFTVKLHGVSQGEKLFTRVPQEFQNELLYNNLVIACLDQGVIRLALEYMKKMRELGYRTSHLVYNRLIIRNSAPGRRKLIAKDLALMKADKATPHVSTYHILMKLEANEHNIDGVLKAFDGMKKAGVEPNEVSYCILAMAHAVARLYTVAEAYTEEIEKSITGDNWSTLDILMILYGRLGKEKELARTWNVIRGFHHVRSKSYLLATEAFARVGNLDRAEELWLEMKNVKGLKETEQFNSLLSVYCKDGLIEKAIGVFREMTGNGFKPNSITYRHLALGCAKAKLMKEALKNIEMGLNLKTSKSIGSSTPWLETTLSIIECFAEKGDVENSEKLFEEVKNAKYNRYAFVYNALFKAYVKAKVYDPNLFKRMVLGGARPDAESYSLLKLVEQYKP

SEQ ID NO: 9352 - DNA, 819 bp, Arabidopsis thaliana
atcccctcgtcgctgcgtctctctcccgcaaccttcgattttcgtttattcgcatccatcggagagagaaaacaatcaataagcgaccatgttggtgtaccaagatcttctcaccggtgatgagcttctgtctgactctttcccttacaaggagattgagaatggaatcctctgggaagtagaaggaaagtgggttactgtgggagctgtagatgttaacattggtgccaatccatctgctgaagaaggtggtgaggatgaaggtgttgatgactctactcaaaaggttgttgacattgtcgacaccttcagacttcaggagcaaccaacttatgacaagaagggattcatcgcttacattaagaaatacattaagcttttgacacccaagctcagcgaagaagatcaagctgtcttcaagaagggtattgagggagctaccaagtttttgctccccaggctcagtgacttccaattctttgttggggagggtatgcatgatgacagcactttggtctttgcttactacaaggagggttcaactaacccaacatttttgtacttcgctcatggtttgaaggaggtcaagtgctgagagagaagctctcgttgggttactgtggtcggtcgcagcgactctctaagtttatgtttctttatattgtcctgtgtttcgtcgtcgtcccctattaaaattacctgccagtttacttttctctcttcttgttttctgtgttggaagattctcaagttatttattccgcaaaaaacggtttatcatttacaattagttgaattttggtcgttactttttgtgcc

SEQ ID NO: 9353 - protein, 168 aa, Arabidopsis thaliana
MLVYQDLLTGDELLSDSFPYKEIENGILWEVEGKWVTVGAVDVNIGANPSAEEGGEDEGVDDSTQKVVDIVDTFRLQEQPTYDKKGFIAYIKKYIKLLTPKLSEEDQAVFKKGIEGATKFLLPRLSDFQFFVGEGMHDDSTLVFAYYKEGSTNPTFLYFAHGLKEVKC

SEQ ID NO: 9354 - DNA, 1113 bp, Arabidopsis thaliana
acgttctcattcatgactctatatatttcgcatttcttctcctcaacgctctcataaaaagtagtactcgtgtcttactcgtgccagccactcgcatttctccagattttattatccttcctcgaaacaagagcttagctaagatgacgaagaactacccaaccgtgagcgaagattacaagaaggctgttgagaagtgcaggaggaagctcagaggtttgatcgctgagaagaactgtgcacccatcatggtccgactcgcatggcactctgctggaactttcgattgtcaatcaaggactggaggtccattcggaacaatgaggtttgacgctgagcaagctcatggagccaacagtggtatccacattgctcttaggttgttggaccccatcagggagcaattccctaccatctcttttgctgatttccatcagcttgctggtgttgtggccgttgaagttactggtggccctgacattcctttccaccctggaagagaggacaagccccaaccacctccagagggtcgtcttcctgatgctaccaagggttgtgaccatttgagagatgtctttgctaagcagatgggcttatctgacaaagacattgtcgctttatctggtgcccacactctgggacgatgccacaaggataggtctggcttcgaaggtgcatggacatcaaaccctctaatcttcgacaactcttacttcaaggaactcttgagcggagagaaggaaggccttcttcagcttgtctctgacaaagcactattggacgaccctgttttccgtcctttggtcgagaaatacgctgctgatgaagatgcctttttcgctgattacgctgaggcccacatgaagctttctgagcttgggtttgctgatgcttaagctgtgacgtatgctctgtgtgtgtgtgtgtgtctccccgagagtcatggctgtttttggttgggggctggaggggtcgcattgcatttgaactttgtcatatgattgcttaatgtactctcggatttacgtatctgtttttttcggtgggttgcgatttgaacacatccgttgcgcttttgctgcttagacacattaataaaattaatttctctcg

SEQ ID NO: 9355 - protein, 297 aa, Arabidopsis thaliana
VLIHDSIYFAFLLLNALIKSSTRVLLVPATRISPDFIILPRNKSLAKMTKNYPTVSEDYKKAVEKCRRKLRGLIAEKNCAPIMVRLAWHSAGTFDCQSRTGGPFGTMRFDAEQAHGANSGIHIALRLLDPIREQFPTISFADFHQLAGVVAVEVTGGPDIPFHPGREDKPQPPPEGRLPDATKGCDHLRDVFAKQMGLSDKDIVALSGAHTLGRCHKDRSGFEGAWTSNPLIFDNSYFKELLSGEKEGLLQLVSDKALLDDPVFRPLVEKYAADEDAFFADYAEAHMKLSELGFADA

SEQ ID NO: 9356 - protein, 250 aa, Arabidopsis thaliana
MTKNYPTVSEDYKKAVEKCRRKLRGLIAEKNCAPIMVRLAWHSAGTFDCQSRTGGPFGTMRFDAEQAHGANSGIHIALRLLDPIREQFPTISFADFHQLAGVVAVEVTGGPDIPFHPGREDKPQPPPEGRLPDATKGCDHLRDVFAKQMGLSDKDIVALSGAHTLGRCHKDRSGFEGAWTSNPLIFDNSYFKELLSGEKEGLLQLVSDKALLDDPVFRPLVEKYAADEDAFFADYAEAHMKLSELGFADA

SEQ ID NO: 9357 - protein, 215 aa, Arabidopsis thaliana
MVRLAWHSAGTFDCQSRTGGPFGTMRFDAEQAHGANSGIHIALRLLDPIREQFPTISFADFHQLAGVVAVEVTGGPDIPFHPGREDKPQPPPEGRLPDATKGCDHLRDVFAKQMGLSDKDIVALSGAHTLGRCHKDRSGFEGAWTSNPLIFDNSYFKELLSGEKEGLLQLVSDKALLDDPVFRPLVEKYAADEDAFFADYAEAHMKLSELGFADA

SEQ ID NO: 9358 - DNA, 884 bp, Arabidopsis thaliana
acacaattcagattccaattttctcaaactctaaaatcaatctctcaaatctctcaaccgtgatcaagatgcagatcttcgttaagactctcaccggaaagactatcaccctcgaggtggaaagctctgacaccatcgacaacgttaaggccaagatccaggataaggaaggtattcctccggatcagcagaggcttatcttcgccggaaagcagttggaggatggccgcacgttggcggattacaatatccagaaggaatccaccctccacttggttctcaggctccgtggtggtatgcagattttcgttaaaaccctaacgggaaagacgattactcttgaggtggagagctctgacaccattgacaacgtcaaggccaagatccaagataaggagggtattcctccggaccagcagaggttgatcttcgccggaaagcaacttgaggacggcagaactttggcggattacaacatccagaaggagtctacgcttcatttggtcttgcgtctgcgtggaggtatgcagatcttcgtaaagactttgaccggaaagaccatcactcttgaagttgagagctccgacaccattgataacgtgaaggctaagatccaggacaaggaaggcattcctccggaccagcagcgtctcatcttcgctggaaagcagcttgaggatggacgtactttggccgactacaacatccagaaggagtctactcttcacttggtcctccgtctccgtggtggtttctaaaccttgtctctctctcttatggttactgaaccaagttcatgtatcgtttcatctagtactttggtggtttatgttttggggccatgtacagcctctgataaataattgatcgactatgtttccgtc

SEQ ID NO: 9359 - protein, 251 aa, Arabidopsis thaliana
TIQIPIFSNSKINLSNLSTVIKMQIFVKTLTGKTITLEVESSDTIDNVKAKIQDKEGIPPDQQRLIFAGKQLEDGRTLADYNIQKESTLHLVLRLRGGMQIFVKTLTGKTITLEVESSDTIDNVKAKIQDKEGIPPDQQRLIFAGKQLEDGRTLADYNIQKESTLHLVLRLRGGMQIFVKTLTGKTITLEVESSDTIDNVKAKIQDKEGIPPDQQRLIFAGKQLEDGRTLADYNIQKESTLHLVLRLRGGF

SEQ ID NO: 9360 - protein, 229 aa, Arabidopsis thaliana; identical to SEQ ID NO: 4884

SEQ ID NO: 9361 - protein, 153 aa, Arabidopsis thaliana
MQIFVKTLTGKTITLEVESSDTIDNVKAKIQDKEGIPPDQQRLIFAGKQLEDGRTLADYNIQKESTLHLVLRLRGGMQIFVKTLTGKTITLEVESSDTIDNVKAKIQDKEGIPPDQQRLIFAGKQLEDGRTLADYNIQKESTLHLVLRLRGGF

SEQ ID NO: 9362 - DNA, 750 bp, Arabidopsis thaliana
accttctactttcatgcatttgcactcataagctctctctatataaacccaaccttcattaccattcttcattatccaatccaatccattacttactaagtaaaaagagaaaaaaaaaaaattaagatatggagggactcttgaagttgtcaactttggtgattgtgtgcatgttagtgaccgctccaatggcgtccgaggcagcaatctcgtgcggcgcagtcaccggcagcttaggtcaatgctataactacttgacccgaggcggtttcattcctagagggtgttgctctggcgttcagaggctcaacagcttggctcgtaccacccgtgaccgccaacaagcttgtcgttgtatccagggagcagcgagagccttgggttctcgacttaacgctggtcgtgctgctcgtctccctggtgcttgccgtgttaggatctcttaccccatcagtgccagaaccaactgtaacaccgtcaggtgatcaaaagaagatagacgttgaagggttttcatataatcgatgagagagtattaaaaataattaagatgtcacactatatacacactagtgtatccttttactgttattattgttgtgtttctagattttgtgttttcatgtctttctttgtatatgacggtccatttaattggtcgtctgtgttatgtactcctctaatgatatattgaatttacgattatgtattatcttcaaactcttgccattaactttggtcacgttctgc

SEQ ID NO: 9363 - protein, 118 aa, Arabidopsis thaliana
MEGLLKLSTLVIVCMLVTAPMASEAAISCGAVTGSLGQCYNYLTRGGFIPRGCCSGVQRLNSLARTTRDRQQACRCIQGAARALGSRLNAGRAARLPGACRVRISYPISARTNCNTVR

SEQ ID NO: 9364 - protein, 104 aa, Arabidopsis thaliana
MLVTAPMASEAAISCGAVTGSLGQCYNYLTRGGFIPRGCCSGVQRLNSLARTTRDRQQACRCIQGAARALGSRLNAGRAARLPGACRVRISYPISARTNCNTVR

SEQ ID NO: 9365 - protein, 98 aa, Arabidopsis thaliana
MASEAAISCGAVTGSLGQCYNYLTRGGFIPRGCCSGVQRLNSLARTTRDRQQACRCIQGAARALGSRLNAGRAARLPGACRVRISYPISARTNCNTVR

SEQ ID NO: 9366 - DNA, 753 bp, Arabidopsis thaliana
aagtctacaaaccaaaagcacgctacagaagaagaggaagaagaagaagaagcagagacaacaagaagaagaagaaacagtctcatctcgccggagaagaagaaagatgtcgtggcaatcatacgtcgatgaccatctcatgtgcgaggtcgaaggcaaccacctcacacacgccgccatcttcggccaagacggcagtgtctgggctcagagctcagctttccctcagttgaagcctgcagagatagcaggaatcaacaaagactttgaagaagccggacatcttgccccaaccgggctattccttggcggtgagaagtacatggttgtccaaggtgaggctggagccgtcatccgagggaaaaagggacctggtggagtcactatcaagaagactactcaagctctagtctttggtatctatgatgaaccgatgaccggagggcaatgcaacttggtcgtggagaggctcggcgattaccttatcgagtctggtctctaagttcactcaaagtgcttcaaacaaatttcatttttcgggttctttcttcactagagaagcacccttctgccatgtattgtgatttgattgttgttgtgcatcaaacaaagttattatactcttaaaaagaacaaagaaacaatcatatttgttatggttttgatcctctcctatgatggctcttatgtttttctcttgtactgtatttcgtaatgtataattacgctttggaataaaaatttgagtttgtg

SEQ ID NO: 9367 - protein, 166 aa, Arabidopsis thaliana
SLQTKSTLQKKRKKKKKQRQQEEEETVSSRRRRRKMSWQSYVDDHLMCEVEGNHLTHAAIFGQDGSVWAQSSAFPQLKPAEIAGINKDFEEAGHLAPTGLFLGGEKYMVVQGEAGAVIRGKKGPGGVTIKKTTQALVFGIYDEPMTGGQCNLVVERLGDYLIESGL

SEQ ID NO: 9368 - protein, 131 aa, Arabidopsis thaliana
MSWQSYVDDHLMCEVEGNHLTHAAIFGQDGSVWAQSSAFPQLKPAEIAGINKDFEEAGHLAPTGLFLGGEKYMVVQGEAGAVIRGKKGPGGVTIKKTTQALVFGIYDEPMTGGQCNLVVERLGDYLIESGL

SEQ ID NO: 9369 - protein, 120 aa, Arabidopsis thaliana
MCEVEGNHLTHAAIFGQDGSVWAQSSAFPQLKPAEIAGINKDFEEAGHLAPTGLFLGGEKYMVVQGEAGAVIRGKKGPGGVTIKKTTQALVFGIYDEPMTGGQCNLVVERLGDYLIESGL

SEQ ID NO: 9370 - DNA, 788 bp, Arabidopsis thaliana
atagaaaacaagtaaccaaagagagacgaagcaaaaacattcagagagaaaattcagcatttttgatagctcaagcacttgattctttccaaaggggtttcctgagatcacaaaggccaagtaacaatggcgaaaggagttgcagttttgaacagcagtgagggtgttacggggactatctttttcacccaggaaggcgatggtgtgaccactgtgagtggaacagtttctggccttaagcctggtcttcatggtttccatgtccatgctcttggtgacaccactaacggttgcatgtctactggtccacatttcaaccccgatggtaaaacacacggtgcccctgaggatgctaatcgacatgctggtgatctaggaaacatcactgttggagatgatggaactgccaccttcacaatcactgattgccagattcctcttactggaccaaactctattgttggtagggctgttgttgtccatgcagaccctgatgacctcggaaagggaggccatgaactcagcctggctactggaaacgcaggcggccgtgttgcttgcggcatcattggtctccagggctaaagctgctacgtttccaaagaagagattgatgtaataaggaggtccaaccttagacctgggtttggtagttgtgtgtatcttctggtgtgtggctaaaaacctatgagcttagtgtggctcaaagcatttttaattcagacagaaaacagagaaaattccgtacttttattatttcatgaataaaaaagagttgatttactgtt

SEQ ID NO: 9371 - protein, 152 aa, Arabidopsis thaliana
MAKGVAVLNSSEGVTGTIFFTQEGDGVTTVSGTVSGLKPGLHGFHVHALGDTTNGCMSTGPHFNPDGKTHGAPEDANRHAGDLGNITVGDDGTATFTITDCQIPLTGPNSIVGRAVVVHADPDDLGKGGHELSLATGNAGGRVACGIIGLQG

SEQ ID NO: 9372 - protein, 96 aa, Arabidopsis thaliana
MSTGPHFNPDGKTHGAPEDANRHAGDLGNITVGDDGTATFTITDCQIPLTGPNSIVGRAVVVHADPDDLGKGGHELSLATGNAGGRVACGIIGLQG

SEQ ID NO: 9373 - DNA, 1107 bp, Arabidopsis thaliana
atattacccattgtagaaaagaagaaaaaaagcaaagaacacttgaacgttttctagatagagatggaagggaaagaagaggatgttcgagtgggagctaacaagttcccggagaggcaaccgataggtacatcggctcagacggacaaagactacaaggagccaccaccagctccatttttcgagccaggcgagctgagttcgtggtccttctacagagccggaatcgccgagttcatagccaccttcctgtttctatacataacagtattgacagtgatgggagtgaagagagcaccaaacatgtgtgcctctgttggaatccaaggcattgcttgggctttcggtggcatgatctttgcccttgtctactgtactgctggaatctctggtgggcacataaacccagcggtgacatttggtctgttcttggctcgtaagctgtcattgacgagagctgtcttttacatcgtgatgcaatgtctcggagccatctgcggcgccggagttgtcaaaggcttccagccaaatccttaccaaactctcggcggaggagccaacacagtcgctcacggctacactaagggctctggtttgggtgctgagataatcggaaccttcgtccttgtctacacggtcttctccgccactgacgccaagagaagcgctcgtgactcccacgttccgattttggcaccactcccaatcggattcgctgtgttcttggttcacttggcgacgtttccaatcaccggaacaggaattaacccagctaggagtcttggagctgcaatcatctacaacaaggaccacgcttgggacgaccactggatattctgggtcggaccattcattggagcagctcttgcggctctttaccaccaacttgtcatcagagccattccattcaagtccagatcctgatttgatttctttctttataaaacttcattgttgcatcttggtttgtaattgagcttgaaaatatttgagagatctggatcatgtgtttattttaattaatggacttgtctttttcttatttgctgtggatgatctggttttatcgttaaatggagtttgatattatgattgatttggtacgat

SEQ ID NO: 9374 - protein, 286 aa, Arabidopsis thaliana
MEGKEEDVRVGANKFPERQPIGTSAQTDKDYKEPPPAPFFEPGELSSWSFYRAGIAEFIATFLFLYITVLTVMGVKRAPNMCASVGIQGIAWAFGGMIFALVYCTAGISGGHINPAVTFGLFLARKLSLTRAVFYIVMQCLGAICGAGVVKGFQPNPYQTLGGGANTVAHGYTKGSGLGAEIIGTFVLVYTVFSATDAKRSARDSHVPILAPLPIGFAVFLVHLATFPITGTGINPARSLGAAIIYNKDHAWDDHWIFWVGPFIGAALAALYHQLVIRAIPFKSRS

SEQ ID NO: 9375 - protein, 214 aa, Arabidopsis thaliana
MGVKRAPNMCASVGIQGIAWAFGGMIFALVYCTAGISGGHINPAVTFGLFLARKLSLTRAVFYIVMQCLGAICGAGVVKGFQPNPYQTLGGGANTVAHGYTKGSGLGAEIIGTFVLVYTVFSATDAKRSARDSHVPILAPLPIGFAVFLVHLATFPITGTGINPARSLGAAIIYNKDHAWDDHWIFWVGPFIGAALAALYHQLVIRAIPFKSRS

SEQ ID NO: 9376 - protein, 206 aa, Arabidopsis thaliana
MCASVGIQGIAWAFGGMIFALVYCTAGISGGHINPAVTFGLFLARKLSLTRAVFYIVMQCLGAICGAGVVKGFQPNPYQTLGGGANTVAHGYTKGSGLGAEIIGTFVLVYTVFSATDAKRSARDSHVPILAPLPIGFAVFLVHLATFPITGTGINPARSLGAAIIYNKDHAWDDHWIFWVGPFIGAALAALYHQLVIRAIPFKSRS

SEQ ID NO: 9377 - DNA, 1224 bp, Arabidopsis thaliana
agaaaacattactgataaaactacaaaaatagctggaatggagcattcaaaactctgtccaaagtccaaacggttaaattatcactgacccaatccaataattagatttatttaagaagaagaagaagaaaaaaaacagagctttacaatttctctctacagagatcgaagatatggaaggcaaggaagaagacgttagagttggagctaacaagttcccggagagacaaccaatcggaacatcagctcagagtgacaaggactacaaggaaccaccaccagctccgtttttcgaacctggtgagctttcttcatggtctttttggagagctgggatcgctgagttcatcgctacttttctctttctctacatcactgtcttgactgttatgggagtgaaaaggtcaccgaacatgtgtgcttccgtcggaatccaaggaatcgcttgggctttcggtggtatgatatttgccttagtctactgtaccgctggtatctccggtggacacatcaacccagcggttacttttggtctgttcttagcccggaagctgtcgcttactagagctctgtactacatagtgatgcagtgcttgggagctatctgtggtgctggagtggttaaagggttccagcctaagcaataccaggctctaggaggaggagctaacactgtggctcatggttacaccaagggaagtggtcttggagctgagatcattggcacattcgttcttgtatacacagtcttctcagcaactgacgccaagagaaatgctcgtgactctcatgtccctattcttgcaccactcccaatcgggtttgcggttttcttggttcacttggcaaccatcccaatcactggcacaggcatcaacccagctagaagccttggagctgcaatcatctacaacaaagaccattcctgggatgaccactgggtgttttgggttggccccttcattgaagctgcacttgctgctctttaccatgtggttgtcatcagagccatccccttcaagtccagaagctaagtaaaaacaagacatcaagtcctctggtttctggccttgtccttagttgcttctatagttctattgttgatctactacatgtatgtgtgcaatgtgtttatctatgtgccctcttaatgcaatatttgtaaacaaggaagaagttccaaaggagaattatttgcaaattatgatgtttaacatgtttatt

SEQ ID NO: 9378 - protein, 286 aa, Arabidopsis thaliana
MEGKEEDVRVGANKFPERQPIGTSAQSDKDYKEPPPAPFFEPGELSSWSFWRAGIAEFIATFLFLYITVLTVMGVKRSPNMCASVGIQGIAWAFGGMIFALVYCTAGISGGHINPAVTFGLFLARKLSLTRALYYIVMQCLGAICGAGVVKGFQPKQYQALGGGANTVAHGYTKGSGLGAEIIGTFVLVYTVFSATDAKRNARDSHVPILAPLPIGFAVFLVHLATIPITGTGINPARSLGAAIIYNKDHSWDDHWVFWVGPFIEAALAALYHVVVIRAIPFKSRS

SEQ ID NO: 9379 - protein, 214 aa, Arabidopsis thaliana
MGVKRSPNMCASVGIQGIAWAFGGMIFALVYCTAGISGGHINPAVTFGLFLARKLSLTRALYYIVMQCLGAICGAGVVKGFQPKQYQALGGGANTVAHGYTKGSGLGAEIIGTFVLVYTVFSATDAKRNARDSHVPILAPLPIGFAVFLVHLATIPITGTGINPARSLGAAIIYNKDHSWDDHWVFWVGPFIEAALAALYHVVVIRAIPFKSRS

SEQ ID NO: 9380 - protein, 206 aa, Arabidopsis thaliana
MCASVGIQGIAWAFGGMIFALVYCTAGISGGHINPAVTFGLFLARKLSLTRALYYIVMQCLGAICGAGVVKGFQPKQYQALGGGANTVAHGYTKGSGLGAEIIGTFVLVYTVFSATDAKRNARDSHVPILAPLPIGFAVFLVHLATIPITGTGINPARSLGAAIIYNKDHSWDDHWVFWVGPFIEAALAALYHVVVIRAIPFKSRS

SEQ ID NO: 9381 - DNA, 1005 bp, Arabidopsis thaliana
agagcaaaagcttctgtttattctccgattcgcagatcaattagctgggttttgattccgttgtgcgaaggactttaagaggttttgcagatcgaaatcggaagagaagaagaagatgtttctcactagaactgagtatgacagaggagtgaacactttttctccagaaggaaggctatttcaagtggaatatgccattgaagctatcaagcttggttctactgcaattggagtaaagacaaaagaaggagttgtgcttgctgtcgagaagcgtatcacgtcgccattgctggaaccgagcagtgtggagaagattatggaaattgatgaccatattggttgtgctatgagcggtttaattgctgacgcgcgcacacttgttgagcatgctagagttgaaactcaaaaccatagattctcgtatggtgagccgatgactgtagagtccacaacacaagcactgtgtgatctggctttacggtttggtgaaggagaggaagaatcaatgtctcggccgtttggagtatctcttctcattgctggccatgatgaaaatggaccaagcttgtactacactgatccttcaggaacattctggcagtgcaatgcaaaggcaattggttcaggttctgaaggagctgatagctctcttcaagagcaattcaacaaagatttgtctctacaagaagctgagactatcgctgtatctatcctaaagcaagttatggaagaaaaggtgactccaaataacgtggatattgccaaggtagcaccagcttatcatctctacactccacaagaagtcgaagcagtcatcgctcgtctttgattgaaaaaactcaatttgggtaatttacctatcagcttgtgtcacaaaacttgttacttttgtctgttagattgaggatcatgtcacattttagtcggttgtgtaagagaatcttttggctcccatgtcattcaataacctttcggatttgtgacttataaaatttcctttcctat

SEQ ID NO: 9382 - protein, 237 aa, Arabidopsis thaliana
MFLTRTEYDRGVNTFSPEGRLFQVEYAIEAIKLGSTAIGVKTKEGVVLAVEKRITSPLLEPSSVEKIMEIDDHIGCAMSGLIADARTLVEHARVETQNHRFSYGEPMTVESTTQALCDLALRFGEGEEESMSRPFGVSLLIAGHDENGPSLYYTDPSGTFWQCNAKAIGSGSEGADSSLQEQFNKDLSLQEAETIAVSILKQVMEEKVTPNNVDIAKVAPAYHLYTPQEVEAVIARL

SEQ ID NO: 9383 - protein, 170 aa, Arabidopsis thaliana
MEIDDHIGCAMSGLIADARTLVEHARVETQNHRFSYGEPMTVESTTQALCDLALRFGEGEEESMSRPFGVSLLIAGHDENGPSLYYTDPSGTFWQCNAKAIGSGSEGADSSLQEQFNKDLSLQEAETIAVSILKQVMEEKVTPNNVDIAKVAPAYHLYTPQEVEAVIARL

SEQ ID NO: 9384 - protein, 160 aa, Arabidopsis thaliana
MSGLIADARTLVEHARVETQNHRFSYGEPMTVESTTQALCDLALRFGEGEEESMSRPFGVSLLIAGHDENGPSLYYTDPSGTFWQCNAKAIGSGSEGADSSLQEQFNKDLSLQEAETIAVSILKQVMEEKVTPNNVDIAKVAPAYHLYTPQEVEAVIARL

SEQ ID NO: 9385 - DNA, 1248 bp, Arabidopsis thaliana
ctcttgcttctcttcactcacaatctcacagcaaagcctctcgttgctagaggaatcaaacaatggtgtttgtgaagtccaccaagtcgaatgcttacttcaagaggtaccaagtgaagttcaggagaagaagagatggaaagactgactacagggcaaggatccgtcttatcaaccaagacaagaacaagtacaatactcctaagtatcgttttgttgtccggtttaccaacaaagacatagtggcacagattgtatctgcaagcattgctggtgacattgttaaagcttctgcttacgcacatgaactgcctcagtatggtctcactgttggtcttacaaactatgctgcagcttactgtactggccttcttttggctcgccgtgttttaaagatgttggaaatggatgacgagtatgagggaaacgttgaggccactggagaagacttttccgttgagccaactgattcaaggagacctttccgtgctcttcttgatgttggacttatcaggaccacaacaggaaaccgtgtgttcggtgctcttaagggtgctttggatggtggtcttgatatccctcacagtgacaagagatttgctgggttccacaaggagaacaagcaacttgatgctgaaatccacaggaactacatctatggtggccatgtctcaaactacatgaagctgttgggagaagatgagccagagaagttacaaactcacttcagtgcttacatcaagaaaggagttgaagctgagagcattgaggagttgtacaagaaggttcacgcagctattcgtgctgaccccaacccaaagaaaaccgtgaaacctgctcccaagcaacacaagaggtacaacttgaagaaacttacttacgaggagaggaagaacaagttgatcgagagagtcaaggcattgaatggagcaggtggtgatgatgatgatgaggacgatgaagagtaaatcagtcaagccttctttatctcatgcctcttgtagttttttatcttttgagcttaatgcctcaaattttctgttttcagactaaaacactcagcttttgtgttcacattttaattgtgttcgaggattttgatattgaggatacattttctttgaagtatcattatcttattattaccttcatcataattttcaagaatttgtatgacaatagtttgatgacttgattttatctgtagtttgctattgttaaatgtaagaactgttagacttcatctat

SEQ ID NO: 9386 - protein, 301 aa, Arabidopsis thaliana [sequence omitted]

SEQ ID NO: 9387 - protein, 190 aa, Arabidopsis thaliana
MLEMDDEYEGNVEATGEDFSVEPTDSRRPFRALLDVGLIRTTTGNRVFGALKGALDGGLDIPHSDKRFAGFHKENKQLDAEIHRNYIYGGHVSNYMKLLGEDEPEKLQTHFSAYIKKGVEAESIEELYKKVHAAIRADPNPKKTVKPAPKQHKRYNLKKLTYEERKNKLIERVKALNGAGGDDDDEDDEE

SEQ ID NO: 9388 - protein, 187 aa, Arabidopsis thaliana
MDDEYEGNVEATGEDFSVEPTDSRRPFRALLDVGLIRTTTGNRVFGALKGALDGGLDIPHSDKRFAGFHKENKQLDAEIHRNYIYGGHVSNYMKLLGEDEPEKLQTHFSAYIKKGVEAESIEELYKKVHAAIRADPNPKKTVKPAPKQHKRYNLKKLTYEERKNKLIERVKALNGAGGDDDDEDDEE

SEQ ID NO: 9389 - DNA, 1536 bp, Arabidopsis thaliana
gacaaagaagagtcgtgttggtgagctaactacccaacctgtgaagctacccccattctctctcaacgttttcgttttgaaatggcgaggaagaagatcagagagtatgactcaaagaggttggtgaaggaacatttcaaaaggctttctggcaaagagcttcctatcagatccgttcagattaatgaaacaactgatctaaatgagctagttgaaaaggaaccttggctctcgtctgagaagctggtggtgaaacctgacatgttgtttggaaagcgtggcaagagtggtttggttgccttgaaattagattttgctgatgttgccacttttgttaaagaacgtttgggaaaagaggtagagatgagtggatgcaaaggacccataacaacattcatagttgaaccatttgttccacacaatgaggagtattatctcaatgttgtctcggatcggcttggttgcagcataagcttttctgagtgtggaggaattgagatcgaggagaactgggacaaggtcaagacaatatttttaccaacaggtgcttccctgacacctgaaatatgtgcacctcttgtcgcaactcttcccttagagatcaaagctgaaattgaagaatttatcaaagtcattttcaccctattccaagatcttgatttcactttcttggagatgaatcctttcactctagttgatggaagtccttatcctctggatatgaggggtgagcttgatgatactgctgccttcaaaaactttaaaaaatggggcgacattgaatttcctctgccatttggaagagtaatgagtcctacagaaagctttatccacggactggatgagaagacaagtgcgtctttgaagtttaccgttctgaaccccaagggacggatttggacaatggtagctggtggaggagcaagtgtcatctatgcggatacggttggagatctcgggtatgcatctgaacttggcaactatgctgaatacagtggagcacccaaagaagatgaggttttgcagtacgccagagtcgttattgattgtgctacagcaaacccggatggaaaaagcagagcccttgtcatcggaggcggaattgccaacttcactgacgttgctgctactttcaatggcataatccgcgctcttaaagaaaaggaagcaaagctgaaagcagcaaggatgcatatatttgtgaggagaggaggaccaaactaccaaaagggacttgctaaaatgcgagcccttggagatgatatcggtgtccccatcgaggtctatggcccagaagcaaccatgacaggtatctgcaaggaggcaatccagtacatcacagcagcagcataagcttctctcagtaccttctatgaccaaaactttgtctgtgttttagagcctttatttactgtggttaagattactcaagctataagatacttgcaatttcttgaaaacttctgttgttcgattctctttcccctaacgttttcttcagattcaataaataatcgttacttttttttcccctct

SEQ ID NO: 9390 - protein, 423 aa, Arabidopsis thaliana
MARKKIREYDSKRLVKEHFKRLSGKELPIRSVQINETTDLNELVEKEPWLSSEKLVVKPDMLFGKRGKSGLVALKLDFADVATFVKERLGKEVEMSGCKGPITTFIVEPFVPHNEEYYLNVVSDRLGCSISFSECGGIEIEENWDKVKTIFLPTGASLTPEICAPLVATLPLEIKAEIEEFIKVIFTLFQDLDFTFLEMNPFTLVDGSPYPLDMRGELDDTAAFKNFKKWGDIEFPLPFGRVMSPTESFIHGLDEKTSASLKFTVLNPKGRIWTMVAGGGASVIYADTVGDLGYASELGNYAEYSGAPKEDEVLQYARVVIDCATANPDGKSRALVIGGGIANFTDVAATFNGIIRALKEKEAKLKAARMHIFVRRGGPNYQKGLAKMRALGDDIGVPIEVYGPEATMTGICKEAIQYITAAA

SEQ ID NO: 9391 - protein, 363 aa, Arabidopsis thaliana
MLFGKRGKSGLVALKLDFADVATFVKERLGKEVEMSGCKGPITTFIVEPFVPHNEEYYLNVVSDRLGCSISFSECGGIEIEENWDKVKTIFLPTGASLTPEICAPLVATLPLEIKAEIEEFIKVIFTLFQDLDFTFLEMNPFTLVDGSPYPLDMRGELDDTAAFKNFKKWGDIEFPLPFGRVMSPTESFIHGLDEKTSASLKFTVLNPKGRIWTMVAGGGASVIYADTVGDLGYASELGNYAEYSGAPKEDEVLQYARVVIDCATANPDGKSRALVIGGGIANFTDVAATFNGIIRALKEKEAKLKAARMHIFVRRGGPNYQKGLAKMRALGDDIGVPIEVYGPEATMTGICKEAIQYITAAA

SEQ ID NO: 9392 - protein, 329 aa, Arabidopsis thaliana
MSGCKGPITTFIVEPFVPHNEEYYLNVVSDRLGCSISFSECGGIEIEENWDKVKTIFLPTGASLTPEICAPLVATLPLEIKAEIEEFIKVIFTLFQDLDFTFLEMNPFTLVDGSPYPLDMRGELDDTAAFKNFKKWGDIEFPLPFGRVMSPTESFIHGLDEKTSASLKFTVLNPKGRIWTMVAGGGASVIYADTVGDLGYASELGNYAEYSGAPKEDEVLQYARVVIDCATANPDGKSRALVIGGGIANFTDVAATFNGIIRALKEKEAKLKAARMHIFVRRGGPNYQKGLAKMRALGDDIGVPIEVYGPEATMTGICKEAIQYITAAA

SEQ ID NO: 9393 - DNA, 1476 bp, Arabidopsis thaliana
aatcatgtaatttaaaataaaaataaaataaaaaaaagaagaagatatattaaagaggtttgtgaagacgaaggagtccaaaacctccctcaggagcttccgccttattcagagaggaggatccaaaagaaaagaggaaaaaatggactatatgtatggaccagggagacaccatctgtttgtaccaggaccagtgaacataccggaaccggtaatccgggcgatgaaccggaacaacgaggattaccggtcaccagccattccggcgcttacgaaaacattgttggaggatgttaagaagatattcaagaccacatcagggacaccttttctgtttcccacgaccgggactggtgcttgggagagtgccttgaccaacacgttatctcctggagacaggattgtttcgtttctgattggacaatttagcttgctctggattgaccagcagaagaggcttaatttcaatgttgatgtggttgagagtgattggggacaaggtgctaatctccaagtcttggcctcaaagctctcacaagacgagaatcataccatcaaagccatttgcattgtccacaacgagaccgcgaccggagttaccaatgacatctctgctgtccgcacactcctcgatcactacaagcatccggctttgctgctagtggacggtgtttcgtccatctgcgcgcttgatttccgaatggatgagtggggagtggacgtggccttgactgggtctcagaaagccttatctcttccaacaggacttggtattgtctgcgccagtcctaaagctttggaagctaccaaaacttctaaatctctcaaagtattctttgactggaatgactaccttaagttttacaagctaggaacctattggccatacacaccttccattcaacttctctacggtcttagagctgctcttgatcttatctttgaggaaggacttgagaacatcatcgcccgccatgctcgtttgggaaaggccaccaggcttgcggtggaagcatgggggctgaaaaactgcacacagaaggaggaatggataagtaacacagtgacagcagttatggtgcctccgcatatagacggttcggagattgtgagaagggcatggcagaggtacaacttaagtcttggtcttggtctcaacaaagtggctggaaaggttttcagaattggacatctaggaaatgtgaatgagttgcaacttctcgggtgtcttgcgggagtggagatgatactgaaggatgttggatacccagttgtaatgggaagtggagttgcagctgcctctacttatcttcagcaccacattcctctcattccctctagaatctaatccatgtggtccttctctttctttctcttcctctcaatgtaaacaaactctcatgttttctcttttcttcatctatatttttactacattatctatgtttttatttgctatctccaacaaacttattg

SEQ ID NO: 9394 - protein, 401 aa, Arabidopsis thaliana [sequence omitted]

SEQ ID NO: 9395 - protein, 398 aa, Arabidopsis thaliana
MYGPGRHHLFVPGPVNIPEPVIRAMNRNNEDYRSPAIPALTKTLLEDVKKIFKTTSGTPFLFPTTGTGAWESALTNTLSPGDRIVSFLIGQFSLLWIDQQKRLNFNVDVVESDWGQGANLQVLASKLSQDENHTIKAICIVHNETATGVTNDISAVRTLLDHYKHPALLLVDGVSSICALDFRMDEWGVDVALTGSQKALSLPTGLGIVCASPKALEATKTSKSLKVFFDWNDYLKFYKLGTYWPYTPSIQLLYGLRAALDLIFEEGLENIIARHARLGKATRLAVEAWGLKNCTQKEEWISNTVTAVMVPPHIDGSEIVRRAWQRYNLSLGLGLNKVAGKVFRIGHLGNVNELQLLGCLAGVEMILKDVGYPVVMGSGVAAASTYLQHHIPLIPSRI

SEQ ID NO: 9396 - protein, 374 aa, Arabidopsis thaliana
MNRNNEDYRSPAIPALTKTLLEDVKKIFKTTSGTPFLFPTTGTGAWESALTNTLSPGDRIVSFLIGQFSLLWIDQQKRLNFNVDVVESDWGQGANLQVLASKLSQDENHTIKAICIVHNETATGVTNDISAVRTLLDHYKHPALLLVDGVSSICALDFRMDEWGVDVALTGSQKALSLPTGLGIVCASPKALEATKTSKSLKVFFDWNDYLKFYKLGTYWPYTPSIQLLYGLRAALDLIFEEGLENIIARHARLGKATRLAVEAWGLKNCTQKEEWISNTVTAVMVPPHIDGSEIVRRAWQRYNLSLGLGLNKVAGKVFRIGHLGNVNELQLLGCLAGVEMILKDVGYPVVMGSGVAAASTYLQHHIPLIPSRI

SEQ ID NO: 9397 - DNA, 616 bp, Arabidopsis thaliana
ctagaacatcctaatcgaaaaaaatggtcaatattaatctcatttagcttataaatttgggagcttcctctatcattaattttcattcataaatttttcttcaatttgaattttctcgagaaaaatgtcttgctgtggaggaaactgcggatgtggatctggctgcaagtgcggcaacggttgtggaggttgcaaaatgtaccctgacttgggattctccggcgagacaaccacaactgagacttttgtcttgggcgttgcacctgcgatgaagaatcagtacgaggcttcaggggagagtaacaacgctgagaacgatgcttgcaagtgtggatctgactgcaagtgtgatccttgcacctgcaagtgaagaagcctttttaaataagcagagataatcgagtctctttaattaattaagttattcaataagtaaacaatatataggatggtgtttttaggtttggtttatgtgtaataatggcttcagcttatcttttagccgatcattgtcttttgtgtttgttttgatcatatcttttagatgtctagcaactctgccatgtgatgagtttgtacttccagtggaatgataataatattatagttttaaatc

SEQ ID NO: 9398 - protein, 81 aa, Arabidopsis thaliana
MSCCGGNCGCGSGCKCGNGCGGCKMYPDLGFSGETTTTETFVLGVAPAMKNQYEASGESNNAENDACKCGSDCKCDPCTCK

SEQ ID NO: 9399 - protein, 57 aa, Arabidopsis thaliana
MYPDLGFSGETTTTETFVLGVAPAMKNQYEASGESNNAENDACKCGSDCKCDPCTCK

SEQ ID NO: 9400 - protein, 40 aa, Arabidopsis thaliana
MCNNGFSLSFSRSLSFVFVLIISFRCLATLPCDEFVLPVE

SEQ ID NO: 9401 - DNA, 1302 bp, Arabidopsis thaliana
ttggagagaagaacgttttaataaacagagagcagagcacttgttctaaagatcaaagcttaagtgagaagcagaaaaaaaaatggcgaaatctcagatctggtttggttttgcgttactcgcgttgcttctggtttcagccgtagctgacgatgtggttgttttgactgacgatagcttcgaaaaggaagttggtaaagataaaggagctctcgtcgagttttacgctccctggtgtggtcactgcaagaaacttgctccagagtatgaaaagctaggggcaagcttcaagaaggctaagtctgtgttgattgcaaaggttgattgtgatgagcaaaagagtgtctgtactaaatatggtgttagtggatacccaaccattcagtggtttcctaaaggatctcttgaacctcaaaagtatgagggtccacgcaatgctgaagctttggctgaatacgtgaacaaggaaggaggcaccaacgtaaaattagctgcagttccacaaaacgtggttgttttgacacctgacaatttcgatgagattgttctggatcaaaacaaagatgtcctagtcgaattttatgcaccatggtgtggccactgcaaatcactcgctcccacatacgaaaaggtagccacagtgtttaaacaggaagaaggtgtagtcatcgccaatttggatgctgatgcacacaaagcccttggcgagaaatatggagtgagtggattcccaacattgaaattcttcccaaaggacaacaaagctggtcacgattatgacggtggcagggatttagatgactttgtaagcttcatcaacgagaaatctgggaccagcagggacagtaaagggcagcttacttcaaaggctggtatagtcgaaagcttagatgctttggtaaaagagttagttgcagctagtgaagatgagaagaaggcagtgttgtctcgcatagaagaggaagcaagtacccttaagggctccaccacgaggtatggaaagctttacttgaaactcgcaaagagctacatagaaaaaggttcagactatgctagcaaagaaacggagaggcttggacgggtgcttgggaagtcgataagtccagtgaaagctgatgaactcactctcaagagaaatatcctaaccacgttcgttgcttcttcttaaaagtcatatagcttgaagctaagagaataggagtcgagagagtttataactgatactgttttgagattttatgtttgtcaagatcaagaacgtctgtggttatttctggttagttctgaaactcttttgaaccc

SEQ ID NO: 9402 - protein, 361 aa, Arabidopsis thaliana
MAKSQIWFGFALLALLLVSAVADDVVVLTDDSFEKEVGKDKGALVEFYAPWCGHCKKLAPEYEKLGASFKKAKSVLIAKVDCDEQKSVCTKYGVSGYPTIQWFPKGSLEPQKYEGPRNAEALAEYVNKEGGTNVKLAAVPQNVVVLTPDNFDEIVLDQNKDVLVEFYAPWCGHCKSLAPTYEKVATVFKQEEGVVIANLDADAHKALGEKYGVSGFPTLKFFPKDNKAGHDYDGGRDLDDFVSFINEKSGTSRDSKGQLTSKAGIVESLDALVKELVAASEDEKKAVLSRIEEEASTLKGSTTRYGKLYLKLAKSYIEKGSDYASKETERLGRVLGKSISPVKADELTLKRNILTTFVASS

SEQ ID NO: 9403 - DNA, 1072 bp, Arabidopsis thaliana
atcatcatcatcatctctttcttcttccaaaagtcataatcatgtcaaagtctctagctggattggcggttttggccgctctttttattgcggttgatgcgtttaggccttctggttaactaatggtcacgctacattctatggaggaagtgacgcttctggaacaatgggtggagcttgtggttacggagatctttactcggcggggtacgggacaatgacggcggcgttaagcacggctctgttcaacgacggagcttcttgcggagaatgctataggataacgtgtgatcacgcggcggactcacggtggtgcttgaaaggagcttctgtggttattacagccactaacttttgcccaccaaactttgctttgcctaacaacaacggtggttggtgcaatccgccgcttaaacatttcgacatggcacaacccgcttgggaaaagatcggaatttacagaggaggaatcgttcccgtcgttttccaaagagtaagctgttacaagaaaggaggagttagattcagaataaacggaagagactacttcgagctagtgaatattcaaaatgtaggaggagcaggttctattaaatctgtatccatcaaaggatcaaagactggttggttagccatgtctcgtaactggggagctaattggcaatcgaatgcttatctagatggtcaagctctctctttctccattaccactactgatggtgctactagagtctttctcaatgttgttccttcttcttggtcttttggacagatttattcttccaacgttcagttttaagttttttttttttgttttgtatgaaatatcattggcagtggtcgcgctttgagtctgtttcttttctccctgagcgacccgccctctttgttttttttatcttatggtatgatgggtctgttaatacaaaagacccgatatgatttgagggtatatgattatatgaagtgtattgtatttgaatgtttcagactcgaaaaagattctgtagcaaaaggagttttaacacatttgtacttggttttgtttatatgaagtttgttttagtttttt

SEQ ID NO: 9404 - protein, 210 aa, Arabidopsis thaliana
MGGACGYGDLYSAGYGTMTAALSTALFNDGASCGECYRITCDHAADSRWCLKGASVVITATNFCPPNFALPNNNGGWCNPPLKHFDMAQPAWEKIGIYRGGIVPVVFQRVSCYKKGGVRFRINGRDYFELVNIQNVGGAGSIKSVSIKGSKTGWLAMSRNWGANWQSNAYLDGQALSFSITTTDGATRVFLNVVPSSWSFGQIYSSNVQF

SEQ ID NO: 9405 - protein, 193 aa, Arabidopsis thaliana
MTAALSTALFNDGASCGECYRITCDHAADSRWCLKGASVVITATNFCPPNFALPNNNGGWCNPPLKHFDMAQPAWEKIGIYRGGIVPVVFQRVSCYKKGGVRFRINGRDYFELVNIQNVGGAGSIKSVSIKGSKTGWLAMSRNWGANWQSNAYLDGQALSFSITTTDGATRVFLNVVPSSWSFGQIYSSNVQF

SEQ ID NO: 9406 - protein, 124 aa, Arabidopsis thaliana
MAQPAWEKIGIYRGGIVPVVFQRVSCYKKGGVRFRINGRDYFELVNIQNVGGAGSIKSVSIKGSKTGWLAMSRNWGANWQSNAYLDGQALSFSITTTDGATRVFLNVVPSSWSFGQIYSSNVQF

SEQ ID NO: 9407 - DNA, 1353 bp, Arabidopsis thaliana
cagacaattatttgttcatcttgaatttgtgtcccaagaacatatctctctctctctctctcctcaccttggattctctgtttgatgattgctagttctttagaagagcaatgagttattctggagccggactcggaaagcctggctcaggtaaaaggagaataagggatcttttaactcaatctgataaccgagtctgcgctgattgtggcgctccagatcctaagtgggcgtcagctaatattggagtgtttatatgcttaaaatgttgtggtgtccacagaagccttggcagtcatatctcaaaggtcttatccgtgacattggatgaatggtcagatgaagaagtcgattcgatgattgaaattggaggaaatgcctctgcaaattcaatttacgaggcgtttattcctgaaggtagctctaagcctggacctgatgctagtcatgaccagcgtatgaggttcattaggtcgaaatatgagcaccaagagtttctgaaaccaagcttgcggatcacatccgtgaggggctctagtacaaagactccagcatttctttcatcgagtctatctaaaaagattgttgatagctttcgcactaattcatcatcgcaacagccgcaacttgaaggcatggttgagtttattggattgttgaaggtgactattaaaaagggtaccaatatggccatccgagatatgatgtcaagtgatccctatgttgtgttgactctaggacaacagaaggctcaatctactgtagtgaagagcaacttaaaccctgtctggaatgaggaactcatgctctctgttcctcataactatggctcagtgaaattgcaagtgtttgactatgacacattttctgctgatgacataatgggagaagctgagattgatatccagcctctgattacatctgcaatggcttttggagaccctgaaatgtttggagatatgcagattggaaaatggctgaaatcgcacgacaatgctcttatagaagatagcatcatcaacattgcagatggtaaagtgaagcaagaggttcaaatcaagcttcagaatgttgaatctggtgaactagaactagaaatggagtggctacctcttgagcaataaataatcaactatataatagggtcattatatataccaaacaaattttattactgtattcattattttaacattcccccttggttcttgtttgacaaatttttgaaactttgatctcattgaaaactttctttcgtactttgttgttgtaatgttcttttggcagattagatatttgtataactcaaatgattatatgttttgactcatgttcttcaaaagatttcatttg

SEQ ID NO: 9408 - protein, 337 aa, Arabidopsis thaliana
MSYSGAGLGKPGSGKRRIRDLLTQSDNRVCADCGAPDPKWASANIGVFICLKCCGVHRSLGSHISKVLSVTLDEWSDEEVDSMIEIGGNASANSIYEAFIPEGSSKPGPDASHDQRMRFIRSKYEHQEFLKPSLRITSVRGSSTKTPAFLSSSLSKKIVDSFRTNSSSQQPQLEGMVEFIGLLKVTIKKGTNMAIRDMMSSDPYVVLTLGQQKAQSTVVKSNLNPVWNEELMLSVPHNYGSVKLQVFDYDTFSADDIMGEAEIDIQPLITSAMAFGDPEMFGDMQIGKWLKSHDNALIEDSIINIADGKVKQEVQIKLQNVESGELELEMEWLPLEQ

SEQ ID NO: 9409 - protein, 255 aa, Arabidopsis thaliana
MIEIGGNASANSIYEAFIPEGSSKPGPDASHDQRMRFIRSKYEHQEFLKPSLRITSVRGSSTKTPAFLSSSLSKKIVDSFRTNSSSQQPQLEGMVEFIGLLKVTIKKGTNMAIRDMMSSDPYVVLTLGQQKAQSTVVKSNLNPVWNEELMLSVPHNYGSVKLQVFDYDTFSADDIMGEAEIDIQPLITSAMAFGDPEMFGDMQIGKWLKSHDNALIEDSIINIADGKVKQEVQIKLQNVESGELELEMEWLPLEQ

SEQ ID NO: 9410 - protein, 221 aa, Arabidopsis thaliana
MRFIRSKYEHQEFLKPSLRITSVRGSSTKTPAFLSSSLSKKIVDSFRTNSSSQQPQLEGMVEFIGLLKVTIKKGTNMAIRDMMSSDPYVVLTLGQQKAQSTVVKSNLNPVWNEELMLSVPHNYGSVKLQVFDYDTFSADDIMGEAEIDIQPLITSAMAFGDPEMFGDMQIGKWLKSHDNALIEDSIINIADGKVKQEVQIKLQNVESGELELEMEWLPLEQ

SEQ ID NO: 9411 - DNA, 1295 bp, Arabidopsis thaliana
atccggagacatccattttctctggtagctgtttacttcttcttcttcttcttcctcctcctctgttcgtcaatcgccgatctcgttgcttcattttccttgagatcgattggtacaagtgttcatccaatggttggaggaggagttatccggcagcttcttagaaggaaacttcattcccaatcagtcgcaactccggtattgtcatggttgtcttcgaagaaagcgaatgaagatgctgggtctgctggtttaagagcatttgctctcatgggtgctggtattaccggattattgagtttttctactgttgcatctgctgatgaggctgaacatggtctggagtgtcctaactacccttggccacatgagggcattctcagctcatatgaccatgcttcgatccgtcgtggtcaccaagtttatcagcaagtttgtgcgtcttgccattcgatgtctctgatctcataccgagacttggtgggtgttgcctacacagaggaagaggcgaaggccatggcagctgaaatcgaggttgttgatggaccaaatgatgagtgtgagatgttcacccgacctggtaaactcagtgatcggcttcctgaaccatacttaaatgaatcggctgctaggttcgccaatggaggagcgtatccaccggatctaagtcttgtaactaaggcacgtcacaatggccaaaattatgtctttgctctgttgactggttatcgtgatcctcctgctggaatttcgatcagagaggggctacactacaatccttatttccctggtggagcaatcgctatgccaaaaatgctcaacgatgaagctgtggaatatgaagatggaactcctgcaacagaagcacagatgggtaaagatgttgtatccttcttgtcctgggcagctgaaccagagatggaagagaggaaattgatggggttcaaatggatattcttactgtctttggctctgcttcaagctgcgtattacaggagactgaaatggtcagtactcaaatcccgtaagcttgttctcgacgttgttaactaatcccgtgaagatcaccttttctctgggtaataatcattaatcttgaaagggataaatggtgaatcccactttttgtctcaaaagacatgtttctttgtttattgtttagaaagtctaatgaggcaaagaagtaaagcttttttaacctcaagtcacacatgattttgagattatattatttctttttggtttgttgtctcctaaaccggactcggtttgtcttaataaaaatgtggttttac

SEQ ID NO: 9412 - protein, 350 aa, Arabidopsis thaliana
IRRHPFSLVAVYFFFFFFLLLCSSIADLVASFSLRSIGTSVHPMVGGGVIRQLLRRKLHSQSVATPVLSWLSSKKANEDAGSAGLRAFALMGAGITGLLSFSTVASADEAEHGLECPNYPWPHEGILSSYDHASIRRGHQVYQQVCASCHSMSLISYRDLVGVAYTEEEAKAMAAEIEVVDGPNDECEMFTRPGKLSDRLPEPYLNESAARFANGGAYPPDLSLVTKARHNGQNYVFALLTGYRDPPAGISIREGLHYNPYFPGGAIAMPKMLNDEAVEYEDGTPATEAQMGKDVVSFLSWAAEPEMEERKLMGFKWIFLLSLALLQAAYYRRLKWSVLKSRKLVLDVVN

SEQ ID NO: 9413 - protein, 307 aa, Arabidopsis thaliana
MVGGGVIRQLLRRKLHSQSVATPVLSWLSSKKANEDAGSAGLRAFALMGAGITGLLSFSTVASADEAEHGLECPNYPWPHEGILSSYDHASIRRGHQVYQQVCASCHSMSLISYRDLVGVAYTEEEAKAMAAEIEVVDGPNDECEMFTRPGKLSDRLPEPYLNESAARFANGGAYPPDLSLVTKARHNGQNYVFALLTGYRDPPAGISIREGLHYNPYFPGGAIAMPKMLNDEAVEYEDGTPATEAQMGKDVVSFLSWAAEPEMEERKLMGFKWIFLLSLALLQAAYYRRLKWSVLKSRKLVLDVVN

SEQ ID NO: 9414 - protein, 260 aa, Arabidopsis thaliana
MGAGITGLLSFSTVASADEAEHGLECPNYPWPHEGILSSYDHASIRRGHQVYQQVCASCHSMSLISYRDLVGVAYTEEEAKAMAAEIEVVDGPNDECEMFTRPGKLSDRLPEPYLNESAARFANGGAYPPDLSLVTKARHNGQNYVFALLTGYRDPPAGISIREGLHYNPYFPGGAIAMPKMLNDEAVEYEDGTPATEAQMGKDVVSFLSWAAEPEMEERKLMGFKWIFLLSLALLQAAYYRRLKWSVLKSRKLVLDVVN

SEQ ID NO: 9415 - DNA, 1375 bp, Arabidopsis thaliana
aaaaaactaaacacaaaaatagaaaatatcgaaaatgagatgagagagagaggaggagtctctcatcgtgagtagggcttttgactccctccctactttgcctacttcttcttcttcctctgtggccactctacacagtccacacctacttcaagacacctttctcatccttgagatcggcgtcagatcctccgccgcttctcctcttcactatctccgtgttaaagatgatggaatctggcgctggtttcgtggccatggaagagaggatctctcctggaagtttcttccagtatcctctttctggattccgtgcttctcctaatcgatccccttgtcctccctctgatcgtgaaaggtacttgactgaattattgcaagagagacaaaagttgggtccctttttgcaagttatgccaaattgctgcagactgcttaatcatgaaatcaggagggtctctagttttcctgatcttgatagatatgagcatggcagtccatttagatcgcttggtcagccgacaaatggaaagcttgatttagagggatggtcgatgatgcaagccgaggaaaactgtcacctccagagagcttctccatttcgcggtccttccccagtgggctggattgggatgccgggactccctaacccacccattgtgaaaaaagtgattagacttgatgtcccagtggataaatatccaagctataattttgttgggaggattcttgggccacgtggaaactccctaaaaagagttgagctagcaacccactgcagggtgtttatcagaggacgaggatctgtgaaggatactgtcaaggaggaaaaattaaaaggtaagccagggtacgagcatctctgcgagccactacatgtactgatcgaggccgagcttccagaagacataataaactctcgattggagcatgcagtgcatttcctggaatcactcctgaagccgatggacgagtcaatggatcactacaagagggaacagctgaaggagttagcggctttgaatggtacactaagggaggagagtccgagtccgagcttgagcccttgtttgagccccagcatgtcccctttcaacagcaagcgtgctaagacagagatatgatcaagagaaaccactagtgcatgggtcttgtgggcaggatcatgagtttgctaagttctaacgtttggactcttgaattaatttattttgtcattaactttattctttatttttgttggttagctgagatgaccattaaccagtgggtaataaactaataatggtgtttatgaaattgtaatctccttctcaatcattgtaacctttatttaagttttaaaccccaaacgtttatttcattttaagttttg

SEQ ID NO: 9416 - protein, 298 aa, Arabidopsis thaliana
MMESGAGFVAMEERISPGSFFQYPLSGFRASPNRSPCPPSDRERYLTELLQERQKLGPFLQVMPNCCRLLNHEIRRVSSFPDLDRYEHGSPFRSLGQPTNGKLDLEGWSMMQAEENCHLQRASPFRGPSPVGWIGMPGLPNPPIVKKVIRLDVPVDKYPSYNFVGRILGPRGNSLKRVELATHCRVFIRGRGSVKDTVKEEKLKGKPGYEHLCEPLHVLIEAELPEDIINSRLEHAVHFLESLLKPMDESMDHYKREQLKELAALNGTLREESPSPSLSPCLSPSMSPFNSKRAKTEI

SEQ ID NO: 9417 - protein, 297 aa, Arabidopsis thaliana
MESGAGFVAMEERISPGSFFQYPLSGFRASPNRSPCPPSDRERYLTELLQERQKLGPFLQVMPNCCRLLNHEIRRVSSFPDLDRYEHGSPFRSLGQPTNGKLDLEGWSMMQAEENCHLQRASPFRGPSPVGWIGMPGLPNPPIVKKVIRLDVPVDKYPSYNFVGRILGPRGNSLKRVELATHCRVFIRGRGSVKDTVKEEKLKGKPGYEHLCEPLHVLIEAELPEDIINSRLEHAVHFLESLLKPMDESMDHYKREQLKELAALNGTLREESPSPSLSPCLSPSMSPFNSKRAKTEI

SEQ ID NO: 9418 - protein, 288 aa, Arabidopsis thaliana
MEERISPGSFFQYPLSGFRASPNRSPCPPSDRERYLTELLQERQKLGPFLQVMPNCCRLLNHEIRRVSSFPDLDRYEHGSPFRSLGQPTNGKLDLEGWSMMQAEENCHLQRASPFRGPSPVGWIGMPGLPNPPIVKKVIRLDVPVDKYPSYNFVGRILGPRGNSLKRVELATHCRVFIRGRGSVKDTVKEEKLKGKPGYEHLCEPLHVLIEAELPEDIINSRLEHAVHFLESLLKPMDESMDHYKREQLKELAALNGTLREESPSPSLSPCLSPSMSPFNSKRAKTEI

SEQ ID NO: 9419 - DNA, 1085 bp, Arabidopsis thaliana
aatatccgtattccctctctctctccctttctatctgagcttctctctcttactctctccagagcaacaatggctgcgactgcttcttctcttacaatcgcgtcgtcattctccgaaccacggactcagatccattcctcgagacgtttgaatctccctcttcaatattcaatcccgtacaaggtgttacggagtaggagtagaagattaggactcgtcgtcagttctgtttcagctcccaacgttgagctccgtactggacctgatgatctcatttctaccctcctctctaaggttgcgaatagtgatggaggtgtgacgctaagccctgagcagcacaaggaggtggcacaagtggccggagagcttcaaaagtactgtgtcaaggagcctgtcaaaaatcctctcatttttggagattgggaagtggtgtactgttctagaccaacctctcctggtggaggctacagaagcgtgataggccgtctcttcttcaaaacgaaagagatgatacaagccatcgatgctcctgatatcgttaggaacaaagtttccattaatgcttttggttttctagacggagacgtctccttgacagggaagctgaaagcgttggacagtgagtgggtgcaggtgatatttgagcctccggaaatcaaggttggatctttggagttcaaatacgggttcgaaagcgaagtgaagcttcggatcacatacgttgatgagaaacttaggttgggattgggatctaaaggatcattgttcgtctttagaaggcgtcaataatatatacgtttctccctcgtgcatcaaccaatgcaaatcactacagaaaaaaaggaaacaacatatggggtcctgcgagagtatgatggtcaatatccacaatgctgtgtacacaaatggtgttttagatataactttgttgtaatgtaaacttcattttaagagtgtctcacttcagatgagttgttgaggaagctactggtgaacttcaacatcttttcgcaaagaattactatagcaacaaagaaagataaatgacttagcagcctttatgttcaaattcaaaacctctcacc

SEQ ID NO: 9420 - protein, 262 aa, Arabidopsis thaliana
NIRIPSLSPFLSELLSLTLSRATMAATASSLTIASSFSEPRTQIHSSRRLNLPLQYSIPYKVLRSRSRRLGLVVSSVSAPNVELRTGPDDLISTLLSKVANSDGGVTLSPEQHKEVAQVAGELQKYCVKEPVKNPLIFGDWEVVYCSRPTSPGGGYRSVIGRLFFKTKEMIQAIDAPDIVRNKVSINAFGFLDGDVSLTGKLKALDSEWVQVIFEPPEIKVGSLEFKYGFESEVKLRITYVDEKLRLGLGSKGSLFVFRRRQ

SEQ ID NO: 9421 - protein, 239 aa, Arabidopsis thaliana
MAATASSLTIASSFSEPRTQIHSSRRLNLPLQYSIPYKVLRSRSRRLGLVVSSVSAPNVELRTGPDDLISTLLSKVANSDGGVTLSPEQHKEVAQVAGELQKYCVKEPVKNPLIFGDWEVVYCSRPTSPGGGYRSVIGRLFFKTKEMIQAIDAPDIVRNKVSINAFGFLDGDVSLTGKLKALDSEWVQVIFEPPEIKVGSLEFKYGFESEVKLRITYVDEKLRLGLGSKGSLFVFRRRQ

SEQ ID NO: 9422 - DNA, 660 bp, Arabidopsis thaliana
atcgaaaaaaaaagcccctaattttttctccgcccaagagacaaaaatccttcgcaatcgagcaacggaagctcctgcatccaccgtccaaatctcttctaacgtcgccggagatcgatcgttggggaagtagagaatggcgacgtttgagctgtacaggagatcgacgatcgggatgtgtctgacggagactttggacgagatggttcagagcggtacgctgagccctgagctagctatccaagtccttgttcaatttgacaagtccatgactgaagctctggagagccaagtgaagaccaaggtgtccatcaagggacacctgcacacttacaggttctgtgacaatgtctggaccttcatattacaggacgcaatgttcaagagtgacgatcgtcaagagaatgtgagccgggtgaagatagtggcatgtgattccaagctgctcacacagtgagatgcaaattgtctgcagggaatttactttcctttgtactagattttgagttttttcactttgtaaactcagcacttgctatatatgttgagcacttgctatatgttgagctccatctgcagccatcaatttagcctatatgtaaattctcggcccaaggacataaggatacattctgttgctataagaaagttcttgagctc

SEQ ID NO: 9423 - protein, 106 aa, Arabidopsis thaliana
MATFELYRRSTIGMCLTETLDEMVQSGTLSPELAIQVLVQFDKSMTEALESQVKTKVSIKGHLHTYRFCDNVWTFILQDAMFKSDDRQENVSRVKIVACDSKLLTQ

SEQ ID NO: 9424 - protein, 93 aa, Arabidopsis thaliana
MCLTETLDEMVQSGTLSPELAIQVLVQFDKSMTEALESQVKTKVSIKGHLHTYRFCDNVWTFILQDAMFKSDDRQENVSRVKIVACDSKLLTQ

SEQ ID NO: 9425 - protein, 84 aa, Arabidopsis thaliana
MVQSGTLSPELAIQVLVQFDKSMTEALESQVKTKVSIKGHLHTYRFCDNVWTFILQDAMFKSDDRQENVSRVKIVACDSKLLTQ

SEQ ID NO: 9426 - DNA, 1209 bp, Arabidopsis thaliana
accatctctctctgtaatcgctcttctcgatgtcaactatttccttcttcctttgctcttagggttagggtttattttgttctttctctatatccttcaatcaatgtgaaaaaaaagctctcccttttggcagtttccgatgtttggtcgccattcgattatcccaaataaccagattggtaccgcctctgcttccgctggtgaagaccatgtctctgcctccgctacgtctggtcacattccttacgacgatatggaagaaatccctcatcctgactctatctatggtgctgcctccgatttgattcccgatggctctcaattggttgctcaccgatccgatggctctgaattacttgtttctcggccaccggaaggggcgaatcagcttacgatctcgttccgtggacaagtttacgtttttgatgccgttggtgctgacaaggtggatgctgtgttgtcgctgttgggtggttctactgagcttgctcctggtccgcaggtgatggaactagctcaacagcagaatcatatgcctgttgtagaatatcagagccgctgtagccttccgcaacgggcacaatccttggataggtttcggaagaagaggaatgctagatgtttcgagaagaaagtaagatacggtgttcgccaagaagttgccttaagaatggcacgtaataaaggtcaattcacctcttcaaagatgacagatggggcttataactctggcacagatcaagattctgcccaagatgatgcccatccagaaatatcgtgtactcattgcggcattagttccaaatgtacaccaatgatgcgacgtggcccttccggccccaggactctctgcaatgcctgtggacttttttgggctaacaggggtacattgagggatctctcaaagaaaacagaagagaatcagttggctttaatgaaaccggatgatggtgggagtgttgctgatgctgctaacaacttaaacactgaagctgcaagtgttgaagaacacacttccatggtttctcttgccaatggggataattctaatctgttaggtgatcactaaatactgtgataagaatcagaagatagaaatctttgtagaatcagatggtcttctctatgaatttatcttttcaccatcacatgtattatagaaaccgtaaccgaacctcaaatcaaataccatatcagatgtctttggtt

SEQ ID NO: 9427 - protein, 309 aa, Arabidopsis thaliana
MFGRHSIIPNNQIGTASASAGEDHVSASATSGHIPYDDMEEIPHPDSIYGAASDLIPDGSQLVAHRSDGSELLVSRPPEGANQLTISFRGQVYVFDAVGADKVDAVLSLLGGSTELAPGPQVMELAQQQNHMPVVEYQSRCSLPQRAQSLDRFRKKRNARCFEKKVRYGVRQEVALRMARNKGQFTSSKMTDGAYNSGTDQDSAQDDAHPEISCTHCGISSKCTPMMRRGPSGPRTLCNACGLFWANRGTLRDLSKKTEENQLALMKPDDGGSVADAANNLNTEAASVEEHTSMVSLANGDNSNLLGDH

SEQ ID NO: 9428 - protein, 271 aa, Arabidopsis thaliana
MEEIPHPDSIYGAASDLIPDGSQLVAHRSDGSELLVSRPPEGANQLTISFRGQVYVFDAVGADKVDAVLSLLGGSTELAPGPQVMELAQQQNHMPVVEYQSRCSLPQRAQSLDRFRKKRNARCFEKKVRYGVRQEVALRMARNKGQFTSSKMTDGAYNSGTDQDSAQDDAHPEISCTHCGISSKCTPMMRRGPSGPRTLCNACGLFWANRGTLRDLSKKTEENQLALMKPDDGGSVADAANNLNTEAASVEEHTSMVSLANGDNSNLLGDH

SEQ ID NO: 9429 - protein, 187 aa, Arabidopsis thaliana
MELAQQQNHMPVVEYQSRCSLPQRAQSLDRFRKKRNARCFEKKVRYGVRQEVALRMARNKGQFTSSKMTDGAYNSGTDQDSAQDDAHPEISCTHCGISSKCTPMMRRGPSGPRTLCNACGLFWANRGTLRDLSKKTEENQLALMKPDDGGSVADAANNLNTEAASVEEHTSMVSLANGDNSNLLGDH

SEQ ID NO: 9430 - DNA, 578 bp, Arabidopsis thaliana
attacaagaccaaactcaaagtctctttctcccccaaacccaaaaacattgacccaaagagagagagacttctatcgtgcgcacctctctctcttaatcctttatcctgcgcaccaccaccaccatcttcttctccggcgaaaacaaacccaccgccatggggaaaggtcgtgcactttccgacggagtgatcaaaaagatcatcctttcatacacctatgtcgcaatctggatcttcctcagcttcacagtcatcgtctacaacaaatacatcctcgacaagaagatgtataattggccattcccaataactctcaccatgattcacatgggtttttgctcttctttagctgtgattctcatcaaagtcttcaaagtcgtcgagcctgtttcaatgtcacgcgagacttatctcagatccgtcgtaccaatcggcgcgttgtactcactttctctctggttatcaaactctgcttacatctacctctctgtttccttcattcaaatgctcaaagccctaatgcctgtagctgtttactcaatcggggttttgttgaagaaagagactttcaaatctc

SEQ ID NO: 9431 - protein, 140 aa, Arabidopsis thaliana
MGKGRALSDGVIKKIILSYTYVAIWIFLSFTVIVYNKYILDKKMYNWPFPITLTMIHMGFCSSLAVILIKVFKVVEPVSMSRETYLRSVVPIGALYSLSLWLSNSAYIYLSVSFIQMLKALMPVAVYSIGVLLKKETFKS

SEQ ID NO: 9432 - protein, 97 aa, Arabidopsis thaliana
ITRPNSKSLSPPNPKTLTQRERDFYRAHLSLLILYPAHHHHHLLLRRKQTHRHGERSCTFRRSDQKDHPFIHLCRNLDLPQLHSHRLQQIHPRQEDV

SEQ ID NO: 9433 - protein, 97 aa, Arabidopsis thaliana
MYNWPFPITLTMIHMGFCSSLAVILIKVFKVVEPVSMSRETYLRSVVPIGALYSLSLWLSNSAYIYLSVSFIQMLKALMPVAVYSIGVLLKKETFKS

SEQ ID NO: 9434 - DNA, 954 bp, Arabidopsis thaliana
tcatttctcttttaactgagacgaaaaagattcacttctccggcgagcaatttcaagtttctcggtaatggcgatgtcttctggaactctcaggatctctgcgaccttagtatctccttatcatcatcaccaccgtaatcgcctctcattaccttcttcttcttccaaggttgatttcacgggattcataagcaatggcgtaaacagtttggaaactcagaaatgtactcctggactggcgatcagccgcgaaaacacacgaggtcaggtgaaggttcttgcaaggaacaccggagactatgaactatcaccaagcccagcagagcaagagatagagagctttctctataatgccatcaacatgggtttctttgacaggttaaacttggcttggaagataatattcccatctcacgcatcaagaagaagctccaacgcaagaattgcaaagcagcggctcaagatgatcctcttctccgacaggtgtgatgttagtgacgaagctaaaaggaaaatcgtcaacaacattatccatgcactgtcggatttcgtagagatagaatcagaggaaaaagttcagctaaatgtttccacggacggtgaccttgggaccatttactcggtcacggtgcctgttagaagggtgaaaccagagtaccaagacgtggacgaggctggaaccataaccaacgtggaatacaaagatacccgtgatggttctgtcgatgtcaggttcgatttttatgttccagagtgatgaaaaggcacagtcttagatttatttgctggatagtatcttgtctgttatgttgatgttcttcaagtttagtctggagggaacaaagacagtttcttgacactccccatgtatatatatatatgcaacttctcttttcttataagtttttttactgtgtttgacacgagctggtcggctcaacctattttagtttc

SEQ ID NO: 9435 - protein, 229 aa, Arabidopsis thaliana
MAMSSGTLRISATLVSPYHHHHRNRLSLPSSSSKVDFTGFISNGVNSLETQKCTPGLAISRENTRGQVKVLARNTGDYELSPSPAEQEIESFLYNAINMGFFDRLNLAWKIIFPSHASRRSSNARIAKQRLKMILFSDRCDVSDEAKRKIVNNIIHALSDFVEIESEEKVQLNVSTDGDLGTIYSVTVPVRRVKPEYQDVDEAGTITNVEYKDTRDGSVDVRFDFYVPE

SEQ ID NO: 9436 - protein, 227 aa, Arabidopsis thaliana
MSSGTLRISATLVSPYHHHHRNRLSLPSSSSKVDFTGFISNGVNSLETQKCTPGLAISRENTRGQVKVLARNTGDYELSPSPAEQEIESFLYNAINMGFFDRLNLAWKIIFPSHASRRSSNARIAKQRLKMILFSDRCDVSDEAKRKIVNNIIHALSDFVEIESEEKVQLNVSTDGDLGTIYSVTVPVRRVKPEYQDVDEAGTITNVEYKDTRDGSVDVRFDFYVPE

SEQ ID NO: 9437 - protein, 131 aa, Arabidopsis thaliana
MGFFDRLNLAWKIIFPSHASRRSSNARIAKQRLKMILFSDRCDVSDEAKRKIVNNIIHALSDFVEIESEEKVQLNVSTDGDLGTIYSVTVPVRRVKPEYQDVDEAGTITNVEYKDTRDGSVDVRFDFYVPE

SEQ ID NO: 9438 - DNA, 1144 bp, Arabidopsis thaliana
attttaatctctcttctcttttttttgtctgtgcaaagatatcactttcttcttcttcttctcccagacatcagcaagattcaggagattaaaaccttaaattaaaacaatacaaactccaaattcaccggaggaaataacttaaaacttgaatctgaaaagatgagctgcaatggttgccgtgttctccggaaaggttgcagcgagaattgtatcctccggccatgtattcaatggattgaaaccgccgatgctcaaggccacgccaccgtcttcgtcgctaaattcttcggccgtgctggtctcatgtcctttatctccgctgttccggattctcaacgtcctgctttgtttcagtcgttgctctacgaagcttgtggaagaactgtcaatccagttaacggagcaatcggaatgttatggactggaaactggaatatctgtcaagcggctgttgaaacagtgcttcgcggcggttctttaagaccgatcccggagcttctcactcacggcggcggtttcgctggctttccttcgcctacatctgaagaagcatctgagatctgcaccgaaatgttgaatctccagcaaaatgattccaccgatcgtaacatctatcatcattcacgattctcaagctctagatctagatctactatggattcttcttctccgacgaaacgtaagagattatcatcggaagaccaaccatcttcggagcttgatctatctctcatccctaattttcccattaagcaagcaacaccttcttctacacggcggcgatcagtaacaccgtcgatgaactcagaggactccgggacgacgacgactacgacggcgttttgtgacaagggtgatgtgtacggtaacggaggaggagaaacgaccaagttgcttaacctttttgtttaatgcaaaacggcggcggttttctcagagttagtctagggttttaaatgtaattttacacattttcttcctttttcctggataaatattggaccggcgaattaacaactacgtcgttttgttctctcggttttgagtcccccccccccccaccattaaccaattgtaaaactttattgagtgaaaaatattatgtctagtttttctgcataatccagtaacaatgtgaact

SEQ ID NO: 9439 - protein, 250 aa, Arabidopsis thaliana
MSCNGCRVLRKGCSENCILRPCIQWIETADAQGHATVFVAKFFGRAGLMSFISAVPDSQRPALFQSLLYEACGRTVNPVNGAIGMLWTGNWNICQAAVETVLRGGSLRPIPELLTHGGGFAGFPSPTSEEASEICTEMLNLQQNDSTDRNIYHHSRFSSSRSRSTMDSSSPTKRKRLSSEDQPSSELDLSLIPNFPIKQATPSSTRRRSVTPSMNSEDSGTTTTTTAFCDKGDVYGNGGGETTKLLNLFV

SEQ ID NO: 9440 - protein, 202 aa, Arabidopsis thaliana
MSFISAVPDSQRPALFQSLLYEACGRTVNPVNGAIGMLWTGNWNICQAAVETVLRGGSLRPIPELLTHGGGFAGFPSPTSEEASEICTEMLNLQQNDSTDRNIYHHSRFSSSRSRSTMDSSSPTKRKRLSSEDQPSSELDLSLIPNFPIKQATPSSTRRRSVTPSMNSEDSGTTTTTTAFCDKGDVYGNGGGETTKLLNLFV

SEQ ID NO: 9441 - protein, 166 aa, Arabidopsis thaliana
MLWTGNWNICQAAVETVLRGGSLRPIPELLTHGGGFAGFPSPTSEEASEICTEMLNLQQNDSTDRNIYHHSRFSSSRSRSTMDSSSPTKRKRLSSEDQPSSELDLSLIPNFPIKQATPSSTRRRSVTPSMNSEDSGTTTTTTAFCDKGDVYGNGGGETTKLLNLFV

SEQ ID NO: 9442 - DNA, 1538 bp, Arabidopsis thaliana
gcattttccgagtactcaagagaaaggcgatggggtcatcacagtcttcgcaattactcgatgaagaagaagaagaagaagatgaagcagagagcgaaggtgaagaagtagaagaagaagaagatgaagcagagagcgaattgaataacagaagaatcgagctggataatctcttggtcaagaaagttctcgagcaagagcctgagatgcttccttgtcacgcctctgcttctccactctctcctcagctctcttctcttggaactcctcgaatcggaccttccattaaagtctgggatccttacaacgtcctcgcgccacctcctccttcttctccgcctcttttctctcgtatctcctccgccgcggaacacgatcgctccgccgtgacggaagtctatttcatcagccacggcgagtgtgatctcaatctcaggcctgatctgattggaggtagatgccacgtggctactctcacacccaacgggaaacgtcaggcgagagctctagccgtatttttaaactctgaaggtgttcgattcacctccgtcttctcttcgcctctggatcgagctagatccatggctgtttctgtttgccaggaaatgaattttcctgaggagcatttgcaagtctcggatgctgtggttgagatgagtttaggggactgggaaagctgtcatcggtcagagatttacacacctgaaactctaagtttaatagaaagatgccaacctgatttctcagctccatctggtgaatcactcagacaagtagagtttcggatggttcagtttctgaatgggacagtctcaggactttcggagaagctcaggtcagaacttcttccatctacacagcacacaaattccagagggttctcgttagctacttctattcatcgcccaattcttacaaggaagaaatctgggaagagccggtttcaggtgatgaatgcaactggtgatcacgagggtagtgaagagatatttagtaatcacaatgatgaacaacacctaggtgatataaacatcaagagttcttcttctcaactctcaacctgcattggagttttcactcactctttacctataaagtgtcttcttaccggtatccttggatgcagcccggtaatgacacataagatctgtgtggaggattcctctgtgaccgtattacagcattcgtggaaaaccgggtggcaggtaaagcggttaaatgacaccgctcatcttagactgttgtagcctcatcatcatcaaattcttttactctctgaaagctcgaaaacacagcgagctggtaaattattgcaagaccttcacaagtcatttgagtctgcagaagaagatcaacaagcttgcagattacatgctcccgccacgagcctcttgtacgtttgttttgagaaagaaaagctaaagatttgttaatgctgatgtttcactaccttgttctgtttgattctttctatttgcaagcttcctcttatgtaattcttatgcttataatcacacaaaaaaaaaaagctcattgcc

SEQ ID NO: 9443 - protein, 414 aa, Arabidopsis thaliana
IFRVLKRKAMGSSQSSQLLDEEEEEEDEAESEGEEVEEEEDEAESELNNRRIELDNLLVKKVLEQEPEMLPCHASASPLSPQLSSLGTPRIGPSIKVWDPYNVLAPPPPSSPPLFSRISSAAEHDRSAVTEVYFISHGECDLNLRPDLIGGRCHVATLTPNGKRQARALAVFLNSEGVRFTSVFSSPLDRARSMAVSVCQEMNFPEEHLQVSDAVVEMSLGDWESCHRSEIYTPETLSLIERCQPDFSAPSGESLRQVEFRMVQFLNGTVSGLSEKLRSELLPSTQHTNSRGFSLATSIHRPILTRKKSGKSRFQVMNATGDHEGSEEIFSNHNDEQHLGDINIKSSSSQLSTCIGVFTHSLPIKCLLTGILGCSPVMTHKICVEDSSVTVLQHSWKTGWQVKRLNDTAHLRLL

SEQ ID NO: 9444 - protein, 405 aa, Arabidopsis thaliana
MGSSQSSQLLDEEEEEEDEAESEGEEVEEEEDEAESELNNRRIELDNLLVKKVLEQEPEMLPCHASASPLSPQLSSLGTPRIGPSIKVWDPYNVLAPPPPSSPPLFSRISSAAEHDRSAVTEVYFISHGECDLNLRPDLIGGRCHVATLTPNGKRQARALAVFLNSEGVRFTSVFSSPLDRARSMAVSVCQEMNFPEEHLQVSDAVVEMSLGDWESCHRSEIYTPETLSLIERCQPDFSAPSGESLRQVEFRMVQFLNGTVSGLSEKLRSELLPSTQHTNSRGFSLATSIHRPILTRKKSGKSRFQVMNATGDHEGSEEIFSNHNDEQHLGDINIKSSSSQLSTCIGVFTHSLPIKCLLTGILGCSPVMTHKICVEDSSVTVLQHSWKTGWQVKRLNDTAHLRLL

SEQ ID NO: 9445 - protein, 346 aa, Arabidopsis thaliana
MLPCHASASPLSPQLSSLGTPRIGPSIKVWDPYNVLAPPPPSSPPLFSRISSAAEHDRSAVTEVYFISHGECDLNLRPDLIGGRCHVATLTPNGKRQARALAVFLNSEGVRFTSVFSSPLDRARSMAVSVCQEMNFPEEHLQVSDAVVEMSLGDWESCHRSEIYTPETLSLIERCQPDFSAPSGESLRQVEFRMVQFLNGTVSGLSEKLRSELLPSTQHTNSRGFSLATSIHRPILTRKKSGKSRFQVMNATGDHEGSEEIFSNHNDEQHLGDINIKSSSSQLSTCIGVFTHSLPIKCLLTGILGCSPVMTHKICVEDSSVTVLQHSWKTGWQVKRLNDTAHLRLL

SEQ ID NO: 9446 - DNA, 565 bp, Arabidopsis thaliana
attcaccagagaaatggtcgtcgctgactactaaccagagccatcggtggttgatttcgcgatttcgagctccattcctacttgtctcaccttaatctccggcgatcgaatttcacggttccggttaatcaatctctccgtggccatggacaaagaagttacaaagattgaaagtgatgacacttcatcggtggagatcaaagtgttgttattcgccagagcacgagagctcacaggtgtgcctgatctaacactgaagatgccatcaggtagtacaacacagaaatgcctggatgagttggtgcttaagtttccaagcttggaagaggtacgtagctgtgttgttctcgctttgaacgaggaatatacaaccgattccgccattgttcaacatagagatgagttagccatcatacctccgataagcggcggctaatgcatcgacacttcttaaatccctttaactcgggattgtatctcattggcgatgatccaaaatgtaacttttgtcataataacacagaaatatctgtcttttataatggaaagaaaatgttacatcaag

SEQ ID NO: 9447 - protein, 96 aa, Arabidopsis thaliana
MDKEVTKIESDDTSSVEIKVLLFARARELTGVPDLTLKMPSGSTTQKCLDELVLKFPSLEEVRSCVVLALNEEYTTDSAIVQHRDELAIIPPISGG

SEQ ID NO: 9448 - protein, 58 aa, Arabidopsis thaliana
MPSGSTTQKCLDELVLKFPSLEEVRSCVVLALNEEYTTDSAIVQHRDELAIIPPISGG

SEQ ID NO: 9449 - DNA, 1363 bp, Arabidopsis thaliana
gaaaaatatcaaaacacgagacagatttgattccatttttattactgttactatcatccaaacccttggtatttgtagccatgagtcttgtttcagatctcatcaaccttaacctctcagactccactgacaaaatcattgctgaatacatatgggttggtggttctggaatggacatgagaagcaaagccaggactctacctggaccagtgactgacccttcgcagctaccaaagtggaactatgatggttcaagcacaggccaagctcctggtgaagacagtgaagtcatcttataccctcaagccatattcaaggatcctttccgtagaggaaacaacattcttgtcatgtgcgatgcgtacactcccgcgggtgaaccaatcccgactaacaaaagacacgctgcggctaaggtctttagcaaccctgatgttgcagctgaagtgccatggtatggtattgagcaagaatacactttactccagaaagatgtgaagtggcctgttggttggcctattggtggttatcccggccctcagggaccgtactattgcggtattggagcagacaaatcttttggcagagatgttgttgattctcactacaaggcctgcttatacgctgggatcaacattagtggcatcaatggagaagtcatgccgggtcagtgggagttccaggtcggtccagctgttggtatctcggctgctgatgaaatttgggtcgctcgttacattttggagaggatcacagagattgctggtgtagtggtatcttttgacccgaaaccgattcccggtgactggaacggtgctggtgctcactgcaactacagtaccaagtcaatgagggaagaaggcggttacgagatcatcaagaaagcaatcgataaattgggactgagacacaaagaacacattgctgcttacggtgaaggcaatgagcgtcgtctcacaggacaccacgagactgctgacatcaacactttcctttggggtgttgcgaaccgtggagcatcgatccgagtaggacgtgatacggagaaagaagggaaaggatactttgaggacaggaggccagcttcgaacatggatccttacattgtcacttccatgattgcagagactacaatcctctggaatccttgatgatcatcagatcaagaaaaaatcttgaatgtcactcaaatttgtgtttcttgcaagattcaaagtttgtgttctctatcaagcaatgtcttaggataagtcaaagatttgctctgcttattctgctttttatttacttcacatcctattgaaaacatttctgtgtattatttatgaataaacattatcttaaaagggctgatttatttacc

SEQ ID NO: 9450 - protein, 382 aa, Arabidopsis thaliana
KISKHETDLIPFLLLLLSSKPLVFVAMSLVSDLINLNLSDSTDKIIAEYIWVGGSGMDMRSKARTLPGPVTDPSQLPKWNYDGSSTGQAPGEDSEVILYPQAIFKDPFRRGNNILVMCDAYTPAGEPIPTNKRHAAAKVFSNPDVAAEVPWYGIEQEYTLLQKDVKWPVGWPIGGYPGPQGPYYCGIGADKSFGRDVVDSHYKACLYAGINISGINGEVMPGQWEFQVGPAVGISAADEIWVARYILERITEIAGVVVSFDPKPIPGDWNGAGAHCNYSTKSMREEGGYEIIKKAIDKLGLRHKEHIAAYGEGNERRLTGHHETADINTFLWGVANRGASIRVGRDTEKEGKGYFEDRRPASNMDPYIVTSMIAETTILWNP

SEQ ID NO: 9451 - protein, 356 aa, Arabidopsis thaliana
MSLVSDLINLNLSDSTDKIIAEYIWVGGSGMDMRSKARTLPGPVTDPSQLPKWNYDGSSTGQAPGEDSEVILYPQAIFKDPFRRGNNILVMCDAYTPAGEPIPTNKRHAAAKVFSNPDVAAEVPWYGIEQEYTLLQKDVKWPVGWPIGGYPGPQGPYYCGIGADKSFGRDVVDSHYKACLYAGINISGINGEVMPGQWEFQVGPAVGISAADEIWVARYILERITEIAGVVVSFDPKPIPGDWNGAGAHCNYSTKSMREEGGYEIIKKAIDKLGLRHKEHIAAYGEGNERRLTGHHETADINTFLWGVANRGASIRVGRDTEKEGKGYFEDRRPASNMDPYIVTSMIAETTILWNP

SEQ ID NO: 9452 - protein, 326 aa, Arabidopsis thaliana
MDMRSKARTLPGPVTDPSQLPKWNYDGSSTGQAPGEDSEVILYPQAIFKDPFRRGNNILVMCDAYTPAGEPIPTNKRHAAAKVFSNPDVAAEVPWYGIEQEYTLLQKDVKWPVGWPIGGYPGPQGPYYCGIGADKSFGRDVVDSHYKACLYAGINISGINGEVMPGQWEFQVGPAVGISAADEIWVARYILERITEIAGVVVSFDPKPIPGDWNGAGAHCNYSTKSMREEGGYEIIKKAIDKLGLRHKEHIAAYGEGNERRLTGHHETADINTFLWGVANRGASIRVGRDTEKEGKGYFEDRRPASNMDPYIVTSMIAETTILWNP

SEQ ID NO: 9453 - DNA, 1144 bp, Arabidopsis thaliana
aactttcttcttctctcaggcgagataaaacatggcgatgcttcagacgaatcttggcttcattacttctccgacatttctgtgtccgaagcttaaagtcaaattgaactcttatctgtggtttagctatcgttctcaagttcaaaaactggatttttcgaaaagggttaatagaagctacaaaagagatgctttattattgtcaatcaagtgttcttcatcgactggatttgataatagcaatgttgttgtgaaggagaagagtgtatctgtgattcttttagctggaggtcaaggcaagagaatgaaaatgagtatgccaaagcagtacataccacttcttggtcagccaattgctttgtatagctttttcacgttttcacgtatgcctgaagtgaaggaaattgtagttgtatgtgatccttttttcagagacatttttgaagaatacgaagaatcaattgatgttgatcttagattcgctattcctggcaaagaaagacaagattctgtttacagtggacttcaggaaatcgatgtgaactctgagcttgtttgtatccacgactctgcccgaccattggtgaatactgaagatgtcgagaaggtccttaaagatggttccgcggttggagcagctgtacttggtgttcctgctaaagctacaatcaaagaggtcaattctgattcgcttgtggtgaaaactctcgacagaaaaaccctatgggaaatgcagacaccacaggtgatcaaaccagagctattgaaaaagggtttcgagcttgtaaaaagtgaaggtctagaggtaacagatgacgtttcgattgttgaatacctcaagcatccagtttatgtctctcaaggatcttatacaaacatcaaggttacaacacctgatgatttactgcttgctgagagaatcttgagcgaggactcatgagatattatatcatttacttagtaagaagacgtgtcaagggtatgcatgaaaaatgttttattgaaatctttgcatcctagtttggtggtttataaaatgtgcaagataattgtttcactgaaaactacttgctgtgaatatggattcgaacagagccaattcgaagtagaatttgcatattgtagtaaaggttctcactaaggc

SEQ ID NO: 9454 - protein, 302 aa, Arabidopsis thaliana
MAMLQTNLGFITSPTFLCPKLKVKLNSYLWFSYRSQVQKLDFSKRVNRSYKRDALLLSIKCSSSTGFDNSNVVVKEKSVSVILLAGGQGKRMKMSMPKQYIPLLGQPIALYSFFTFSRMPEVKEIVVVCDPFFRDIFEEYEESIDVDLRFAIPGKERQDSVYSGLQEIDVNSELVCIHDSARPLVNTEDVEKVLKDGSAVGAAVLGVPAKATIKEVNSDSLVVKTLDRKTLWEMQTPQVIKPELLKKGFELVKSEGLEVTDDVSIVEYLKHPVYVSQGSYTNIKVTTPDDLLLAERILSEDS

SEQ ID NO: 9455 - protein, 300 aa, Arabidopsis thaliana
MLQTNLGFITSPTFLCPKLKVKLNSYLWFSYRSQVQKLDFSKRVNRSYKRDALLLSIKCSSSTGFDNSNVVVKEKSVSVILLAGGQGKRMKMSMPKQYIPLLGQPIALYSFFTFSRMPEVKEIVVVCDPFFRDIFEEYEESIDVDLRFAIPGKERQDSVYSGLQEIDVNSELVCIHDSARPLVNTEDVEKVLKDGSAVGAAVLGVPAKATIKEVNSDSLVVKTLDRKTLWEMQTPQVIKPELLKKGFELVKSEGLEVTDDVSIVEYLKHPVYVSQGSYTNIKVTTPDDLLLAERILSEDS

SEQ ID NO: 9456 - protein, 211 aa, Arabidopsis thaliana
MKMSMPKQYIPLLGQPIALYSFFTFSRMPEVKEIVVVCDPFFRDIFEEYEESIDVDLRFAIPGKERQDSVYSGLQEIDVNSELVCIHDSARPLVNTEDVEKVLKDGSAVGAAVLGVPAKATIKEVNSDSLVVKTLDRKTLWEMQTPQVIKPELLKKGFELVKSEGLEVTDDVSIVEYLKHPVYVSQGSYTNIKVTTPDDLLLAERILSEDS

SEQ ID NO: 9457 - DNA, 1696 bp, Arabidopsis thaliana
agtgttactgtaacagtcgcacacctaacaaaaatcctccagccatggcggcagttactcaatttctctcccaaccttcatcaatccgcggaaccctaaatcagtaccaattgaatcagacttcactctcaagaatcccatttttgtctctcaagtcaacattgaagccacttaaacgcctctccgtcaaagccgccgtttcccaaaactccaccaaaaccctcacgaaagaatctgcttcctctttcgaccactgtttcaagaaatcatcagatgggtttctctattgcgaaggaaccaaggttcaagatatcatggaaacagtcgagaaacgacccttttacttatatagcaaacctcagatcacgagaaaccttgaggcttataaagaggctttggaaggagtgagatctgttattggttacgctattaaagctaataacaatctcaagattttggagcatttgaggagtttgggctgtggtgctgtgttggttagtggaaatgagctcaggcttgctcttcttgctggtttcgatcccacaaagtgtattttcaatggaaatggaaagtctttggaagatttagttctagctgctcaagaaggtgttttcgtaaatgttgatagtgagtttgacttgaataacattgtggaagcttcaagaatttctggtaagcaggtcaatgtgttgttgcgtatcaatcctgatgttgatcctcaggtgcatccatatgtagctactgggaacaagaactcgaagtttggtattaggaacgagaagcttcaatggtttctggatgaagtgaaggcacatcccaaagagctgaagcttgttggagctcattgtcatcttggttctaccattacaaaggtggatatattcagagatgctgcggttctcatgattgaatacattgatgaaatccggcgtcaaggctttgaggttagctacttgaacattggtggtggtttagggatagattattatcatgccggcgctgtccttcctacacccatggatcttatcaacaccgtaagagagctggttctttcacgagacctgaatctaataatcgagccagggagatcactgattgcaaacacatgttgtttcgtcaaccatgtaactggtgtgaagacgaatggaactaaaaacttcatagtgattgatggaagtatggctgagcttatccgtcccagtctttatgatgcctatcagcatattgagttggtctctcctacaccgcctgaagcagaggttaccaaattcgatgtagtgggtcctgtttgtgaatctgctgatttcttgggcaaagacagagagcttcccactcctccacagggagctggtctggtggttcatgacgctggtgcatactgtatgagtatggcttccacttacaatctcaagatgcgtcccccggaatactgggttgaagaagatgggtcgatcactaagatcaggcatgctgagacattcgatgaccatttacgtttctttgaaggactatgaactccgagatttactcatcattgttgctattttagatgaattgtatgattacgtttctataatgctattgctgtcttggatttttccacattctgtgctatgatttaaagtcctcaataaagtgatcatatgaataagaaacaggtcacaagtcaagaacgaaaataaaaggtgtatttgtg

SEQ ID NO: 9458 - protein, 503 aa, Arabidopsis thaliana
CYCNSRTPNKNPPAMAAVTQFLSQPSSIRGTLNQYQLNQTSLSRIPFLSLKSTLKPLKRLSVKAAVSQNSTKTLTKESASSFDHCFKKSSDGFLYCEGTKVQDIMETVEKRPFYLYSKPQITRNLEAYKEALEGVRSVIGYAIKANNNLKILEHLRSLGCGAVLVSGNELRLALLAGFDPTKCIFNGNGKSLEDLVLAAQEGVFVNVDSEFDLNNIVEASRISGKQVNVLLRINPDVDPQVHPYVATGNKNSKFGIRNEKLQWFLDEVKAHPKELKLVGAHCHLGSTITKVDIFRDAAVLMIEYIDEIRRQGFEVSYLNIGGGLGIDYYHAGAVLPTPMDLINTVRELVLSRDLNLIIEPGRSLIANTCCFVNHVTGVKTNGTKNFIVIDGSMAELIRPSLYDAYQHIELVSPTPPEAEVTKFDVVGPVCESADFLGKDRELPTPPQGAGLVVHDAGAYCMSMASTYNLKMRPPEYWVEEDGSITKIRHAETFDDHLRFFEGL

SEQ ID NO: 9459 - protein, 489 aa, Arabidopsis thaliana
MAAVTQFLSQPSSIRGTLNQYQLNQTSLSRIPFLSLKSTLKPLKRLSVKAAVSQNSTKTLTKESASSFDHCFKKSSDGFLYCEGTKVQDIMETVEKRPFYLYSKPQITRNLEAYKEALEGVRSVIGYAIKANNNLKILEHLRSLGCGAVLVSGNELRLALLAGFDPTKCIFNGNGKSLEDLVLAAQEGVFVNVDSEFDLNNIVEASRISGKQVNVLLRINPDVDPQVHPYVATGNKNSKFGIRNEKLQWFLDEVKAHPKELKLVGAHCHLGSTITKVDIFRDAAVLMIEYIDEIRRQGFEVSYLNIGGGLGIDYYHAGAVLPTPMDLINTVRELVLSRDLNLIIEPGRSLIANTCCFVNHVTGVKTNGTKNFIVIDGSMAELIRPSLYDAYQHIELVSPTPPEAEVTKFDVVGPVCESADFLGKDRELPTPPQGAGLVVHDAGAYCMSMASTYNLKMRPPEYWVEEDGSITKIRHAETFDDHLRFFEGL

SEQ ID NO: 9460 - protein, 399 aa, Arabidopsis thaliana
METVEKRPFYLYSKPQITRNLEAYKEALEGVRSVIGYAIKANNNLKILEHLRSLGCGAVLVSGNELRLALLAGFDPTKCIFNGNGKSLEDLVLAAQEGVFVNVDSEFDLNNIVEASRISGKQVNVLLRINPDVDPQVHPYVATGNKNSKFGIRNEKLQWFLDEVKAHPKELKLVGAHCHLGSTITKVDIFRDAAVLMIEYIDEIRRQGFEVSYLNIGGGLGIDYYHAGAVLPTPMDLINTVRELVLSRDLNLIIEPGRSLIANTCCFVNHVTGVKTNGTKNFIVIDGSMAELIRPSLYDAYQHIELVSPTPPEAEVTKFDVVGPVCESADFLGKDRELPTPPQGAGLVVHDAGAYCMSMASTYNLKMRPPEYWVEEDGSITKIRHAETFDDHLRFFEGL

SEQ ID NO: 9461 - DNA, 978 bp, Arabidopsis thaliana
caaattatatgggcaagagataagaacagtgaaggagaagaaagtgcagatctttttcttaggggaatcggtttaagagagtattctcggtatatatgtttcaacttcccgtttactcacgagcaatcgttgttgagtcatcttcggtttttcccttgggatgctgatgttgataagttcaaggcctggagacaaggcaggaccggttatccgttggtggatgccggaatgagagagctttgggctaccggatggatgcataacagaataagagtgattgtttcaagctttgctgtgaagtttcttctccttccatggaaatggggaatgaagtatttctgggatacacttttggatgctgatttggaatgtgacatccttggctggcagtatatctctgggagtatccccgatggccacgagcttgatcgcttggacaatcccgcgttacaaggcgccaaatatgacccagaaggtgagtacataaggcaatggcttcccgagcttgcgagattgccaactgaatggatccatcatccatgggacgctcctttaaccgtactcaaagcttctggtgtggaactcggaacaaactatgcgaaacccattgtagacatcgacacagctcgtgagctactagctaaagctatttcaagaacccgtgaagcacagatcatgatcggagcagcacctgatgagattgtagcagatagcttcgaggccttaggggctaataccattaaagaacctggtctttgcccatctgtgtcttctaatgaccaacaagtaccttcggctgttcgttacaacgggtcaaagagagtgaaacctgaggaagaagaagagagatacatgaagaaatctaggggattcgatgaaagggagttgttttcgactgctgaatcttcttcttcttcgagtgtgtttttcgtttcgcagtcttgctcgttggcatcagaagggaagaatctggaaggt

SEQ ID NO: 9462 - protein, 326 aa, Arabidopsis thaliana
QIIWARDKNSEGEESADLFLRGIGLREYSRYICFNFPFTHEQSLLSHLRFFPWDADVDKFKAWRQGRTGYPLVDAGMRELWATGWMHNRIRVIVSSFAVKFLLLPWKWGMKYFWDTLLDADLECDILGWQYISGSIPDGHELDRLDNPALQGAKYDPEGEYIRQWLPELARLPTEWIHHPWDAPLTVLKASGVELGTNYAKPIVDIDTARELLAKAISRTREAQIMIGAAPDEIVADSFEALGANTIKEPGLCPSVSSNDQQVPSAVRYNGSKRVKPEEEEERYMKKSRGFDERELFSTAESSSSSSVFFVSQSCSLASEGKNLEG

SEQ ID NO: 9463 - protein, 250 aa, Arabidopsis thaliana
MRELWATGWMHNRIRVIVSSFAVKFLLLPWKWGMKYFWDTLLDADLECDILGWQYISGSIPDGHELDRLDNPALQGAKYDPEGEYIRQWLPELARLPTEWIHHPWDAPLTVLKASGVELGTNYAKPIVDIDTARELLAKAISRTREAQIMIGAAPDEIVADSFEALGANTIKEPGLCPSVSSNDQQVPSAVRYNGSKRVKPEEEEERYMKKSRGFDERELFSTAESSSSSSVFFVSQSCSLASEGKNLEG

SEQ ID NO: 9464 - protein, 241 aa, Arabidopsis thaliana
MHNRIRVIVSSFAVKFLLLPWKWGMKYFWDTLLDADLECDILGWQYISGSIPDGHELDRLDNPALQGAKYDPEGEYIRQWLPELARLPTEWIHHPWDAPLTVLKASGVELGTNYAKPIVDIDTARELLAKAISRTREAQIMIGAAPDEIVADSFEALGANTIKEPGLCPSVSSNDQQVPSAVRYNGSKRVKPEEEEERYMKKSRGFDERELFSTAESSSSSSVFFVSQSCSLASEGKNLEG

SEQ ID NO: 9465 - DNA, 1002 bp, Arabidopsis thaliana
acttcaaccttctcttctctgcaagaaacctaaaagcctatttatttcacctctctctctctctctctgcaactaatcacttgttcgatctcgaagctgaagctaaagctttcgctaatttgcttaaggagctatgggagatagtcagtactcgttttctctcaccactttcagcccatctggtaagctggtgcagatagaacatgcccttacagctgttggatctggccaaacatctttagggattaaagcttctaatggagttgtcattgcaactgaaaagaagttgccttctattctggttgatgaagcatctgttcaaaaaattcagcatttgactcctaatattggagttgtttacagtggcatgggtcctgattttcgagttcttgttaggaagagtaggaaacaggctgagcaatatcttcgtctgtacaaagaacccatccctgttacccaacttgtaagggaaaccgctactgttatgcaagagtttactcaatcgggaggtgttaggcctttcggggtttccttgctggtggctggatatgatgacaagggtccacaattgtatcaggtggatccatctggctcttatttctcctggaaagcttcagccatggggaagaacgtttctaatgcaaaaaccttccttgagaaaaggtacacagaagacatggaacttgacgatgccattcacacagcgatactgacattgaaagaaggctttgagggagagatctcaagcaaaaatattgaaattggcaaaatcggtgctgacaaagttttcagggtactaacaccagcagagatcgatgattaccttgctgaagtcgagtaactcccagcatagtctagcaacaaagtttaagaccggaatttcgtggcatttacagtcttaaagagttgttttttctgtaaaactttggatctttaaatagtttgttgctgaacacaagctgagtgtctctcaataactaatgaaatctgtttctttttttc

SEQ ID NO: 9466 - protein, 235 aa, Arabidopsis thaliana
MGDSQYSFSLTTFSPSGKLVQIEHALTAVGSGQTSLGIKASNGVVIATEKKLPSILVDEASVQKIQHLTPNIGVVYSGMGPDFRVLVRKSRKQAEQYLRLYKEPIPVTQLVRETATVMQEFTQSGGVRPFGVSLLVAGYDDKGPQLYQVDPSGSYFSWKASAMGKNVSNAKTFLEKRYTEDMELDDAIHTAILTLKEGFEGEISSKNIEIGKIGADKVFRVLTPAEIDDYLAEVE

SEQ ID NO: 9467 - protein, 157 aa, Arabidopsis thaliana
MGPDFRVLVRKSRKQAEQYLRLYKEPIPVTQLVRETATVMQEFTQSGGVRPFGVSLLVAGYDDKGPQLYQVDPSGSYFSWKASAMGKNVSNAKTFLEKRYTEDMELDDAIHTAILTLKEGFEGEISSKNIEIGKIGADKVFRVLTPAEIDDYLAEVE

SEQ ID NO: 9468 - protein, 118 aa, Arabidopsis thaliana
MQEFTQSGGVRPFGVSLLVAGYDDKGPQLYQVDPSGSYFSWKASAMGKNVSNAKTFLEKRYTEDMELDDAIHTAILTLKEGFEGEISSKNIEIGKIGADKVFRVLTPAEIDDYLAEVE

SEQ ID NO: 9469 - DNA, 742 bp, Arabidopsis thaliana
  misc_feature (715)..(716): n is a, c, g, or t
  misc_feature (718)..(718): n is a, c, g, or t
aaccaaaacaaaacaaaacaaaaaaaacacgagtggaagcttttaaacaaaattagaaaaagagagagagaaatggcgacgtcgggaacatacgtgacggaggtgccgctaaaaggaacggtggagaaacacttcaagaggtacaggaacgagaactatctcttccctgacactatcggccaccacatccaaagtgttactgttcacgatggcgaatgggacactcaaggaggcatcaagatttggaactacacactcggagatggaaaggaggaggtattcaaggagaggagagagatagacgatgacaataagatagtaaaggttgtaggattggaaggtcacgtgatggagcagttcaaggtgtatgagattgacttccaatttattcccaagtctgaagaagattgcgtctgcaaaatcactatgatatgggagaagcgcaacgatgatttccccgaaccaagcagctacatgcaactcctcaagagtatggttattgatatggaggaccacgtccttaaagcttaatcaatatcacaaccaccaccatcatcacaaccaccatcatcatcatcctatatgtttattaaattgttttcatttatatataatagactagataagaacctgtataatgtgcgggataaaatgattgaaataaattattatgcgtaaacttattgtatgagatatcatatatgtttgtatacannanaatatgtaattaaagtttttgttt

SEQ ID NO: 9470 - protein, 176 aa, Arabidopsis thaliana
NQNKTKQKKHEWKLLNKIRKREREMATSGTYVTEVPLKGTVEKHFKRYRNENYLFPDTIGHHIQSVTVHDGEWDTQGGIKIWNYTLGDGKEEVFKERREIDDDNKIVKVVGLEGHVMEQFKVYEIDFQFIPKSEEDCVCKITMIWEKRNDDFPEPSSYMQLLKSMVIDMEDHVLKA

SEQ ID NO: 9471 - protein, 152 aa, Arabidopsis thaliana
MATSGTYVTEVPLKGTVEKHFKRYRNENYLFPDTIGHHIQSVTVHDGEWDTQGGIKIWNYTLGDGKEEVFKERREIDDDNKIVKVVGLEGHVMEQFKVYEIDFQFIPKSEEDCVCKITMIWEKRNDDFPEPSSYMQLLKSMVIDMEDHVLKA

SEQ ID NO: 9472 - DNA, 1379 bp, Arabidopsis thaliana
acttatcctgatcactagtgatcagtgataatctattaatcatctaggtggcagaagcagcatcgttgagaacgaagaagcttgaaaaagttgcgagctcagagaatctggaagtagcaaaatttggcggctttaactcagcaatttgttctgtacatggtattttgagaagagagcattcagctcacagttacgctctgcctatccagcttctaaatctactcactttggtcgagtcatggcttcttctggatctgaggcaaaagctaattacgcacccatatctaccaatgaacctgttgtgtctgttgattggctccactctaatcttggagatgctgatataaaggttttggatgcctcatggtacatggcacatgagcaaagaaatccaatccaagagtatcaagttgctcatattccaggtgctctcttctttgatttgaatggaatagcagatcgaaaaacaaatttacgacacatgctaccatctgaggaagcttttgctgctggttgttctgctcttggaatcgagaacaacgatggagtggttgtgtatgatggaatggggctctttagtgcagctcgtgtatggtggatgtttagagtctttggacatgacaaagtatgggtacttgatggaggcttgccgaaatggcgtgcttcaggctatgacgttgaatccagtgtttcaaatgatgccattttgaaagccagtgcagcaactgaggctatagagaagatctatcaaggacaaacaattagcccaataacttttcagacgaagttccggccacatcttgtattggcacttgatcaggtgaaggaaaacatcgaggataagacttatcagcacatcgatgcgcgttcaaaggctagatttgacggtattgctccagaaccttggaagggtttaccgagtggtcatatacccggtagcaagtgtgtcccttttcccctaatgtttgattcctctcaaacactgttaccagcagaggagctgaagaagcagtttgaacaggaagacatatctctggacagtccgattgcggcctcatgtggaaccggtgtaacagcttgtattttggcattgggactttatcgtctgggaaaaactaatgtggcaatctatgatgggtcttggactgaatgggcaactgcaccaaacttgcccatagtgggttcttcttcataagaaagtccaagaaaaagctacaagatcacaagccagtggatatatatttataagcttagcttggttcaatccatttctgtgttaaactttaacaaattgctgggagggttgtattagtattatacatcagtattcaggattcttgagtttggtctcatctttgtggagattgattaaaagtctt

SEQ ID NO: 9473 - protein, 318 aa, Arabidopsis thaliana
MASSGSEAKANYAPISTNEPVVSVDWLHSNLGDADIKVLDASWYMAHEQRNPIQEYQVAHIPGALFFDLNGIADRKTNLRHMLPSEEAFAAGCSALGIENNDGVVVYDGMGLFSAARVWWMFRVFGHDKVWVLDGGLPKWRASGYDVESSVSNDAILKASAATEAIEKIYQGQTISPITFQTKFRPHLVLALDQVKENIEDKTYQHIDARSKARFDGIAPEPWKGLPSGHIPGSKCVPFPLMFDSSQTLLPAEELKKQFEQEDISLDSPIAASCGTGVTACILALGLYRLGKTNVAIYDGSWTEWATAPNLPIVGSSS

SEQ ID NO: 9474 - protein, 274 aa, Arabidopsis thaliana
MAHEQRNPIQEYQVAHIPGALFFDLNGIADRKTNLRHMLPSEEAFAAGCSALGIENNDGVVVYDGMGLFSAARVWWMFRVFGHDKVWVLDGGLPKWRASGYDVESSVSNDAILKASAATEAIEKIYQGQTISPITFQTKFRPHLVLALDQVKENIEDKTYQHIDARSKARFDGIAPEPWKGLPSGHIPGSKCVPFPLMFDSSQTLLPAEELKKQFEQEDISLDSPIAASCGTGVTACILALGLYRLGKTNVAIYDGSWTEWATAPNLPIVGSSS

SEQ ID NO: 9475 - protein, 237 aa, Arabidopsis thaliana
MLPSEEAFAAGCSALGIENNDGVVVYDGMGLFSAARVWWMFRVFGHDKVWVLDGGLPKWRASGYDVESSVSNDAILKASAATEAIEKIYQGQTISPITFQTKFRPHLVLALDQVKENIEDKTYQHIDARSKARFDGIAPEPWKGLPSGHIPGSKCVPFPLMFDSSQTLLPAEELKKQFEQEDISLDSPIAASCGTGVTACILALGLYRLGKTNVAIYDGSWTEWATAPNLPIVGSSS

SEQ ID NO: 9476 - DNA, 1542 bp, Arabidopsis thaliana
gtggcaaaatcagattctctgggaagacgatattagcaatcatggagcgtctaacatctcctcctcgtttgatgattgtctctgatcttgatcatactatggttgatcatcatgatcctgagaatctatctctgctgagattcaattcgttgtgggaacacgcttatcgccatgactctcttcttgtgttttctacgggaagatcaccgacattgtataaagaactcagaaaggagaaacctttgttgacccctgatattaccattatgtctgtaggaactgagattacttatggtaactctatggttcctgatcatggttgggttgaggctctgaacaataaatgggatttgggtattgtcaaacaagaagctagcaacttccctgagttaaagcttcaggcagaaactgagcagaggccacacaaggttagcttttatgttgaaaagagtaaggctcaggaagttactaaggagctatcacagaggttcctgaaacgtgggctggatgtcaaaataatttacagtggaggtatggatttggatattttaccacaaggtgccggaaagggacaagcgcttgcatatctgctgaagaaactgaagactgaggggaaactccctgtcaatactcttgcttgtggcgactctgggaatgatgctgagctgtttagtattcccgatgtttatggtgttatggtaagcaatgctcaagaagagctgttgaagtggcatgctgaaaatgcaaaagacaaccctaaggtaatccatgcaaaggagaggtgtgcaggtgggattatacaagccattggtcacttcaagcttggtccgaacctttctccaagagatgtctctgatttcttagagatcaaggtggagaatgtgaaccctggtcacgaggttgtgaagttttttttgttctacgagagatggagacggggcgaggttgagaactctgaggcatacacagcaagcctcaaagcttcagttcaccccggtggtgtgtttgtccatccatctggtactgaaaaatctctgagagataccatcgatgagctgcgcaagtaccatggagacaaacaagggaagaagtttcgcgtttgggcagatcaagtcctggcaacagacactactcctgggacatggatagtaaagcttgataaatgggagcaagatggggacgaacgaagatgctgcacaacaactgtcaaattcacctcaaaggaaggggagggattggtgtgggaacatgtacaacaaacctggtcgaaagaaacaatggtgaaggatgatagcagctggatcatctgagtaacatcatctctctacagattaagacttcttcttctctttctcgtcttatgatctctgccttaaatcattggaacttcggtataaaaacacatgagatccaataaaacattgtcttcataaaacttggatctcaaaactcattctacaatccatattatctataactccaagttaacacagttttctttgtatacccctttatagtatatgatattatccatttggcatt

SEQ ID NO: 9477 - protein, 435 aa, Arabidopsis thaliana
GKIRFSGKTILAIMERLTSPPRLMIVSDLDHTMVDHHDPENLSLLRFNSLWEHAYRHDSLLVFSTGRSPTLYKELRKEKPLLTPDITIMSVGTEITYGNSMVPDHGWVEALNNKWDLGIVKQEASNFPELKLQAETEQRPHKVSFYVEKSKAQEVTKELSQRFLKRGLDVKIIYSGGMDLDILPQGAGKGQALAYLLKKLKTEGKLPVNTLACGDSGNDAELFSIPDVYGVMVSNAQEELLKWHAENAKDNPKVIHAKERCAGGIIQAIGHFKLGPNLSPRDVSDFLEIKVENVNPGHEVVKFFLFYERWRRGEVENSEAYTASLKASVHPGGVFVHPSGTEKSLRDTIDELRKYHGDKQGKKFRVWADQVLATDTTPGTWIVKLDKWEQDGDERRCCTTTVKFTSKEGEGLVWEHVQQTWSKETMVKDDSSWII

SEQ ID NO: 9478 - protein, 422 aa, Arabidopsis thaliana
MERLTSPPRLMIVSDLDHTMVDHHDPENLSLLRFNSLWEHAYRHDSLLVFSTGRSPTLYKELRKEKPLLTPDITIMSVGTEITYGNSMVPDHGWVEALNNKWDLGIVKQEASNFPELKLQAETEQRPHKVSFYVEKSKAQEVTKELSQRFLKRGLDVKIIYSGGMDLDILPQGAGKGQALAYLLKKLKTEGKLPVNTLACGDSGNDAELFSIPDVYGVMVSNAQEELLKWHAENAKDNPKVIHAKERCAGGIIQAIGHFKLGPNLSPRDVSDFLEIKVENVNPGHEVVKFFLFYERWRRGEVENSEAYTASLKASVHPGGVFVHPSGTEKSLRDTIDELRKYHGDKQGKKFRVWADQVLATDTTPGTWIVKLDKWEQDGDERRCCTTTVKFTSKEGEGLVWEHVQQTWSKETMVKDDSSWII

SEQ ID NO: 9479 - protein, 412 aa, Arabidopsis thaliana
MIVSDLDHTMVDHHDPENLSLLRFNSLWEHAYRHDSLLVFSTGRSPTLYKELRKEKPLLTPDITIMSVGTEITYGNSMVPDHGWVEALNNKWDLGIVKQEASNFPELKLQAETEQRPHKVSFYVEKSKAQEVTKELSQRFLKRGLDVKIIYSGGMDLDILPQGAGKGQALAYLLKKLKTEGKLPVNTLACGDSGNDAELFSIPDVYGVMVSNAQEELLKWHAENAKDNPKVIHAKERCAGGIIQAIGHFKLGPNLSPRDVSDFLEIKVENVNPGHEVVKFFLFYERWRRGEVENSEAYTASLKASVHPGGVFVHPSGTEKSLRDTIDELRKYHGDKQGKKFRVWADQVLATDTTPGTWIVKLDKWEQDGDERRCCTTTVKFTSKEGEGLVWEHVQQTWSKETMVKDDSSWII

SEQ ID NO: 9480 - DNA, 1362 bp, Arabidopsis thaliana
attctctgtctctctgtctttctcccccaactcgcgaacaaagcaaaccctagatcatccatcggcgagtgagacggcagctcctcgtcggtaattccttccaccggcggcgaccactcaccctcagatctctcaatcccactcatctctgtaacattctggtggaaattctgccatggcggagcatttggcttcaatctttggtactgagaaagacagagtgaattgccctttctacttcaagattggcgcttgccgtcatggtgaccggtgctcgcgtcttcacaaccgtcctaccatctccccaacactccttctttcaaacatgtaccaaaggcctgacatgattacccctggtgttgacgctcagggccaaccactcgacccgcgtaagattcaggagcactttgaggatttctttgaggatctttttgaggagcttggaaagtttggcgagatagagagcctcaacatttgtgacaaccttgctgaccacatgattggcaacgtatatgttcagtttaaggaagaggatcaggctgcagctgctttgcaggctctgcaaggtaggttctattcaggacgtcccatcattgctgatttctctcctgtgacggatttccgcgaagccacgtgtaggcagtatgaagaaaacaactgcaaccgtggtgggtactgtaatttcatgcatgtgaagcttgtttcgagggaactaaggagaaaactctttgggagatatcggcgatcataccgcagaggaagtagaagcaggagcagaagcaggagtattagccccaggaacaagagagataatgaccgacgtgatccttctcacagggaattcagtcatcgggacagagatcgcgagttttaccgtcatggaagtggaaaaaggagcagtgagaggtcggagaggcaagagagggacggttcaaggggtaggagacaagcaagccctaaacgaggagggagcccgggtggcgggagggaaggaagtgaggagaggagggcaaggattgagcaatggaacagagaacgggaggagaaggaagagggaggagcataaaaacagttgtttactcaaatcacaattgctgctatgtggtttctgcgtctgcttctctgcgtttattctgaaatcggtaaaatctggtgatggatttttcatttggctgttctaatttggaacttgaaatgagtggaatcaacttctttagattataaaatgtttggggttactttcttgtagttttgattaggaaaaaccgctctgtccccttgttattgattttcaccagtgttctttagaactttgtactatcttctgttggttaaaacttaaaagagttctagtttaattcg

SEQ ID NO: 9481 - protein, 296 aa, Arabidopsis thaliana
MAEHLASIFGTEKDRVNCPFYFKIGACRHGDRCSRLHNRPTISPTLLLSNMYQRPDMITPGVDAQGQPLDPRKIQEHFEDFFEDLFEELGKFGEIESLNICDNLADHMIGNVYVQFKEEDQAAAALQALQGRFYSGRPIIADFSPVTDFREATCRQYEENNCNRGGYCNFMHVKLVSRELRRKLFGRYRRSYRRGSRSRSRSRSISPRNKRDNDRRDPSHREFSHRDRDREFYRHGSGKRSSERSERQERDGSRGRRQASPKRGGSPGGGREGSEERRARIEQWNREREEKEEGGA

SEQ ID NO: 9482 - protein, 246 aa, Arabidopsis thaliana
MYQRPDMITPGVDAQGQPLDPRKIQEHFEDFFEDLFEELGKFGEIESLNICDNLADHMIGNVYVQFKEEDQAAAALQALQGRFYSGRPIIADFSPVTDFREATCRQYEENNCNRGGYCNFMHVKLVSRELRRKLFGRYRRSYRRGSRSRSRSRSISPRNKRDNDRRDPSHREFSHRDRDREFYRHGSGKRSSERSERQERDGSRGRRQASPKRGGSPGGGREGSEERRARIEQWNREREEKEEGGA

SEQ ID NO: 9483 - protein, 240 aa, Arabidopsis thaliana
MITPGVDAQGQPLDPRKIQEHFEDFFEDLFEELGKFGEIESLNICDNLADHMIGNVYVQFKEEDQAAAALQALQGRFYSGRPIIADFSPVTDFREATCRQYEENNCNRGGYCNFMHVKLVSRELRRKLFGRYRRSYRRGSRSRSRSRSISPRNKRDNDRRDPSHREFSHRDRDREFYRHGSGKRSSERSERQERDGSRGRRQASPKRGGSPGGGREGSEERRARIEQWNREREEKEEGGA

SEQ ID NO: 9484 - DNA, 1571 bp, Arabidopsis thaliana
attttctgtcattttgatcagatccaagaaaccaaaagagtaaaacaaacacagagaagcttcttcttaaacgatgccgtactataccagagatgacaacgacgtcgacgatttcgatgagtttgatccaacgccgtacagtggtggttacgacatcacggtgatctacggccgtccgattccaccttccgatgagacttgttatcctctctcatctggtgtcgatgatgatttcgaatacgagagacctgaatttactcagatccatgagccttctgcttacggtgatgaagctcttaacacagagtacagtagctattctcgacccaagccacgacccgcatttcgacccgattcaggtggtggtggtcatgttcaaggtgaaagaccaaatcctggttatggatctgaatccggttatgggaggaaaccggaatctgagtacggatctggctatggtggacaaacggaggtggagtatggtcggagacctgagcagagttatggatctggttatggtggaaggacggagactgaatcggagtatggatctggtggtggtggaagaactgaggttgagtatggtaggagacctgaatcagggcttggatctggttatggtgggagatcggagtctgagtatgagcgtaagcctagctatggaaggtctgaggaacaagaagaaggttataggaagcctagctatggaagatctgaagaacaagaggaaggttacaggaagccaagttatggaagatctgaggagcaggaagaaggatatagaaagcctagctatggaagatctgaggaggaacaagaggaaggttataggaagcctagctatggaagatctgaggaacaagaggaaggaagttacaggaaacctagttatgggaggtctgatgatcaggtggagagttacattaagcctagctatggaagatctgaggaacaggaggagggaagttacaggaagcctagttatgggaggtctgaggaacaggaagaggggagttacaggaagcagcctagctatggccgtggcaatgacgatgatgatgatgagcagcgtaggaaccgttctggttctggtgatgatgaggaagggagctatggccgcaagaaatatggtggcaatgactctgatgaggatgaggagaagaagaagcaccgtcacaagcatcaccaccagaagcgtcgtgacgaagacgatgagtaaactaaaccctctctgtgctagagagtgtaatgagaatgtgtgtttgcttagcctcaaaaatctactaaataaagagctaagtcacatacctttctacataatatcttccgacgttggtgttgtgtttgtttgaatctctgtattattactacagagtcttcgtactggttcataataagacctttaagtggtattgggtcaccatgtaactgttgctactctgtttcgttttctatctatcgttttgtgttatgatttacttttctatccttatataattatgatgatcatttcgtgtaatatcagaatgttttttgcatgaattggaattagatggaaactttgtttaagg

SEQ ID NO: 9485 - protein, 386 aa, Arabidopsis thaliana
MRLVILSHLVSMMISNTRDLNLLRSMSLLLTVMKLLTQSTVAILDPSHDPHFDPIQVVVVMFKVKDQILVMDLNPVMGGNRNLSTDLAMVDKRRWSMVGDLSRVMDLVMVEGRRLNRSMDLVVVEELRLSMVGDLNQGLDLVMVGDRSLSMSVSLAMEGLRNKKKVIGSLAMEDLKNKRKVTGSQVMEDLRSRKKDIESLAMEDLRRNKRKVIGSLAMEDLRNKRKEVTGNLVMGGLMIRWRVTLSLAMEDLRNRRREVTGSLVMGGLRNRKRGVTGSSLAMAVAMTMMMMSSVGTVLVLVMMRKGAMAARNMVAMTLMRMRRRRSTVTSITTRSVVTKTMSKLNPLCARECNENVCLLSLKNLLNKELSHIPFYIISSDVGVVFV

SEQ ID NO: 9486 - protein, 381 aa, Arabidopsis thaliana
MPYYTRDDNDVDDFDEFDPTPYSGGYDITVIYGRPIPPSDETCYPLSSGVDDDFEYERPEFTQIHEPSAYGDEALNTEYSSYSRPKPRPAFRPDSGGGGHVQGERPNPGYGSESGYGRKPESEYGSGYGGQTEVEYGRRPEQSYGSGYGGRTETESEYGSGGGGRTEVEYGRRPESGLGSGYGGRSESEYERKPSYGRSEEQEEGYRKPSYGRSEEQEEGYRKPSYGRSEEQEEGYRKPSYGRSEEEQEEGYRKPSYGRSEEQEEGSYRKPSYGRSDDQVESYIKPSYGRSEEQEEGSYRKPSYGRSEEQEEGSYRKQPSYGRGNDDDDDEQRRNRSGSGDDEEGSYGRKKYGGNDSDEDEEKKKHRHKHHHQKRRDEDDE

SEQ ID NO: 9487 - protein, 375 aa, Arabidopsis thaliana
MMISNTRDLNLLRSMSLLLTVMKLLTQSTVAILDPSHDPHFDPIQVVVVMFKVKDQILVMDLNPVMGGNRNLSTDLAMVDKRRWSMVGDLSRVMDLVMVEGRRLNRSMDLVVVEELRLSMVGDLNQGLDLVMVGDRSLSMSVSLAMEGLRNKKKVIGSLAMEDLKNKRKVTGSQVMEDLRSRKKDIESLAMEDLRRNKRKVIGSLAMEDLRNKRKEVTGNLVMGGLMIRWRVTLSLAMEDLRNRRREVTGSLVMGGLRNRKRGVTGSSLAMAVAMTMMMMSSVGTVLVLVMMRKGAMAARNMVAMTLMRMRRRRSTVTSITTRSVVTKTMSKLNPLCARECNENVCLLSLKNLLNKELSHIPFYIISSDVGVVFV

SEQ ID NO: 9488 - DNA, 766 bp, Arabidopsis thaliana
gtccctttaattgttttttggctcttctatcgcccatcgcttgggagattaaagtctgaactttttgatctcaagcttctccatctctccctcaactcaagctcctgatggcgagcaatatcatcttgttcgaggatatcttcgtggtcgatcagttagaccctgatggcaaaaagttcgataaagttactcgcgttcaagctacgagccacaacttggaaatgtttatgcatttagatgttaatacagaggtttatccattggctgttggtgataagttcacacttgcgttggctcctacgctgaatctcgatggaacccctgataccggttattttactccgggagcaaagaaaacacttgccgataagtatgaatacataatgcacgggaagctttacaagatctctgagcgtgacggcaaaactccaaaagcagagctatatgtttcgtttggcggcctcctgatgttgcttaagggagatccagctcacatttctcacttcgaactcgaccagaggctcttcctactcatgaggaagctgtgaggtgccattttttcggataaaaactgaattaatagagagcttgatctaatgtttaacttttactacttcaactcttgcaattttcatgaagcaactcttgtgcaaaagcaagtttttccgttccgttttaaatcccattccacaaattgactgctccggtccggtgaaatgtactatttgtagctctaagctattgatgaagataagcaattgagacc

SEQ ID NO: 9489 - protein, 146 aa, Arabidopsis thaliana
MASNIILFEDIFVVDQLDPDGKKFDKVTRVQATSHNLEMFMHLDVNTEVYPLAVGDKFTLALAPTLNLDGTPDTGYFTPGAKKTLADKYEYIMHGKLYKISERDGKTPKAELYVSFGGLLMLLKGDPAHISHFELDQRLFLLMRKL

SEQ ID NO: 9490 - protein, 108 aa, Arabidopsis thaliana
MFMHLDVNTEVYPLAVGDKFTLALAPTLNLDGTPDTGYFTPGAKKTLADKYEYIMHGKLYKISERDGKTPKAELYVSFGGLLMLLKGDPAHISHFELDQRLFLLMRKL

SEQ ID NO: 9491 - protein, 106 aa, Arabidopsis thaliana
MHLDVNTEVYPLAVGDKFTLALAPTLNLDGTPDTGYFTPGAKKTLADKYEYIMHGKLYKISERDGKTPKAELYVSFGGLLMLLKGDPAHISHFELDQRLFLLMRKL

SEQ ID NO: 9492 - DNA, 804 bp, Arabidopsis thaliana
acagagtagagcagagagagagagagagagagagatgggtgattctgacgtcggtgatcgtcttccccctccatcttcttccgacgaactctcgagctttctccgacagattctttcccgtactcctacagctcaaccttcttcaccaccgaagagtactaatgtttcctccgctgagaccttcttcccttccgtttccggcggagctgtttcttccgtcggttatggagtctctgaaactggccaagacaaatatgctttcgaacacaagagaagtggagctaaacagagaaattcgttgaagagaaacattgatgctcaattccacaacttgtctgaaaagactgataaagcctcaatgcttgatgaagctatagaatatctgaagcagcttcaacttcaagtccagactttagccgttatgaatggtttaggcttaaaccctatgcgattaccacaggttccacctccaactcatacaaggatcaatgagaccttagagcaagacctgaacctagagactcttctcgctgctcctcactcgctggaaccagctaaaacaagtcaaggaatgtgcttttccacagccactctgctttgaagataacattcagacaatgatgatgatcggaattcctctagtaccctgccagacaggagtgaacaatgttttgagttttagcattggccagatttctatgttcagttatagttatgctaataagctttaggagtgaacaaaatctgagtagtttgattataatgatgtctgaagcagattatatataaaagactaatttactc

SEQ ID NO: 9493 - protein, 199 aa, Arabidopsis thaliana
QSRAEREREREMGDSDVGDRLPPPSSSDELSSFLRQILSRTPTAQPSSPPKSTNVSSAETFFPSVSGGAVSSVGYGVSETGQDKYAFEHKRSGAKQRNSLKRNIDAQFHNLSEKTDKASMLDEAIEYLKQLQLQVQTLAVMNGLGLNPMRLPQVPPPTHTRINETLEQDLNLETLLAAPHSLEPAKTSQGMCFSTATLL

SEQ ID NO: 9494 - protein, 188 aa, Arabidopsis thaliana
MGDSDVGDRLPPPSSSDELSSFLRQILSRTPTAQPSSPPKSTNVSSAETFFPSVSGGAVSSVGYGVSETGQDKYAFEHKRSGAKQRNSLKRNIDAQFHNLSEKTDKASMLDEAIEYLKQLQLQVQTLAVMNGLGLNPMRLPQVPPPTHTRINETLEQDLNLETLLAAPHSLEPAKTSQGMCFSTATLL

SEQ ID NO: 9495 - protein, 99 aa, Arabidopsis thaliana
RVEQRERERERWVILTSVIVFPLHLLPTNSRAFSDRFFPVLLQLNLLHHRRVLMFPPLRPSSLPFPAELFLPSVMESLKLAKTNMLSNTREVELNREIR

SEQ ID NO: 9496 - DNA, 1529 bp, Arabidopsis thaliana
aattttcatggcataaagagtgagagagagagagtcatagacaggagacgtttgagattgatgaacagcgaattcgaaacaaatcacatggaagaagagctctctttcgctaccgttaccttctccacttttctccttcattagggttttctctcttatttagctgcgcagctctctctctttcttacggattcacttcttaaaactcgttaatttcttgtgggtttttgtctcttttgcgatctgattccgaaagttgagtgagagtgagagaatcatggaggaaggaagtatgttcagatctctattagcgattcttcagtggtggggtttcaatgttaccgtcatcatcatgaacaaatggatctttcagaaactggattttaagtttccactatcggtttcatgtgttcacttcatatgttcgtcgattggagcttacatcgttatcaaagttctcaagcttaaaccattgattgttgtcgatcctgaagatcgatggaggaggatttttccaatgtctttcgtgttttgtatcaacattgtcttgggaaatgtcagtcttcgttacattccggtttcgtttatgcagacgattaagtctttcactccagctactacagttgtgttacagtggctggtatggaggaaatactttgactggcgtatttgggcgtctctcgtgcctattgttggtggaattcttctgacatctgtgactgaacttagttttaacatgtttggattctgtgctgccctgtttggatgtttagctacttccacaaagaccattctagccgaatctcttcttcatggttacaaatttgacagcataaacaccgtttactatatggcgccttttgccaccatgattctcgggataccagcgttattactggaaggcagtggaattttgagctggtttgaagcacaccctgctccctggtcagccctcatcattatactcagttctggtgttctagccttctgtctcaacttctccatcttctatgtcattcactccacaactgcagtcacattcaacgtggctggaaaccttaaggttgcagtggctgtaatggtctcatggttgatattccgtaacccaatatcatatatgaatgctgttggatgcggaattacgcttgtgggctgcacgttttatggatatgtgaggcatatgctttcacagcaaacaccgggaactcctaggactcctcgtaccccaagaagcaagatggaattacttccacttgttaataatgataaactcgaaggcaaagtctgatcttcttcattccgcagctcagtttagtactcactggttcagggtgctgcagaagagaagcattgacacaaggggtgttgaatttttactaaatatgcattttactcaaaaaccttagtagagaaaagttacatttttttttttcgttttgatttgagctcgtagaagagataatggttcctactactatttatatttctgtgaagtgtagaatcttttaatttatcaaatacattttcgg

SEQ ID NO: 9497 - protein, 336 aa, Arabidopsis thaliana
MEEGSMFRSLLAILQWWGFNVTVIIMNKWIFQKLDFKFPLSVSCVHFICSSIGAYIVIKVLKLKPLIVVDPEDRWRRIFPMSFVFCINIVLGNVSLRYIPVSFMQTIKSFTPATTVVLQWLVWRKYFDWRIWASLVPIVGGILLTSVTELSFNMFGFCAALFGCLATSTKTILAESLLHGYKFDSINTVYYMAPFATMILGIPALLLEGSGILSWFEAHPAPWSALIIILSSGVLAFCLNFSIFYVIHSTTAVTFNVAGNLKVAVAVMVSWLIFRNPISYMNAVGCGITLVGCTFYGYVRHMLSQQTPGTPRTPRTPRSKMELLPLVNNDKLEGKV

SEQ ID NO: 9498 - protein, 331 aa, Arabidopsis thaliana
MFRSLLAILQWWGFNVTVIIMNKWIFQKLDFKFPLSVSCVHFICSSIGAYIVIKVLKLKPLIVVDPEDRWRRIFPMSFVFCINIVLGNVSLRYIPVSFMQTIKSFTPATTVVLQWLVWRKYFDWRIWASLVPIVGGILLTSVTELSFNMFGFCAALFGCLATSTKTILAESLLHGYKFDSINTVYYMAPFATMILGIPALLLEGSGILSWFEAHPAPWSALIIILSSGVLAFCLNFSIFYVIHSTTAVTFNVAGNLKVAVAVMVSWLIFRNPISYMNAVGCGITLVGCTFYGYVRHMLSQQTPGTPRTPRTPRSKMELLPLVNNDKLEGKV

SEQ ID NO: 9499 - protein, 311 aa, Arabidopsis thaliana
MNKWIFQKLDFKFPLSVSCVHFICSSIGAYIVIKVLKLKPLIVVDPEDRWRRIFPMSFVFCINIVLGNVSLRYIPVSFMQTIKSFTPATTVVLQWLVWRKYFDWRIWASLVPIVGGILLTSVTELSFNMFGFCAALFGCLATSTKTILAESLLHGYKFDSINTVYYMAPFATMILGIPALLLEGSGILSWFEAHPAPWSALIIILSSGVLAFCLNFSIFYVIHSTTAVTFNVAGNLKVAVAVMVSWLIFRNPISYMNAVGCGITLVGCTFYGYVRHMLSQQTPGTPRTPRTPRSKMELLPLVNNDKLEGKV

SEQ ID NO: 9500 - DNA, 783 bp, Arabidopsis thaliana
ggggataactaattcaatcgttaccgaaccaattcaccggcgagagagaatgaatacgccgatgtcactctcggcggcgcgtggccgtatgctaccttttttagagaaggagaaatcagaagaagagtctgaaactctggaatcgagtctcttacagctaatcgacgacaatcgtcgatcatcgttacagctccgggaaaaaaccgagagatcgagaaaggaagcaatcaggcacgcggcgagaacggcggatctgctagtgaaggcggtgaacggaggagtagaggaatgtttcgttaacgagaaacggattgagtcggagattaggaatcttgccattacggtggcgaaattcggcaaacaaacggatcagtggcttgccgtcactcacgccgttaatagcgccgtaaaggaaattggagattttgagaattggatgaagacgatggagtttgattgtaagaaaatcactgctgcaattcgaaacattcatgaagatcaacaataagagcaagttattgtgattcattcacttgttggtgttttttgatagagagttcttatagccattgatgttatataccacttctttagtgtttctctgtttgagtagtggaaatgattggatcaaaagagtttgatagtctactcaaaataaaaacatgaactactcttttggccttgttgggttgtctttgtgagtgttacaagatattttcttcgtacttctcttcttcataggcttgttctttagcctgagtaggattcatcatgtgccttatt

SEQ ID NO: 9501 - protein, 168 aa, Arabidopsis thaliana
GITNSIVTEPIHRRERMNTPMSLSAARGRMLPFLEKEKSEEESETLESSLLQLIDDNRRSSLQLREKTERSRKEAIRHAARTADLLVKAVNGGVEECFVNEKRIESEIRNLAITVAKFGKQTDQWLAVTHAVNSAVKEIGDFENWMKTMEFDCKKITAAIRNIHEDQQ

SEQ ID NO: 9502 - protein, 152 aa, Arabidopsis thaliana
MNTPMSLSAARGRMLPFLEKEKSEEESETLESSLLQLIDDNRRSSLQLREKTERSRKEAIRHAARTADLLVKAVNGGVEECFVNEKRIESEIRNLAITVAKFGKQTDQWLAVTHAVNSAVKEIGDFENWMKTMEFDCKKITAAIRNIHEDQQ

SEQ ID NO: 9503 - protein, 148 aa, Arabidopsis thaliana
MSLSAARGRMLPFLEKEKSEEESETLESSLLQLIDDNRRSSLQLREKTERSRKEAIRHAARTADLLVKAVNGGVEECFVNEKRIESEIRNLAITVAKFGKQTDQWLAVTHAVNSAVKEIGDFENWMKTMEFDCKKITAAIRNIHEDQQ

SEQ ID NO: 9504 - DNA, 1614 bp, Arabidopsis thaliana
atcgcttcgttttcgcctctgtaatcggaagaaaatcgaaaagtgaaaaattggaaatttgaagtgttacaaacctaattgacctttcctgtgtaacccaattcgagagacggaatcggcgagtgagaaagtactgatttctctaaaaagcccaaacattgcttggttgatttagcaacaatggcactctcgcagtggaaggaagctatactcgaagggattttcatggagattgaggatggtattgtggaagagaagaatctcgagcgattagagaatcttgtggagattttacacaaagaaggttctaaagtacccaaatcagtcacggaagcgtattgtaaagtagctgtggagtgcacagtgaagtgtctcgcttatgagaaagatgcaaaaaaggcttacaccgaagcaatcaaaacgatatggctcggtaggattatgcctttatgcgataaggttagttgtttggttactcttgacctcttgaaatgctgtcgaagattatggaaggcccacactgacgacaaggcttgtaagacactgatggatgaagatacaagagacaaagctttggtttgtttgaggaaggttgttttagatttgaatcccaatcttgttttagagaatctcaacatggatgaatcggatgagattgaatctagtgaagaatctgaagagacagaatcaatggttgaagcaagagagggcgtgggtaatcagaacagtcaggcgtctgaagctatggaagaagacgaccaagagagcctcttagatactgaactggaaagacctacttctggagggtcaaaagctgtatatgtacccagtcaattcaatcccattccatctgcagttgttgacagagcgctcagaaagctgagagctagtaaaatcgagctaatgaaagctttagaaaaaggaagaccttcaaatttaaacaatgagacgattacagaacaagaaaacgatgttgctaatccttctgcaacaaacgctgcaccaaggcctagcttgatggagccacgtagcacagcacacacttatgaatggaatgactccattgatgattcagatggagaaatgggcgatgacattgaaaggattaataaatcaaaacgtaaaagaattgtcgtgtctcctttgaaaagaaaccgatgttcagaaggtgctagaaggccaaaacttccttggagtactgcagaaacgctggccgtactcaaaggctatgaaaagtatggtgcaaactggaaacggatcaaagatgagaatccagttctagtgcgcagaactaatggtgatattaaagataaatttcgagttgagatgagacgtgaagagcgccgtcattgagtaggtattggagtactgaagtaggcatcagacctttttgtgagtagacgagtaccaacaactgctgaacaatgacgtattgtaaaaaaactgggtaacattttgtagccttttgtctttaagacccatagaatagcgtacgacgatgattgtctagtgaatggttttgttaagtaaactaggttccttagtcaaatgtagacgagcagttcatttcggtttcatattattttctattacgttttctaaaaaaaaaccaaa

SEQ ID NO: 9505 - protein, 390 aa, Arabidopsis thaliana
MALSQWKEAILEGIFMEIEDGIVEEKNLERLENLVEILHKEGSKVPKSVTEAYCKVAVECTVKCLAYEKDAKKAYTEAIKTIWLGRIMPLCDKVSCLVTLDLLKCCRRLWKAHTDDKACKTLMDEDTRDKALVCLRKVVLDLNPNLVLENLNMDESDEIESSEESEETESMVEAREGVGNQNSQASEAMEEDDQESLLDTELERPTSGGSKAVYVPSQFNPIPSAVVDRALRKLRASKIELMKALEKGRPSNLNNETITEQENDVANPSATNAAPRPSLMEPRSTAHTYEWNDSIDDSDGEMGDDIERINKSKRKRIVVSPLKRNRCSEGARRPKLPWSTAETLAVLKGYEKYGANWKRIKDENPVLVRRTNGDIKDKFRVEMRREERRH

SEQ ID NO: 9506 - protein, 375 aa, Arabidopsis thaliana
MEIEDGIVEEKNLERLENLVEILHKEGSKVPKSVTEAYCKVAVECTVKCLAYEKDAKKAYTEAIKTIWLGRIMPLCDKVSCLVTLDLLKCCRRLWKAHTDDKACKTLMDEDTRDKALVCLRKVVLDLNPNLVLENLNMDESDEIESSEESEETESMVEAREGVGNQNSQASEAMEEDDQESLLDTELERPTSGGSKAVYVPSQFNPIPSAVVDRALRKLRASKIELMKALEKGRPSNLNNETITEQENDVANPSATNAAPRPSLMEPRSTAHTYEWNDSIDDSDGEMGDDIERINKSKRKRIVVSPLKRNRCSEGARRPKLPWSTAETLAVLKGYEKYGANWKRIKDENPVLVRRTNGDIKDKFRVEMRREERRH

SEQ ID NO: 9507 - protein, 303 aa, Arabidopsis thaliana
MPLCDKVSCLVTLDLLKCCRRLWKAHTDDKACKTLMDEDTRDKALVCLRKVVLDLNPNLVLENLNMDESDEIESSEESEETESMVEAREGVGNQNSQASEAMEEDDQESLLDTELERPTSGGSKAVYVPSQFNPIPSAVVDRALRKLRASKIELMKALEKGRPSNLNNETITEQENDVANPSATNAAPRPSLMEPRSTAHTYEWNDSIDDSDGEMGDDIERINKSKRKRIVVSPLKRNRCSEGARRPKLPWSTAETLAVLKGYEKYGANWKRIKDENPVLVRRTNGDIKDKFRVEMRREERRH

SEQ ID NO: 9508 - DNA, 590 bp, Arabidopsis thaliana
acttacaaaatcatcttccctcaataaaccaaataagctaagtgttttgtgtaacgaaaacaaaaaatgggaaacctcatgtctctcgttctcgtggctttgctcttttctctctcccttgctgttattgcggacacatccaacgatgccacacatgttaaagaagaagtgaagccgagtactgaagcaactgatgctatagaagccgaagtcgaggtcaatgacgctgttgtagagccccagcaaggcttgcctggtggtggttgtaggttcggatgttgcggtgggtactggtggaatggactgtgcatatactgttgccgcagtcaagccgaggccaacgaagttgtaaaaactgttgagcctcagaaggaagaagctaagccatgatttcgcatgtaacacaaactctatatgtttgtatgcatgcagtggtcaattaccgtatgtatgtataaataaaagaagcatggtgcctaagtaagatacctagagagagctcaatagaaagaaaccaaaggttcattaatggtttttggttatgaggtgtttttctcgtggatgttataaataataactgttttaatact

SEQ ID NO: 9509 - protein, 107 aa, Arabidopsis thaliana
MGNLMSLVLVALLFSLSLAVIADTSNDATHVKEEVKPSTEATDAIEAEVEVNDAVVEPQQGLPGGGCRFGCCGGYWWNGLCIYCCRSQAEANEVVKTVEPQKEEAKP

SEQ ID NO: 9510 - protein, 103 aa, Arabidopsis thaliana
MSLVLVALLFSLSLAVIADTSNDATHVKEEVKPSTEATDAIEAEVEVNDAVVEPQQGLPGGGCRFGCCGGYWWNGLCIYCCRSQAEANEVVKTVEPQKEEAKP

SEQ ID NO: 9511 - protein, 56 aa, Arabidopsis thaliana
LTKSSSLNKPNKLSVLCNENKKWETSCLSFSWLCSFLSPLLLLRTHPTMPHMLKKK

SEQ ID NO: 9512 - DNA, 1649 bp, Arabidopsis thaliana
aaaaatcaattagggttttaacaaaaggttttagatttctggattgctgctctttctcccctgtgccgtcctgtggaaaacatcgttctttcaccaacaatggcgaagaagcgagatcgaattgtcaacactcaaccttttatctccgatgacgcctccctcgcttcttccaggaaacgatcaaaggttccaaaaacccatcagaaacaggaaaagttgattgaagctggtatgagcgagaagatcatgaaacaagctcttgcacaacaaaaggaagttgctgatgaagagaacgccgagagaaaccctagtagcgccgcttttgctgttgccggcgctgcgactgctggagaggagcagaaaattctggaggaggaagaagatgatattgatgattttgatggaacctttgaaaaccagagccaattcaataagcaagaggagattaatgaggatgatgagaagttgtttgagtcattcttaaataagaatgctcctcctcaacgtacgcttactgatatcattatcaagaagctcaaagataaggatgctgacttagctgaagaagagcgtcccgatcctaaaatggaccctgcaataactaagttatataaaggtgttggcaagtttatgagtgagtatacagttgggaaattgccaaaagcatttaagcttgttacttcaatggaacactgggaggatgttttatacttgactgagccagagaaatggtcacctaacgcattgtatcaagccacaaggatctttgcttccaacttgaaagacagacaagttcaacggttttataactatgttttgcttccgcgagtgagagaggatattagaaagcacaagaagctgcactttgctctgtaccaggctctgaaaaagtcactgtataagcctagtgctttcaatcaagggatactattcccgctttgtaagtcggggacatgcaatctcagagaagctgtaattatagggagcattcttgaaaagtgttcgatccctatgcttcactcatgtgttgccttgaacagactggctgagatggattattgtggcacaacaagttactttataaaagttcttttggagaagaaatattgtatgccgtatcgggtgcttgatgcattggttgctcacttcatgagatttgttgacgatataagagttatgcctgtgatttggcaccagtctcttcttacctttgtgcaacggtacaattatgaaatactaaaggaagataaagaacatctccaaactctcctccagaggcaaaaacaccatcttgttactcctgagattctgagagagcttaaggatagcagaaaccgtggagagaaagaagatcctatggtggataattttgccccagtaccggctaaagaagataggtttgacattcctgaagtaccaatggaagaagactgatgattcatggtgtttggtattgaaagaggactgatgattcatagcagcagagataaaccctgaaactgggtgggtatgattctggttttccagttttgacatcgttgtattattatttcttatttgagtaagatttgaaatttttattactacatgatagtgtatctttaaacatggtttaatctttttgatataatccaaatttggtcttgtct

SEQ ID NO: 9513 - protein, 444 aa, Arabidopsis thaliana
MAKKRDRIVNTQPFISDDASLASSRKRSKVPKTHQKQEKLIEAGMSEKIMKQALAQQKEVADEENAERNPSSAAFAVAGAATAGEEQKILEEEEDDIDDFDGTFENQSQFNKQEEINEDDEKLFESFLNKNAPPQRTLTDIIIKKLKDKDADLAEEERPDPKMDPAITKLYKGVGKFMSEYTVGKLPKAFKLVTSMEHWEDVLYLTEPEKWSPNALYQATRIFASNLKDRQVQRFYNYVLLPRVREDIRKHKKLHFALYQALKKSLYKPSAFNQGILFPLCKSGTCNLREAVIIGSILEKCSIPMLHSCVALNRLAEMDYCGTTSYFIKVLLEKKYCMPYRVLDALVAHFMRFVDDIRVMPVIWHQSLLTFVQRYNYEILKEDKEHLQTLLQRQKHHLVTPEILRELKDSRNRGEKEDPMVDNFAPVPAKEDRFDIPEVPMEED

SEQ ID NO: 9514 - protein, 400 aa, Arabidopsis thaliana
MSEKIMKQALAQQKEVADEENAERNPSSAAFAVAGAATAGEEQKILEEEEDDIDDFDGTFENQSQFNKQEEINEDDEKLFESFLNKNAPPQRTLTDIIIKKLKDKDADLAEEERPDPKMDPAITKLYKGVGKFMSEYTVGKLPKAFKLVTSMEHWEDVLYLTEPEKWSPNALYQATRIFASNLKDRQVQRFYNYVLLPRVREDIRKHKKLHFALYQALKKSLYKPSAFNQGILFPLCKSGTCNLREAVIIGSILEKCSIPMLHSCVALNRLAEMDYCGTTSYFIKVLLEKKYCMPYRVLDALVAHFMRFVDDIRVMPVIWHQSLLTFVQRYNYEILKEDKEHLQTLLQRQKHHLVTPEILRELKDSRNRGEKEDPMVDNFAPVPAKEDRFDIPEVPMEED

SEQ ID NO: 9515 - protein, 395 aa, Arabidopsis thaliana
MKQALAQQKEVADEENAERNPSSAAFAVAGAATAGEEQKILEEEEDDIDDFDGTFENQSQFNKQEEINEDDEKLFESFLNKNAPPQRTLTDIIIKKLKDKDADLAEEERPDPKMDPAITKLYKGVGKFMSEYTVGKLPKAFKLVTSMEHWEDVLYLTEPEKWSPNALYQATRIFASNLKDRQVQRFYNYVLLPRVREDIRKHKKLHFALYQALKKSLYKPSAFNQGILFPLCKSGTCNLREAVIIGSILEKCSIPMLHSCVALNRLAEMDYCGTTSYFIKVLLEKKYCMPYRVLDALVAHFMRFVDDIRVMPVIWHQSLLTFVQRYNYEILKEDKEHLQTLLQRQKHHLVTPEILRELKDSRNRGEKEDPMVDNFAPVPAKEDRFDIPEVPMEED

SEQ ID NO: 9516 - DNA, 1061 bp, Arabidopsis thaliana
aaattttctgaaagtgaagaaagggaaagcaagttttttttgaagtggggagagagatgggagaaatggggaaggcgatgggattgctgattagcgggacgcttgtgtattaccattgtgcatatcgtaacgcgactcttctctctctcttctccgatgttttcattgttctcttatgctctctcgccattctcggtctcctttttcgccaactcaatgtctcggtaccagtggatccactagagtggcaaatatcacaggacacagcaagtaacatcgttgcacgcttagctaataccgttggagcagcagagggtgttctgagggttgcagcaactggacatgacaagagactttttgtcaaggtcgtaatttgcctttacttcttatcagcgcttgggcgactcatatcaggtgtaaccgttgcttatgcaggactatgcttgttctgtctctccatgctctgtcagacttctcaatctcttggaaactgtgtactaaagcgaggaaatggccagattttagaacaagaagcacattctgatacataatatgtctagcttttgtttatacttttcgtcttttctcatgcttacatgctcatagcttcagtcttcagagtagtttccccttatgtacattggatttgttgcatactaccttgtgaaaaatgtaatgatattgtttaacctccacaccatatatctataattgtattctcttctaaaaaaaaaaaaaaaaaacgatgacaagaccaacgtcaaggccgcctggggtaaggtcggcgcgcacgctggcgagtatggtgcggaggccctggagaggatgttcctgtccttccccaccaccaagacctacttcccgcacttcgacctgagccacggctctgcccaggttaagggccacggcaagaaggtggccgacgcgctgaccaacgccgtggcgcacgtggacgacatgcccaacgcgctgtccgccctgagcgacctgcacgcgcacaagcttcgggtggacccggtcaacttcaagctcctaagccactgcctgctggtgagcccatc

SEQ ID NO: 9517 - protein, 164 aa, Arabidopsis thaliana
MGEMGKAMGLLISGTLVYYHCAYRNATLLSLFSDVFIVLLCSLAILGLLFRQLNVSVPVDPLEWQISQDTASNIVARLANTVGAAEGVLRVAATGHDKRLFVKVVICLYFLSALGRLISGVTVAYAGLCLFCLSMLCQTSQSLGNCVLKRGNGQILEQEAHSDT

SEQ ID NO: 9518 - protein, 161 aa, Arabidopsis thaliana
MGKAMGLLISGTLVYYHCAYRNATLLSLFSDVFIVLLCSLAILGLLFRQLNVSVPVDPLEWQISQDTASNIVARLANTVGAAEGVLRVAATGHDKRLFVKVVICLYFLSALGRLISGVTVAYAGLCLFCLSMLCQTSQSLGNCVLKRGNGQILEQEAHSDT

SEQ ID NO: 9519 - protein, 157 aa, Arabidopsis thaliana
MGLLISGTLVYYHCAYRNATLLSLFSDVFIVLLCSLAILGLLFRQLNVSVPVDPLEWQISQDTASNIVARLANTVGAAEGVLRVAATGHDKRLFVKVVICLYFLSALGRLISGVTVAYAGLCLFCLSMLCQTSQSLGNCVLKRGNGQILEQEAHSDT

SEQ ID NO: 9520 - DNA, 824 bp, Arabidopsis thaliana
acattcctaaattcctctcaatcttcttcttacttaacttattatataagtctctgtttctctctgacaaaaatattccaccacaaaaaaaaatggctcaattcttagagaaggcaacttcggctctcagcgaagccaaagaatccgttacaagcaccgctgaatccgtcacggcttctctcactgatgctgagaaaaccgttaaccaaaccgccaggagcactctaactgacgccgagacaaccgttgcagcatctgttgaaacggtcaagaccgaggctgcagccgcaccagacaaagcgtctggtgtgtctacacaggctaaggatgcagtggacaaagctttttctagaggtatagaaggagccaaatctttgcttcaaactttcgaagcgaagagcagcgatatttcctcaaagcttgttggaggtgttaccaatcttgtgagtggagcatcgagcagcaccgtggcaaaccgagaccttccagtatctacagacaaccagcctctgctagcgtctggcgaaacgacgccgtggtggaagaattgttgtggagttcttgatcttttcaagaaagatacttaagttaaaaagatcaaaaaaatgacaaattaacgaatttcacgagatgaagaaacagagcactagaagaagaaagaaccctcatccttttgattatttatttccttcctttttgattttgatttgagattgtgtctatctgtttttgtttgttttttgttttgttgatatcttgattgtttcccaaaaacttgtgtaagaacaaaaaaaagaccaaataaaaagggttatttctttgtg

SEQ ID NO: 9521 - protein, 194 aa, Arabidopsis thaliana
IPKFLSIFFLLNLLYKSLFLSDKNIPPQKKMAQFLEKATSALSEAKESVTSTAESVTASLTDAEKTVNQTARSTLTDAETTVAASVETVKTEAAAAPDKASGVSTQAKDAVDKAFSRGIEGAKSLLQTFEAKSSDISSKLVGGVTNLVSGASSSTVANRDLPVSTDNQPLLASGETTPWWKNCCGVLDLFKKDT

SEQ ID NO: 9522 - protein, 164 aa, Arabidopsis thaliana
MAQFLEKATSALSEAKESVTSTAESVTASLTDAEKTVNQTARSTLTDAETTVAASVETVKTEAAAAPDKASGVSTQAKDAVDKAFSRGIEGAKSLLQTFEAKSSDISSKLVGGVTNLVSGASSSTVANRDLPVSTDNQPLLASGETTPWWKNCCGVLDLFKKDT

SEQ ID NO: 9523 - DNA, 853 bp, Arabidopsis thaliana
ctcaaaagagattctcacgatcgagcaagagagagatggatggtcgattacctgacaaaggcattctcaagagcgaggctctaaaacagtacatcatggaaacaacagcgtatccaagagaacacgaattgcttaaagaacttcgagaagctacaatccagagatatggaaatttaagcgagatgggagttccggttgatgaaagtctatttttatcgatgcttgtaaagatcatcaacgcgaaaaacactatcgagatcggtgtgttcaccggttactcacttttcaccgtagctcttgctttgcctgaagatggccgtattactgcgatagacattgatcaagcaggttacaatttgggactagagtttatgaagaaagcaggtgttgatcacaagatcaatttcattcaatctgatgctgttagaggcttagaccaattattgaacggggagaaacaagagtatgattttgcatttgtggatgctgacaagacgaactacgtttacttccttgagaagctccttaagttagtgaaggttggaggaatcattgccttcgacaacactttatggtttggtactctaattcagaaggaaaacgaagttccaggccatatgagagcttatagagaggcacttttagagttcaataagatattggctcgggatcctcgagtcgaaatcgctcaaatatccatcggagatggtctcacgctatgtagacgtcttatatgataaacctatagtaaataatgttatatggttcaataataactttggcctttgtttgtaatgttatatgctactataatgactcttcatcttcctaataaaactcctctttcaattcc

SEQ ID NO: 9524 - protein, 244 aa, Arabidopsis thaliana
QKRFSRSSKREMDGRLPDKGILKSEALKQYIMETTAYPREHELLKELREATIQRYGNLSEMGVPVDESLFLSMLVKIINAKNTIEIGVFTGYSLFTVALALPEDGRITAIDIDQAGYNLGLEFMKKAGVDHKINFIQSDAVRGLDQLLNGEKQEYDFAFVDADKTNYVYFLEKLLKLVKVGGIIAFDNTLWFGTLIQKENEVPGHMRAYREALLEFNKILARDPRVEIAQISIGDGLTLCRRLI

SEQ ID NO: 9525 - protein, 233 aa, Arabidopsis thaliana
MDGRLPDKGILKSEALKQYIMETTAYPREHELLKELREATIQRYGNLSEMGVPVDESLFLSMLVKIINAKNTIEIGVFTGYSLFTVALALPEDGRITAIDIDQAGYNLGLEFMKKAGVDHKINFIQSDAVRGLDQLLNGEKQEYDFAFVDADKTNYVYFLEKLLKLVKVGGIIAFDNTLWFGTLIQKENEVPGHMRAYREALLEFNKILARDPRVEIAQISIGDGLTLCRRLI

SEQ ID NO: 9526 - protein, 213 aa, Arabidopsis thaliana
METTAYPREHELLKELREATIQRYGNLSEMGVPVDESLFLSMLVKIINAKNTIEIGVFTGYSLFTVALALPEDGRITAIDIDQAGYNLGLEFMKKAGVDHKINFIQSDAVRGLDQLLNGEKQEYDFAFVDADKTNYVYFLEKLLKLVKVGGIIAFDNTLWFGTLIQKENEVPGHMRAYREALLEFNKILARDPRVEIAQISIGDGLTLCRRLI

SEQ ID NO: 9527 - DNA, 1913 bp, Arabidopsis thaliana
atggagaagaagaagaagaagagagatgaggaagaaacgagaggctaaagatgaaaatgaagaagaagaagaggagaagaagaagagactagagttgatgaaggcagctgcgcaggcttggctcagccactcccaaacctcaaaacatactgttttagagttcgatgcgcagagaaagcatgcttttgtcaaagggaaggcatcacgtttcaaaacggaagccttgtccgcaaagcatcatccgtcgtttttggattgggaattcggacagtcgctgtgggatccctacgagattctttcggtctctaagaaactggaacgcgaactcactttagaagaacaaaccttctcttcttcagataatgatggcctcaagaagatgaagaagaagaaaactagagacagcagaaacagccttaggagtttgttcactcgttcgtcttcaaagagattctaacaaactcatcatgttactacttcaaacttgtaaatttttctcaaaaagtgaaatcaattatgaatgtcttttattggtcgaaaaaaaaaaaaaaaaaagcttttttttttttttttttgcaaagaaagctttgttttgattgataatattacacataaccaagagagagcatatagtacaaacgaaaacaagaatagttatccttagaagtaatcctcagtcctgcccttgaatccgatttgtccgaaagtgaggcagaggaagaggcctaagtgccacgtaaccaaccacaaccagaactgtgaagtgagagctggaggagtcgggaagtgagcgagctcagttccgatgctatcgaagaagagacccgtcaggctcttcccatttatcgctggaatgctcgacggagctagccatccgatcagcccaaatcctaccacgttcaaatctctcctcaaccagttcctctcaaagcaagtgactcttcctcccgatgcaccggcgagtctcaaagggttcttggcgcttaatgttggttttaaaaaggatgaagagaagggtttggtggtgatggatgatcctccgaggcctatcaccgtcgatggtgttgcaaatgttgctgccatttttcttctgggctgctcacaagaccgactttttctcggacaagttcggtgtgaggtcaatcagggacaataacgatgaactaatgggtgctgtgtatctacaagttagtatcatcagtcaagctctaatctttgtcaccaggtcaaggagttggtcatttgtcgaacgtcctggggcgcttctgatgattgcattcgtcattgcacaactggttgcaactttgatcgcagtgtatgccgactggacatttgcaaaggtgaagggtatcggttggggatgggcaggtgtgatttggatttacagtatcgtaacatacttcccacaggacattttgaagtttgccattcggtatatcttgagtggaaaggcttgggccagcttgtttgacaacaggaccgctttcacaaccaagaaagattacggtattggagaaagagaagctcaatgggcacaagctcaaaggacattgcacggtctgcagccaaaagaagatgttaatatcttcccagagaaaggaagttacagagagctgtctgagatcgcagagcaagccaagagaagggccgagatagctaggcttagggagcttcacacattgaagggacatgtggaatcagtcgcaaagctaaagggattggacattgatacagcaggacatcactacactgtgtagttggagttgcacaacaacacaaacatttaccgaaaaccaaccccatcatgactcatcttttgttttgtcttcacaaatctctctttaaaagtcattacagtagagggaagagaactcttgtgtattgccataactcttccaaaactcttttttctt

SEQ ID NO: 9528 - protein, 241 aa, Arabidopsis thaliana
MILRGLSPSMVLQMLLPFFFWAAHKTDFFSDKFGVRSIRDNNDELMGAVYLQVSIISQALIFVTRSRSWSFVERPGALLMIAFVIAQLVATLIAVYADWTFAKVKGIGWGWAGVIWIYSIVTYFPQDILKFAIRYILSGKAWASLFDNRTAFTTKKDYGIGEREAQWAQAQRTLHGLQPKEDVNIFPEKGSYRELSEIAEQAKRRAEIARLRELHTLKGHVESVAKLKGLDIDTAGHHYTV

SEQ ID NO: 9529 - protein, 232 aa, Arabidopsis thaliana
MVLQMLLPFFFWAAHKTDFFSDKFGVRSIRDNNDELMGAVYLQVSIISQALIFVTRSRSWSFVERPGALLMIAFVIAQLVATLIAVYADWTFAKVKGIGWGWAGVIWIYSIVTYFPQDILKFAIRYILSGKAWASLFDNRTAFTTKKDYGIGEREAQWAQAQRTLHGLQPKEDVNIFPEKGSYRELSEIAEQAKRRAEIARLRELHTLKGHVESVAKLKGLDIDTAGHHYTV

SEQ ID NO: 9530 - protein, 228 aa, Arabidopsis thaliana
MLLPFFFWAAHKTDFFSDKFGVRSIRDNNDELMGAVYLQVSIISQALIFVTRSRSWSFVERPGALLMIAFVIAQLVATLIAVYADWTFAKVKGIGWGWAGVIWIYSIVTYFPQDILKFAIRYILSGKAWASLFDNRTAFTTKKDYGIGEREAQWAQAQRTLHGLQPKEDVNIFPEKGSYRELSEIAEQAKRRAEIARLRELHTLKGHVESVAKLKGLDIDTAGHHYTV

SEQ ID NO: 9531 - DNA, 1344 bp, Arabidopsis thaliana
gttgctctgaaaccctaaaagaagctaaatctagcaatggcgagaagatccgtttcgatatttaatcgccttctggcgaatcctccttctccattcacatcactgtcccgatccatcacctacatgcctagacccggagatggagctccacgaaccgtaaccctaattcccggcgacggaatcggacctttggtgaccggtgcggtggaacaggtcatggaagcgatgcacgcgccagtgcatttcgagagatacgaggttctaggaaacatgagaaaagtccctgaagaagtgatcgagtctgtgaagaaaaacaaggtttgtctcaaaggtggattagcgactcctgttggtgggggtgtcagttctttgaatatgcaattgaggaaagaactcgatatcttcgcttctcttgtcaattgcatcaatgtccctggattagtgacgcgacacgaaaatgttgatatcgttgtgataagagagaacactgaaggagagtactcaagtctcgagcatgaggttgttcctggtgttgtcgagagccttaaggtgataacaaagttttgttctgagagaatagcgagatatgcatttgagtatgcgtatctaaacaataggaagaaagtgactgctgttcataaagctaacattatgaagcttgcggatgggctcttccttgaatcttgtagagaggttgctaaacattattcggggattacttacaatgaaataatcgtagacaattgctgtatgcagcttgtcgccaagcctgagcaatttgatgtcatggtcacacctaatttgtatggtaaccttatagcaaacacggcggctggaatagccggtggcactggagtgatgccaggagggaatgttggtgcagaacatgcgatattcgagcaaggcgcatcagcagggaatgtggggaatgataagatggtggaacagaagaaagcgaatccggtggctctacttctctcgtcggctatgatgctaagacatctccggtttcctacttttgctgatcggcttgaaacagcagtgaaacaagtgattaaagaaggaaaatatagaacaaaagatcttggaggagattgtaccacgcaggaagttgttgatgctgtcatagcagctcttgagtgaaaccatgtgagcttctctgcttctgcttgcttcttctttcgtcttttccatttcaactaagagaaaagtgttggttttctctgttttacgtcgctcttttttgtttcttgattcattttacaagttcattttttcttgtttgagcatgagctctatgatacagaataaaaacaataaagacagacatatgcaatgttgttt

SEQ ID NO: 9532 - protein, 368 aa, Arabidopsis thaliana
MARRSVSIFNRLLANPPSPFTSLSRSITYMPRPGDGAPRTVTLIPGDGIGPLVTGAVEQVMEAMHAPVHFERYEVLGNMRKVPEEVIESVKKNKVCLKGGLATPVGGGVSSLNMQLRKELDIFASLVNCINVPGLVTRHENVDIVVIRENTEGEYSSLEHEVVPGVVESLKVITKFCSERIARYAFEYAYLNNRKKVTAVHKANIMKLADGLFLESCREVAKHYSGITYNEIIVDNCCMQLVAKPEQFDVMVTPNLYGNLIANTAAGIAGGTGVMPGGNVGAEHAIFEQGASAGNVGNDKMVEQKKANPVALLLSSAMMLRHLRFPTFADRLETAVKQVIKEGKYRTKDLGGDCTTQEVVDAVIAALE

SEQ ID NO: 9533 - protein, 339 aa, Arabidopsis thaliana
MPRPGDGAPRTVTLIPGDGIGPLVTGAVEQVMEAMHAPVHFERYEVLGNMRKVPEEVIESVKKNKVCLKGGLATPVGGGVSSLNMQLRKELDIFASLVNCINVPGLVTRHENVDIVVIRENTEGEYSSLEHEVVPGVVESLKVITKFCSERIARYAFEYAYLNNRKKVTAVHKANIMKLADGLFLESCREVAKHYSGITYNEIIVDNCCMQLVAKPEQFDVMVTPNLYGNLIANTAAGIAGGTGVMPGGNVGAEHAIFEQGASAGNVGNDKMVEQKKANPVALLLSSAMMLRHLRFPTFADRLETAVKQVIKEGKYRTKDLGGDCTTQEVVDAVIAALE

SEQ ID NO: 9534 - protein, 308 aa, Arabidopsis thaliana
MEAMHAPVHFERYEVLGNMRKVPEEVIESVKKNKVCLKGGLATPVGGGVSSLNMQLRKELDIFASLVNCINVPGLVTRHENVDIVVIRENTEGEYSSLEHEVVPGVVESLKVITKFCSERIARYAFEYAYLNNRKKVTAVHKANIMKLADGLFLESCREVAKHYSGITYNEIIVDNCCMQLVAKPEQFDVMVTPNLYGNLIANTAAGIAGGTGVMPGGNVGAEHAIFEQGASAGNVGNDKMVEQKKANPVALLLSSAMMLRHLRFPTFADRLETAVKQVIKEGKYRTKDLGGDCTTQEVVDAVIAALE

SEQ ID NO: 9535 - DNA, 1633 bp, Arabidopsis thaliana
ttttttcacactttttctgtctgttacgattcttgcttgatttctttctaaacaaagcaaaagttgtctttttggagttgtgagcaactaattctctgaaattgaggaagagaaagcgagaaggtttttttggagtcagagacagaagaagaatttaacagattcttgtcggaaacatggatacgagtgaagcaaggaaccgtaaagttgttgcagttgaacaattcgatctcgaagtccctgagactgctcatcagattagcagcgattcatggtttcaggtagcttttgttctaacgaccggtataaacagtgcctatgtgttgggatattccgggacagtcatggttcctttgggttggattggtggtgtggttggtctcattcttgctaccgcaatctctctttacgcaaacactcttatcgccaaacttcatgagtttggtggcaaaagacacattcgttatagagatcttgcaggcttcatctatggtaaaaagatgtatcgtgttacatggggattgcaatatgtcaatcttttcatgattaattgtggcttcatcatacttgctggttcggccttaaaggctgtttatgtactttttagagatgatagtctcatgaaactgcctcacttcatcgccatcgcgggtgttgtatgcgcgattttcgcaatcggtattcctcatttatcagctcttggaatctggctaggagtttcaacaatcctcagcataatctacattattgttgcaatagttctatcagctaaagatggagtaaacaagcctgaaagagattacaacatacaaggatcatcaataaacaaactctttaccataacaggagcagctgcaaatctagttttcgcattcaacacgggaatgctcccggaaatacaggcgacggtgaagcaaccggtcgttaaaaacatgatgaaggctctgtattttcaattcactgttggtgttttacctatgtacgcggttacattcatcggatattgggcttacgggtcctcgacatcgacttatctcttaaacagcgtcagtggacctgtttgggtcaaagcactcgctaacatttcagcttttctccaatctgttatctctttacatatttttgcaagtccgacttatgagtatatggacacaaagtatggagtcaaaggaagtccattggcaatgaagaatctgttgtttagaacagtagcaagaggaagctacattgcggtgagcactcttctctctgcgcttttaccgtttctcggagatttcatgagccttaccggagcgataagcacgttccctctcacattcatattagcgaatcacatgtatcttgttgctatgaatgatgagcttagtcttgtgcaaaagctatggcattggctcaatgtttgcttctttggattaatgtctcttgctgctgctattgctgctgttagactcatctctgttgactccaagaacttccatgtttttgctgatgtttgattaaaatgtcttcgacatttttaacgatgtaatctttataccaattagaaaaaattgtaatccttttgttgttacttttattatttcaaatgaaagaaattttttataacataatatatatatttatttttcggttc

SEQ ID NO: 9536 - protein, 439 aa, Arabidopsis thaliana
MDTSEARNRKVVAVEQFDLEVPETAHQISSDSWFQVAFVLTTGINSAYVLGYSGTVMVPLGWIGGVVGLILATAISLYANTLIAKLHEFGGKRHIRYRDLAGFIYGKKMYRVTWGLQYVNLFMINCGFIILAGSALKAVYVLFRDDSLMKLPHFIAIAGVVCAIFAIGIPHLSALGIWLGVSTILSIIYIIVAIVLSAKDGVNKPERDYNIQGSSINKLFTITGAAANLVFAFNTGMLPEIQATVKQPVVKNMMKALYFQFTVGVLPMYAVTFIGYWAYGSSTSTYLLNSVSGPVWVKALANISAFLQSVISLHIFASPTYEYMDTKYGVKGSPLAMKNLLFRTVARGSYIAVSTLLSALLPFLGDFMSLTGAISTFPLTFILANHMYLVAMNDELSLVQKLWHWLNVCFFGLMSLAAAIAAVRLISVDSKNFHVFADV

SEQ ID NO: 9537 - protein, 383 aa, Arabidopsis thaliana
MVPLGWIGGVVGLILATAISLYANTLIAKLHEFGGKRHIRYRDLAGFIYGKKMYRVTWGLQYVNLFMINCGFIILAGSALKAVYVLFRDDSLMKLPHFIAIAGVVCAIFAIGIPHLSALGIWLGVSTILSIIYIIVAIVLSAKDGVNKPERDYNIQGSSINKLFTITGAAANLVFAFNTGMLPEIQATVKQPVVKNMMKALYFQFTVGVLPMYAVTFIGYWAYGSSTSTYLLNSVSGPVWVKALANISAFLQSVISLHIFASPTYEYMDTKYGVKGSPLAMKNLLFRTVARGSYIAVSTLLSALLPFLGDFMSLTGAISTFPLTFILANHMYLVAMNDELSLVQKLWHWLNVCFFGLMSLAAAIAAVRLISVDSKNFHVFADV

SEQ ID NO: 9538 - protein, 331 aa, Arabidopsis thaliana
MYRVTWGLQYVNLFMINCGFIILAGSALKAVYVLFRDDSLMKLPHFIAIAGVVCAIFAIGIPHLSALGIWLGVSTILSIIYIIVAIVLSAKDGVNKPERDYNIQGSSINKLFTITGAAANLVFAFNTGMLPEIQATVKQPVVKNMMKALYFQFTVGVLPMYAVTFIGYWAYGSSTSTYLLNSVSGPVWVKALANISAFLQSVISLHIFASPTYEYMDTKYGVKGSPLAMKNLLFRTVARGSYIAVSTLLSALLPFLGDFMSLTGAISTFPLTFILANHMYLVAMNDELSLVQKLWHWLNVCFFGLMSLAAAIAAVRLISVDSKNFHVFADV

SEQ ID NO: 9539 - DNA, 1212 bp, Arabidopsis thaliana
ttcccggagaaagaaatttagaattactcaagcgaatttgattaacccaacaatggatgttataaagacgcaacaaatatcggcaaggacaatcgagaaagtgatcgttcacccacttgtcttgcttagtatcgtcgaccattacaatcgtgtagccaaggacacgagcaagcgcgtcgtcggcgttctgctcggaagtagctctcgtggtactgtacgtcaccaacagctacgcagtgccttttgaggaggatgacaaagacacaagcatatggtttcttgatcacaactaccacgagtcgatgtttcacatgttcaagagaattaattctaaggagcatattgtgggttggtacagcacaggtcctaaacttcgagagaatgatttggatgttcacgctttattcaatggctacgttccaaatccagtgttggtcattattgatgtccaacctaaagaacttggaatccctacaaaagcatactatgcggttgaggaggtgaaagagaatgctacccagaaaagccaacaggtttttgtacacgtgcctacagaaattgcagctcatgaagttgaggaaattggtgtggaacatttgctcagggatgtaaaagacacaaccatcagtaccttggcaactgaggtcactgcgaaacttactgctctgaagggattggatgcacgacttcgggagatccggacttaccttgaccttgtaatcgaaggaaaactcccattaaaccatgaaatcttataccatcttcaggacgtattcaacttgcttcctaacttgaacgtcaacgagttggttaaagcctttgcagtaaaaacaaatgacatgatgctcgtaatctacctttcttcgcttatccgaagtgtaatcgccctccacagtttgatcaacaacaagttgttgaataaggaacatgaaaaagcagaggactccaagcctgttgacatacccttaatcactgagagttaaatgcagccgaatttcgagctttgggaagttttctaatcggatgttactctgtcatttgctgcatgtgaagaggggtctgtaggggaacaaaacgggtttggtctcgttctgatgatcttctattactgttgtttctacaatggttgttattagtatgtcgtttctgtctccaaagattcttttttcatcgatttttatttctagtttccctaattctgatcttcaaggc

SEQ ID NO: 9540 - protein, 226 aa, Arabidopsis thaliana
MFHMFKRINSKEHIVGWYSTGPKLRENDLDVHALFNGYVPNPVLVIIDVQPKELGIPTKAYYAVEEVKENATQKSQQVFVHVPTEIAAHEVEEIGVEHLLRDVKDTTISTLATEVTAKLTALKGLDARLREIRTYLDLVIEGKLPLNHEILYHLQDVFNLLPNLNVNELVKAFAVKTNDMMLVIYLSSLIRSVIALHSLINNKLLNKEHEKAEDSKPVDIPLITES

SEQ ID NO: 9541 - protein, 223 aa, Arabidopsis thaliana
MFKRINSKEHIVGWYSTGPKLRENDLDVHALFNGYVPNPVLVIIDVQPKELGIPTKAYYAVEEVKENATQKSQQVFVHVPTEIAAHEVEEIGVEHLLRDVKDTTISTLATEVTAKLTALKGLDARLREIRTYLDLVIEGKLPLNHEILYHLQDVFNLLPNLNVNELVKAFAVKTNDMMLVIYLSSLIRSVIALHSLINNKLLNKEHEKAEDSKPVDIPLITES

SEQ ID NO: 9542 - DNA, 637 bp, Arabidopsis thaliana
  misc_feature (491)..(491): n is a, c, g, or t
  misc_feature (548)..(548): n is a, c, g, or t
  misc_feature (570)..(570): n is a, c, g, or t
ataaattttctcgtgaagctaatttttcctgagaaagaaagcgaaacttcgctggcgactaaagattgctgagaagacacgtcgtctctgtgagaactttttctttttcttctggtatattctggagacatatattgttttttcttctgattagagaataatatgacggaagtgattagcaaaacgagtttgttcttaggagcttgtgggaatcatcaccgtgttgatgatttctctttctctccgatcgttttcggagattctcaagacgagagcttcagaagatcatcagctatcacagctcagacaactttgaggattgggacagctcagaagtggtgggagaaaggtctgaaagataacatgagagagatctcttcagctcaagagctcgttgattctcttactaacgctggtgataagcttgttgttgttgatttcttctcacctggctgtggtggctgcaaggctctccatcctaagatatgtcngtttgcagagatgaacccggatgtgcagtttcttcaggtgaattacgaggagcatangtccatgtgttatagccttggngtccatgttctccctttttttccgatctccgtggctctcaggggtcgggttttggcagctttagctg

SEQ ID NO: 9543 - protein, 158 aa, Arabidopsis thaliana
  misc_feature (110)..(110): Xaa can be any naturally occurring amino acid
  misc_feature (129)..(129): Xaa can be any naturally occurring amino acid
  misc_feature (136)..(136): Xaa can be any naturally occurring amino acid
MTEVISKTSLFLGACGNHHRVDDFSFSPIVFGDSQDESFRRSSAITAQTTLRIGTAQKWWEKGLKDNMREISSAQELVDSLTNAGDKLVVVDFFSPGCGGCKALHPKICXFAEMNPDVQFLQVNYEEHXSMCYSLXVHVLPFFPISVALRGRVLAALA

SEQ ID NO: 9544 - protein, 91 aa, Arabidopsis thaliana
  misc_feature (43)..(43): Xaa can be any naturally occurring amino acid
  misc_feature (62)..(62): Xaa can be any naturally occurring amino acid
  misc_feature (69)..(69): Xaa can be any naturally occurring amino acid
MREISSAQELVDSLTNAGDKLVVVDFFSPGCGGCKALHPKICXFAEMNPDVQFLQVNYEEHXSMCYSLXVHVLPFFPISVALRGRVLAALA

SEQ ID NO: 9545 - DNA, 665 bp, Arabidopsis thaliana
cattacctagaacatcctaatcgaaaaaacaaatcacatttctctctcttctctgcttgaatccattacagagggattgtggagtggtttggtttgatttgatttcgatctgtgacaatggtggagactagtatcgacatggaggaaggaactctcgagatcggaatggagtatagaactgtctccggagttgctggacctttggtcatccttgacaaagtgaagggtccaaagtaccaggagattgttaatattcgcttaggagatggatcaacgagacgtggtcaggtcttggaggttgatggggagaaagctgttgtccaggtttttgaaggaacatctgggattgacaacaagtttaccaccgtgcaattcacaggagaggtactgaaaacgcctgtatcattggacatgcttggccgcatatttaacggctcgggaaagccaattgataatggccctcctattttgccagaggcataccttgatatttctggaagttcaatcaaccccagtgaaagaacctaccctgaagagatgatacaaacggggatttctaccattgatgtcatgaactccattgctcgtggacagaagattcctcttttctctgctgctggtctacctcataatgagattgctgctcaaatttgtcgtcaggctgg

SEQ ID NO: 9546 - protein, 182 aa, Arabidopsis thaliana
MVETSIDMEEGTLEIGMEYRTVSGVAGPLVILDKVKGPKYQEIVNIRLGDGSTRRGQVLEVDGEKAVVQVFEGTSGIDNKFTTVQFTGEVLKTPVSLDMLGRIFNGSGKPIDNGPPILPEAYLDISGSSINPSERTYPEEMIQTGISTIDVMNSIARGQKIPLFSAAGLPHNEIAAQICRQA

SEQ ID NO: 9547 - protein, 175 aa, Arabidopsis thaliana
MEEGTLEIGMEYRTVSGVAGPLVILDKVKGPKYQEIVNIRLGDGSTRRGQVLEVDGEKAVVQVFEGTSGIDNKFTTVQFTGEVLKTPVSLDMLGRIFNGSGKPIDNGPPILPEAYLDISGSSINPSERTYPEEMIQTGISTIDVMNSIARGQKIPLFSAAGLPHNEIAAQICRQA

SEQ ID NO: 9548 - protein, 166 aa, Arabidopsis thaliana
MEYRTVSGVAGPLVILDKVKGPKYQEIVNIRLGDGSTRRGQVLEVDGEKAVVQVFEGTSGIDNKFTTVQFTGEVLKTPVSLDMLGRIFNGSGKPIDNGPPILPEAYLDISGSSINPSERTYPEEMIQTGISTIDVMNSIARGQKIPLFSAAGLPHNEIAAQICRQA

SEQ ID NO: 9549 - DNA, 583 bp, Arabidopsis thaliana
atccaaaccctagaaattttgtctctctcgccgccttgcgaaaagcattttcgatcttactcttaggataaaaaaatgtcgacacttggagagcttgcttgcagctacgctgttatgatcctcgaggacgagggtatcgctatcacggctgacaaaatcgcgaccttggtgaaagctgctggtgttagtattgagtcatactggccaatgctattcgccaagatggctgagaaacgtaacgtgactgatctcatcatgaacgttggtgctggtggtggaggtggtgctccggttgcagctgctgctccagctgctgctgaggagaagaagaaggatgagccagcagaagagagtgacggagatttgggtttggctaaagctggttctgctcggttgtcacgtagaggtgatgaccagtaacgaaacacatcctatgggtcataacctatcttgtgtgaattgctcaagcctagttacttattgtaatgcttttatgcatgtattaatatcaaaaatgtttttttgtcattaaattccaaatttgttgtcatgttgaaaaaatatttttacccgatgtcatttt

SEQ ID NO: 9550 - protein, 114 aa, Arabidopsis thaliana
MSTLGELACSYAVMILEDEGIAITADKIATLVKAAGVSIESYWPMLFAKMAEKRNVTDLIMNVGAGGGGGAPVAAAAPAAAEEKKKDEPAEESDGDLGLAKAGSARLSRRGDDQ

SEQ ID NO: 9551 - protein, 101 aa, Arabidopsis thaliana
MILEDEGIAITADKIATLVKAAGVSIESYWPMLFAKMAEKRNVTDLIMNVGAGGGGGAPVAAAAPAAAEEKKKDEPAEESDGDLGLAKAGSARLSRRGDDQ

SEQ ID NO: 9552 - protein, 70 aa, Arabidopsis thaliana
MLFAKMAEKRNVTDLIMNVGAGGGGGAPVAAAAPAAAEEKKKDEPAEESDGDLGLAKAGSARLSRRGDDQ

SEQ ID NO: 9553 - DNA, 2337 bp, Arabidopsis thaliana
caaattatcttctttctctttctctctgatcatttccaaattatttctaagctaagaaaatctttaaaaataacaaagcttctaaaataataatccgacctaccggattcaaaccattgatctgaagatcatctataaaccagtccttgatctataaactaaaataagggaagaaaaaaacaagagagagaaatagagaatgaagtcttttgcggctaaggtagaagagggagttaaaggaatagacggaaagccgtcggtaggtccggtgtaccggaatcttctgtcggaaaaaggttttcctccgattgattctgagatcaccactgcttgggacattttcagtaaatcagtggagaaattccctgacaataatatgcttggatggcgtcgaattgttgatgagaaggttggaccatatatgtggaaaacgtacaaggaagtatacgaagaagttttgcagattggctctgcactacgagccgccggagctgaacctgggagtcgagtggggatctacggtgttaattgtcctcagtggatcatagcaatggaggcttgtgcagctcacactctaatctgtgtacctctatatgatacattgggttcaggagcagtcgattacattgtagagcatgcggaaatcgactttgtgtttgtccaagacaccaaaattaaaggacttcttgagccagattgcaaatgtgctaaacggctaaaagctatagtttccttcactaacgtgagcgacgagcttagccacaaggcttcagaaattggagtcaaaacatactcctggatcgattttctccatatgggacgtgagaaaccggaagacacgaacccgcctaaggcgtttaacatatgcaccataatgtacaccagcggcacaagcggtgatcctaaaggtgtggttttgactcaccaagcggtcgcgacttttgttgttgggatggatctctatatggaccagtttgaagataagatgacacatgatgatgtgtatctctccttcttgccgttggctcatattcttgaccgtatgaatgaggaatacttctttcgcaaaggcgcttccgtcggctattaccatggaaatttgaacgtgttacgtgacgatattcaagaactgaaaccgacttatctagctggagtaccaagagtgtttgagagaatccatgaggggattcaaaaggctcttcaagaacttaatccaagaaggagattcatcttcaatgctctctacaaacacaagcttgcgtggttgaatcgtagatactctcatagtaaagcttcacccatggctgatttcattgctttcagaaagattagagacaaattgggaggtcgcatccggttgttagtatccggaggagcacctttgagccctgagattgaagagtttttgagagttacttgttgttgctttgtcgttcaaggctacggtctaacggagacgcttggaggaacggctttgggtttcccggacgagatgtgtatgctagggacagtcggtattccagcggtttacaacgagatacggcttgaggaggtgtctgaaatgggctatgacccgctcggagaaaatccggcaggagagatctgtataagaggacaatgtatgttttctgggtattacaagaaccctgaactcactgaagaagtcatgaaagatggatggttccacacaggagatataggtgagattcttccaaacggagtactcaagatcatcgatcgcaaaaagaatctgatcaaactttctcaaggagaatatgttgctctcgagcatttggaaaacatcttcgggcaaaactctgttgtccaagatatatgggtttatggagacagcttcaaatctatgcttgtcgcggtggttgttcccaacccagaaaccgtcaacaggtgggctaaagatctcggttttactaaaccattcgtagaactctgttctttcccggagcttaaagaacacatcatttcagaactgaagtccacggcagaaaagaacaagctaagaaagtttgagtacatcaaagcggtggcagtggagacaaaacctttcgacgtagagagagacttagtgactgcgacgctcaagaatcggaggaacaatcttctcaaatattatcaggtgcaaatcgacgaaatgtaccgcaaattggcctcaaagaaaatctgaaagtattgcgatgatgtgtgtgctgttattgatagttatatatgtacgttatatgtatcaataattcatagatatgagctttatgctttatgtaatattttatttttatgttgtatgacatttacatcataattatggattttttttttcttttg

SEQ ID NO: 9554 - protein, 660 aa, Arabidopsis thaliana
MKSFAAKVEEGVKGIDGKPSVGPVYRNLLSEKGFPPIDSEITTAWDIFSKSVEKFPDNNMLGWRRIVDEKVGPYMWKTYKEVYEEVLQIGSALRAAGAEPGSRVGIYGVNCPQWIIAMEACAAHTLICVPLYDTLGSGAVDYIVEHAEIDFVFVQDTKIKGLLEPDCKCAKRLKAIVSFTNVSDELSHKASEIGVKTYSWIDFLHMGREKPEDTNPPKAFNICTIMYTSGTSGDPKGVVLTHQAVATFVVGMDLYMDQFEDKMTHDDVYLSFLPLAHILDRMNEEYFFRKGASVGYYHGNLNVLRDDIQELKPTYLAGVPRVFERIHEGIQKALQELNPRRRFIFNALYKHKLAWLNRRYSHSKASPMADFIAFRKIRDKLGGRIRLLVSGGAPLSPEIEEFLRVTCCCFVVQGYGLTETLGGTALGFPDEMCMLGTVGIPAVYNEIRLEEVSEMGYDPLGENPAGEICIRGQCMFSGYYKNPELTEEVMKDGWFHTGDIGEILPNGVLKIIDRKKNLIKLSQGEYVALEHLENIFGQNSVVQDIWVYGDSFKSMLVAVVVPNPETVNRWAKDLGFTKPFVELCSFPELKEHIISELKSTAEKNKLRKFEYIKAVAVETKPFDVERDLVTATLKNRRNNLLKYYQVQIDEMYRKLASKKI

SEQ ID NO: 9555 - protein, 601 aa, Arabidopsis thaliana
MLGWRRIVDEKVGPYMWKTYKEVYEEVLQIGSALRAAGAEPGSRVGIYGVNCPQWIIAMEACAAHTLICVPLYDTLGSGAVDYIVEHAEIDFVFVQDTKIKGLLEPDCKCAKRLKAIVSFTNVSDELSHKASEIGVKTYSWIDFLHMGREKPEDTNPPKAFNICTIMYTSGTSGDPKGVVLTHQAVATFVVGMDLYMDQFEDKMTHDDVYLSFLPLAHILDRMNEEYFFRKGASVGYYHGNLNVLRDDIQELKPTYLAGVPRVFERIHEGIQKALQELNPRRRFIFNALYKHKLAWLNRRYSHSKASPMADFIAFRKIRDKLGGRIRLLVSGGAPLSPEIEEFLRVTCCCFVVQGYGLTETLGGTALGFPDEMCMLGTVGIPAVYNEIRLEEVSEMGYDPLGENPAGEICIRGQCMFSGYYKNPELTEEVMKDGWFHTGDIGEILPNGVLKIIDRKKNLIKLSQGEYVALEHLENIFGQNSVVQDIWVYGDSFKSMLVAVVVPNPETVNRWAKDLGFTKPFVELCSFPELKEHIISELKSTAEKNKLRKFEYIKAVAVETKPFDVERDLVTATLKNRRNNLLKYYQVQIDEMYRKLASKKI

SEQ ID NO: 9556 - protein, 586 aa, Arabidopsis thaliana
MWKTYKEVYEEVLQIGSALRAAGAEPGSRVGIYGVNCPQWIIAMEACAAHTLICVPLYDTLGSGAVDYIVEHAEIDFVFVQDTKIKGLLEPDCKCAKRLKAIVSFTNVSDELSHKASEIGVKTYSWIDFLHMGREKPEDTNPPKAFNICTIMYTSGTSGDPKGVVLTHQAVATFVVGMDLYMDQFEDKMTHDDVYLSFLPLAHILDRMNEEYFFRKGASVGYYHGNLNVLRDDIQELKPTYLAGVPRVFERIHEGIQKALQELNPRRRFIFNALYKHKLAWLNRRYSHSKASPMADFIAFRKIRDKLGGRIRLLVSGGAPLSPEIEEFLRVTCCCFVVQGYGLTETLGGTALGFPDEMCMLGTVGIPAVYNEIRLEEVSEMGYDPLGENPAGEICIRGQCMFSGYYKNPELTEEVMKDGWFHTGDIGEILPNGVLKIIDRKKNLIKLSQGEYVALEHLENIFGQNSVVQDIWVYGDSFKSMLVAVVVPNPETVNRWAKDLGFTKPFVELCSFPELKEHIISELKSTAEKNKLRKFEYIKAVAVETKPFDVERDLVTATLKNRRNNLLKYYQVQIDEMYRKLASKKI

SEQ ID NO: 9557 - DNA, 2539 bp, Arabidopsis thaliana
gacattacttttcaattgcttcaggttcataaatctatcttcttctttctttggttgttcagctttagcgtgttaggctgaacatttaagaaccatggatctcaatctcggaaaatgctgtggttctcgttcttctaagaaggaatcatggaggtcggttttgcttcttgcttaccagagtcttggtgttgtctatggagacttgagtatctctccgctttatgtctttaagagcacttttgctgaggacattcaacattcagagaccaatgaagagatctacggtgttatgtcttttgttttctggactttaactttggttcctttgcttaagtatgtcttcattgtcctccgagctgatgataacggagaaggtggaacttttgctttgtactcattgatctgccgtcatgtcaaagttagcctcctcccaaaccgacaagtctctgatgaggcactgtccacttataagctggagcatccaccggagaagaaccatgactcgtgtgtgaaaagatatctggagaaacacaagtggttacacactgctttgctgcttcttgttcttcttgggacttgtatggttattggagatggacttctcactccagctatctccgttttctctgctgtgtcaggtcttgagctgaatatgtctaaagaacatcaccaatatgcagtaattcctattacctgcttcatactagtctgccttttctcgcttcagcattttgggacacatcgtgttgggtttgttttcgcgcctattgtcctcacttggctgctctgtataagtggtattggcttgtacaatataatacagtggaatcctcatatatacaaagctctttctcctacatacatgttcatgttcttgagaaagacgagagtaagcggatggatgtctctaggcgggatcttgttgtgcataactggtgctgaggccatgtttgctgatcttggtcacttcaattacgcagcaattcagattgcgtttaccttcctggtttatccggctcttatattggcatacatggggcaagctgcttacttatcccggcatcaccattctgctcatgcaattgggttttacgtctctgtaccaaaatgtttgcactggcctgtgcttgctgtagcaattcttgcttctgttgtgggaagccaagcgatcatcagtgggactttctcaatcataaaccagagccagtctctcggatgcttccctcgagtcaaagtcattcacacgtccgataagatgcatggtcagatttacataccggagattaactggatgctcatgattctctgcatcgctgttactatcgggtttagagatgtcaaacacctgggaaatgcatcaggtttggctgtaatggcggttatgctagtgacaacatgtcttacctcattagtcattgttctttgctggcacaagcctccaattctagcgctagcgttccttctctttttcggttcaatagaacttctctacttctcggcctcactcaccaaatttcgtgaaggcgcttggcttccgatcctcttatctctaatattcatgatcatcatgttcgtttggcactacaccaccattaagaaatacgagtttgatctccagaataaagtctcgcttgaatggcttcttgcattgggtccaagcctcggaatttctcgagttccaggtatcggtttagtcttcacggatttaacctctggaatccccgccaatttctcccggttcgtcaccaacctccctgccttccaccgtgttcttgtctttgtctgcgtgaaatctgtccctgtcccgttcgttccacctgctgagagatacctcgtgggtcgtgttggtcccgttgaccaccgctcttacagatgcatcgttcggtatggataccgtgacgtccatcaagacgtggactcattcgaaacagagctcgtaagcaagctggcggatttcatccgttacgattggcacaaaagaacacaacaagaagacgacaacgctcgttctgtccagtccaacgaatcctcaagcgagtcaagactagccgtgatcggaacagtagcttacgagatcgaagacaatctccaaccagagagtgtctccatcggattctccacagtcgaaagcatggaagacgtcatacaaatggccgaaccagccccaaccgccaccataagacgggtgaggtttgcggttgaggaaaacagttacgaggacgaaggatcaacatcgtcagcagaagcagatgcggaactgagaagcgagctgagggatttgctggcagcgcaagaagcaggaactgcgtttatattgggacattcacatgtgaaagcgaaacaaggatcatcggtgatgaagagattagcagttaatttcggttataatttcttgagaaggaactgtagaggacctgacgtggctcttaaggttccacctgtttctcttttagaagtcggcatggtttatgttgtttgacttatgaaaaaactaaatatatgaaaacctaattcctctgttgtaaatcgtcagttagat

SEQ ID NO: 9558 - protein, 794 aa, Arabidopsis thaliana
MDLNLGKCCGSRSSKKESWRSVLLLAYQSLGVVYGDLSISPLYVFKSTFAEDIQHSETNEEIYGVMSFVFWTLTLVPLLKYVFIVLRADDNGEGGTFALYSLICRHVKVSLLPNRQVSDEALSTYKLEHPPEKNHDSCVKRYLEKHKWLHTALLLLVLLGTCMVIGDGLLTPAISVFSAVSGLELNMSKEHHQYAVIPITCFILVCLFSLQHFGTHRVGFVFAPIVLTWLLCISGIGLYNIIQWNPHIYKALSPTYMFMFLRKTRVSGWMSLGGILLCITGAEAMFADLGHFNYAAIQIAFTFLVYPALILAYMGQAAYLSRHHHSAHAIGFYVSVPKCLHWPVLAVAILASVVGSQAIISGTFSIINQSQSLGCFPRVKVIHTSDKMHGQIYIPEINWMLMILCIAVTIGFRDVKHLGNASGLAVMAVMLVTTCLTSLVIVLCWHKPPILALAFLLFFGSIELLYFSASLTKFREGAWLPILLSLIFMIIMFVWHYTTIKKYEFDLQNKVSLEWLLALGPSLGISRVPGIGLVFTDLTSGIPANFSRFVTNLPAFHRVLVFVCVKSVPVPFVPPAERYLVGRVGPVDHRSYRCIVRYGYRDVHQDVDSFETELVSKLADFIRYDWHKRTQQEDDNARSVQSNESSSESRLAVIGTVAYEIEDNLQPESVSIGFSTVESMEDVIQMAEPAPTATIRRVRFAVEENSYEDEGSTSSAEADAELRSELRDLLAAQEAGTAFILGHSHVKAKQGSSVMKRLAVNFGYNFLRRNCRGPDVALKVPPVSLLEVGMVYVV

SEQ ID NO: 9559 - protein, 729 aa, Arabidopsis thaliana
MSFVFWTLTLVPLLKYVFIVLRADDNGEGGTFALYSLICRHVKVSLLPNRQVSDEALSTYKLEHPPEKNHDSCVKRYLEKHKWLHTALLLLVLLGTCMVIGDGLLTPAISVFSAVSGLELNMSKEHHQYAVIPITCFILVCLFSLQHFGTHRVGFVFAPIVLTWLLCISGIGLYNIIQWNPHIYKALSPTYMFMFLRKTRVSGWMSLGGILLCITGAEAMFADLGHFNYAAIQIAFTFLVYPALILAYMGQAAYLSRHHHSAHAIGFYVSVPKCLHWPVLAVAILASVVGSQAIISGTFSIINQSQSLGCFPRVKVIHTSDKMHGQIYIPEINWMLMILCIAVTIGFRDVKHLGNASGLAVMAVMLVTTCLTSLVIVLCWHKPPILALAFLLFFGSIELLYFSASLTKFREGAWLPILLSLIFMIIMFVWHYTTIKKYEFDLQNKVSLEWLLALGPSLGISRVPGIGLVFTDLTSGIPANFSRFVTNLPAFHRVLVFVCVKSVPVPFVPPAERYLVGRVGPVDHRSYRCIVRYGYRDVHQDVDSFETELVSKLADFIRYDWHKRTQQEDDNARSVQSNESSSESRLAVIGTVAYEIEDNLQPESVSIGFSTVESMEDVIQMAEPAPTATIRRVRFAVEENSYEDEGSTSSAEADAELRSELRDLLAAQEAGTAFILGHSHVKAKQGSSVMKRLAVNFGYNFLRRNCRGPDVALKVPPVSLLEVGMVYVV

SEQ ID NO: 9560 - protein, 632 aa, Arabidopsis thaliana
MVIGDGLLTPAISVFSAVSGLELNMSKEHHQYAVIPITCFILVCLFSLQHFGTHRVGFVFAPIVLTWLLCISGIGLYNIIQWNPHIYKALSPTYMFMFLRKTRVSGWMSLGGILLCITGAEAMFADLGHFNYAAIQIAFTFLVYPALILAYMGQAAYLSRHHHSAHAIGFYVSVPKCLHWPVLAVAILASVVGSQAIISGTFSIINQSQSLGCFPRVKVIHTSDKMHGQIYIPEINWMLMILCIAVTIGFRDVKHLGNASGLAVMAVMLVTTCLTSLVIVLCWHKPPILALAFLLFFGSIELLYFSASLTKFREGAWLPILLSLIFMIIMFVWHYTTIKKYEFDLQNKVSLEWLLALGPSLGISRVPGIGLVFTDLTSGIPANFSRFVTNLPAFHRVLVFVCVKSVPVPFVPPAERYLVGRVGPVDHRSYRCIVRYGYRDVHQDVDSFETELVSKLADFIRYDWHKRTQQEDDNARSVQSNESSSESRLAVIGTVAYEIEDNLQPESVSIGFSTVESMEDVIQMAEPAPTATIRRVRFAVEENSYEDEGSTSSAEADAELRSELRDLLAAQEAGTAFILGHSHVKAKQGSSVMKRLAVNFGYNFLRRNCRGPDVALKVPPVSLLEVGMVYVV

SEQ ID NO: 9561 - DNA, 643 bp, Arabidopsis thaliana
tgattctcttatccatcaatcgttacttcgtttcttctctatcaccaggaaaaaagaagaagatagctcctgaagacaaaaatggcggtttctctcccgaactcgtttcttcagattagcccatgtgttccttctctgcaattaagaaagccggtgatggcggcagtgaaaggaggaaaacaatcggtgagaagaagcagcaatacggtggttcagataacgtgtcgtaagaaggaattgcatcctgaattccacgaagacgcaaaggtttactgcaatggagagctggtgatgactacaggaggaacaaagaaagagtatgtggttgatgtatggtcaggtaaccatccgttttacctcgggaatcgttcggctttgatggttgatgctgatcaagttgagaagtttcgtaagaggttcgctgggctttctgagattatggagattcctgtgcttaaaggagaaatcattatgcctactaagaaaagtaaaggtcccaaagggaagaagaaatgatgagtcttttctggtaaagcttatgtctttgaatttgttgtcttttcaattgaagtcgagatactgcttaggctgttaaaaattgtatgtgaattttcttctgaatgctattggttatgctttctct

SEQ ID NO: 9562 - protein, 144 aa, Arabidopsis thaliana
MAVSLPNSFLQISPCVPSLQLRKPVMAAVKGGKQSVRRSSNTVVQITCRKKELHPEFHEDAKVYCNGELVMTTGGTKKEYVVDVWSGNHPFYLGNRSALMVDADQVEKFRKRFAGLSEIMEIPVLKGEIIMPTKKSKGPKGKKK

SEQ ID NO: 9563 - protein, 119 aa, Arabidopsis thaliana
MAAVKGGKQSVRRSSNTVVQITCRKKELHPEFHEDAKVYCNGELVMTTGGTKKEYVVDVWSGNHPFYLGNRSALMVDADQVEKFRKRFAGLSEIMEIPVLKGEIIMPTKKSKGPKGKKK

SEQ ID NO: 9564 - protein, 74 aa, Arabidopsis thaliana
MTTGGTKKEYVVDVWSGNHPFYLGNRSALMVDADQVEKFRKRFAGLSEIMEIPVLKGEIIMPTKKSKGPKGKKK

SEQ ID NO: 9565 - DNA, 1280 bp, Arabidopsis thaliana
acatcctaatcaaaaaaatactactactcactttactataatctctcaaaatggccgtaagtttcgtaacaacatctcctgaggaagaagacaaaccgaagctaggccttggaaatattcaaactccgttaatcttcaacccttcaatgcttaaccttcaagccaatatcccaaaccaattcatctggcctgacgacgaaaaaccttccatcaacgttctcgagcttgatgttcctctcatcgaccttcaaaaccttctctctgatccatcctccactttagatgcttcgagactgatctctgaggcctgtaagaagcacggtttcttcctcgtggtcaatcacggcatcagcgaggagcttatatcagacgctcatgaatacacgagccgcttctttgatatgcctctctccgaaaaacagagggttcttagaaaatccggtgagagtgttggctacgcaagcagtttcaccggacgcttctccaccaagcttccatggaaggagaccctttctttccggttttgcgacgacatgagccgctcaaaatccgttcaagattacttctgcgatgcgttgggacatgggtttcagccatttgggaaggtgtatcaagagtattgtgaagcaatgagttctctatcactgaagatcatggagcttctcgggctaagtttaggcgtaaaacgggactactttagagagtttttcgaagaaaacgattcaataataagactgaattactaccctccatgtataaaaccagatctcacactaggaacaggacctcattgtgatccaacatctcttaccatccttcaccaagaccatgttaatggccttcaagtctttgtggaaaatcaatggcgctccattcgtcccaaccccaaggcctttgtggtcaatatcggcgatactttcatggctctatcgaacgatagatacaagagctgcttgcaccgggcggtggtgaacagcgagagcgagaggaagtcacttgcattcttcttgtgtccgaaaaaagacagagtagtgacgccaccgagagagcttttggacagcatcacatcaagaagataccctgacttcacatggtctatgttccttgagttcactcagaaacattatagagcagacatgaacactctccaagccttttcagattggctcaccaaacccatctaagaaataaaatattcatgtcttgtcttgttagttataactagtatcttctttatatttcatgtatgtatatggtaataggcaataacaccttttagc

SEQ ID NO: 9566 - protein, 377 aa, Arabidopsis thaliana
MAVSFVTTSPEEEDKPKLGLGNIQTPLIFNPSMLNLQANIPNQFIWPDDEKPSINVLELDVPLIDLQNLLSDPSSTLDASRLISEACKKHGFFLVVNHGISEELISDAHEYTSRFFDMPLSEKQRVLRKSGESVGYASSFTGRFSTKLPWKETLSFRFCDDMSRSKSVQDYFCDALGHGFQPFGKVYQEYCEAMSSLSLKIMELLGLSLGVKRDYFREFFEENDSIIRLNYYPPCIKPDLTLGTGPHCDPTSLTILHQDHVNGLQVFVENQWRSIRPNPKAFVVNIGDTFMALSNDRYKSCLHRAVVNSESERKSLAFFLCPKKDRVVTPPRELLDSITSRRYPDFTWSMFLEFTQKHYRADMNTLQAFSDWLTKPI

SEQ ID NO: 9567 - protein, 345 aa, Arabidopsis thaliana
MLNLQANIPNQFIWPDDEKPSINVLELDVPLIDLQNLLSDPSSTLDASRLISEACKKHGFFLVVNHGISEELISDAHEYTSRFFDMPLSEKQRVLRKSGESVGYASSFTGRFSTKLPWKETLSFRFCDDMSRSKSVQDYFCDALGHGFQPFGKVYQEYCEAMSSLSLKIMELLGLSLGVKRDYFREFFEENDSIIRLNYYPPCIKPDLTLGTGPHCDPTSLTILHQDHVNGLQVFVENQWRSIRPNPKAFVVNIGDTFMALSNDRYKSCLHRAVVNSESERKSLAFFLCPKKDRVVTPPRELLDSITSRRYPDFTWSMFLEFTQKHYRADMNTLQAFSDWLTKPI

SEQ ID NO: 9568 - protein, 260 aa, Arabidopsis thaliana
MPLSEKQRVLRKSGESVGYASSFTGRFSTKLPWKETLSFRFCDDMSRSKSVQDYFCDALGHGFQPFGKVYQEYCEAMSSLSLKIMELLGLSLGVKRDYFREFFEENDSIIRLNYYPPCIKPDLTLGTGPHCDPTSLTILHQDHVNGLQVFVENQWRSIRPNPKAFVVNIGDTFMALSNDRYKSCLHRAVVNSESERKSLAFFLCPKKDRVVTPPRELLDSITSRRYPDFTWSMFLEFTQKHYRADMNTLQAFSDWLTKPI

SEQ ID NO: 9569 - DNA, 799 bp, Arabidopsis thaliana
aacatcctaatcgaaaactcagtcacacaaagagtaaagaagaacaatggcttcctctatgctctcttccgctactatggttgcctctccggctcaggccactatggtcgctcctttcaacggacttaagtcctccgctgccttcccagccacccgcaaggctaacaacgacattacttccatcacaagcaacggcggaagagttaactgcatgcaggtgtggcctccgattggaaagaagaagtttgagactctctcttaccttcctgaccttaccgattccgaattggctaaggaagttgactaccttatccgcaacaagtggattccttgtgttgaattcgagttggagcacggatttgtgtaccgtgagcacggtaactcacccggatactatgatggacggtactggacaatgtggaagcttcccttgttcggttgcaccgactccgctcaagtgttgaaggaagtggaagagtgcaagaaggagtaccccaatgccttcattaggatcatcggattcgacaacacccgtcaagtccagtgcatcagtttcattgcctacaagccaccaagcttcaccggttaatttccctttgcttttgtgtaaacctcaaaactttatcccccatctttgattttatcccttgtttttctgcttttttcttctttcttgggttttaatttccggacttaacgtttgttttccggtttgcgagacatattctatcggattctcaactgtctgatgaaataaatatgtaatgttctataagtctttcaatttgatatgcatatc

SEQ ID NO: 9570 - protein, 180 aa, Arabidopsis thaliana
MASSMLSSATMVASPAQATMVAPFNGLKSSAAFPATRKANNDITSITSNGGRVNCMQVWPPIGKKKFETLSYLPDLTDSELAKEVDYLIRNKWIPCVEFELEHGFVYREHGNSPGYYDGRYWTMWKLPLFGCTDSAQVLKEVEECKKEYPNAFIRIIGFDNTRQVQCISFIAYKPPSFTG

SEQ ID NO: 9571 - protein, 176 aa, Arabidopsis thaliana
MLSSATMVASPAQATMVAPFNGLKSSAAFPATRKANNDITSITSNGGRVNCMQVWPPIGKKKFETLSYLPDLTDSELAKEVDYLIRNKWIPCVEFELEHGFVYREHGNSPGYYDGRYWTMWKLPLFGCTDSAQVLKEVEECKKEYPNAFIRIIGFDNTRQVQCISFIAYKPPSFTG

SEQ ID NO: 9572 - protein, 170 aa, Arabidopsis thaliana
MVASPAQATMVAPFNGLKSSAAFPATRKANNDITSITSNGGRVNCMQVWPPIGKKKFETLSYLPDLTDSELAKEVDYLIRNKWIPCVEFELEHGFVYREHGNSPGYYDGRYWTMWKLPLFGCTDSAQVLKEVEECKKEYPNAFIRIIGFDNTRQVQCISFIAYKPPSFTG

SEQ ID NO: 9573 - DNA, 1068 bp, Arabidopsis thaliana
agatttagaggtctacaactaaaagcctttgtgtgtgccagattagctccctactaatccgccgccgcacctcctcgatctccgcccagctcccttcttttctatctatctattcagttgtttctccggtaacaaccagctgaggaagaagaagaagtagtagccgtgatgatgatgatgacgtcacttggtggtggtgctggaggcggcggaggaggtggtggtagtggtggtgggagatttgtgacgtatccgccgcctctatctgtgcctccgtcggctcctcagtcacctaacttctctggtggtctccgatcacagccttctttcctcgttgagcaagagaagtatctttctgagttacttgcagagcgtcacaagcttactccatttttgcctgtgcttccacatgtttgccggctcatgaaccaagagatcggtttcatcatccccagcaccaaattggcttaactctcctggtagctcgtccggtctcatcgtcaagcgaacaataagggtggatattccagtcgacaaatacccaaactacaattttgtcggtcgtctcttgggtcctagaggaaactccctcaaacgagttgaagcgagtactgattgtcgtgttctaataaggggtagaggcagcattaaagatccgattaaggaggatatgatgagaggtaaacctggttatgagcacctcaatgaaccactccacatcttagtcgaggcagaattacccattgaaatagtggacgcacgtctcatgcaagcccgtgaaatactcgacgatctacttactcccgtggaggaaacccatgatttctacaagaaacaacagctacgggaattggcccttctcaacggcagtcttcgagaagaaggatctccaatgtctggttccatctcaccttacaatagcctcggcatgaagagagctaagacaaggggctaaaaacacgtctaaatttcatatttttgcttgcctctctcacctttccaagaaggtatatatccaccgtaacagcttccttcaaacaagaaggatttggagattctgtctccatc

SEQ ID NO: 9574 - protein, 100 aa, Arabidopsis thaliana
MMMMTSLGGGAGGGGGGGGSGGGRFVTYPPPLSVPPSAPQSPNFSGGLRSQPSFLVEQEKYLSELLAERHKLTPFLPVLPHVCRLMNQEIGFIIPSTKLA

SEQ ID NO: 9575 - protein, 99 aa, Arabidopsis thaliana
MMMTSLGGGAGGGGGGGGSGGGRFVTYPPPLSVPPSAPQSPNFSGGLRSQPSFLVEQEKYLSELLAERHKLTPFLPVLPHVCRLMNQEIGFIIPSTKLA

SEQ ID NO: 9576 - protein, 98 aa, Arabidopsis thaliana
MMTSLGGGAGGGGGGGGSGGGRFVTYPPPLSVPPSAPQSPNFSGGLRSQPSFLVEQEKYLSELLAERHKLTPFLPVLPHVCRLMNQEIGFIIPSTKLA

SEQ ID NO: 9577 - DNA, 1173 bp, Arabidopsis thaliana
aaaaagaaagatttgaagaaaaacaacaaatccttgagatccatgtcgagagagaggatcaaacgtgaattacctcctgttcaagagcatattgataaattgcggaaagtgatagaggaaggcaattactatggagctttgcagatgtataaatctatcagtgcaagatatgtcaccgctcaaagattctctgaagctcttgatatcctcttttcaggggcttgcattgaactagaacacggcctggtgaattgtggggcggacctagctattttgtttgttgacacactagttaaagccaaatctccttgcaacgatgaaactcttgatcgtatcaggtgtattttcaaattgtttcctcgggttcctgtaccacctcatttggtagatgtgagtgacgatgaagatgttcaaaatcttcaagaatctcttggggaagccagatcacgagtagaaaacttgacttcgttcttgagagctgctatcaaatggtctgcagaatttggaggcccacgtactggctatcctgagttgcatgctatgctgggtgattatctctacactgagtgtcctgaacttgatatggtccggatatcccgacattttgttagagctgaggaccccgagaaatttgcatctatgctggtcaactttatgggaaggtgttatcccggagaagatgacctcgcaattgcacgagcagttctcatgtatttatccatgggtaacatgaaagatgcaaactttatgatggatgagattaagaaacaagcagagacaaaaaatcctgagctttcagaatcggaccttatccaatttatctcatatcttctggaaacgttgcagagggatgcattacctcttttcaatatgttaagagtaaaatataagtcaagcatagatagagatcagctgcttaacgagttgctggacgagattgcagagaggttttatggtgtgcagcgtaagaatcctttgcaaggaatgtttggagacatcttcaagatgatgggctgaggaaggagtttgaagagtgagttctttttttggttttcctttctgatttgtatttggcaacgtactaataatggatagctctggggaattctccagatcataagttatttctcttttcctcaagtgggtgaaacagttttgttctttgtaacattt

SEQ ID NO: 9578 - protein, 338 aa, Arabidopsis thaliana
KKKDLKKNNKSLRSMSRERIKRELPPVQEHIDKLRKVIEEGNYYGALQMYKSISARYVTAQRFSEALDILFSGACIELEHGLVNCGADLAILFVDTLVKAKSPCNDETLDRIRCIFKLFPRVPVPPHLVDVSDDEDVQNLQESLGEARSRVENLTSFLRAAIKWSAEFGGPRTGYPELHAMLGDYLYTECPELDMVRISRHFVRAEDPEKFASMLVNFMGRCYPGEDDLAIARAVLMYLSMGNMKDANFMMDEIKKQAETKNPELSESDLIQFISYLLETLQRDALPLFNMLRVKYKSSIDRDQLLNELLDEIAERFYGVQRKNPLQGMFGDIFKMMG

SEQ ID NO: 9579 - protein, 324 aa, Arabidopsis thaliana
MSRERIKRELPPVQEHIDKLRKVIEEGNYYGALQMYKSISARYVTAQRFSEALDILFSGACIELEHGLVNCGADLAILFVDTLVKAKSPCNDETLDRIRCIFKLFPRVPVPPHLVDVSDDEDVQNLQESLGEARSRVENLTSFLRAAIKWSAEFGGPRTGYPELHAMLGDYLYTECPELDMVRISRHFVRAEDPEKFASMLVNFMGRCYPGEDDLAIARAVLMYLSMGNMKDANFMMDEIKKQAETKNPELSESDLIQFISYLLETLQRDALPLFNMLRVKYKSSIDRDQLLNELLDEIAERFYGVQRKNPLQGMFGDIFKMMG

SEQ ID NO: 9580 - protein, 290 aa, Arabidopsis thaliana
MYKSISARYVTAQRFSEALDILFSGACIELEHGLVNCGADLAILFVDTLVKAKSPCNDETLDRIRCIFKLFPRVPVPPHLVDVSDDEDVQNLQESLGEARSRVENLTSFLRAAIKWSAEFGGPRTGYPELHAMLGDYLYTECPELDMVRISRHFVRAEDPEKFASMLVNFMGRCYPGEDDLAIARAVLMYLSMGNMKDANFMMDEIKKQAETKNPELSESDLIQFISYLLETLQRDALPLFNMLRVKYKSSIDRDQLLNELLDEIAERFYGVQRKNPLQGMFGDIFKMMG

SEQ ID NO: 9581 - DNA, 765 bp, Arabidopsis thaliana
aaagaaaaatagctgagcacaaggggaggatcatcgtcaaagccaacgagaagaatactctgaaatatcttgaagctgcgacaggaaaaatggacgcggcgatagggaaggttttcgattccgtctcagacttcttctccggcgctgcttctgcttccgccgatgagtttcccttgtgcgattccgacatcatctccggatgtgagaaagaacttgcagaggctcaagacgaaggacgtaagaaggaatgcattatgcgtctttcatgggctcttgttcattcaaagatgccttcggatattcagcgtgggattgcaatgcttgaagctttggtggttaatgatacaagtgcaatgaaacttagggagaagctatatctccttgctcttggttactatcgaagcggtgacttttcaagaagccgggattgtatagaacggtgtttggaggttgaaccggagtccggacaggctcaggcactcaaaaaggctatagaggaccgtattgtgaaagatggtgtgattggcgttggaattgctgttactgctgtaggggttgttgctggtattgctgcagccatattacgcagctaaggaggaaagaacccatacatgtacatgtttcccttattttcagtgagtctgtttagtttctttgtgtccttcaaagaatgtctttattaaggaaaattatgtaattcctgttttactatgaaaagctaaacaacagaactgattgaggaagcatcaaacagaaaactttatt

SEQ ID NO: 9582 - protein, 196 aa, Arabidopsis thaliana
RKIAEHKGRIIVKANEKNTLKYLEAATGKMDAAIGKVFDSVSDFFSGAASASADEFPLCDSDIISGCEKELAEAQDEGRKKECIMRLSWALVHSKMPSDIQRGIAMLEALVVNDTSAMKLREKLYLLALGYYRSGDFSRSRDCIERCLEVEPESGQAQALKKAIEDRIVKDGVIGVGIAVTAVGVVAGIAAAILRS

SEQ ID NO: 9583 - protein, 167 aa, Arabidopsis thaliana
MDAAIGKVFDSVSDFFSGAASASADEFPLCDSDIISGCEKELAEAQDEGRKKECIMRLSWALVHSKMPSDIQRGIAMLEALVVNDTSAMKLREKLYLLALGYYRSGDFSRSRDCIERCLEVEPESGQAQALKKAIEDRIVKDGVIGVGIAVTAVGVVAGIAAAILRS

SEQ ID NO: 9584 - protein, 112 aa, Arabidopsis thaliana
MRLSWALVHSKMPSDIQRGIAMLEALVVNDTSAMKLREKLYLLALGYYRSGDFSRSRDCIERCLEVEPESGQAQALKKAIEDRIVKDGVIGVGIAVTAVGVVAGIAAAILRS

SEQ ID NO: 9585 - DNA, 1324 bp, Arabidopsis thaliana
cattattcacttaagtatatagtagcttccataagagtcttagttctaactataaatacacatatctcactctctctgatctccgcttctcttcgccaacaaatgtcgaccgctcctctctccggcttctttctcacttcactttctccttctcaatcttctctccagaaactctctcttcgtacttcttccaccgtcgcttgcctcccacccgcctcttcttcttcctcatcttcctcctcctcgtcttcccgttccgttccaacgcttatccgtaacgagccagtttttgccgctcctgctcctatcattgccccttattggagtgaagagatgggaaccgaagcatacgacgaggctattgaagctctcaagaagcttctcatcgagaaggaagagctaaagacggttgcagcggcaaaggtggagcagatcacagcggctcttcagacaggtacttcatccgacaagaaagctttcgaccccgtcgaaaccattaagcagggcttcatcaaattcaagaaggagaaatacgaaaccaaccctgctttgtacggtgagctcgcaaagggtcaaagtcctaagtacatggtgtttgcttgttcagactcacgtgtgtgtccatcacacgttctggactttcagccaggagatgccttcgtggtccgtaacatagccaacatggttcctcctttcgacaaggtcaaatacggtggcgttggagcagccattgaatacgcggtcttgcaccttaaggtggagaacattgtggtgataggacacagtgcatgtggtgggatcaaagggcttatgtctttccccttagatggaaacaactccactgactttatagaggactgggtcaaaatctgtttaccagccaagtcaaaggttatatcagaacttggagattcagcctttgaagatcaatgtggccgatgtgaaagggaggcagtgaatgtttcactagcaaacctattgacatatccatttgtgagagaaggacttgtgaagggaacacttgctttgaagggaggctactatgacttcgtcaagggtgcttttgagctttggggacttgaatttggcctctccgaaactagctctgtatgaaccaatccatcatcatcatcatcatcatgaccatccatcatcatcatcattattatcatcgtatataatatatatctaccccatatgtaatttgtaatgtgcctttgactgtgatgagttatctctccctctctaccaactttcttcatatatataaaacaaaaaggaaaagcagatgatatagaccaaaaaaaaaaaaaaaaaatatcga

SEQ ID NO: 9586 - protein, 370 aa, Arabidopsis thaliana
HYSLKYIVASIRVLVLTINTHISLSLISASLRQQMSTAPLSGFFLTSLSPSQSSLQKLSLRTSSTVACLPPASSSSSSSSSSSSRSVPTLIRNEPVFAAPAPIIAPYWSEEMGTEAYDEAIEALKKLLIEKEELKTVAAAKVEQITAALQTGTSSDKKAFDPVETIKQGFIKFKKEKYETNPALYGELAKGQSPKYMVFACSDSRVCPSHVLDFQPGDAFVVRNIANMVPPFDKVKYGGVGAAIEYAVLHLKVENIVVIGHSACGGIKGLMSFPLDGNNSTDFIEDWVKICLPAKSKVISELGDSAFEDQCGRCEREAVNVSLANLLTYPFVREGLVKGTLALKGGYYDFVKGAFELWGLEFGLSETSSV

SEQ ID NO: 9587 - protein, 336 aa, Arabidopsis thaliana
MSTAPLSGFFLTSLSPSQSSLQKLSLRTSSTVACLPPASSSSSSSSSSSSRSVPTLIRNEPVFAAPAPIIAPYWSEEMGTEAYDEAIEALKKLLIEKEELKTVAAAKVEQITAALQTGTSSDKKAFDPVETIKQGFIKFKKEKYETNPALYGELAKGQSPKYMVFACSDSRVCPSHVLDFQPGDAFVVRNIANMVPPFDKVKYGGVGAAIEYAVLHLKVENIVVIGHSACGGIKGLMSFPLDGNNSTDFIEDWVKICLPAKSKVISELGDSAFEDQCGRCEREAVNVSLANLLTYPFVREGLVKGTLALKGGYYDFVKGAFELWGLEFGLSETSSV

SEQ ID NO: 9588 - protein, 259 aa, Arabidopsis thaliana
MGTEAYDEAIEALKKLLIEKEELKTVAAAKVEQITAALQTGTSSDKKAFDPVETIKQGFIKFKKEKYETNPALYGELAKGQSPKYMVFACSDSRVCPSHVLDFQPGDAFVVRNIANMVPPFDKVKYGGVGAAIEYAVLHLKVENIVVIGHSACGGIKGLMSFPLDGNNSTDFIEDWVKICLPAKSKVISELGDSAFEDQCGRCEREAVNVSLANLLTYPFVREGLVKGTLALKGGYYDFVKGAFELWGLEFGLSETSSV

SEQ ID NO: 9589 - DNA, 1066 bp, Arabidopsis thaliana
gatttttcgatttgagcacgacgattcactaatttcgttcttgtttccattttgaaaatttgatgaagaagaaatggacaatcacaatgaagaaccaaacatcgcaccagaacctaatcgttggtacaacattacgttaggaccatctctactcaacaacaatcactcatactctcccaaattctgcactttacgatatgagtttaaacctgcttcaattgacagtactaaaccaggattgttacataagagtaaagacaataaggttacgttagagtttcaaaacaatcaacttaataaacccaaagttagatttgatggtgttagtgaggattacaatgacagagataaagatgcagttctcttctttgatggcgaaaatttccgattggagaagcttcaccgctctgttaagcgtttgaaatatttacgtgttcctgatgaatctgcttcagctagtagagtagtatcaaaggttgttcctccagttgcaaacacagttaaaccggttaagatggcacaaattgatattaacaatcctgttgactttgaggaggatgtgaacattgatgatgatggtgaagatgacaatgatggacaagaatcagtaaaagaagaaactttattgagaaaggaatttcaaacgggtggtcttgacattgacattaaccttccgcatcctgctgaaatggaagatgatgagattgcagttgtagacattaatgatgacgaatcttacagaggtcttaacgcggcagaagcactcagagcgcaagtaaatgcagaagcgagagaggagtctcgaaagagttcgagttcaggcagcggaagagaaagtgagagcagtgaaagtggagttgagagtagtggtagcggaagtagtagtagcagtgaaagcagaaacagaggtagtgaaggtggaaccgctagcgagagcggaagccgagatagtctctaggtcagcagctatgtatgtattttctagtttttgtcctgttaatgttaagtcttcttgtgaacaacatagtgaaaaatacagagatatagtaaaaatgttaactacctc

SEQ ID NO: 9590 - protein, 294 aa, Arabidopsis thaliana
MDNHNEEPNIAPEPNRWYNITLGPSLLNNNHSYSPKFCTLRYEFKPASIDSTKPGLLHKSKDNKVTLEFQNNQLNKPKVRFDGVSEDYNDRDKDAVLFFDGENFRLEKLHRSVKRLKYLRVPDESASASRVVSKVVPPVANTVKPVKMAQIDINNPVDFEEDVNIDDDGEDDNDGQESVKEETLLRKEFQTGGLDIDINLPHPAEMEDDEIAVVDINDDESYRGLNAAEALRAQVNAEAREESRKSSSSGSGRESESSESGVESSGSGSSSSSESRNRGSEGGTASESGSRDSL

SEQ ID NO: 9591 - protein, 147 aa, Arabidopsis thaliana
MAQIDINNPVDFEEDVNIDDDGEDDNDGQESVKEETLLRKEFQTGGLDIDINLPHPAEMEDDEIAVVDINDDESYRGLNAAEALRAQVNAEAREESRKSSSSGSGRESESSESGVESSGSGSSSSSESRNRGSEGGTASESGSRDSL

SEQ ID NO: 9592 - DNA, 1192 bp, Arabidopsis thaliana
attttatctgattctgggtctgttgaaaatcaaaattttcttgagaactttttttgaagagttatgattgcattagctgcttcttcgttggggaatacaccgattgcttcgtttaaccgtcattttagattccggttacatccacgaaaccctctgatacaagcagcggtttcaccttcgtcttcttcttcttctcctactgcttcatctggctttgatttgagttctctcgaatccgccattaacaagaaagatagtaatggtgttaaggaagctctcgataaattgagtgaagaaggttgggctaagaaatggagctcccagccgtatctttcgcgccgtacgacatcactgcgggagctgacaactctcggtatcaagaatgcagagactctggccattcctagtgtcaggaacgatgcggcttttcttttcacagtagtcggatcaactgggttcatagctgtacttgccggccaacttcccggggactggggattctttgtgccttacttagttgggagcatttcgttggtagttttagccgtgggaagcgtttcaccagggcttcttcaagctgcgatttccgggttttcgacgttcttccctgattatcaagaacgaattgctgcacatgaagcagcccacttcttagtggcttacttaatcgggcttccaatcctcgggtactcgttagacatcggtaaagaacatgtcaatctcattgacgagagactagctaaactaatatacagcggcaagcttgactcaaaggagctcgataggttggctgctgttgcaatggctggacttgccgccgagggtctgaagtatgacaaagtaattggccaatctgcagatctcttctctcttcagagattcataaacagaagccaacccaaaatcagcaacgagcagcagcaaaatctaacaagatgggctgttctttactctgcttctcttctcaaaaacaacaagaccatccatgaagctctaatggctgcaatgtccaaaaatgcatctgttcttgaatgcattcaaaccattgagacagcttcctagatgaacaatctctgttatctctttaatcgatacaactacgtcccataacaacactcaattgtttcacatgaacttccatatcttttatatatataaagacacaaaagttacagactttcattatcatctc

SEQ ID NO: 9593 - protein, 332 aa, Arabidopsis thaliana
MIALAASSLGNTPIASFNRHFRFRLHPRNPLIQAAVSPSSSSSSPTASSGFDLSSLESAINKKDSNGVKEALDKLSEEGWAKKWSSQPYLSRRTTSLRELTTLGIKNAETLAIPSVRNDAAFLFTVVGSTGFIAVLAGQLPGDWGFFVPYLVGSISLVVLAVGSVSPGLLQAAISGFSTFFPDYQERIAAHEAAHFLVAYLIGLPILGYSLDIGKEHVNLIDERLAKLIYSGKLDSKELDRLAAVAMAGLAAEGLKYDKVIGQSADLFSLQRFINRSQPKISNEQQQNLTRWAVLYSASLLKNNKTIHEALMAAMSKNASVLECIQTIETAS

SEQ ID NO: 9594 - DNA, 882 bp, Arabidopsis thaliana
aagaaacttaatcacaactctctctttaatctctttgtctctctctctctctctctatctctctctcattttaatggcgacccaagattctcaagggattaaactctttggtaaaaccataacattcaacgccaacatcacacagacgataaaaaaagaagagcagcaacaacaacaacagccagagctacaagcaacaacagccgttagatcaccctcatcggatctgacggctgagaagcgtccagacaagatcataccatgtccgagatgcaagagcatggagactaagttttgttacttcaacaactacaacgttaatcaaccaagacacttctgcaaaggttgtcaacgttactggaccgccggtggagctctccggaatgttcccgtcggtgccggtcgtcggaagtcaaaacctcccggacgtgtcggtgggttcgctgagttgcttggagctgcgactggagctgttgatcaggtcgagctagatgctttgctagtggaagagtggagagctgctacggcgtctcacggtggtttccggcatgattttccggtgaagaggctccgttgttacaccgatggtcaatcttgttaattatttttacatttttatttgtttgttttcgggtttgggtttgggtggtttgctataatttaacccgtagaacgaaagaacgtggttaaatttgctttgctttgattactctggatacgtacaggctagcaacaaaatttaactagttaattactaattaattagtaggtttttaatacttgcttatctactaaacagctgtcgctttttaatctctcttgttgtaaattgaagctcgtggccgtgggatttttcttctctaaacaaagacggtgtggttg

SEQ ID NO: 9595 - protein, 199 aa, Arabidopsis thaliana
RNLITTLSLISLSLSLSLYLSLILMATQDSQGIKLFGKTITFNANITQTIKKEEQQQQQQPELQATTAVRSPSSDLTAEKRPDKIIPCPRCKSMETKFCYFNNYNVNQPRHFCKGCQRYWTAGGALRNVPVGAGRRKSKPPGRVGGFAELLGAATGAVDQVELDALLVEEWRAATASHGGFRHDFPVKRLRCYTDGQSC

SEQ ID NO: 9596 - protein, 175 aa, Arabidopsis thaliana
MATQDSQGIKLFGKTITFNANITQTIKKEEQQQQQQPELQATTAVRSPSSDLTAEKRPDKIIPCPRCKSMETKFCYFNNYNVNQPRHFCKGCQRYWTAGGALRNVPVGAGRRKSKPPGRVGGFAELLGAATGAVDQVELDALLVEEWRAATASHGGFRHDFPVKRLRCYTDGQSC

SEQ ID NO: 9597 - protein, 106 aa, Arabidopsis thaliana
METKFCYFNNYNVNQPRHFCKGCQRYWTAGGALRNVPVGAGRRKSKPPGRVGGFAELLGAATGAVDQVELDALLVEEWRAATASHGGFRHDFPVKRLRCYTDGQSC

SEQ ID NO: 9598 - DNA, 1537 bp, Arabidopsis thaliana
aaattttttctcgtgcttccatcacgagatatctcacaaggctctcgcgactcaagaaaggtaaagataaagaaagaagaagcaaagattccataaatggacttgaaaagcaacaaccaccagcaacagcaacaagtacttgatggctcggacatagttgagctggtggaaaacgagaaagtgttcgacaagtttgtggaacaaaagtttcaacagttagaccaagatgaagatggtaagctctccgtgactgagttacaacccgccgttgctgatatcggcgctgctcttggtttgcctgctcaaggaacttctcctgattccgatcacatctactccgaggtcctaaacgaattcactcatgggagtcaagagaaagtgagcaagacagagttcaaagaagtgttgtcggacattttgttgggtatggctgctggtctgaaacgtgatcctatcgtcatcctcaggatggacggtgaggatctctcggagtttgtccacggccctggatatgaaatcgagagcatttctgttttctcagagctctccagtagcaaggacgcatcgctccgtgattgtatcgtcaaagctctccagtctctttctgttgatcatggaatgcctccttccaacgacccatgggtgatgagcaacatcgtagaaccaattgttgactcttgtcttgatgaagaagataaaagagagaaaagcgcgtctcaggagagattcttggaagcattcaagagagtcgtggagagtgtggctcagcgtctcaatgaacagcccgtgatcgttgctcacagcgaaaacacctttgatgggagcggtatcaggaggctcttgtccaataaattcgaattcgataaggcactaaacgttgccatggagacgattccaaaagaccgtcagggtaaggtgtctaaaggatatctacgagctgtgcttgacgctgttgcaccatcggccactttaccaccaataggcgctgtgtcccagatggataatatgataatggaagcgttgaagatggtgaatggagatgatggaaatgtggtgaaggaagaagagtttaagaaaacaatggcagagatattggggagtataatgttgcagctcgagggtagtccaatatcggtttcctctaactcggtggttcacgagccgctcacctcggctacctttctgccgtcaacttcgactgatacagaggagccttcaaactaatcatagaagggaataagcagcactagcagcaacaaatgttatatggttttgagtgtttacccccaaaagttttagattaatgaggaaaaccgtctttactttcagatgtataaaattgaaagtttggggtttcctcttgttggtgtggtgattctactcatgccttttttttttttttttctaatgaccatgggatgcaatgtttactctgttttttaatttcgttaaaatttgtttacgtttatgatgcttgaatggctatgatgaaacatttgagttatctttaaaagtgtgaaataaatattctgaagtt

SEQ ID NO: 9599 - protein, 375 aa, Arabidopsis thaliana
MDLKSNNHQQQQQVLDGSDIVELVENEKVFDKFVEQKFQQLDQDEDGKLSVTELQPAVADIGAALGLPAQGTSPDSDHIYSEVLNEFTHGSQEKVSKTEFKEVLSDILLGMAAGLKRDPIVILRMDGEDLSEFVHGPGYEIESISVFSELSSSKDASLRDCIVKALQSLSVDHGMPPSNDPWVMSNIVEPIVDSCLDEEDKREKSASQERFLEAFKRVVESVAQRLNEQPVIVAHSENTFDGSGIRRLLSNKFEFDKALNVAMETIPKDRQGKVSKGYLRAVLDAVAPSATLPPIGAVSQMDNMIMEALKMVNGDDGNVVKEEEFKKTMAEILGSIMLQLEGSPISVSSNSVVHEPLTSATFLPSTSTDTEEPSN

SEQ ID NO: 9600 - protein, 265 aa, Arabidopsis thaliana
MAAGLKRDPIVILRMDGEDLSEFVHGPGYEIESISVFSELSSSKDASLRDCIVKALQSLSVDHGMPPSNDPWVMSNIVEPIVDSCLDEEDKREKSASQERFLEAFKRVVESVAQRLNEQPVIVAHSENTFDGSGIRRLLSNKFEFDKALNVAMETIPKDRQGKVSKGYLRAVLDAVAPSATLPPIGAVSQMDNMIMEALKMVNGDDGNVVKEEEFKKTMAEILGSIMLQLEGSPISVSSNSVVHEPLTSATFLPSTSTDTEEPSN

SEQ ID NO: 9601 - protein, 251 aa, Arabidopsis thaliana
MDGEDLSEFVHGPGYEIESISVFSELSSSKDASLRDCIVKALQSLSVDHGMPPSNDPWVMSNIVEPIVDSCLDEEDKREKSASQERFLEAFKRVVESVAQRLNEQPVIVAHSENTFDGSGIRRLLSNKFEFDKALNVAMETIPKDRQGKVSKGYLRAVLDAVAPSATLPPIGAVSQMDNMIMEALKMVNGDDGNVVKEEEFKKTMAEILGSIMLQLEGSPISVSSNSVVHEPLTSATFLPSTSTDTEEPSN

SEQ ID NO: 9602 - DNA, 928 bp, Arabidopsis thaliana
tggttttctgttctgtcctaatttctctctggcgaaagctaagaggtttcggttacggtctccatctccgatcaaatcacgaagtttctatcggaaattttcagtgatacataccgtcagagattttctttacgagagaattgtcgccgacatactaaagcagagttttgggtgggaattagtaagatttcgactttagaattgggagatctttccattatgggttctgagcaaaacgacagcacaagcttctctccttcagagccaaagctctgcgtcaaaggatgtggcttcttcggatctccatcgaacatgaacctctgctctaaatgctacagagacatccgagccacggaggaacaaaccgcttccgctaaagccgccgtcgagaaatctctaaaccctaataaacccaaaactcaaccacaacagagccaagaaatcactcaaggcgtcctcggatctggatcgtcttcctcatcaacgagagggggtgattcggctgctgctccgttggatccaccgaaatcgacggctacgagatgcttgagctgtaacaagaaagttggcgtgacgggtttcaagtgtaggtgtggaagcactttctgtggaactcatagatatccagagagtcacgagtgccaattcgatttcaaaggagttgcgagagaagctattgctaaagctaatcctgtggtgaaggctgataaggttgataggatatgaattggtgaagaaactgttgtgttctcttttgtttttttattttcaagtctcgtgatgttggtggtttggctctctgttttctgctcttattatggttttatttgcttttagggtttcttaggaaaggccttagattctgctattatgtggtttcatgttttgcaacattggatttgttgttctgtaataaagtgttggttat

SEQ ID NO: 9603 - protein, 168 aa, Arabidopsis thaliana
MGSEQNDSTSFSPSEPKLCVKGCGFFGSPSNMNLCSKCYRDIRATEEQTASAKAAVEKSLNPNKPKTQPQQSQEITQGVLGSGSSSSSTRGGDSAAAPLDPPKSTATRCLSCNKKVGVTGFKCRCGSTFCGTHRYPESHECQFDFKGVAREAIAKANPVVKADKVDRI

SEQ ID NO: 9604 - protein, 137 aa, Arabidopsis thaliana
MNLCSKCYRDIRATEEQTASAKAAVEKSLNPNKPKTQPQQSQEITQGVLGSGSSSSSTRGGDSAAAPLDPPKSTATRCLSCNKKVGVTGFKCRCGSTFCGTHRYPESHECQFDFKGVAREAIAKANPVVKADKVDRI

SEQ ID NO: 9605 - DNA, 946 bp, Arabidopsis thaliana
ctcggtttcactattgaacgtgtaacactggtcgaaagaagacgaacataaactcgtctccatgactacttcatcttcttcgtacggaacattctctacagtcttcaacagttctagacctaattcctcagcaacctttctcgtcccttccttgaaattctccaccggaatatcgaatttcgcgaatctgagtaatgggttttctctaaaatctccaattaatcctgggtttctcttcaagtctcgtcctttcactgtccaagctagagctgctgcagaaaaaaccgttcacgatttcaccgttaaggacattgatgggaaggatgttgctttgaacaaattcaaggggaaagttatgttgattgtcaatgttgcttcaagatgtggtttgacatcatcaaattactcagagctttcacatctgtacgagaaatacaaaactcaaggatttgagattctagcttttccctgcaatcagtttggtttccaagagcccgggtcaaactccgagatcaaacaattcgcttgcacccggtttaaagcagagttccctatatttgataaggttgacgtgaatggaccaagcacaagcgccgatctacgagttcttgaaatcaaacgcaggaggattcttgggtggtctcattaaatggaactttgagaagttcttgattgataaaaagggaaaggtcgttgagaggtaccctcccaccacatcccctttccaaatcgagaaagacatccagaagttgcttgccgcttaaaaacttttgctcatgagtgagcatatagagactgatggttaaagtaaccgtaaattgtgacataaagtttccggttattgcttgtataccttcttacattctaagttgtactaatcgcttaataatttgcgtataatggtaatgttatatacattatattataaaaatggtgttatatatgc

SEQ ID NO: 9606 - protein, 195 aa, Arabidopsis thaliana
MTTSSSSYGTFSTVFNSSRPNSSATFLVPSLKFSTGISNFANLSNGFSLKSPINPGFLFKSRPFTVQARAAAEKTVHDFTVKDIDGKDVALNKFKGKVMLIVNVASRCGLTSSNYSELSHLYEKYKTQGFEILAFPCNQFGFQEPGSNSEIKQFACTRFKAEFPIFDKVDVNGPSTSADLRVLEIKRRRILGWSH

SEQ ID NO: 9607 - protein, 97 aa, Arabidopsis thaliana
MLIVNVASRCGLTSSNYSELSHLYEKYKTQGFEILAFPCNQFGFQEPGSNSEIKQFACTRFKAEFPIFDKVDVNGPSTSADLRVLEIKRRRILGWSH

SEQ ID NO: 9608 - DNA, 149 bp, Arabidopsis thaliana
atttttcatctgctttctctttcaacttctccataaaccctttcttctctaccttccttgattctgatcatagcttcttcttcttaacccaaaaatatatattttatacacataaggtaaagttcgatgaagtggtttttttaattttt

SEQ ID NO: 9609 - protein, 49 aa, Arabidopsis thaliana
FSSAFSFNFSINPFFSTFLDSDHSFFFLTQKYIFYTHKVKFDEVVFLIF

SEQ ID NO: 9610 - DNA, 699 bp, Arabidopsis thaliana
tcggagcaacagtcatcaaagagccaatggcttcttcaggtttcagcggcgatgaaactgcgcctttcttcggattcctcggcgccgccgctgcgctcgttttctcctgtatgggagcagcgtacgggacggcgaagagtggagttggagttgcgtcgatgggagtgatgagacctgaacttgttatgaaatcgattgttcctgttgtcatggctggtgtgttaggtatttatggtttgatcatcgctgttatcatcagtactgggattaaccccaaggccaagtcttattacctattcgatggctatgctcatctctcttctgggctagcttgtggtcttgctggtctctctgctggtatggctattggaatcgtcggtgatgctggtgttagagcgaattcgcaacaaccgaagctgtttgtgggaatgattctgattctcatctttgcggaagcgcttgcactgtatggtctcattgttggtatcatcctctcatctcgagctggtcagtctagagctgagtgaaagaagtggagacttattgttattatcatcatgtctcatatgagaagtttcatgtgatgtgtagcttctcctttcagttatttttcgtgagtttgagttctgttattattagacacacttgtgtaacttgggtgaaattatatgactcggtaccaaaaaaaaaaaaaaaaaa

SEQ ID NO: 9611 - protein, 174 aa, Arabidopsis thaliana
GATVIKEPMASSGFSGDETAPFFGFLGAAAALVFSCMGAAYGTAKSGVGVASMGVMRPELVMKSIVPVVMAGVLGIYGLIIAVIISTGINPKAKSYYLFDGYAHLSSGLACGLAGLSAGMAIGIVGDAGVRANSQQPKLFVGMILILIFAEALALYGLIVGIILSSRAGQSRAE

SEQ ID NO: 9612 - protein, 166 aa, Arabidopsis thaliana
MASSGFSGDETAPFFGFLGAAAALVFSCMGAAYGTAKSGVGVASMGVMRPELVMKSIVPVVMAGVLGIYGLIIAVIISTGINPKAKSYYLFDGYAHLSSGLACGLAGLSAGMAIGIVGDAGVRANSQQPKLFVGMILILIFAEALALYGLIVGIILSSRAGQSRAE

SEQ ID NO: 9613 - protein, 138 aa, Arabidopsis thaliana
MGAAYGTAKSGVGVASMGVMRPELVMKSIVPVVMAGVLGIYGLIIAVIISTGINPKAKSYYLFDGYAHLSSGLACGLAGLSAGMAIGIVGDAGVRANSQQPKLFVGMILILIFAEALALYGLIVGIILSSRAGQSRAE

SEQ ID NO: 9614 - DNA, 1411 bp, Arabidopsis thaliana
attacctagaacatcctaatcgaaaaactaactcatcatctcaacactacaaacaagaaacacatactctctctcaattcatatttcctcacttttgatcagtttgatcacgtagagtgccttgaaggagaagaaaataacaaaaaagaaagagaaatgggataccttttcgaagaaaccttaagctctaaccctaaaaccccaattgttgttgatgatgataacgagttgggtttgatggccgtgagacttgccaatgccgccgcctttccaatggttcttaaagcttccctcgagctcggtgtctttgacactctctacgcggaagcctctcgcaccgactcgttcctttcaccatctgagatagcgagtaagctaccaactacaccccgtaaccctggggctccggtcttgttggaccgcatgcttcgtttactcgctagctattccatggtcaagtgtgagaaggtctcagtaggaaagggggagagggtctatcgagccgagccaatttgcaggtttttcttgaagaataacattcaggatattggatcccttgcttctcaagtcatcgtcaatttcgacactgtcttccttaatacctgggcacaattgaaagatgtggtgctagaaggaggagacgcgtttgggcgtgcacatggtggcatgaaactctttgactatatgggtacagatgagaggttcagcaagctctttaaccagaccggattcacaatcgcggtcgttaagaaggctcttgaagtctatgaaggcttcaaaggtgtgaatgttttagttgatgttggaggaggagttggtaacactcttggtgttgttacttctaaatatcccaatattaagggtattaattttgatctaacttgcgccttggcacaagcaccctcgtatcccggtgtggagcatgttgccggagatatgtttgtggatgtcccaaccggagatgccatgatcttgaaacgtatacttcatgattggaccgacgaagattgtgtcaagattcttaagaattgttggaaatcactaccaaaaaacggtaaagtggttgttatagaattagtcactcctgatgaggcagagaatggtgacatcaacgcaaacattgcctttgacatggacatgttaatgttcacccaatgttctggtggaaaagagagatcaagagctgagtttgaagctttagctgcagcttctggcttcacccattgcaagttcgtttgccaagcttatcactgctggattattgagttctgtaaataatatgtctatttctatttaaaatttaatcctcataattgttaatttcatctgtatttcagttttttgtttgaaatggtcatgcctctctttttctttcgagcaatatatataaaataaataaaaatcttttttt

SEQ ID NO: 9615 - protein, 373 aa, Arabidopsis thaliana
MGYLFEETLSSNPKTPIVVDDDNELGLMAVRLANAAAFPMVLKASLELGVFDTLYAEASRTDSFLSPSEIASKLPTTPRNPGAPVLLDRMLRLLASYSMVKCEKVSVGKGERVYRAEPICRFFLKNNIQDIGSLASQVIVNFDTVFLNTWAQLKDVVLEGGDAFGRAHGGMKLFDYMGTDERFSKLFNQTGFTIAVVKKALEVYEGFKGVNVLVDVGGGVGNTLGVVTSKYPNIKGINFDLTCALAQAPSYPGVEHVAGDMFVDVPTGDAMILKRILHDWTDEDCVKILKNCWKSLPKNGKVVVIELVTPDEAENGDINANIAFDMDMLMFTQCSGGKERSRAEFEALAAASGFTHCKFVCQAYHCWIIEFCK

SEQ ID NO: 9616 - protein, 346 aa, Arabidopsis thaliana
MAVRLANAAAFPMVLKASLELGVFDTLYAEASRTDSFLSPSEIASKLPTTPRNPGAPVLLDRMLRLLASYSMVKCEKVSVGKGERVYRAEPICRFFLKNNIQDIGSLASQVIVNFDTVFLNTWAQLKDVVLEGGDAFGRAHGGMKLFDYMGTDERFSKLFNQTGFTIAVVKKALEVYEGFKGVNVLVDVGGGVGNTLGVVTSKYPNIKGINFDLTCALAQAPSYPGVEHVAGDMFVDVPTGDAMILKRILHDWTDEDCVKILKNCWKSLPKNGKVVVIELVTPDEAENGDINANIAFDMDMLMFTQCSGGKERSRAEFEALAAASGFTHCKFVCQAYHCWIIEFCK

SEQ ID NO: 9617 - protein, 334 aa, Arabidopsis thaliana
MVLKASLELGVFDTLYAEASRTDSFLSPSEIASKLPTTPRNPGAPVLLDRMLRLLASYSMVKCEKVSVGKGERVYRAEPICRFFLKNNIQDIGSLASQVIVNFDTVFLNTWAQLKDVVLEGGDAFGRAHGGMKLFDYMGTDERFSKLFNQTGFTIAVVKKALEVYEGFKGVNVLVDVGGGVGNTLGVVTSKYPNIKGINFDLTCALAQAPSYPGVEHVAGDMFVDVPTGDAMILKRILHDWTDEDCVKILKNCWKSLPKNGKVVVIELVTPDEAENGDINANIAFDMDMLMFTQCSGGKERSRAEFEALAAASGFTHCKFVCQAYHCWIIEFCK

SEQ ID NO: 9618 - DNA, 888 bp, Arabidopsis thaliana
tgacacacaatccaatcaaaacacacagagagaagaaaaactcagaagaaaagccaaagagtgaaacaaaaatggcgtcgacgactctctcaatcgcaacaacaatccgttcctcatcttatcctactctcgcttccatcaatcacttcccttcccgaaccaccaccatcgaattcccctctcgcttcggtggtggttcatcatccacattgacccaccgtgcaacccatctccgtccaatcgccgccgtcgaagctccggagaaaatcgagaagatcggatccgaaatctcatccctaaccctcgaagaagctcgtatcctcgtcgactatctccaagacaaattcggtgtctccccactctctttagcccccgcagcagcggcggttgctgctccagccgacggtggcgcggcggctgtagtggaggagcaaacagagttcgatgtggttatcaatgaagttccgagtagttctcgtattgcagtaattaaagctgttagggctttgactagcttggcgttgaaggaagctaaggagctaatcgaaggattaccaaagaagtttaaagaaggtatcactaaagatgaagctgaagaagctaagaagactcttgaagaagctggtgctaaagtctccattgcttaaggtttttataaaaaaaaaaaaagaagttgttatcttttctggaatttgattggtcttttgtgttgtttagtatagtttgcgtctggaattgttgagaaattgttgtaatttgaatcacatttggtttcccattagctgatttcgccattgatgtgagctttttggtagctgcacataacatgtttgttgaaatgcctaaatgaggcaaatcactcgtagttgcttaacatgaaacagagtt

SEQ ID NO: 9619 - protein, 214 aa, Arabidopsis thaliana
THNPIKTHREKKNSEEKPKSETKMASTTLSIATTIRSSSYPTLASINHFPSRTTTIEFPSRFGGGSSSTLTHRATHLRPIAAVEAPEKIEKIGSEISSLTLEEARILVDYLQDKFGVSPLSLAPAAAAVAAPADGGAAAVVEEQTEFDVVINEVPSSSRIAVIKAVRALTSLALKEAKELIEGLPKKFKEGITKDEAEEAKKTLEEAGAKVSIA

SEQ ID NO: 9620 - protein, 191 aa, Arabidopsis thaliana
MASTTLSIATTIRSSSYPTLASINHFPSRTTTIEFPSRFGGGSSSTLTHRATHLRPIAAVEAPEKIEKIGSEISSLTLEEARILVDYLQDKFGVSPLSLAPAAAAVAAPADGGAAAVVEEQTEFDVVINEVPSSSRIAVIKAVRALTSLALKEAKELIEGLPKKFKEGITKDEAEEAKKTLEEAGAKVSIA

SEQ ID NO: 9621 - DNA, 1733 bp, Arabidopsis thaliana
gcaccaggagctcactagtccccccccccccacccatttatctctctctttctcaaaacctttcagtcaaaattctccggcggcttttaaactatgtgaaggaggagaacctccataacaagaagcggattctctcagttttccggcggcggaggaacacaaagccaccggtttttagacacacagatttcattttcagttattaaatggtaactagagaaacgaagttgacgtcagagcgagaagtagagtcgtccatggcgcaagcgagacataatggaggaggtggtggtgagaatcatccgtttacttctttgggaagacaatcctctatctactcattgacccttgacgagttccaacatgctttatgtgagaacggcaagaactttgggtccatgaacatggacgagtttcttgtctctatttggaacgcagaggagaataataacaatcaacaacaagcagcagcagctgcaggttcacattctgttccggctaatcacaatggtttcaacaacaacaataacaatggaggcgagggtggtgttggtgtctttagtggtggttctagaggcaacgaagatgctaacaataagagagggatagcgaacgagtctagtcttcctcgacaaggctctttgacacttccagctccgctttgtaggaagactgttgatgaggtttggtctgagatacatagaggtggtggtagcggtaatggaggagacagcaatggacgtagtagtagtagtaatggacagtacaatgctcagaacggcggtgagactgcggctagacaaccgacttttggagagatgacacttgaggatttcttggtgaaggctggtgtggttagagaacatcccactaatcctaaacctaatccaaacccgaaccaaaaccaaaacccgtctagtgtaatacccgcagctgcacagcaacagctttatggtgtgtttcaaggaaccggtgatccttcattcccgggtcaagctatgggtgtgggtgacccatcaggttatgctaaaaggacaggaggaggagggtatcagcaggcgccaccagttcaggcaggtgtttgctatggaggtggcgttgggtttggagcgggtggacagcaaatgggaatggttggaccgttaagcccggtgtcttcagatggattaggacatggacaagtggataacataggaggtcagtatggagtagatatgggagggctaaggggaaggaaaagagtagtggatggtccagtggagaaagtagtggagagaagacagaggaggatgatcaagaaccgcgagtctgctgctagatctagagcaagaaaacaagcatatacagtggaattggaagctgaacttaaccagttgaaagaagagaatgcgcagctaaaacatgcattggcggagttggagaggaagaggaagcaacagtattttgagagtttgaagtcaagggcacaaccgaaattgccgaaatcgaacgggagattgcggacattgatgaggaacccgagttgtccactctaaacaaacaataggaagatggagaagaagtcggagacagaacgagggaaaaactgatgattttctacgttgttgttttgtctttgaggaatgaggttatagaatctttatactttgatgttttctgtgttggtaggaggaacaccatctgatctgctttactagtgttccctgtgaacaaagaaagtgattctgtgtttc

SEQ ID NO: 9622 - protein, 442 aa, Arabidopsis thaliana
MVTRETKLTSEREVESSMAQARHNGGGGGENHPFTSLGRQSSIYSLTLDEFQHALCENGKNFGSMNMDEFLVSIWNAEENNNNQQQAAAAAGSHSVPANHNGFNNNNNNGGEGGVGVFSGGSRGNEDANNKRGIANESSLPRQGSLTLPAPLCRKTVDEVWSEIHRGGGSGNGGDSNGRSSSSNGQYNAQNGGETAARQPTFGEMTLEDFLVKAGVVREHPTNPKPNPNPNQNQNPSSVIPAAAQQQLYGVFQGTGDPSFPGQAMGVGDPSGYAKRTGGGGYQQAPPVQAGVCYGGGVGFGAGGQQMGMVGPLSPVSSDGLGHGQVDNIGGQYGVDMGGLRGRKRVVDGPVEKVVERRQRRMIKNRESAARSRARKQAYTVELEAELNQLKEENAQLKHALAELERKRKQQYFESLKSRAQPKLPKSNGRLRTLMRNPSCPL

SEQ ID NO: 9623 - protein, 425 aa, Arabidopsis thaliana
MAQARHNGGGGGENHPFTSLGRQSSIYSLTLDEFQHALCENGKNFGSMNMDEFLVSIWNAEENNNNQQQAAAAAGSHSVPANHNGFNNNNNNGGEGGVGVFSGGSRGNEDANNKRGIANESSLPRQGSLTLPAPLCRKTVDEVWSEIHRGGGSGNGGDSNGRSSSSNGQYNAQNGGETAARQPTFGEMTLEDFLVKAGVVREHPTNPKPNPNPNQNQNPSSVIPAAAQQQLYGVFQGTGDPSFPGQAMGVGDPSGYAKRTGGGGYQQAPPVQAGVCYGGGVGFGAGGQQMGMVGPLSPVSSDGLGHGQVDNIGGQYGVDMGGLRGRKRVVDGPVEKVVERRQRRMIKNRESAARSRARKQAYTVELEAELNQLKEENAQLKHALAELERKRKQQYFESLKSRAQPKLPKSNGRLRTLMRNPSCPL

SEQ ID NO: 9624 - protein, 378 aa, Arabidopsis thaliana
MNMDEFLVSIWNAEENNNNQQQAAAAAGSHSVPANHNGFNNNNNNGGEGGVGVFSGGSRGNEDANNKRGIANESSLPRQGSLTLPAPLCRKTVDEVWSEIHRGGGSGNGGDSNGRSSSSNGQYNAQNGGETAARQPTFGEMTLEDFLVKAGVVREHPTNPKPNPNPNQNQNPSSVIPAAAQQQLYGVFQGTGDPSFPGQAMGVGDPSGYAKRTGGGGYQQAPPVQAGVCYGGGVGFGAGGQQMGMVGPLSPVSSDGLGHGQVDNIGGQYGVDMGGLRGRKRVVDGPVEKVVERRQRRMIKNRESAARSRARKQAYTVELEAELNQLKEENAQLKHALAELERKRKQQYFESLKSRAQPKLPKSNGRLRTLMRNPSCPL

SEQ ID NO: 9625 - DNA, 769 bp, Arabidopsis thaliana
aacgaacaaagaaacatacatcaaagctacatatactaaaagatatataatttctcgattgtcctgagccctcagaccaaaatctgaccatggacaaggttatgagaatgtcatcggagaaaggagtcgtgatcttcaccaaaagttcatgttgtctctgctacgccgtgcaaatccttttccgtgatcttagggttcaaccaacaatccacgagatcgacaactcggtcacgttaaggacttggcaacagcctttctcaacgtgcttggtaacgagaaagccagcagagagatattcaacatctcgggggagaaatatgttacctttgatgggttagcaaaagcttgcgcaaagcccggtgggtttccggagccagagattgttcattacaacccgaaagagttcgactttgggaagaagaaggcattccctttccgtgatcagcatttctttgcatcggtggagaaagcaaagcatgtcctcggatggaaaccggagttcgacttagtggagggtctcactgactcatacaaccttgatttcggtcgcggaacattccggaaagaagcggatttcaccactgacgacatgattctgagcaagaaacttgttcttcaataatcgaaatcctaagagttgctcattcttggcttgtatgattctgatcacccggttctcttaaagttctgaactttattgtcatctcacgtatgttatggtccggattttgttcgacttttctctaaagaagtcaagctagggacgatg

SEQ ID NO: 9626 - protein, 82 aa, Arabidopsis thaliana
MDKVMRMSSEKGVVIFTKSSCCLCYAVQILFRDLRVQPTIHEIDNSVTLRTWQQPFSTCLVTRKPAERYSTSRGRNMLPLMG

SEQ ID NO: 9627 - protein, 78 aa, Arabidopsis thaliana
MRMSSEKGVVIFTKSSCCLCYAVQILFRDLRVQPTIHEIDNSVTLRTWQQPFSTCLVTRKPAERYSTSRGRNMLPLMG

SEQ ID NO: 9628 - protein, 76 aa, Arabidopsis thaliana
MSSEKGVVIFTKSSCCLCYAVQILFRDLRVQPTIHEIDNSVTLRTWQQPFSTCLVTRKPAERYSTSRGRNMLPLMG

SEQ ID NO: 9629 - DNA, 1097 bp, Arabidopsis thaliana
gtccctatccaatacacatctctctctctcttattaactcaatgacggcgactgcgtttagggtcggcttgtggttggccgttacggcttcctttctcttaaccgcaacaaacgccaaaatccccggcgtttacagtggcggaccgtggcagaatgcacacgccactttctacggtggcagtgacgcccggcacaatgggcggcgcgtgtgggtacgggaacttgtacagccaaggatacggtgtgaacacggcggcgttgagcactgctttgttcaacaacggattcagctgtggtgcttgttttgagattaagtgtactgatgatccaagatggtgtgttccgggaaatccatctattcttgtgacggcgacgaacttttgtccgccgaattttgctcagccgagtgacgacggagggtggtgcaatccgccgcgcgagcattttgatctcgccatgcctatgttcctcaagatcggtctataccgtgcaggcattgtccccgtctcctatcgcagggtaccttgtcggaagataggagggataagattcacagtaaacggattcagatacttcaatcttgttctggtaactaacgttgccggcgccggagatattaacggagttagcgtaaagggatcaaagacagattgggtgaggatgagtcggaactggggacagaactggcaatccaacgccgttctcatcggccaatcactctctttccgagtcaccgcctctgaccgacgttcttctacctcatggaacgttgctcctgccacgtggcagtttggtcagactttctccggcaaaaactttcgagtctgaaatctgaaaaaccacccaaaagatgttttttaattttattttttacaatggaagaagacacaaacaagaagagagatgagacattttccagccctgggttttccctttaattttcttgggaatattccggtggcttgtggaaaatatttccgtttttagtattattatcagcaaaatttcttttaatctttgcgatttacgagtgatttgtttttctcttggttattttgttcctttaattatttcgttggtggcatcttcgttctgcg

SEQ ID NO: 9630 - protein, 224 aa, Arabidopsis thaliana
MHTPLSTVAVTPGTMGGACGYGNLYSQGYGVNTAALSTALFNNGFSCGACFEIKCTDDPRWCVPGNPSILVTATNFCPPNFAQPSDDGGWCNPPREHFDLAMPMFLKIGLYRAGIVPVSYRRVPCRKIGGIRFTVNGFRYFNLVLVTNVAGAGDINGVSVKGSKTDWVRMSRNWGQNWQSNAVLIGQSLSFRVTASDRRSSTSWNVAPATWQFGQTFSGKNFRV

SEQ ID NO: 9631 - protein, 210 aa, Arabidopsis thaliana
MGGACGYGNLYSQGYGVNTAALSTALFNNGFSCGACFEIKCTDDPRWCVPGNPSILVTATNFCPPNFAQPSDDGGWCNPPREHFDLAMPMFLKIGLYRAGIVPVSYRRVPCRKIGGIRFTVNGFRYFNLVLVTNVAGAGDINGVSVKGSKTDWVRMSRNWGQNWQSNAVLIGQSLSFRVTASDRRSSTSWNVAPATWQFGQTFSGKNFRV

SEQ ID NO: 9632 - protein, 123 aa, Arabidopsis thaliana
MPMFLKIGLYRAGIVPVSYRRVPCRKIGGIRFTVNGFRYFNLVLVTNVAGAGDINGVSVKGSKTDWVRMSRNWGQNWQSNAVLIGQSLSFRVTASDRRSSTSWNVAPATWQFGQTFSGKNFRV

SEQ ID NO: 9633 - DNA, 763 bp, Arabidopsis thaliana
agagcacaacaccacgatgacgaccaaggccatggagagaggatttaagctgattctgggttctcaatccatggcgagaaagaggattctggctgaaatgggatatgattacactatcgtgactgcagacattgatgagaaagctattaggacagagaagcctgaagatttggttgtggctcttgctgaagccaaggcaaatgagattatatcgaaattgggaggtgagagccagtttgcaaaagatcctcaaccaactcttttgattactgcagacactgttgttgtgtacaaaggtgttattagagaaaaaccaaccactaaagaagaagctcgtgaatttatcaaaggctattccggttcacacggaggagttgtgggatctgttcttgttagaaacttgaaaactggagttaaaaaaggaggatgggacaaagctgaggtttatttccatgagataccagaacaagtcattgacgatcttattgatgatgcaataacttataaggttgctggaggtttaacactggagcatcccctcatttcaccctttatcgattctgtggtgggaggggttgatacagtcatgggacttcctaaagaactcacagaaaaattcataaacgatgtgttgttgtagctcaagtccctttttgattatgtaggaatacttttgaatctctctaatcaatcatttattttgtaatttggtaaaacacagatttatcgtatcatgtttttaagtagtgatgatgttttcagg

SEQ ID NO: 9634 - protein, 212 aa, Arabidopsis thaliana
EHNTTMTTKAMERGFKLILGSQSMARKRILAEMGYDYTIVTADIDEKAIRTEKPEDLVVALAEAKANEIISKLGGESQFAKDPQPTLLITADTVVVYKGVIREKPTTKEEAREFIKGYSGSHGGVVGSVLVRNLKTGVKKGGWDKAEVYFHEIPEQVIDDLIDDAITYKVAGGLTLEHPLISPFIDSVVGGVDTVMGLPKELTEKFINDVLL

SEQ ID NO: 9635 - protein, 207 aa, Arabidopsis thaliana
MTTKAMERGFKLILGSQSMARKRILAEMGYDYTIVTADIDEKAIRTEKPEDLVVALAEAKANEIISKLGGESQFAKDPQPTLLITADTVVVYKGVIREKPTTKEEAREFIKGYSGSHGGVVGSVLVRNLKTGVKKGGWDKAEVYFHEIPEQVIDDLIDDAITYKVAGGLTLEHPLISPFIDSVVGGVDTVMGLPKELTEKFINDVLL

SEQ ID NO: 9636 - protein, 202 aa, Arabidopsis thaliana
MERGFKLILGSQSMARKRILAEMGYDYTIVTADIDEKAIRTEKPEDLVVALAEAKANEIISKLGGESQFAKDPQPTLLITADTVVVYKGVIREKPTTKEEAREFIKGYSGSHGGVVGSVLVRNLKTGVKKGGWDKAEVYFHEIPEQVIDDLIDDAITYKVAGGLTLEHPLISPFIDSVVGGVDTVMGLPKELTEKFINDVLL

SEQ ID NO: 9637 - DNA, 740 bp, Arabidopsis thaliana
acggcgccaccattaaaatctctcgatctctatctgcgaaatttcacggtgagcttagtattactctcaattgttctcagtaggtatttgaaatggcgacagttccaggacaattgatctgggagatcgtgaagaacaacaactgtttcttggtgaagcagttcggtagaggaaactctaaggttcaattcagcaaggagactaacaacctcaccaacgttcactcttacaagcactctggtcttgcaaacaaaaagactgtgaccatccaggccgctgacaaggaccaagctgttgtgctcgccaccaccaagaccaagaagcagaacaagcctaagctctctgtcaacaagtctatcctcaagaaggaattccccaggatgtcaaaggctgttgctaaccaggtggtggacaactactacaggccggacttgaagaaagctgcacttgctagactcagcgccatcagcaaaggtctcagggttgccaagtccggtgccaagcaaagaaacagacaagcttaagcttcttcgtttcacaatctgttttttttgaagtaaaagattctgttgaacaggttttatgtaagttgttgctttgaagatgttccataatgctattctcctttttcattatccttattataaaggagttagaagtttatcttgttatgcttgatgtttctggtgtgcttgtgcttacattttgttagatccttctatcgaatcaggagctttctc

SEQ ID NO: 9638 - protein, 143 aa, Arabidopsis thaliana [sequence omitted]

SEQ ID NO: 9639 - DNA, 721 bp, Arabidopsis thaliana
acaacacaacttcagctttaagacagctaaaactaaatacaaagaaacagagatgggtttggttacagaggaggtgagagctaaggcagagatgtacaccggagatgagatatgtagagagaagacaaagtgtttcctcaaggaaatatctatgcccaatggtttattaccattgaaggatatagaagaggttgggtatgacagagagtcaggtgttgtatggctgaagcagaagaagagcatcactcacaagttcacagagatagataagcttgtctcctatggaaccgaagtcacagccattgttgagaccgggaaaatcaagaagctcactggagtcaaagccaaggaacttcttatttgggtcactatcaatgagatctataccgaggaaccccctaccaagatcacgttcaagacaccgaccacactgtccaggactttcccggtctcaacaatggctgtgacttcggttctattggacacatcgttgcttactacatcttggctacttccagcaatggatacgacccaagcttctttggatgattcttttcaatgtcaatctctcgtatatgtatatgtatatgtttgacttgtgttgcaagctatctaatctgttctctatctctgtttcttcttctgttgttgttgttgttgtctaagacttgtccctctttttgcaaatgttttatttctccatttacaaatattggtttgc

SEQ ID NO: 9640 - protein, 197 aa, Arabidopsis thaliana
QHNFSFKTAKTKYKETEMGLVTEEVRAKAEMYTGDEICREKTKCFLKEISMPNGLLPLKDIEEVGYDRESGVVWLKQKKSITHKFTEIDKLVSYGTEVTAIVETGKIKKLTGVKAKELLIWVTINEIYTEEPPTKITFKTPTTLSRTFPVSTMAVTSVLLDTSLLTTSWLLPAMDTTQASLDDSFQCQSLVYVYVYV

SEQ ID NO: 9641 - protein, 180 aa, Arabidopsis thaliana
MGLVTEEVRAKAEMYTGDEICREKTKCFLKEISMPNGLLPLKDIEEVGYDRESGVVWLKQKKSITHKFTEIDKLVSYGTEVTAIVETGKIKKLTGVKAKELLIWVTINEIYTEEPPTKITFKTPTTLSRTFPVSTMAVTSVLLDTSLLTTSWLLPAMDTTQASLDDSFQCQSLVYVYVYV

SEQ ID NO: 9642 - protein, 167 aa, Arabidopsis thaliana
MYTGDEICREKTKCFLKEISMPNGLLPLKDIEEVGYDRESGVVWLKQKKSITHKFTEIDKLVSYGTEVTAIVETGKIKKLTGVKAKELLIWVTINEIYTEEPPTKITFKTPTTLSRTFPVSTMAVTSVLLDTSLLTTSWLLPAMDTTQASLDDSFQCQSLVYVYVYV

SEQ ID NO: 9643 - DNA, 839 bp, Arabidopsis thaliana
aaaaaccggtggagagaagacggaaagagtctgagagagagagaagaaatggggagagaagtgccggagagctgtgtagacactatgttaatggagatggtggcgatgtacagtggccgattctatgctaacaagccggaactcgccgctcggaggatcgaggccattggttatcaggtcggccaccagctctccgagaggtacactatggaaagaccaaggttcagtgaccatctagaggcaatcaagtttatctgcaaagacttctggtctgaggtcttcaagaagcagattgataatttaaagacaaatcaccggggtacttttgtattacaagacaacaagttccggtggttgtctcgtgtctcaattgacccttcatctgagaatgaaaccgaagatccttctactccaggggaaagcaaagctgcacaagcggtgagcatgtacctctatttcccgtgtggaatcattagaggtgtcctctccaacttggggataccttgtgctgtctctgcagatatatcaagccttcccacatgctctttcgtgattcgggtcaaggcttgattctgcatttagctcgagtacttggctttatactttcaaggaagatagatccttcgggtctgatcaatctaaaacccattgcaggcttctgtttgctgttcttttgacacactttagccttgtggtgcttgttttaaacagtgagggcttggtttcatgtttgaaatgacttttatttttctgttgtaaatttttgttgatatcttatatacagtaattcctgatgcatctccatttcatatcatttttaaaaaaggcgtacatttggg

SEQ ID NO: 9644 - protein, 189 aa, Arabidopsis thaliana
KNRWREDGKSLREREEMGREVPESCVDTMLMEMVAMYSGRFYANKPELAARRIEAIGYQVGHQLSERYTMERPRFSDHLEAIKFICKDFWSEVFKKQIDNLKTNHRGTFVLQDNKFRWLSRVSIDPSSENETEDPSTPGESKAAQAVSMYLYFPCGIIRGVLSNLGIPCAVSADISSLPTCSFVIRVKA

SEQ ID NO: 9645 - protein, 173 aa, Arabidopsis thaliana
MGREVPESCVDTMLMEMVAMYSGRFYANKPELAARRIEAIGYQVGHQLSERYTMERPRFSDHLEAIKFICKDFWSEVFKKQIDNLKTNHRGTFVLQDNKFRWLSRVSIDPSSENETEDPSTPGESKAAQAVSMYLYFPCGIIRGVLSNLGIPCAVSADISSLPTCSFVIRVKA

SEQ ID NO: 9646 - protein, 161 aa, Arabidopsis thaliana
MLMEMVAMYSGRFYANKPELAARRIEAIGYQVGHQLSERYTMERPRFSDHLEAIKFICKDFWSEVFKKQIDNLKTNHRGTFVLQDNKFRWLSRVSIDPSSENETEDPSTPGESKAAQAVSMYLYFPCGIIRGVLSNLGIPCAVSADISSLPTCSFVIRVKA

SEQ ID NO: 9647 - DNA, 932 bp, Arabidopsis thaliana
gtgttatgtctgctcaaagacagcctttgtaaccaaaaccaaagtgtctctcttttcttcttcctaaatttctttccacgagaattgatttgggtttgtgttgtttttttctttcttttttgggtttttgtaattgggttggtgaataatcctgcaaaagtgttcgatgattttctccagagaagaattttgaagtttctctttttagagattttttttgttgttggggttttttgttttctgggggaaattgaaaagagatggcaggtgaagaagattggatagaactaaagtttagactagcagatggtacagacataggtccaagcaagtataatcaatctatgactgtttcttctcttaaagagaaactcatttctcaatggcctaaagataaagaaaatactccaaaaactgtaaatgatatgaagctcatcaatgccgggaaaatactggagaacaataggacacttgctgaatccaggcttcctgtttgtgaacttcctggaatgatcattactatgcatattgttcttcgccttcctacgttagacaaaaagagcgaaaaactgcagaatgatccaccgatgaagaatcgctgcgtgtgcaccattttgtagctgcaagtaaattggatcatagagatttatatccgtcatgatcatggcactagatgatgctccacggaacaacttccatggcatcaaacaagctttgagaagttccttcagtacagaatgattggcataggcatgaaaacaaaagatcttcattacagaatttggttccatgtgtgtggttgttaattattattttttaaaaatcaaaatggcttgagaaaatgtactatgattcttgaaggttggttcttttataaatatatacaatatgttcaatacaacagtaaataacaagaatggtattgtccttac

SEQ ID NO: 9648 - protein, 119 aa, Arabidopsis thaliana
MAGEEDWIELKFRLADGTDIGPSKYNQSMTVSSLKEKLISQWPKDKENTPKTVNDMKLINAGKILENNRTLAESRLPVCELPGMIITMHIVLRLPTLDKKSEKLQNDPPMKNRCVCTIL

SEQ ID NO: 9649 - protein, 94 aa, Arabidopsis thaliana
VLCLLKDSLCNQNQSVSLFFFLNFFPRELIWVCVVFFFLFWVFVIGLVNNPAKVFDDFLQRRILKFLFLEIFFVVGVFCFLGEIEKRWQVKKIG

SEQ ID NO: 9650 - protein, 91 aa, Arabidopsis thaliana
MTVSSLKEKLISQWPKDKENTPKTVNDMKLINAGKILENNRTLAESRLPVCELPGMIITMHIVLRLPTLDKKSEKLQNDPPMKNRCVCTIL

SEQ ID NO: 9651 - DNA, 709 bp, Arabidopsis thaliana
gcctttttcgttagggtgttcaacgcaatcttgcgtcgctgtggccactactcatcaacaaaagaaaccaaaccaactcatcaagagtaccttcttgctcacatttcttttgttctatatccttgcttcttctctctttttctttctgaatagtctttttctctgatctggttttctaaggaagagaagaaagtcatgagaatggatcatttgaaaaagaatacacaaagatggacagaaacggtgctaaaatgttagatggaagagtagaaagtgatgcaaagggctcatttagaaaggattacacaaagatggagaacaacaacaacggtgctaatatctcagatggtatctacagaattattcgcagcttcaagagtttctcgcactttttcatacgttacgaagaggagacgaaagagagagaagcggagatggagataggatttccaacggacgtgaagcacttgagccacatcggagttgatggaaccatgaccactttcgacaacacctcctcatcttttccattctccggtttccatctcaccggcaccgtcgtctgattttcgcatcttctagtactaaatcaactacatatgacattttctttcaatagtttcataattagtcgtaagatcatcttatttggttgcaagtacgtacatacatacctcaaaattcaataatcaatctcattcctttaacc

SEQ ID NO: 9652 - protein, 111 aa, Arabidopsis thaliana
MDRNGAKMLDGRVESDAKGSFRKDYTKMENNNNGANISDGIYRIIRSFKSFSHFFIRYEEETKEREAEMEIGFPTDVKHLSHIGVDGTMTTFDNTSSSFPFSGFHLTGTVV

SEQ ID NO: 9653 - protein, 104 aa, Arabidopsis thaliana
MLDGRVESDAKGSFRKDYTKMENNNNGANISDGIYRIIRSFKSFSHFFIRYEEETKEREAEMEIGFPTDVKHLSHIGVDGTMTTFDNTSSSFPFSGFHLTGTVV

SEQ ID NO: 9654 - protein, 84 aa, Arabidopsis thaliana
MENNNNGANISDGIYRIIRSFKSFSHFFIRYEEETKEREAEMEIGFPTDVKHLSHIGVDGTMTTFDNTSSSFPFSGFHLTGTVV

SEQ ID NO: 9655 - DNA, 687 bp, Arabidopsis thaliana
atcttcgcgcgcttaagcgattctctgcaaagcttcataccaaacaaagagaagtcgaaatgccagtttcagctccatctccgcctcgtcttcattctccgttcattcactgtcccatcaatttcactccttcttctttctcggcgaggaatctccggtcgccgtcaacatcttatccccgaatcaaagctgaactcgatcccaacacggtagtcgcgatatctgtaggcgtagcaagcgtcgcattaggaatcggaatccctgtgttctacgagactcaaatcgacaatgcggctaagcgagagaatactcaaccttgttttccctgtaatggcaccggagctcagaaatgcagattgtgtgtgggaagtggtaatgtgaccgtagagcttggtggaggagagaaagaagtctcaaactgtatcaactgtgatggtgctggttccttaacttgcactacttgtcaaggctctggtgttcaacctcgataccttgatcgaagggagttcaaggacgatgactaaataccttgctctaaggaacatttcttttcttctcccttctcacatttcttcattgtacaatgctgttttgttcaccaaacatgttgagagaacatcatgacatggatattgtaattgtgaaagaaaaccaccagagttcaatcaaatgtttcttcttgtacct

SEQ ID NO: 9656 - protein, 173 aa, Arabidopsis thaliana
LRALKRFSAKLHTKQREVEMPVSAPSPPRLHSPFIHCPINFTPSSFSARNLRSPSTSYPRIKAELDPNTVVAISVGVASVALGIGIPVFYETQIDNAAKRENTQPCFPCNGTGAQKCRLCVGSGNVTVELGGGEKEVSNCINCDGAGSLTCTTCQGSGVQPRYLDRREFKDDD

SEQ ID NO: 9657 - protein, 154 aa, Arabidopsis thaliana [sequence omitted]

SEQ ID NO: 9658 - DNA, 1859 bp, Arabidopsis thaliana
atagtcaacaagagaacaaagccacagagagagagagacactaaaaccctaatctcttactcactgtctctcttcttcaatccatgtcttcaacacaagaagcgtctgttactgatttgcccgtgaagagacctagagaagcagaggaggacaataacggcggcgccatggaaacagagaacggtggaggagagataaaggagccttcttgtatgtcctctattattcctggatggttctctgagattagtcctatgtggccaggagaagcacattctctcaaggtagagaagattctattccaagggaaatcagattaccaggatgttattgttttccagtctgcaacatatggaaaggttttggttttggatggagtgattcaactcactgagagagatgaatgtgcgtatcaagaaatgatcactcatcttcctttgtgctctatctccaaccccaaaaaggtactggtgattggaggaggagatggaggagtcctgagggaagtggcacgtcatagttctgttgagcagattgacatttgtgaaatagataaaatggtggttgatgtggctaagcagtatttccctaatgtagcagttgttttttttttttttttttcctaaaaccttccataatttataatccagaacgaaagatgttcaacatagaatccatgataactcaaattaaagagcttacaaaattcccaaatagaaatgcagtttttaaaagataagagagaaagagaaggatcgatctaccgctacaacagatcaagcttcaactccttctttctggtaaacgtaggtgagtccacacttaccacagtaatggcgatcaaaatgactcgccatgaaagtcccagctccacaggttgcgttagggcactccttcctcaaacgctgaacctttccagatccatcgattttgtaaaactgaagaacagcgagcttaaccttcttatgcttgtgcttgatcttcttcggcttggtgtaagtcttcttcttcctcttcttagcaccaccacggagacggaggacgagatgaagcgtcgattccttctggatgttgtagtcggcgagggtacggccgtcttcaagctgtttcccggcgaaaatcaatcgctgctggtccggtgggattccttccttgtcttggatcttcgccttcacattgtcgatggtgtcggatgattcaacctcaagggttatggtcttccacgttagggttttcacgaagaacgctgctgaaggaacctatgatgcagttattgttgattcatctgatccaatcggtccagcaaaagagctatttgagaaacctttctttgagtcagtgaatagagctcttcgtcctggtggagttgtgtgcacacaagctaaaagcttgtggcttcacatggatatcattgaagacattgtttctaattgccgtgacatctttaaaggatctgttaactacgcttggaccagtgttccaacttacccgagtggagtcattggattcatgctttgttcatctgaaggaccacaagtcgatttcaagaagccagtgagtctaatcgatactgatgaaagctctatcaaatcacactgtcccttgaagtattacaacgctgagattcactcagctgctttctgcttgccctcttttgctaagaaggtgattgattcgaaagccaactagaaaagagaagagaaatcatttgctttagagaaacttcatgtggaagtgataatatgatgatacaatgatcctttggaaaaaaataaagaagttttaatttttagaatgtaatgttctttcacctgcaatgttatgtgactgcactgagctatcaatctctttttataagc

SEQ ID NO: 9659 - protein, 180 aa, Arabidopsis thaliana
MSSTQEASVTDLPVKRPREAEEDNNGGAMETENGGGEIKEPSCMSSIIPGWFSEISPMWPGEAHSLKVEKILFQGKSDYQDVIVFQSATYGKVLVLDGVIQLTERDECAYQEMITHLPLCSISNPKKVLVIGGGDGGVLREVARHSSVEQIDICEIDKMVVDVAKQYFPNVAVVFFFFFS

SEQ ID NO: 9660 - protein, 168 aa, Arabidopsis thaliana
MVSDDSTSRVMVFHVRVFTKNAAEGTYDAVIVDSSDPIGPAKELFEKPFFESVNRALRPGGVVCTQAKSLWLHMDIIEDIVSNCRDIFKGSVNYAWTSVPTYPSGVIGFMLCSSEGPQVDFKKPVSLIDTDESSIKSHCPLKYYNAEIHSAAFCLPSFAKKVIDSKAN

SEQ ID NO: 9661 - protein, 158 aa, Arabidopsis thaliana
MVFHVRVFTKNAAEGTYDAVIVDSSDPIGPAKELFEKPFFESVNRALRPGGVVCTQAKSLWLHMDIIEDIVSNCRDIFKGSVNYAWTSVPTYPSGVIGFMLCSSEGPQVDFKKPVSLIDTDESSIKSHCPLKYYNAEIHSAAFCLPSFAKKVIDSKAN

SEQ ID NO: 9662 - DNA, 1010 bp, Arabidopsis thaliana
cacaaaattacccactacgttgctcttcaacaaaaagattaaacaaagagagaagaatatggcgagagggaagatccagatcaagaggatagagaaccagacaaacagacaagtgacgtattcaaagagaagaaatggtttattcaagaaagcacatgagctcacggttttgtgtgatgctagggtttcgattatcatgttctctagctccaacaagcttcatgagtatatcagccctaacaccacaacgaaggagatcgtagatctgtaccaaactatttctgatgtcgatgtttgggccactcaatatgagcgaatgcaagaaaccaagaggaaactgttggagacaaatagaaatctccggactcagatcaagcagaggctaggtgagtgtttggacgagcttgacattcaggagctgcgtcgtcttgaggatgaaatggaaaacactttcaaactcgttcgcgagcgcaagttcaaatctcttgggaatcagatcgagaccaccaagaaaaagaacaaaagtcaacaagacatacaaaagaatctcatacatgagctggaactaagagctgaagatcctcactatggactagtagacaatggaggagattacgactcagttcttggataccaaatcgaagggtcacgtgcttacgctcttcgtttccaccagaaccatcaccactattaccccaaccatggccttcatgcaccctctgcctctgacatcattaccttccatcttcttgaataattaaaggctaaaaggtttgctggtgccatcattgtctatctaattatttagtaactacttaaaacataaggcatggtgttgctaaaaccttaaactgtcatgtttcttagttatgtattttaaagcctaaagaaatatggattgtgtgatcagtagtgcttaggcttattgtgtgtggaatgttttcaagacttttatcatgtatcgtattattatattgaccactctacttaattatgctacaaatttactc

SEQ ID NO: 9663 - protein, 251 aa, Arabidopsis thaliana
TKLPTTLLFNKKIKQREKNMARGKIQIKRIENQTNRQVTYSKRRNGLFKKAHELTVLCDARVSIIMFSSSNKLHEYISPNTTTKEIVDLYQTISDVDVWATQYERMQETKRKLLETNRNLRTQIKQRLGECLDELDIQELRRLEDEMENTFKLVRERKFKSLGNQIETTKKKNKSQQDIQKNLIHELELRAEDPHYGLVDNGGDYDSVLGYQIEGSRAYALRFHQNHHHYYPNHGLHAPSASDIITFHLLE

SEQ ID NO: 9664 - protein, 232 aa, Arabidopsis thaliana
MARGKIQIKRIENQTNRQVTYSKRRNGLFKKAHELTVLCDARVSIIMFSSSNKLHEYISPNTTTKEIVDLYQTISDVDVWATQYERMQETKRKLLETNRNLRTQIKQRLGECLDELDIQELRRLEDEMENTFKLVRERKFKSLGNQIETTKKKNKSQQDIQKNLIHELELRAEDPHYGLVDNGGDYDSVLGYQIEGSRAYALRFHQNHHHYYPNHGLHAPSASDIITFHLLE

SEQ ID NO: 9665 - protein, 186 aa, Arabidopsis thaliana
MFSSSNKLHEYISPNTTTKEIVDLYQTISDVDVWATQYERMQETKRKLLETNRNLRTQIKQRLGECLDELDIQELRRLEDEMENTFKLVRERKFKSLGNQIETTKKKNKSQQDIQKNLIHELELRAEDPHYGLVDNGGDYDSVLGYQIEGSRAYALRFHQNHHHYYPNHGLHAPSASDIITFHLLE

SEQ ID NO: 9666 - DNA, 2181 bp, Arabidopsis thaliana
aaataccctaatcacattttgtaacaataatacaattatacattaaaactctccgacgatgcctcaggcaccgatgccagagttctctagctcggtgaagctcaagtacgtgaaacttggttaccaatatttggttaaccatttcttgagttttcttttgatcccgatcatggctattgtcgccgttgagcttcttcggatgggtcctgaagagatccttaatgtttggaattcactccagtttgacctagttcaggttctatgttcttccttctttgtcatcttcatctccactgtttacttcatgtccaagccacgcaccatctacctcgttgactattcttgttacaagccacctgtcacgtgtcgtgtccccttcgcaactttcatggaacactctcgtttgatcctcaaggacaagcctaagagcgtcgagttccaaatgagaatccttgaacgttctggcctcggtgaggagacttgtctccctccggctattcattatattcctcccacaccaaccatggacgcggctagaagcgaggctcagatggttatcttcgaggccatggacgatcttttcaagaaaaccggtcttaaacctaaagacgtcgacatccttatcgtcaactgctctcttttctctcccacaccatcgctctcagctatggtcatcaacaaatataagcttaggagtaatatcaagagcttcaatctttcggggatgggctgcagcgcgggcctgatctcagttgatctagcccgcgacttgctccaagttcatcccaattcaaatgcaatcatcgtcagcacggagatcataacgcctaattactatcaaggcaacgagagagccatgttgttacccaattgtctcttccgcatgggtgcggcagccatacacatgtcaaaccgccggtctgaccggtggcgagccaaatacaagctttcccacctcgtccggacacaccgtggcgctgacgacaagtctttctactgtgtctacgaacaggaagacaaagaaggacacgttggcatcaacttgtccaaagatctcatggccatcgccggtgaagccctcaaggcaaacatcaccacaataggtcctttggtcctaccggcgtcagaacaacttctcttcctcacgtccctaatcggacgtaaaatcttcaacccgaaatggaaaccatacataccggatttcaagctggccttcgaacacttttgcattcacgcaggaggcagagcggtgatcgacgagctccaaaagaatctacaactatcaggagaacacgttgaggcctcaagaatgacactacatcgttttggtaacacgtcatcttcatcgttatggtacgagcttagctacatcgagtctaaagggagaatgaggagaggcgatcgcgtttggcaaatcgcgtttgggagtggtttcaagtgtaactctgccgtgtggaaatgtaaccgtacgattaagacacctaaggacggaccatggtccgattgtatcgaccgttaccctgtctttattcccgaagttgtcaaactctaaactgaaaacgtctttgaacggtttagtaacggtttgattttgtgttacggtttaggtttatttggtctcgggatttggtttaaaggggattgagaaatgggaagttagagagaagaaaaagcaaagcataaatgtttgtatttaattgctctgcatatacttaaatctctgcttttcatttggggtattttttagtttctcgtgctgtaattaataacttgtggtgtactcaaataagaatatttctctctgttttattatttttaaattggagaataaacttctttgtttccaaaaaaaaaaaaaaaaaacgatgacaagaccaacgtcaaggccgcctggggtaaggtcggcgcgcacgctggcgagtatggtgcggaggccctggagaggatgttcctgtccttccccaccaccaagacctacttcccgcacttcgacctgagccacggctctgcccaggttaagggccacggcaagaaggtggccgacgcgctgaccaacgccgtggcgcacgtggacgacatgcccaacgcgctgtccgccctgagcgacctgcacgcgcacaagcttcgggtggacccggtcaacttcaagctcctaagccactgcctgctggtgagcccatc

SEQ ID NO: 9667 - protein, 497 aa, Arabidopsis thaliana; identical to SEQ ID NO: 7949

SEQ ID NO: 9668 - protein, 492 aa, Arabidopsis thaliana; identical to SEQ ID NO: 7950

SEQ ID NO: 9669 - protein, 460 aa, Arabidopsis thaliana; identical to SEQ ID NO: 7951

SEQ ID NO: 9670 - DNA, 2447 bp, Arabidopsis thaliana
aatttttaattcatcctccattagaatccctagggttttcttccatacacaatcagactcaacgataagtaccaatcggagaagagatcacaagtggatgatgagttacgaaggcaacggagatggtgtcgctatctccaccgaaaaccacaacgagaactacatatctctagagagctcgccttttcatgaagactccaagtctcgagaatctcatgatcttaaaaaggattcttcgaaaatcagtgagaaagacaatgaaaatggacgtgataaagacggaaacaaagatcgtgatcgtgagaaggatcgtgatagggagaagagcagagacagagatagggagaaaagcagagatagagatagggatagggagagaagtaaggataggcaacgagaccgtcatcatagagatcgtcatagggaccgtagcagagaacgtagtgagaaaagagatgatttggatgatgatcatcatcgcagaagtcgagaccgtgataggaggaggtctcgcgatcgagacagagaggtgagacacaggcgacggtcacgctctcggtcaaggagccgctctgaacgtaggtcaaggtcagaacatagacataagtctgaacatagatcacgctcacggtcgcgatcaaggtcaaagagcaagaggagaagtggatttgatatggcgcctcctgatatgttagctgctactgctgttgctgcagcagtttggaaagatcatagtcaattacacggtgtgactttgtaagaaggctatgttgggttagttgccccactgtgctgacaatgagccgacctctctagctttaattgtacaaggaggaatcagtgcaacggttgtcatgggtatttttcatcttcgactggcaactatatgcctgttttcgagccttacaatctctgacaactaaaacgaatattacatcacaacttttcattttaatattcataagttgttggtatactttctacttgtgggttttgtaagtagcaaggtgttatctgtagctttgtacttgttggtaggtctgctcctccgggaaacataataatgtatctaacaaacatttttatgacgcatactactttacctagcaggccaggttcctagtgtgccaactactgctactattccagggatgttctcaaacatgtttccaatggtccctggtcagcaactaggtgcgcttcctgtactgccagttcaggcaatgactcaacaggcaactaggcatgctcggcgagtctatgttggtggccttccaccaactgctaatgaacagtcggtgtcaacgttctttagccaagtgatgtcggccattgggggaaacactgctgggccaggtgatgcggtggtcaatgtttatataaaccacgaaaagaagtttgcttttgtagagatgagatctgttgaggaggctagtaacgcaatggcattagacggcattatattagagggagttcctgtaaaggtgaggaggccaactgactataacccgtctcttgctgcaactcttggtccgagccagcctaatcccaacctcaacttaggggctgttggattgtcttcagggtctagtggtgggcttgagggtcccgaccgcatttttgtgggcggacttccctattacttcacagaggtacagatcagggagctcttggagtcttttgggcccctaagaggtttcaacttggtcaaagacagggagactggaaattcgaagggatatgcattctgtgtttaccaagatccgtcagtaacagatattgcatgtgccgctctaaacgggattaagatgggtgataagacacttacagttaggcgtgcaatccagggtgcaattcaacctaaacccgagcaagaagaagtcttactttatgcccaacaacagattgctttacagaggcttatgttccaaccaggaggtactcccaccaagattgtctgtttgactcaagtggttacagctgatgatcttagagacgatgaagaatatgcagagataatggaggacatgcgacaagaaggtggaaaattcggtaacttagtgaatgttgtgattccgaggcctaatccagatcatgacccaacaccaggagttgggaaggttttcttagagtatgcggatgtggatggctcatcaaaggccagatcggggatgaatggaagaaaatttggaggaaaccaagtagtggctgtgtattaccccgaagacaagtatgcccaaggcgactacgaagactgagctatctatcgtcttcttcttaagcttttagtttggatctcttagcaacaagtttggttcttttttatttttaagttttttacatgtttagttctctctctactaaatggagaaatttgtctagaatctgactgcaatagtacttgtccaggcacaatcaattaaggtgtgtgttggtaatagtagctt

SEQ ID NO: 9671 - protein, 368 aa, Arabidopsis thaliana
MFSNMFPMVPGQQLGALPVLPVQAMTQQATRHARRVYVGGLPPTANEQSVSTFFSQVMSAIGGNTAGPGDAVVNVYINHEKKFAFVEMRSVEEASNAMALDGIILEGVPVKVRRPTDYNPSLAATLGPSQPNPNLNLGAVGLSSGSSGGLEGPDRIFVGGLPYYFTEVQIRELLESFGPLRGFNLVKDRETGNSKGYAFCVYQDPSVTDIACAALNGIKMGDKTLTVRRAIQGAIQPKPEQEEVLLYAQQQIALQRLMFQPGGTPTKIVCLTQVVTADDLRDDEEYAEIMEDMRQEGGKFGNLVNVVIPRPNPDHDPTPGVGKVFLEYADVDGSSKARSGMNGRKFGGNQVVAVYYPEDKYAQGDYED

SEQ ID NO: 9672 - protein, 364 aa, Arabidopsis thaliana
MFPMVPGQQLGALPVLPVQAMTQQATRHARRVYVGGLPPTANEQSVSTFFSQVMSAIGGNTAGPGDAVVNVYINHEKKFAFVEMRSVEEASNAMALDGIILEGVPVKVRRPTDYNPSLAATLGPSQPNPNLNLGAVGLSSGSSGGLEGPDRIFVGGLPYYFTEVQIRELLESFGPLRGFNLVKDRETGNSKGYAFCVYQDPSVTDIACAALNGIKMGDKTLTVRRAIQGAIQPKPEQEEVLLYAQQQIALQRLMFQPGGTPTKIVCLTQVVTADDLRDDEEYAEIMEDMRQEGGKFGNLVNVVIPRPNPDHDPTPGVGKVFLEYADVDGSSKARSGMNGRKFGGNQVVAVYYPEDKYAQGDYED

SEQ ID NO: 9673 - protein, 361 aa, Arabidopsis thaliana
MVPGQQLGALPVLPVQAMTQQATRHARRVYVGGLPPTANEQSVSTFFSQVMSAIGGNTAGPGDAVVNVYINHEKKFAFVEMRSVEEASNAMALDGIILEGVPVKVRRPTDYNPSLAATLGPSQPNPNLNLGAVGLSSGSSGGLEGPDRIFVGGLPYYFTEVQIRELLESFGPLRGFNLVKDRETGNSKGYAFCVYQDPSVTDIACAALNGIKMGDKTLTVRRAIQGAIQPKPEQEEVLLYAQQQIALQRLMFQPGGTPTKIVCLTQVVTADDLRDDEEYAEIMEDMRQEGGKFGNLVNVVIPRPNPDHDPTPGVGKVFLEYADVDGSSKARSGMNGRKFGGNQVVAVYYPEDKYAQGDYED

SEQ ID NO: 9674 - DNA, 1340 bp, Arabidopsis thaliana
aaagaaggcatggaacattttataaacaagagagaacagaattcaatatagtgatcagagaagagagagcaaagggaaagggttaatcctcagcaatgggctctcacctttccaaacaactcgagcggcgaaaagccatctccacggagaagaaagccctcaccgatctcgagaaatcgtgcggctgcgagtttccggggtgtgattacatgccttccgatcgtaaaaactggatggccggcgttcgacctgaaaagcttcacatcaacaagatcgtctggcctgggacgcacgactctgccaccaacaaaatcggtatccgattcgtgtctcgtccctttgctaagtgccaatctctctccatctataaccagctcgtggcgggtactcgagtccttgacattcgtgtccaagaagatcgccgtgtatgccacggtatcctcaagacttatagtgtcgacgttgtcttggccgatctcaaacggtttctatccgaaacagagtcggagattgtcattcttgagatcagaacagagtttggacacgaagacccaccggagtttgataagtatcttgtggaacagcttggagagcatctgattcaccaggacgatcacgtgttctccaagacagtcgctgagctgcttcccaagagagtgatctgcgtttggaaaccgaggaaatcgcctcagcctaagcatggtgatcctctttggagcgctggttaccttaaagacaattggatcgatacagatcttccatcgaccaaattcgagagcaacatcaagcatttgagccagcagcaaccagctacttcaaggaaattcttttaccgggtggagaacacagtgacgccgcagcccgataacccaataatgtgtgtaaaaccggtgactaagaggatacattgctacgccaaggtattcatcatagagtgtgtaaaaagaggatgtgctgataaactgcagatattctcaactgatttcatagataaagaatttgttgatgcttgcgttgggctcacctttgcgagagctgaaggtaaggcttgaggaatgagcgtgtggaaacagactttgtgtatctattttgaaggaaaagaatcagaacatggttgatgtgttgttagggttgcttgtgtataagagaacatgtgagtgtgtatttgtatgtgtgtgtgatttacgagtgtatattccaattcattacaacttatttgaatcctgatacaattgcgagataaaaaaaaaaaaaaaaaaaaaaaaaaaaaaaaaaaaaaaaaaaaaaaaaaaaaaaaaagaaaaaaaaaaaaaaaaaagcttatcgataccgtcgacctc

SEQ ID NO: 9675 - protein, 318 aa, Arabidopsis thaliana
MGSHLSKQLERRKAISTEKKALTDLEKSCGCEFPGCDYMPSDRKNWMAGVRPEKLHINKIVWPGTHDSATNKIGIRFVSRPFAKCQSLSIYNQLVAGTRVLDIRVQEDRRVCHGILKTYSVDVVLADLKRFLSETESEIVILEIRTEFGHEDPPEFDKYLVEQLGEHLIHQDDHVFSKTVAELLPKRVICVWKPRKSPQPKHGDPLWSAGYLKDNWIDTDLPSTKFESNIKHLSQQQPATSRKFFYRVENTVTPQPDNPIMCVKPVTKRIHCYAKVFIIECVKRGCADKLQIFSTDFIDKEFVDACVGLTFARAEGKA

SEQ ID NO: 9676 - protein, 280 aa, Arabidopsis thaliana
MPSDRKNWMAGVRPEKLHINKIVWPGTHDSATNKIGIRFVSRPFAKCQSLSIYNQLVAGTRVLDIRVQEDRRVCHGILKTYSVDVVLADLKRFLSETESEIVILEIRTEFGHEDPPEFDKYLVEQLGEHLIHQDDHVFSKTVAELLPKRVICVWKPRKSPQPKHGDPLWSAGYLKDNWIDTDLPSTKFESNIKHLSQQQPATSRKFFYRVENTVTPQPDNPIMCVKPVTKRIHCYAKVFIIECVKRGCADKLQIFSTDFIDKEFVDACVGLTFARAEGKA

SEQ ID NO: 9677 - protein, 272 aa, Arabidopsis thaliana
MAGVRPEKLHINKIVWPGTHDSATNKIGIRFVSRPFAKCQSLSIYNQLVAGTRVLDIRVQEDRRVCHGILKTYSVDVVLADLKRFLSETESEIVILEIRTEFGHEDPPEFDKYLVEQLGEHLIHQDDHVFSKTVAELLPKRVICVWKPRKSPQPKHGDPLWSAGYLKDNWIDTDLPSTKFESNIKHLSQQQPATSRKFFYRVENTVTPQPDNPIMCVKPVTKRIHCYAKVFIIECVKRGCADKLQIFSTDFIDKEFVDACVGLTFARAEGKA

SEQ ID NO: 9678 - DNA, 724 bp, Arabidopsis thaliana
gaaaaacatctcactgctcactactctcactgtaatcccttagatcttcttttcaaatttcaatggcgtccggtgatgttgagtatcggtgcttcgttggaggtctagcatgggccactgatgacagagctcttgagactgccttcgctcaatacggcgacgttattgattccaagatcattaacgatcgtgagactggaagatcaaggggattcggattcgtcaccttcaaggatgagaaagccatgaaggatgcgattgagggaatgaacggacaagatctcgatggccgtagcatcactgttaacgaggctcagtcacgaggaagcggtggcggcggaggccaccgtggaggtggtggcggtggataccgcagcggcggtggtggaggttactccggtggaggtggtagctacggaggtggaagacgtgagggaggaggaggatacggtggtggtgaaggaggaggttacggaggaagcggtggtggaggatggtaattcctttaattaggtttgggattaccaatgaatgttctctctctcgcttgttatgcttctacttggttttgtgtgttctctattttgttctggttctgctttagatttgatgtaacagttcgtgattaggtattttggtatctggaaacgtaatgttaagtcacttgtcattctctaaataacaaatttcttcggagatattatctctgttgattgattctatc

SEQ ID NO: 9679 - protein, 145 aa, Arabidopsis thaliana
MASGDVEYRCFVGGLAWATDDRALETAFAQYGDVIDSKIINDRETGRSRGFGFVTFKDEKAMKDAIEGMNGQDLDGRSITVNEAQSRGSGGGGGHRGGGGGGYRSGGGGGYSGGGGSYGGGRREGGGGYGGGEGGGYGGSGGGGW

SEQ ID NO: 9680 - protein, 84 aa, Arabidopsis thaliana
MKDAIEGMNGQDLDGRSITVNEAQSRGSGGGGGHRGGGGGGYRSGGGGGYSGGGGSYGGGRREGGGGYGGGEGGGYGGSGGGGW

SEQ ID NO: 9681 - protein, 77 aa, Arabidopsis thaliana
MNGQDLDGRSITVNEAQSRGSGGGGGHRGGGGGGYRSGGGGGYSGGGGSYGGGRREGGGGYGGGEGGGYGGSGGGGW

SEQ ID NO: 9682 - DNA, 1826 bp, Arabidopsis thaliana
atttgctcactcccattctccagttgtggaaaccccccaaagacatggcatttgaaccttttgagtcatcatcagcgtattcattcacacgacgatttatagaatgtggtgtttgtcctgctttaaaccttccactaaacatgatccctctgaggatcgttttgaagaagaaacaaatatcgttacaggtatttctctgtatgaagatgtcatcttacgtcagagaagatcagaagctgatcagatagaatgggctattcaagatagcttcaacccgcaagaaacttctcgttgtcgtcagcgagaggaggatgatcagatagcgcgtggtttgcaatatgtggaagaaactgagcttgataaatcagttgtggacgaagaagatcagcagctttctaagattgttgaggagagtttgaaggagaaaggcaaaagtaagcaatttgaagatgatcaagtggaaaatgatgaacagcaagctctgatggttcaggagagtctatacatggtggagctttctgctcaacttgaagaagataaaaacatttcaacaatacctccgctgaatgaagatgcgcagcttcagaaggttatttgggaaagcgcgaagggtaaaggccaaatagagcatttcaaagatccagtggaagaagatggaaatcttccaagggtagatctcaacgttaaccatcctcatagcatatgtgatggttgcaaatctgcgattgaatatggaagatctgttcatgccttgggtgttaattggcatcctgaatgtttctgttgtcgttattgcgacaaaccaatcgctatgcacgagttttcaaacacaaaagggaggtgtcatataacctgctacgagcgtagtcacccaaactgccatgtctgcaaaaagaagtttcctggtagaaagtataaagaacatcccttctggaaggaaaagtactgcccttttcatgaagttgatggaactcccaagtgttgcagttgtgaaagattagagccctggggaacgaagtatgtaatgcttgctgacaatcggtggctatgcgtaaaatgtatggaatgcgcggttatggatacttatgagtgccaaccattgcactttgaaatccgtgaaatcttcggaagcttaaacatgaaggttgagaaagaattccctcttcttttggtggagaaagaagcgctgaaaaaagctgaggcgcaagaaaagatcgacaatcagcatggggttgtaaccagaggtatttgcctgtctgaagggcagattgtcaatagtgtctttaaaaagccaaccatggggccaaacggcgagctagtaagcttgggtacagaacctcaaaaggttgttggtggatgtgaggtcactgcaattctcatcctatatggacttcctaggttactaactggatatatcttggctcatgagatgatgcatgcttggcttagactcaatggttataggaatcttaagttagagctggaagaaggaatatgccaagtgctaggccacatgtggttggagtcacagacatactccagttctgcagctgcatcatcagcttcttcttcttcgaggactccagctgctaatgcatcaaagaaaggtgctcaatctgattacgagaagaaactggtggaattttgcaaggatcagatagaaacagacgattcaccggtctacggtgttggattcaggaaagttaaccagatggtctcaaactccagcctccataaaatcctgaaaagtattcaacactggacgaaaccagattcaaatctttgaagcacctaatataggacaaatcgaaacataccttatcgat

SEQ ID NO: 9683 - protein, 560 aa, Arabidopsis thaliana
MWCLSCFKPSTKHDPSEDRFEEETNIVTGISLYEDVILRQRRSEADQIEWAIQDSFNPQETSRCRQREEDDQIARGLQYVEETELDKSVVDEEDQQLSKIVEESLKEKGKSKQFEDDQVENDEQQALMVQESLYMVELSAQLEEDKNISTIPPLNEDAQLQKVIWESAKGKGQIEHFKDPVEEDGNLPRVDLNVNHPHSICDGCKSAIEYGRSVHALGVNWHPECFCCRYCDKPIAMHEFSNTKGRCHITCYERSHPNCHVCKKKFPGRKYKEHPFWKEKYCPFHEVDGTPKCCSCERLEPWGTKYVMLADNRWLCVKCMECAVMDTYECQPLHFEIREIFGSLNMKVEKEFPLLLVEKEALKKAEAQEKIDNQHGVVTRGICLSEGQIVNSVFKKPTMGPNGELVSLGTEPQKVVGGCEVTAILILYGLPRLLTGYILAHEMMHAWLRLNGYRNLKLELEEGICQVLGHMWLESQTYSSSAAASSASSSSRTPAANASKKGAQSDYEKKLVEFCKDQIETDDSPVYGVGFRKVNQMVSNSSLHKILKSIQHWTKPDSNL

SEQ ID NO: 9684 - protein, 433 aa, Arabidopsis thaliana
MVQESLYMVELSAQLEEDKNISTIPPLNEDAQLQKVIWESAKGKGQIEHFKDPVEEDGNLPRVDLNVNHPHSICDGCKSAIEYGRSVHALGVNWHPECFCCRYCDKPIAMHEFSNTKGRCHITCYERSHPNCHVCKKKFPGRKYKEHPFWKEKYCPFHEVDGTPKCCSCERLEPWGTKYVMLADNRWLCVKCMECAVMDTYECQPLHFEIREIFGSLNMKVEKEFPLLLVEKEALKKAEAQEKIDNQHGVVTRGICLSEGQIVNSVFKKPTMGPNGELVSLGTEPQKVVGGCEVTAILILYGLPRLLTGYILAHEMMHAWLRLNGYRNLKLELEEGICQVLGHMWLESQTYSSSAAASSASSSSRTPAANASKKGAQSDYEKKLVEFCKDQIETDDSPVYGVGFRKVNQMVSNSSLHKILKSIQHWTKPDSNL

SEQ ID NO: 9685 - protein, 426 aa, Arabidopsis thaliana
MVELSAQLEEDKNISTIPPLNEDAQLQKVIWESAKGKGQIEHFKDPVEEDGNLPRVDLNVNHPHSICDGCKSAIEYGRSVHALGVNWHPECFCCRYCDKPIAMHEFSNTKGRCHITCYERSHPNCHVCKKKFPGRKYKEHPFWKEKYCPFHEVDGTPKCCSCERLEPWGTKYVMLADNRWLCVKCMECAVMDTYECQPLHFEIREIFGSLNMKVEKEFPLLLVEKEALKKAEAQEKIDNQHGVVTRGICLSEGQIVNSVFKKPTMGPNGELVSLGTEPQKVVGGCEVTAILILYGLPRLLTGYILAHEMMHAWLRLNGYRNLKLELEEGICQVLGHMWLESQTYSSSAAASSASSSSRTPAANASKKGAQSDYEKKLVEFCKDQIETDDSPVYGVGFRKVNQMVSNSSLHKILKSIQHWTKPDSNL

SEQ ID NO: 9686 - DNA, 279 bp, Arabidopsis thaliana
agaacatcctaatcgaaaaatctttcttctctattgacttgagaagaaccacaacaatgcctcgcctacaattcctaacaatggcgacttcactaattctgctgcttcaagctctgagtttagtgagctcaactattctgtcccgggccgatcggatcacccgtttacccggtcaaccccgggtcgggtttcagcagtactcaggttatgtcactattgacgagaagaaacagagagctctgttttactacttggtatcgataccgtcgacctcgaggg

SEQ ID NO: 9687 - protein, 92 aa, Arabidopsis thaliana
NILIEKSFFSIDLRRTTTMPRLQFLTMATSLILLLQALSLVSSTILSRADRITRLPGQPRVGFQQYSGYVTIDEKKQRALFYYLVSIPSTSR

SEQ ID NO: 9688 - protein, 74 aa, Arabidopsis thaliana
MPRLQFLTMATSLILLLQALSLVSSTILSRADRITRLPGQPRVGFQQYSGYVTIDEKKQRALFYYLVSIPSTSR

SEQ ID NO: 9689 - protein, 66 aa, Arabidopsis thaliana
MATSLILLLQALSLVSSTILSRADRITRLPGQPRVGFQQYSGYVTIDEKKQRALFYYLVSIPSTSR

SEQ ID NO: 9690 - DNA, 795 bp, Arabidopsis thaliana
atcaagatcagaagacaatttttatttttcatcaagtttcttagatcatcagaaatggcgtctaattcttctaacgggacgacgacgacaaagccaccacctatgccgtctcctctgcgtaattccaagttttttcagtcgaatatgaggatcttggtgaccggaggagctggattcattggttcacatctcgttgataaattgatgcaaaacgaaaagaatgaagtaatcgttgcggataattacttcacaggatcaaaagacaatctcaagaaatggattggtcatccaagatttgagctaattcgtcatgatgtggctgaacctcttttcgtcgaggttgatcaaatctaccatttagcatgtcccgcttctccaattttctacaaatacaaccccgttaagacgataaaaacaaatgtgattggcacacttaacatgttaggactagctaagcgagttggagcaagaattttacttacttccacatctgaagtgtatggtgatcctttggttcaccctcaaaccgagagctattggggaaatgtaaacccgatcggtgttagaagctgttatgatgaaggaaaacgtgttgccgagactcttatgtttgattaccataggcaacatgggattgagatacgcatagcgaggatattcaacacatatggtcctcgtatgaacattgatgatggtcgcgttgtgagcaacttcattgctcaggctctcaggggagaagctctgactgttcagaaaccgggaacacaaacccgcagtttctgttatgtttcggac

SEQ ID NO: 9691 - protein, 265 aa, Arabidopsis thaliana
IKIRRQFLFFIKFLRSSEMASNSSNGTTTTKPPPMPSPLRNSKFFQSNMRILVTGGAGFIGSHLVDKLMQNEKNEVIVADNYFTGSKDNLKKWIGHPRFELIRHDVAEPLFVEVDQIYHLACPASPIFYKYNPVKTIKTNVIGTLNMLGLAKRVGARILLTSTSEVYGDPLVHPQTESYWGNVNPIGVRSCYDEGKRVAETLMFDYHRQHGIEIRIARIFNTYGPRMNIDDGRVVSNFIAQALRGEALTVQKPGTQTRSFCYVSD

SEQ ID NO: 9692 - protein, 247 aa, Arabidopsis thaliana
MASNSSNGTTTTKPPPMPSPLRNSKFFQSNMRILVTGGAGFIGSHLVDKLMQNEKNEVIVADNYFTGSKDNLKKWIGHPRFELIRHDVAEPLFVEVDQIYHLACPASPIFYKYNPVKTIKTNVIGTLNMLGLAKRVGARILLTSTSEVYGDPLVHPQTESYWGNVNPIGVRSCYDEGKRVAETLMFDYHRQHGIEIRIARIFNTYGPRMNIDDGRVVSNFIAQALRGEALTVQKPGTQTRSFCYVSD

SEQ ID NO: 9693 - protein, 231 aa, Arabidopsis thaliana
MPSPLRNSKFFQSNMRILVTGGAGFIGSHLVDKLMQNEKNEVIVADNYFTGSKDNLKKWIGHPRFELIRHDVAEPLFVEVDQIYHLACPASPIFYKYNPVKTIKTNVIGTLNMLGLAKRVGARILLTSTSEVYGDPLVHPQTESYWGNVNPIGVRSCYDEGKRVAETLMFDYHRQHGIEIRIARIFNTYGPRMNIDDGRVVSNFIAQALRGEALTVQKPGTQTRSFCYVSD

SEQ ID NO: 9694 - DNA, 1226 bp, Arabidopsis thaliana
aacactgttccgagagtgaggagtagaataccttattaccggtttaatcaaaccggttcagtttccaaatggataatctactctgcgaagaatcttggcccgcgagtcctttaaccccggagcctttaccaaacttccgtcaccgttctcacgacaatgacgtcgtgaagatgtatccagagatagacgcagcgacgatggaggaagccattgctatggacttagagaaagaattatgttttaacaatcatggagacaagtttgttgagtttttcgtctcaaagaagttaaccgattataggttccatgcgtttcaatggctaatccagactcggagtcggctaaatctttcatatgaaacggtattttccgccgctaattgttttgatcggttcgtctacatgacttgctgtgacgagtggacgaattggatggtggaactagttgcggtaacttcattatcgatcgcatcaaagttcaatgaagttaccactccattactcgaagaacttgaaatggaaggtttaactcatatgtttcacgttaatacagttgctcagatggaactcataattttgaaagctctcgaatggcgtgtgaacgcggttacgagttatactttttcgcaaacccttgtgtcgaagatcggtatggttggggatcatatgatcatgaatcgaattacaaatcatctgcttgatgatttatgcgatttaaaaatgcttcaatatccaccaagcgttgtggccactgctgctatatggattctcatggaagacaaggtgtgtcgagaaagtatcatgaatctttttgaacaaaatcacaaggaaaaaattgtgaaatgcgttgatgtgatgaaaaatcgagacattgatcatcagtcgtcgagaagaagatacagtgaagggaagagtattctgcgtctgttgcagagaggggatgtgatgaatatgaatggggattataacgttgaagatctttctaaaatctttcaaattttccgatacgaaaagaagaagagggatagaggtaaccaccaagacaacattcgtccggcaaaaagaatgacaattgaaatgtcaaattacatttagcattttatgaaagaagtctacaaagtgagaaatgtttgtttgttttttaattgtttttacacataccttgactcaattgtaatatatactacagaataatgtatgacagtaatatttatagtgtttaattgc

SEQ ID NO: 9695 - protein, 341 aa, Arabidopsis thaliana
MDNLLCEESWPASPLTPEPLPNFRHRSHDNDVVKMYPEIDAATMEEAIAMDLEKELCFNNHGDKFVEFFVSKKLTDYRFHAFQWLIQTRSRLNLSYETVFSAANCFDRFVYMTCCDEWTNWMVELVAVTSLSIASKFNEVTTPLLEELEMEGLTHMFHVNTVAQMELIILKALEWRVNAVTSYTFSQTLVSKIGMVGDHMIMNRITNHLLDDLCDLKMLQYPPSVVATAAIWILMEDKVCRESIMNLFEQNHKEKIVKCVDVMKNRDIDHQSSRRRYSEGKSILRLLQRGDVMNMNGDYNVEDLSKIFQIFRYEKKKRDRGNHQDNIRPAKRMTIEMSNYI

SEQ ID NO: 9696 - protein, 307 aa, Arabidopsis thaliana
MYPEIDAATMEEAIAMDLEKELCFNNHGDKFVEFFVSKKLTDYRFHAFQWLIQTRSRLNLSYETVFSAANCFDRFVYMTCCDEWTNWMVELVAVTSLSIASKFNEVTTPLLEELEMEGLTHMFHVNTVAQMELIILKALEWRVNAVTSYTFSQTLVSKIGMVGDHMIMNRITNHLLDDLCDLKMLQYPPSVVATAAIWILMEDKVCRESIMNLFEQNHKEKIVKCVDVMKNRDIDHQSSRRRYSEGKSILRLLQRGDVMNMNGDYNVEDLSKIFQIFRYEKKKRDRGNHQDNIRPAKRMTIEMSNYI

SEQ ID NO: 9697 - protein, 298 aa, Arabidopsis thaliana
MEEAIAMDLEKELCFNNHGDKFVEFFVSKKLTDYRFHAFQWLIQTRSRLNLSYETVFSAANCFDRFVYMTCCDEWTNWMVELVAVTSLSIASKFNEVTTPLLEELEMEGLTHMFHVNTVAQMELIILKALEWRVNAVTSYTFSQTLVSKIGMVGDHMIMNRITNHLLDDLCDLKMLQYPPSVVATAAIWILMEDKVCRESIMNLFEQNHKEKIVKCVDVMKNRDIDHQSSRRRYSEGKSILRLLQRGDVMNMNGDYNVEDLSKIFQIFRYEKKKRDRGNHQDNIRPAKRMTIEMSNYI

SEQ ID NO: 9698 - DNA, 1117 bp, Arabidopsis thaliana
atgttcatcaacagcatttgatctcaagctcataggaatttgatctccacattatatcttgatcatcaccacaagaaaaacatttcaacttcttttatcagcaatcacaaatcaaacagatgggaagagctccatgctgtgagaagatggggttgaagagaggaccatggacacctgaagaagatcaaatcttggtctcttttatcctcaaccatggacatagtaactggcgagccctccctaagcaagctggtcttttgagatgtggaaaaagctgtagacttaggtggatgaactatttaaagcctgatattaaacgtggcaatttcaccaaagaagaggaagatgctatcatcagcttacaccaaatacttggcaatagatggtcagcgattgcagcaaaactgcctggaagaaccgataacgagatcaagaacgtatggcacactcacttgaagaagagactcgaagattatcaaccagctaaacctaagaccagcaacaaaaagaagggtactaaaccaaaatctgaatccgtaataacgagctcgaacagtactagaagcgaatcggagctagcagattcatcaaacccttctggagaaagcttattttcgacatcgccttcgacaagtgaggtttcttcgatgacactcataagccacgacggctatagcaacgagattaatatggataacaaaccgggagatatcagtactatcgatcaagaatgtgtttctttcgaaacttttggtgcggatatcgatgaaagcttctggaaagagacactgtatagccaagatgaacacaactacgtatcgaatgacctagaagtggctggtttagttgagatacaacaagagtttcaaaacttgggctccgctaataatgagatgatttttgacagtgagatggacttctggttcgatgtattggctagaaccggcggggaacaagatctcttagccgggctctagttaacatgtttgaggagtaaagtgaaatggtgcaaattagttaaggctaagaaattcaaaagcttttgtttaccgagaaaaaaacacactctaactcttgatgtgatgtagttagtgtattaattagaggctgcgttttc

SEQ ID NO: 9699 - protein, 285 aa, Arabidopsis thaliana
MGRAPCCEKMGLKRGPWTPEEDQILVSFILNHGHSNWRALPKQAGLLRCGKSCRLRWMNYLKPDIKRGNFTKEEEDAIISLHQILGNRWSAIAAKLPGRTDNEIKNVWHTHLKKRLEDYQPAKPKTSNKKKGTKPKSESVITSSNSTRSESELADSSNPSGESLFSTSPSTSEVSSMTLISHDGYSNEINMDNKPGDISTIDQECVSFETFGADIDESFWKETLYSQDEHNYVSNDLEVAGLVEIQQEFQNLGSANNEMIFDSEMDFWFDVLARTGGEQDLLAGL

SEQ ID NO: 9700 - protein, 276 aa, Arabidopsis thaliana
MGLKRGPWTPEEDQILVSFILNHGHSNWRALPKQAGLLRCGKSCRLRWMNYLKPDIKRGNFTKEEEDAIISLHQILGNRWSAIAAKLPGRTDNEIKNVWHTHLKKRLEDYQPAKPKTSNKKKGTKPKSESVITSSNSTRSESELADSSNPSGESLFSTSPSTSEVSSMTLISHDGYSNEINMDNKPGDISTIDQECVSFETFGADIDESFWKETLYSQDEHNYVSNDLEVAGLVEIQQEFQNLGSANNEMIFDSEMDFWFDVLARTGGEQDLLAGL

SEQ ID NO: 9701 - protein, 228 aa, Arabidopsis thaliana
MNYLKPDIKRGNFTKEEEDAIISLHQILGNRWSAIAAKLPGRTDNEIKNVWHTHLKKRLEDYQPAKPKTSNKKKGTKPKSESVITSSNSTRSESELADSSNPSGESLFSTSPSTSEVSSMTLISHDGYSNEINMDNKPGDISTIDQECVSFETFGADIDESFWKETLYSQDEHNYVSNDLEVAGLVEIQQEFQNLGSANNEMIFDSEMDFWFDVLARTGGEQDLLAGL

SEQ ID NO: 9702 - DNA, 234 bp, Arabidopsis thaliana
aatttattggattgacgaactttgaagaagaagaagagagatgccgaagagaacgacacacacgtactcgagcgaggacgccgcgccggatggacccgactctgatctcttcgtatactactgcaaacactgtggttctcatgtccttatcactgatacccagttgcagaagatgccaaaaaggaagaccgacaggtcgaatgtacttgacaagatatcgataccgtcgacctc

SEQ ID NO: 9703 - protein, 77 aa, Arabidopsis thaliana
FIGLTNFEEEEERCRRERHTRTRARTPRRMDPTLISSYTTANTVVLMSLSLIPSCRRCQKGRPTGRMYLTRYRYRRP

SEQ ID NO: 9704 - protein, 64 aa, Arabidopsis thaliana
MPKRTTHTYSSEDAAPDGPDSDLFVYYCKHCGSHVLITDTQLQKMPKRKTDRSNVLDKISIPST

SEQ ID NO: 9705 - protein, 48 aa, Arabidopsis thaliana
MDPTLISSYTTANTVVLMSLSLIPSCRRCQKGRPTGRMYLTRYRYRRP

SEQ ID NO: 9706 - DNA, 1108 bp, Arabidopsis thaliana
attcttcgtcgtcctcctttgaaattcacaccaatttgtctctcttcctagagaagcaaaagattattcgaaactcgggaaagtatcacccggtcaccggaaaattgattatttccgatgccaataggtgaccgtcagaatccgagtgtggagaagaagaagaacctcttcaggctatgtccgttttggcagaggagcagcaccacttcttcatcttcaacacagaatccaagccaaaactaccgtagccgccatggacatcggaatacagatatttccgccgtctctaagccttccttgactatgtcttccgtcgccagatcacttcttccagctcgccgtcgtctccgactagatccttccagttatctctatttcccttatgaacctggtaaacaagttcgcagcgcaataaagcttaagaacactagcaaatctcatactgcatttaagttccaaacaacggcacctaagagttgttatatgcgtcctcccggaggtgttttggctccaggagagagtgttttcgctactgtgttcaagtttgtggaacatccagagaacaatgaaaagcagccgttgaaccagaagagcaaggttaagtttaagattatgagcctgaaagttaaaccaggagtagagtatgtgcctgagttgtttgatgagcaaaaggatcaagtagcagtggagcaggttcttcgggtcatttttattgatgcggaccgcccaagtgctgcattggagaaactgaaacgtcaattggatgaagctgaagctgcagttgaagcaagaaagaagcctcccccagagacagggcctcgagttgtcggggagggtcttgtcatagacgaatggaaggagagaagagagaagtaccttgctcggcaacaagtcgaatctgtagattctttgtcctaaacgcagagagcaatgtggatttgttatacgcttatagcagaggtaaaagaagctccttcttcttattcttcatcttctgcagatcatgtacataatttattatccctcggttatgtatttatctctagacgattactttgtggttcttgtatgtctctgtttgttgtgttattcatgccgggtttttctc

SEQ ID NO: 9707 - protein, 266 aa, Arabidopsis thaliana
MPIGDRQNPSVEKKKNLFRLCPFWQRSSTTSSSSTQNPSQNYRSRHGHRNTDISAVSKPSLTMSSVARSLLPARRRLRLDPSSYLYFPYEPGKQVRSAIKLKNTSKSHTAFKFQTTAPKSCYMRPPGGVLAPGESVFATVFKFVEHPENNEKQPLNQKSKVKFKIMSLKVKPGVEYVPELFDEQKDQVAVEQVLRVIFIDADRPSAALEKLKRQLDEAEAAVEARKKPPPETGPRVVGEGLVIDEWKERREKYLARQQVESVDSLS

SEQ ID NO: 9708 - protein, 204 aa, Arabidopsis thaliana
MSSVARSLLPARRRLRLDPSSYLYFPYEPGKQVRSAIKLKNTSKSHTAFKFQTTAPKSCYMRPPGGVLAPGESVFATVFKFVEHPENNEKQPLNQKSKVKFKIMSLKVKPGVEYVPELFDEQKDQVAVEQVLRVIFIDADRPSAALEKLKRQLDEAEAAVEARKKPPPETGPRVVGEGLVIDEWKERREKYLARQQVESVDSLS

SEQ ID NO: 9709 - protein, 144 aa, Arabidopsis thaliana
MRPPGGVLAPGESVFATVFKFVEHPENNEKQPLNQKSKVKFKIMSLKVKPGVEYVPELFDEQKDQVAVEQVLRVIFIDADRPSAALEKLKRQLDEAEAAVEARKKPPPETGPRVVGEGLVIDEWKERREKYLARQQVESVDSLS

SEQ ID NO: 9710 - DNA, 1498 bp, Arabidopsis thaliana
aactaaaaataaatgtttggaaacgttaggcaattttattatattctatcgttgttctctataaatgaagtctcgaccacacacttggtagctacacacgagaaagaaaaagctcacaactttaacctttctggagagagaagaacaaaagagggagagggagagaaatggaaggcaaagaagaagatgtacgagtgggagctaacaagttcccggagaggcaacccatcggtacatcggctcagtccaccgacaaggactacaaagagccacctcctgcgccactgttcgagcccggcgagctcagctcatggtctttctacagagccggaatagctgagtttatcgctactttcttgtttctctacatcactgttttgactgtaatgggagttaagagagcaccaaacatgtgtgcttctgttggaatccaaggtatcgcttgggcttttggtggcatgatctttgctcttgtctactgtactgctggaatttcaggtggacacatcaaccctgctgtaacattcggtctgttcttggctcggaagttatctctgaccagagcagtgttctacatgattatgcaatgtcttggagccatctgtggtgccggagtcgtcaaaggtttccagccaacgccgtaccagactctcggtggtggtgctaacaccgttgctcatggctacaccaaaggttctggccttggtgctgaaatcatcggaacattcgttctcgtctacactgtcttctccgccaccgacgccaagagaagcgcccgtgactcacacgtcccgattttggcgccgctcccaatcggatttgcagtgttcttggtacacttggcaacaataccgatcaccgggaccggaatcaacccagctagaagtcttggagccgcaattatctacaacaaggaccactcttgggatgaccattggattttctgggttggaccattcattggagcagctctagcagcactatatcaccagattgtcatcagagcgattcctttcaagagcaagagttagagacacacagaaagattccacggtccagaatttgttctttagtagtttctttgcttatctatctaatgtagcttgtgttttgcaatgtaatgagcctttcaagaatatgtatttgggatttctaatcagcttttgtctatgtaaaaactatgtgtttcttttttcttcctatactcgtctcagatgctttatggcaaagggtctctgaagtctaaggtgattagtgctccggttattgatgttttgaatagtttgttcgacgaatataaaataaacatagtcaaccctcattctgtatcaacatcaagttctcgggttggttttgagagacatgattatgaagatgatcatgacttcgtgaatgtgggggttgaaggattggcctctgtttatgacaagatggtgaatgaagagcttgactattgtgtacttgcaagaaagtgttgaaaacacaagggccaatacat

SEQ ID NO: 9711 - protein, 287 aa, Arabidopsis thaliana; identical to SEQ ID NO: 9179

SEQ ID NO: 9712 - protein, 214 aa, Arabidopsis thaliana; identical to SEQ ID NO: 9180

SEQ ID NO: 9713 - protein, 206 aa, Arabidopsis thaliana; identical to SEQ ID NO: 9181

SEQ ID NO: 9714 - DNA, 763 bp, Arabidopsis thaliana
atagacagacacacccaaaccctagatctaaccccagccgtcagatcagattgatcgggcaatcgcttctagaccgttggaatcaagcaatggtagagcagcggtacgaggatggctctcgtctcgtcgccgggtgtattccgtttaggtatgtaaattctgacaaagatggtaattctgaatctgggaaagtgattcaagtgttgatgatcagctcgtctagtggaccgggacttttgtttcccaagggaggatgggagaatgatgagacagtcagggaggctgcagcgagggaagcagtggaagaagcaggagtccgtgggattcttatggattttttggggaattatgagttcaagagcaaatcacaccaagatgagtttagcccagaaggtttatgtaaagcggcaatgtacgcgttgtatgtgaaagaagagctagcgacgtggccggaacatgagacgagaacacggaaatggctgacaattgaagaagcggtagagagttgcagtcacccttggatgaaggacgcattggtggaaggattctgtaaatggcataaggagaagatggttaaaggagaggagataactggtgaacattgaagcaaatgtgcataaacctctgagcgttggtttcattcctttcgattttgtttttacctttttgtttttgtttttgaagtcttatgcatggataatctcttgtgactgcgaaacgtaatagtttcgaagatttaaagttcaattattgccctattttc

SEQ ID NO: 9715 - protein, 200 aa, Arabidopsis thaliana
RQTHPNPRSNPSRQIRLIGQSLLDRWNQAMVEQRYEDGSRLVAGCIPFRYVNSDKDGNSESGKVIQVLMISSSSGPGLLFPKGGWENDETVREAAAREAVEEAGVRGILMDFLGNYEFKSKSHQDEFSPEGLCKAAMYALYVKEELATWPEHETRTRKWLTIEEAVESCSHPWMKDALVEGFCKWHKEKMVKGEEITGEH

SEQ ID NO: 9716 - protein, 171 aa, Arabidopsis thaliana
MVEQRYEDGSRLVAGCIPFRYVNSDKDGNSESGKVIQVLMISSSSGPGLLFPKGGWENDETVREAAAREAVEEAGVRGILMDFLGNYEFKSKSHQDEFSPEGLCKAAMYALYVKEELATWPEHETRTRKWLTIEEAVESCSHPWMKDALVEGFCKWHKEKMVKGEEITGEH

SEQ ID NO: 9717 - protein, 132 aa, Arabidopsis thaliana
MISSSSGPGLLFPKGGWENDETVREAAAREAVEEAGVRGILMDFLGNYEFKSKSHQDEFSPEGLCKAAMYALYVKEELATWPEHETRTRKWLTIEEAVESCSHPWMKDALVEGFCKWHKEKMVKGEEITGEH

SEQ ID NO: 9718 - DNA, 931 bp, Arabidopsis thaliana
atcctaatcgaaaaaaccagatataacagaattaacctacacaactgaaactcgagttaagaaccggaaacagaatccaattcaaccaaaccgaatcgaaccgaaccggagtttttatccaatggtgaagcaagcgatgaaggaagaggagaagaagagaaacacggcgatgcagtcaaagtacaaaggagtgaggaagaggaaatggggaaaatgggtatcggagatcagactttcacacagcagagaacgaatttggttaggctcttacgacactcccgagaaggcgccgcgtgctttcgacgccgctcaattttgtctccgcggcggcgatgctaatttcaatttccctaataatccaccgtcgatctccgtagaaaagtcgttgacgcctccggagattcaggaagctgctgctagattcgctaacacattccaagacattgtcaagggagaagaagaatcgggtttagtacccggatccgagatccgaccagagtctccttctacatctgcatctgttgctacatcgacggtggattatgatttttcgtttttggatttgcttccgatgaatttcgggtttgattccttctccgacgacttctctggcttctccggtggtgatcgatttacagagattttacccatcgaagattacggaggagagagtttattagatgaatctttgattctttgggatttttgaattcccaaacataatatttttttagagcgaactgtgagattttccttggagtcatggagaaatctggagattttttgtaacacggagctccaatgacccgggaatttctttcgtttcggatccgaatttgatgtggatcatattcacacctatattttttcatttttttgttgtaaagaaaaatcggataagattctagtaataaatgttaaaagtccattt

SEQ ID NO: 9719 - protein, 195 aa, Arabidopsis thaliana
MVKQAMKEEEKKRNTAMQSKYKGVRKRKWGKWVSEIRLSHSRERIWLGSYDTPEKAPRAFDAAQFCLRGGDANFNFPNNPPSISVEKSLTPPEIQEAAARFANTFQDIVKGEEESGLVPGSEIRPESPSTSASVATSTVDYDFSFLDLLPMNFGFDSFSDDFSGFSGGDRFTEILPIEDYGGESLLDESLILWDF

SEQ ID NO: 9720 - protein, 190 aa, Arabidopsis thaliana
MKEEEKKRNTAMQSKYKGVRKRKWGKWVSEIRLSHSRERIWLGSYDTPEKAPRAFDAAQFCLRGGDANFNFPNNPPSISVEKSLTPPEIQEAAARFANTFQDIVKGEEESGLVPGSEIRPESPSTSASVATSTVDYDFSFLDLLPMNFGFDSFSDDFSGFSGGDRFTEILPIEDYGGESLLDESLILWDF

SEQ ID NO: 9721 - protein, 179 aa, Arabidopsis thaliana
MQSKYKGVRKRKWGKWVSEIRLSHSRERIWLGSYDTPEKAPRAFDAAQFCLRGGDANFNFPNNPPSISVEKSLTPPEIQEAAARFANTFQDIVKGEEESGLVPGSEIRPESPSTSASVATSTVDYDFSFLDLLPMNFGFDSFSDDFSGFSGGDRFTEILPIEDYGGESLLDESLILWDF

SEQ ID NO: 9722 - DNA, 2256 bp, Arabidopsis thaliana
gaccaaatacaaaccctagccgccttattcgtcttcttcgttctctagttttttcctcagtctctgttcttagatcccttgtagtttccaaatcttccgataaaaatgtcgggtaaaggagaaggaccagctatcggtatcgatcttggtaccacttactcttgcgtcggagtatggcaacacgaccgtgttgagatcattgctaatgatcaaggaaacagaaccacgccatcttacgttgctttcaccgactccgagaggttgatcggtgacgcagctaagaatcaggtcgccatgaaccccgttaacaccgttttcgacgctaagaggttgatcggtcgtcgtttctctgacagctctgttcagagtgacatgaaattgtggccattcaagattcaagccggacctgccgataagccaatgatctacgtcgaatacaagggtgaagagaaagagttcgcagctgaggagatttcttccatggttcttattaagatgcgtgagattgctgaggcttaccttggtgtcacaatcaagaacgccgttgttaccgttccagcttacttcaacgactctcagcgtcaggctacaaaggatgctggtgtcatcgctggtttgaacgttatgcgaatcatcaacgagcctacagccgccgctattgcctacggtcttgacaaaaaggctaccagcgttggagagaagaatgttcttatcttcgatcttggtggtggcacttttgatgtctctcttcttaccattgaagagggtatctttgaggtgaaggcaactgctggtgacacccatcttggtggggaagattttgacaacagaatggttaaccactttgtccaagagttcaagaggaagagtaagaaggatatcaccggtaacccaagagctcttaggaggttgagaacttcctgtgagagagcgaagaggactctttcttccactgctcagaccaccatcgagattgactctctatacgagggtatcgacttctactccaccatcacccgtgctagatttgaggagctcaacatggatctcttcaggaagtgtatggagccagttgagaagtgtcttcgtgatgctaagatggacaagagcactgttcatgatgttgtccttgttggtggttctacccgtatccctaaggttcagcaattgctccaggacttcttcaacggcaaagagctttgcaagtctattaaccctgatgaggctgttgcctacggtgctgctgtccagggagctattctcagcggtgaaggaaacgagaaggttcaagatcttctattgctcgatgtcactcctctctcccttggtttggaaactgccggtggtgtcatgaccactttgatcccaaggaacacaaccatcccaaccaagaaggaacaagtcttctccacctactcagacaaccaacccggtgtgttgatccaggtgtacgaaggagagagagccagaaccaaggacaacaaccttcttggtaaatttgagctctccggaattcctccagctcctcgtggtgtcccccagatcacagtctgctttgacattgatgccaatggtatcctcaatgtctctgctgaggacaagaccaccggacagaagaacaagatcaccatcaccaatgacaagggtcgtctctccaaggatgagattgagaagatggttcaagaggctgagaagtacaagtccgaagacgaggagcacaagaagaaggttgaagccaagaacgctctcgagaactacgcttacaacatgaggaacaccatccaagacgagaagattggtgagaagctcccggctgcagacaagaagaagatcgaggattctattgagcaggcgattcaatggctcgagggtaaccagttggctgaggctgatgagttcgaagacaagatgaaggaattggagagcatctgcaacccaatcattgccaagatgtaccaaggagctggtggtgaagccggtggtccaggtgcctctggtatggacgatgatgctccccctgcttcaggcggtgctggacctaagatcgaggaggtcgactaatttgttggacaatgacctctctctttctcctatctctatctcttttacttgcttttttttgatctgttaagactttttatgttgggcttttttaaagaagcccattttgtggtgttttttggttagtacttttttgaacaatggttggttctataccagtttagctacgatgacggataaaattaaaagtttgcc

SEQ ID NO: 9723 - protein, 651 aa, Arabidopsis thaliana
MSGKGEGPAIGIDLGTTYSCVGVWQHDRVEIIANDQGNRTTPSYVAFTDSERLIGDAAKNQVAMNPVNTVFDAKRLIGRRFSDSSVQSDMKLWPFKIQAGPADKPMIYVEYKGEEKEFAAEEISSMVLIKMREIAEAYLGVTIKNAVVTVPAYFNDSQRQATKDAGVIAGLNVMRIINEPTAAAIAYGLDKKATSVGEKNVLIFDLGGGTFDVSLLTIEEGIFEVKATAGDTHLGGEDFDNRMVNHFVQEFKRKSKKDITGNPRALRRLRTSCERAKRTLSSTAQTTIEIDSLYEGIDFYSTITRARFEELNMDLFRKCMEPVEKCLRDAKMDKSTVHDVVLVGGSTRIPKVQQLLQDFFNGKELCKSINPDEAVAYGAAVQGAILSGEGNEKVQDLLLLDVTPLSLGLETAGGVMTTLIPRNTTIPTKKEQVFSTYSDNQPGVLIQVYEGERARTKDNNLLGKFELSGIPPAPRGVPQITVCFDIDANGILNVSAEDKTTGQKNKITITNDKGRLSKDEIEKMVQEAEKYKSEDEEHKKKVEAKNALENYAYNMRNTIQDEKIGEKLPAADKKKIEDSIEQAIQWLEGNQLAEADEFEDKMKELESICNPIIAKMYQGAGGEAGGPGASGMDDDAPPASGGAGPKIEEVD

SEQ ID NO: 9724 - protein, 588 aa, Arabidopsis thaliana
MNPVNTVFDAKRLIGRRFSDSSVQSDMKLWPFKIQAGPADKPMIYVEYKGEEKEFAAEEISSMVLIKMREIAEAYLGVTIKNAVVTVPAYFNDSQRQATKDAGVIAGLNVMRIINEPTAAAIAYGLDKKATSVGEKNVLIFDLGGGTFDVSLLTIEEGIFEVKATAGDTHLGGEDFDNRMVNHFVQEFKRKSKKDITGNPRALRRLRTSCERAKRTLSSTAQTTIEIDSLYEGIDFYSTITRARFEELNMDLFRKCMEPVEKCLRDAKMDKSTVHDVVLVGGSTRIPKVQQLLQDFFNGKELCKSINPDEAVAYGAAVQGAILSGEGNEKVQDLLLLDVTPLSLGLETAGGVMTTLIPRNTTIPTKKEQVFSTYSDNQPGVLIQVYEGERARTKDNNLLGKFELSGIPPAPRGVPQITVCFDIDANGILNVSAEDKTTGQKNKITITNDKGRLSKDEIEKMVQEAEKYKSEDEEHKKKVEAKNALENYAYNMRNTIQDEKIGEKLPAADKKKIEDSIEQAIQWLEGNQLAEADEFEDKMKELESICNPIIAKMYQGAGGEAGGPGASGMDDDAPPASGGAGPKIEEVD

SEQ ID NO: 9725 - protein, 562 aa, Arabidopsis thaliana
MKLWPFKIQAGPADKPMIYVEYKGEEKEFAAEEISSMVLIKMREIAEAYLGVTIKNAVVTVPAYFNDSQRQATKDAGVIAGLNVMRIINEPTAAAIAYGLDKKATSVGEKNVLIFDLGGGTFDVSLLTIEEGIFEVKATAGDTHLGGEDFDNRMVNHFVQEFKRKSKKDITGNPRALRRLRTSCERAKRTLSSTAQTTIEIDSLYEGIDFYSTITRARFEELNMDLFRKCMEPVEKCLRDAKMDKSTVHDVVLVGGSTRIPKVQQLLQDFFNGKELCKSINPDEAVAYGAAVQGAILSGEGNEKVQDLLLLDVTPLSLGLETAGGVMTTLIPRNTTIPTKKEQVFSTYSDNQPGVLIQVYEGERARTKDNNLLGKFELSGIPPAPRGVPQITVCFDIDANGILNVSAEDKTTGQKNKITITNDKGRLSKDEIEKMVQEAEKYKSEDEEHKKKVEAKNALENYAYNMRNTIQDEKIGEKLPAADKKKIEDSIEQAIQWLEGNQLAEADEFEDKMKELESICNPIIAKMYQGAGGEAGGPGASGMDDDAPPASGGAGPKIEEVD

SEQ ID NO: 9726 - DNA, 2471 bp, Arabidopsis thaliana
aattttatccctctttactcttcttgataatcggaggaaactaaaaaaggaaaaaaaaatctaaataagaataaaattcctaaaaaataaataaatcaaaaattgtgaagaaacaaatcctcgagtcatgttgtttacagaaaatctctttctcacttaaaacccttacagaaacaaatcatcgaatctttgtttttttagaatcagtgattttgtttcctttcacgagacgaaaataacaaatcgtcttgtaaaaagtaaactcataatcatggcggcagcggttgccacaggtgttgcaccggcgacaatggttgatcaagttcccagtccgacggcgcagacttcggttcaggttccggtttcaatacctcttccatccccggtagtggtagccgatcaaacccacccgaactcgtcgctctatgccggtgatctggacccgaaagtgactgaagcgcatctatttgatttgttcaagcatgttgctaatgtcgtctcggtaagagtttgccgtgatcagaatcgtcgatctttgggatatgcctacatcaatttcagtaaccctagcgatgcttaccgtgcaatggaggccttgaactacactcccctctttgataggcccattcggatcatgctctcgaaccgtgacccgagcacgcgactgagcggtaaaggaaacattttcatcaaaaaccttgacgcttcaatcgacaacaaggccttgttcgagacgttttcaagttttggaaccatcctctcatgcaaagttgcaatggacgtgactggccggtccaaggggtatggatttgtccagttcgagaaggaggaatcggctcaagccgcaattgacaagctaaacggaatgttaatgaacgacaagcaagtctttgtgggacacttcatcagacgtcaagagcgtgctcgtgatgaaaacacccctacaccgcgtttcactaacgtgtacgtcaagaatctccccaaggagattggtgaggacgagctacgaaaaacgtttggtaaatttggagtgatatcgagtgcagttgtaatgagggaccagagcggaaactcgaggtgtttcgggtttgtgaattttgagtgtactgaagcagcggcttccgcggttgagaagatgaatggaattagcttaggggatgatgtgttgtacgttgggagggcgcaaaagaagtctgagagagaggatgagctaagaaggaagtttgagcaagagaggataaaccggtttgagaaatctcaaggagcgaacctgtatttgaagaatcttgatgatagtgttgatgatgagaaactcaaggagatgttctctgagtatggaaatgtgacatcctccaaggttatgcttaatccacaaggaatgagcagaggatttggttttgttgcttattccaatcctgaagaagctttaagagccctgagtgaaatgaatgggaagatgatcggaagaaaacctctatacatagctcttgcgcagcgcaaagaagatagacgagcacacttacaggcgttgttttcacagattagagcaccagggccaatgtcagggttccatcacccgccaggtggaccaatgcccggtccacctcaacacatgtacgtaggccaaaacggagcaagtatggtcccgtcccagcccattggatatggattccagcctcagttcatgcccgggatgcgtccaggttctggcccgggcaacttcatcgtgccttatccgcttcaaagacaacctcagaccggtcctcgtatgggattcaggcgtggtgctactaacatgcaacaacacatccaacaacaacaacttatgcaccgtaacccgtccccgggaatgagatatatgaacggtgcgagtaacgggaggaacggaatggattcgagtgttcctcaaggaatcttacctcctatcattcctttgccaatagatgcttcttcgatctctcaccagaaagctcctctccttccaatctctaagctcacttcttccttagcttctgctagtccagctgatcgcactcggatgcttggagaacaactttacccacttgtggaaaggcacgaaccacttcacgtggctaaagtcacaggaatgttgttggagatggatcaagctgagatcttgcacctgatggagtcaccagaggcactcaagtctaaagtatccgaggctttggatgttctcaggctatctgttgatccaactgatcatgatcttggtttctctaccaccgactgaaattcgcaatgcgtttgctcaactctgttttcttcttttagttttgatatcgactccttttcttttctttttttttggttttagtcttcctttactattttagcagttttttttctttacttagtttatggtttttgtgtctttaacttagtttatggtgtttttctttttgttttggacaatgatgatttcttaataatctgagtagacttcttct

SEQ ID NO: 9727 - protein, 660 aa, Arabidopsis thaliana
MAAAVATGVAPATMVDQVPSPTAQTSVQVPVSIPLPSPVVVADQTHPNSSLYAGDLDPKVTEAHLFDLFKHVANVVSVRVCRDQNRRSLGYAYINFSNPSDAYRAMEALNYTPLFDRPIRIMLSNRDPSTRLSGKGNIFIKNLDASIDNKALFETFSSFGTILSCKVAMDVTGRSKGYGFVQFEKEESAQAAIDKLNGMLMNDKQVFVGHFIRRQERARDENTPTPRFTNVYVKNLPKEIGEDELRKTFGKFGVISSAVVMRDQSGNSRCFGFVNFECTEAAASAVEKMNGISLGDDVLYVGRAQKKSEREDELRRKFEQERINRFEKSQGANLYLKNLDDSVDDEKLKEMFSEYGNVTSSKVMLNPQGMSRGFGFVAYSNPEEALRALSEMNGKMIGRKPLYIALAQRKEDRRAHLQALFSQIRAPGPMSGFHHPPGGPMPGPPQHMYVGQNGASMVPSQPIGYGFQPQFMPGMRPGSGPGNFIVPYPLQRQPQTGPRMGFRRGATNMQQHIQQQQLMHRNPSPGMRYMNGASNGRNGMDSSVPQGILPPIIPLPIDASSISHQKAPLLPISKLTSSLASASPADRTRMLGEQLYPLVERHEPLHVAKVTGMLLEMDQAEILHLMESPEALKSKVSEALDVLRLSVDPTDHDLGFSTTD

SEQ ID NO: 9728 - protein, 647 aa, Arabidopsis thaliana
MVDQVPSPTAQTSVQVPVSIPLPSPVVVADQTHPNSSLYAGDLDPKVTEAHLFDLFKHVANVVSVRVCRDQNRRSLGYAYINFSNPSDAYRAMEALNYTPLFDRPIRIMLSNRDPSTRLSGKGNIFIKNLDASIDNKALFETFSSFGTILSCKVAMDVTGRSKGYGFVQFEKEESAQAAIDKLNGMLMNDKQVFVGHFIRRQERARDENTPTPRFTNVYVKNLPKEIGEDELRKTFGKFGVISSAVVMRDQSGNSRCFGFVNFECTEAAASAVEKMNGISLGDDVLYVGRAQKKSEREDELRRKFEQERINRFEKSQGANLYLKNLDDSVDDEKLKEMFSEYGNVTSSKVMLNPQGMSRGFGFVAYSNPEEALRALSEMNGKMIGRKPLYIALAQRKEDRRAHLQALFSQIRAPGPMSGFHHPPGGPMPGPPQHMYVGQNGASMVPSQPIGYGFQPQFMPGMRPGSGPGNFIVPYPLQRQPQTGPRMGFRRGATNMQQHIQQQQLMHRNPSPGMRYMNGASNGRNGMDSSVPQGILPPIIPLPIDASSISHQKAPLLPISKLTSSLASASPADRTRMLGEQLYPLVERHEPLHVAKVTGMLLEMDQAEILHLMESPEALKSKVSEALDVLRLSVDPTDHDLGFSTTD

SEQ ID NO: 9729 - protein, 555 aa, Arabidopsis thaliana
MEALNYTPLFDRPIRIMLSNRDPSTRLSGKGNIFIKNLDASIDNKALFETFSSFGTILSCKVAMDVTGRSKGYGFVQFEKEESAQAAIDKLNGMLMNDKQVFVGHFIRRQERARDENTPTPRFTNVYVKNLPKEIGEDELRKTFGKFGVISSAVVMRDQSGNSRCFGFVNFECTEAAASAVEKMNGISLGDDVLYVGRAQKKSEREDELRRKFEQERINRFEKSQGANLYLKNLDDSVDDEKLKEMFSEYGNVTSSKVMLNPQGMSRGFGFVAYSNPEEALRALSEMNGKMIGRKPLYIALAQRKEDRRAHLQALFSQIRAPGPMSGFHHPPGGPMPGPPQHMYVGQNGASMVPSQPIGYGFQPQFMPGMRPGSGPGNFIVPYPLQRQPQTGPRMGFRRGATNMQQHIQQQQLMHRNPSPGMRYMNGASNGRNGMDSSVPQGILPPIIPLPIDASSISHQKAPLLPISKLTSSLASASPADRTRMLGEQLYPLVERHEPLHVAKVTGMLLEMDQAEILHLMESPEALKSKVSEALDVLRLSVDPTDHDLGFSTTD

SEQ ID NO: 9730 - DNA, 4536 bp, Arabidopsis thaliana
atggaggagaatcgtcggaatccgtcggccggtatggaagttccagttgccggcggcggaaatgtcgtcaaatggattgagatatctgttccttcaccttctgtttcatcttctagtatcggtgctaattcaagtgaggacaatgagtgtgttcagcttcctttgtctgaagactacgcttctagctctgtaattggggaaccttcgatctctttcgtttggagaatcaacaagacgagtccaaatgctctcgagcttcttcagctctcagctaagtctggatttccaataacaggactgcgtttcgtctttgctcagactctttctccttttgcttttgtatacgccgatgagggtggtgatagtggtcgtcttgtctactttctttactctctcacgccgtctggtgttgtctacgttcttaaactctcgaatacgttagcatataagtctggttcagtcttcccgcttgatcatttgattcacttggatgttcgaccttacttgaacgagagtcgtgttactagtgttgctgcatcgcctggtttcatttttctcgggagaaatcttcaggtttccaccaggagctgcgtgatgatacaggatttggtcgtctgtggggattcggggacagttgttgcagccgtgcaagatttatttatatcagaagttcatggaagaaattatctatgtgtgcttcatgctgacggggcattacgtgtctgggatattttgacttatagcagggttttatgtcagagtatagctgctaagaaccttgagggggttatgtgtgtgaggttatggttgggcaaagctgattacgattctggcatcattccattagctgtcttgtatagaaagagtatgaatgacagcatggacgtgatcactgtatatggcctgcactttagttctgcggaggggatagctttgtctctagattctggattacagaatataccactggaagagggggaattgcgggatgtcagatttacatccgacaagatctggactctaaaggccaatgaattaacatcttacatgttgtgccagaaatctagcaccatggaagcgcagtcttacacgttgcaggaagactacatttctgaacagctatttctgagttctaggagctcttcacatgatcttcttttgactactcattcactgttttcatccgcaaaggatcaaattatgggattcatttcgtcaatcttcttacgcaggcttctttgtcctggaatttttcacaatgttgccttacgtctaactttactggaccacaacaaaaactggactgattccgagtttcaatctttaagtcttgatgagcttacaagcgagattcttttactggttgagcatgaggttacagctgaaacttctatttcagtttttcattggtggaaaaacttttgtacatcctatctccatcattggtgcagtaataatgaacctcgcacgttgttggttcagtcagatgttattggtttagttagaaataattctgtatcactgttttttagattggagaacgctgagcacagccttggaggttcttcctccgaacacagcaacctgacgagcttagacttgggcgtgtctcacagcgaccatgaaattctggcagaggtactaagatgtacttcgaagatcagtaaacagtggggtggtgctccttatgccatgtattatgaatcaattaccggaaggccaattatctcatcggatgaaatcgttcctcgcttagttaacatccttgagtcgggatattctacgaccataggtcaacgtacttggtcagatcttggtgctgatagagcatgggaaaaagagctagaagctcataaaaatcttagaacattctccattgacatgctgctgtctctctctgctctatgtcaaagggctggatcttgggaaaaagtctttactatcatggagcactatttgcagtatttggtccctaaaaaatctatgcagaaaaatgatggtgaggcattatctgatatctgtagttctatcctcgtccaagccacttctcagtttgtaaaggtgatgtttgagtcggcatttgacatcttcctactcatcagctatctgcttaacatcgctgggcaggttaatatgtcacagcaagacatatgcaagctacggcttgagttgcttccaatgatccaagatattgtctcagagtggctcatcatccttttctttgttaccactccagctgagtcaacttctatggaagatttcagcttgaaactttcatctctacagattgatagcagcattgacaaaagatcatggaacgcaatgctagggaaatgtggtttctcactggcgtttattcttctctttagtgaccgaagttgcattgtggatggccgctttaacttgagatatcttccgagttcacaaatcattacaagtttggtgcaaaactttatcagctggattcggtatagtaaaacaggagatgactcttcttcactgctaagacgctccacggaacttagtcttaggttgattcggaatggacaatctgatgctgttgagcgaatccttgtggttgtggaggcaagtttacgtggggagaaaacatttggatgttctcaagatactagtggagattggtgtcttcttcaacatctccgtggttgttgccttcttgatcaagtacaacgtggtgcaagtggcatattaagagagagaaagattattgatgccatccgctgcttcttcagagcttcatcaggtgaaggatcttggaaggctttgcacagcttgtctaaagaagcaggattttcacctgccacaacgggtccaagtattttagatggttctacgtcttctgcagcatggaaacttcattactatgagtgggctatgcaaatttttgaacggtacaatataagtgaaggagcttgtcagtttgcctatgcagcccttgagcaagtagatgatgcctataatttcatagagatgactgaggaattcgatccaactaaagcagccacctacactagaggacgactgtgggcaaatgttttcaagttcaccttagatctcaatctcttgaatgatgcctactgtgctataatttcaaaccctgatgaggagattaagcgcatctgtttgaggcgcttcataatagttctatttgaatgtggcaaaacgaagatcctcagtgatggacatctacctttcatcggcttaacagagaagatcacccaagagcttttttggaaggccggacgttctgatataatgatgaagccaaatccatacaagctgctttatgcttatgagatgagacgacacaattggcgaatggcggcaagttacatgtatcagttttctgcccgtttgagaagcgagggagcatgcaaggattacaaacacatgtccctagttttgcaagagaggcttaatggactttctgctgctatgaatgcattagcccttgttcatcctgggtatgcttggattgatccagtaccagaagaaaccacacgttatccggttaaaaaggctagaagagcagaagaagaacaattaaggagtaatgaccagcccaaaggggagaagagttgcattgatatcgagaaactccaaaacgagtttgtttttactactgctgaatatatgctttctctgaaaaatttcgggtggacatattcaggactcgaaaagccaccatcagatttggttgaccttcttgtccaggcaaacttgtatgacatggcattcactgttgttttgaaattttggaggggctccgctttgaaaagggagctggaaaagatatttgagaatatggcaattaaatgttgccctgctaaaggaactctgtggtcatcgcctaatcttatgttaacatctaacgatgaagaagttactcattcgcctgatagaagccctgctgatcagggctctaagttggctggtgattgggaaattcttgaggtttatctgaagaggtacatagacatacacgctagactaccggtttctgttgcttcaacccttcttcaagcagattcttgtatcgaattgcctctctggctgattcaaatgttcaagagatgtttgacacagcatgtctgcttaatgctgaagagattgtatctaatatctcaatggaaatattgttgttcgcttgttccttttcatttacaccatggaaagaagcaatcatttgatggtcagaaggaaaaagctttgggaatggctgggcaagaagcaagtcctgcttccttgtttcagttatatgttgattatgggcgtcttacagaggcaactaatttgctacttgagtacatggaatcatttgcttcatcgaaaccagcagaggtattgaagaggaaaaaggtatccggagtttggtttccgtacacaacagtagaaagactatggtgggagctagagaaaacaatgaactcaggacgaatggtggagcaatgccataagctgaaggaacaacttcatcatgcattactcaatcacttaaaactgtctaataagtga

SEQ ID NO: 9731 - protein, 1511 aa, Arabidopsis thaliana
MEENRRNPSAGMEVPVAGGGNVVKWIEISVPSPSVSSSSIGANSSEDNECVQLPLSEDYASSSVIGEPSISFVWRINKTSPNALELLQLSAKSGFPITGLRFVFAQTLSPFAFVYADEGGDSGRLVYFLYSLTPSGVVYVLKLSNTLAYKSGSVFPLDHLIHLDVRPYLNESRVTSVAASPGFIFLGRNLQVSTRSCVMIQDLVVCGDSGTVVAAVQDLFISEVHGRNYLCVLHADGALRVWDILTYSRVLCQSIAAKNLEGVMCVRLWLGKADYDSGIIPLAVLYRKSMNDSMDVITVYGLHFSSAEGIALSLDSGLQNIPLEEGELRDVRFTSDKIWTLKANELTSYMLCQKSSTMEAQSYTLQEDYISEQLFLSSRSSSHDLLLTTHSLFSSAKDQIMGFISSIFLRRLLCPGIFHNVALRLTLLDHNKNWTDSEFQSLSLDELTSEILLLVEHEVTAETSISVFHWWKNFCTSYLHHWCSNNEPRTLLVQSDVIGLVRNNSVSLFFRLENAEHSLGGSSSEHSNLTSLDLGVSHSDHEILAEVLRCTSKISKQWGGAPYAMYYESITGRPIISSDEIVPRLVNILESGYSTTIGQRTWSDLGADRAWEKELEAHKNLRTFSIDMLLSLSALCQRAGSWEKVFTIMEHYLQYLVPKKSMQKNDGEALSDICSSILVQATSQFVKVMFESAFDIFLLISYLLNIAGQVNMSQQDICKLRLELLPMIQDIVSEWLIILFFVTTPAESTSMEDFSLKLSSLQIDSSIDKRSWNAMLGKCGFSLAFILLFSDRSCIVDGRFNLRYLPSSQIITSLVQNFISWIRYSKTGDDSSSLLRRSTELSLRLIRNGQSDAVERILVVVEASLRGEKTFGCSQDTSGDWCLLQHLRGCCLLDQVQRGASGILRERKIIDAIRCFFRASSGEGSWKALHSLSKEAGFSPATTGPSILDGSTSSAAWKLHYYEWAMQIFERYNISEGACQFAYAALEQVDDAYNFIEMTEEFDPTKAATYTRGRLWANVFKFTLDLNLLNDAYCAIISNPDEEIKRICLRRFIIVLFECGKTKILSDGHLPFIGLTEKITQELFWKAGRSDIMMKPNPYKLLYAYEMRRHNWRMAASYMYQFSARLRSEGACKDYKHMSLVLQERLNGLSAAMNALALVHPGYAWIDPVPEETTRYPVKKARRAEEEQLRSNDQPKGEKSCIDIEKLQNEFVFTTAEYMLSLKNFGWTYSGLEKPPSDLVDLLVQANLYDMAFTVVLKFWRGSALKRELEKIFENMAIKCCPAKGTLWSSPNLMLTSNDEEVTHSPDRSPADQGSKLAGDWEILEVYLKRYIDIHARLPVSVASTLLQADSCIELPLWLIQMFKRCLTQHVCLMLKRLYLISQWKYCCSLVPFHLHHGKKQSFDGQKEKALGMAGQEASPASLFQLYVDYGRLTEATNLLLEYMESFASSKPAEVLKRKKVSGVWFPYTTVERLWWELEKTMNSGRMVEQCHKLKEQLHHALLNHLKLSNK

SEQ ID NO: 9732 - protein, 1500 aa, Arabidopsis thaliana
MEVPVAGGGNVVKWIEISVPSPSVSSSSIGANSSEDNECVQLPLSEDYASSSVIGEPSISFVWRINKTSPNALELLQLSAKSGFPITGLRFVFAQTLSPFAFVYADEGGDSGRLVYFLYSLTPSGVVYVLKLSNTLAYKSGSVFPLDHLIHLDVRPYLNESRVTSVAASPGFIFLGRNLQVSTRSCVMIQDLVVCGDSGTVVAAVQDLFISEVHGRNYLCVLHADGALRVWDILTYSRVLCQSIAAKNLEGVMCVRLWLGKADYDSGIIPLAVLYRKSMNDSMDVITVYGLHFSSAEGIALSLDSGLQNIPLEEGELRDVRFTSDKIWTLKANELTSYMLCQKSSTMEAQSYTLQEDYISEQLFLSSRSSSHDLLLTTHSLFSSAKDQIMGFISSIFLRRLLCPGIFHNVALRLTLLDHNKNWTDSEFQSLSLDELTSEILLLVEHEVTAETSISVFHWWKNFCTSYLHHWCSNNEPRTLLVQSDVIGLVRNNSVSLFFRLENAEHSLGGSSSEHSNLTSLDLGVSHSDHEILAEVLRCTSKISKQWGGAPYAMYYESITGRPIISSDEIVPRLVNILESGYSTTIGQRTWSDLGADRAWEKELEAHKNLRTFSIDMLLSLSALCQRAGSWEKVFTIMEHYLQYLVPKKSMQKNDGEALSDICSSILVQATSQFVKVMFESAFDIFLLISYLLNIAGQVNMSQQDICKLRLELLPMIQDIVSEWLIILFFVTTPAESTSMEDFSLKLSSLQIDSSIDKRSWNAMLGKCGFSLAFILLFSDRSCIVDGRFNLRYLPSSQIITSLVQNFISWIRYSKTGDDSSSLLRRSTELSLRLIRNGQSDAVERILVVVEASLRGEKTFGCSQDTSGDWCLLQHLRGCCLLDQVQRGASGILRERKIIDAIRCFFRASSGEGSWKALHSLSKEAGFSPATTGPSILDGSTSSAAWKLHYYEWAMQIFERYNISEGACQFAYAALEQVDDAYNFIEMTEEFDPTKAATYTRGRLWANVFKFTLDLNLLNDAYCAIISNPDEEIKRICLRRFIIVLFECGKTKILSDGHLPFIGLTEKITQELFWKAGRSDIMMKPNPYKLLYAYEMRRHNWRMAASYMYQFSARLRSEGACKDYKHMSLVLQERLNGLSAAMNALALVHPGYAWIDPVPEETTRYPVKKARRAEEEQLRSNDQPKGEKSCIDIEKLQNEFVFTTAEYMLSLKNFGWTYSGLEKPPSDLVDLLVQANLYDMAFTVVLKFWRGSALKRELEKIFENMAIKCCPAKGTLWSSPNLMLTSNDEEVTHSPDRSPADQGSKLAGDWEILEVYLKRYIDIHARLPVSVASTLLQADSCIELPLWLIQMFKRCLTQHVCLMLKRLYLISQWKYCCSLVPFHLHHGKKQSFDGQKEKALGMAGQEASPASLFQLYVDYGRLTEATNLLLEYMESFASSKPAEVLKRKKVSGVWFPYTTVERLWWELEKTMNSGRMVEQCHKLKEQLHHALLNHLKLSNK

SEQ ID NO: 9733 - protein, 1313 aa, Arabidopsis thaliana
MIQDLVVCGDSGTVVAAVQDLFISEVHGRNYLCVLHADGALRVWDILTYSRVLCQSIAAKNLEGVMCVRLWLGKADYDSGIIPLAVLYRKSMNDSMDVITVYGLHFSSAEGIALSLDSGLQNIPLEEGELRDVRFTSDKIWTLKANELTSYMLCQKSSTMEAQSYTLQEDYISEQLFLSSRSSSHDLLLTTHSLFSSAKDQIMGFISSIFLRRLLCPGIFHNVALRLTLLDHNKNWTDSEFQSLSLDELTSEILLLVEHEVTAETSISVFHWWKNFCTSYLHHWCSNNEPRTLLVQSDVIGLVRNNSVSLFFRLENAEHSLGGSSSEHSNLTSLDLGVSHSDHEILAEVLRCTSKISKQWGGAPYAMYYESITGRPIISSDEIVPRLVNILESGYSTTIGQRTWSDLGADRAWEKELEAHKNLRTFSIDMLLSLSALCQRAGSWEKVFTIMEHYLQYLVPKKSMQKNDGEALSDICSSILVQATSQFVKVMFESAFDIFLLISYLLNIAGQVNMSQQDICKLRLELLPMIQDIVSEWLIILFFVTTPAESTSMEDFSLKLSSLQIDSSIDKRSWNAMLGKCGFSLAFILLFSDRSCIVDGRFNLRYLPSSQIITSLVQNFISWIRYSKTGDDSSSLLRRSTELSLRLIRNGQSDAVERILVVVEASLRGEKTFGCSQDTSGDWCLLQHLRGCCLLDQVQRGASGILRERKIIDAIRCFFRASSGEGSWKALHSLSKEAGFSPATTGPSILDGSTSSAAWKLHYYEWAMQIFERYNISEGACQFAYAALEQVDDAYNFIEMTEEFDPTKAATYTRGRLWANVFKFTLDLNLLNDAYCAIISNPDEEIKRICLRRFIIVLFECGKTKILSDGHLPFIGLTEKITQELFWKAGRSDIMMKPNPYKLLYAYEMRRHNWRMAASYMYQFSARLRSEGACKDYKHMSLVLQERLNGLSAAMNALALVHPGYAWIDPVPEETTRYPVKKARRAEEEQLRSNDQPKGEKSCIDIEKLQNEFVFTTAEYMLSLKNFGWTYSGLEKPPSDLVDLLVQANLYDMAFTVVLKFWRGSALKRELEKIFENMAIKCCPAKGTLWSSPNLMLTSNDEEVTHSPDRSPADQGSKLAGDWEILEVYLKRYIDIHARLPVSVASTLLQADSCIELPLWLIQMFKRCLTQHVCLMLKRLYLISQWKYCCSLVPFHLHHGKKQSFDGQKEKALGMAGQEASPASLFQLYVDYGRLTEATNLLLEYMESFASSKPAEVLKRKKVSGVWFPYTTVERLWWELEKTMNSGRMVEQCHKLKEQLHHALLNHLKLSNK

SEQ ID NO: 9734 - DNA, 2763 bp, Arabidopsis thaliana
gaaaaaatcgaagaaaattagaaaaatcggaagagcgatcgaagaggattttgaaccgccatggcttcttcttcgctctctaatctgatgctcgccattcatgagaagaagacgagctccgttgatctctaccgtcctctccgcaactacgttactttcacctactctgagcgcgaggctcagcttatagacgacgatctcgagaccttgaagcagctccgatccgatatagaacgcgtttccgatccttctccagctgctcggcgagaccttctcatctcctattacaaagttctttgtcttgtggagacgcgatttccaatttcccctgacaaggatcatgtcaacgccgtctctttcgtatggtacgatgctttcaagcaaaagcataaagctactcagcagaacattcatttggagaaagcagctgttctattcaatcttggtgctagctacagccagattggactcggtcatgaccgcaccaccgtcgatgggcgtcgtcaggcttcacatgcgttcatggctgcagcaggggcgttcgctcacttgagggataacgagtccattaaggcgacgatcgggccgagcactaccgtggatgtgtcggttgagtgtgttggaatgttggaacggttgatggtggcgcaggcgcaggaatgtgtctttgaaaataccattgctaaaggaagtactcctggtgtctctgctaaaattgctaggcaggttggcatattttatgaggaggctttatctgcgctaatcatttcgccattgaaggatcatttcgacaaaggctggatttctcatgtgcagctgaaagcagcactcttctatggtgaagcttgctttagatatggaaaagagttgcacgagaaagaggaaattgcagaagaaattgcacggctgaggagtggagccagccgtttggcagaagcaaagaagtcttcaaggggagctcctgctcagcttatagaagcgatgaacacactagagtctagcattaatggcaatttggatagggctgtcaaggaaaacgacagagtgtacctcatgagagttccttctccttcttctttgtctccacttcccgccttctcaatggttaagccaatgaacatgactgatattttggatgcaagcaaggaaaaaatgttttcaatccttgttccagacagcagtgcaaaggctctctctagatacactgagatggtcgatgatgtaattagaactcaggcggagagattacagcaagctagcgaactaactcgagttaggctcaaagagatggatcttccagattctattctcgctgtggatggtaattcagctcttcctgttgatcttaaagaagatgtagaagctgttcagatcagtggtggtccagctggcttggaagctgaactgcagcaacttagagatttgaagagggttaatcaggaactgttggtgcacactgaagagcttttgcagaaagaagcaactgaagattctcagttcagaagtcaatttgggactcggtggactaggcctcaatctagcacactgacaaagaacttgcaggataggctaaatcggtttgcagccaatttgaaacaagctggcgaaagtgatgttaagattgagcgatcagtgagagataactccgccctcatgtctattcttgatcgacggccgatagagtctgctgtcccaactcttgctaggccaataatgtctctggacgcaacagaggatgctattgtgggaactttgaagcagagtctgaggcaactggaaaatcttggtgctcagcgggcaggtcttgaagacatgctcaaagagatgaagagaaaggatgacatactgccaaagctgatgaccataacaggctcctatgaagatatgttcaggaaagagatatcaaagtatgaccacatttgtgaagatatttcccaaaacattgaagttcaagaacaattattgatgcaaattcaggctcaaaatgaagagttttcaactattttcaatcttgaagattataaagcatccaaggagaagtgctacaagcagattcaagctgcaataatgaagtatcgagagatcaaggagaacatcaatgagggcctgaagttctatgtcactctccaagatgcaatcacgaatgtgaagcagcagtgcagtgattttgtgatgacaaggagtatccagtgccgagatatgattgaagatgtgcaacgacagatgtctggtttgagttttcaggatcatagaagctccggcccatacccatctgtgcatcaaccaacggcttcaagtccgcctcctccaccagaaactcagaatccatctcatcctcacccacatgcaccatactatagaccgcctgagcagatgtcaaggcctggctactctatcccaccctacggtccacctcccccataccatactcctcatggccaggcgccacaaccataccctcctcaggcacagcaacagcctcatccatcatggcaacaaggctcttactatgatccgcagggacagcagcctcggcctccttatcccggccagagcccataccaacctcctcaccaaggtggaggatactacaggcaatgagttactttgggagcaataaaattctggtgttatatatctattgttgtgtttcctgtgagtacttgatgtgtgtctatctctttgacatgtttctgtcatgaaattgaatatctggtttgatagtgactcaaattctttattcaaagtagagccgatgtgatg

SEQ ID NO: 9735 - protein, 846 aa, Arabidopsis thaliana
MASSSLSNLMLAIHEKKTSSVDLYRPLRNYVTFTYSEREAQLIDDDLETLKQLRSDIERVSDPSPAARRDLLISYYKVLCLVETRFPISPDKDHVNAVSFVWYDAFKQKHKATQQNIHLEKAAVLFNLGASYSQIGLGHDRTTVDGRRQASHAFMAAAGAFAHLRDNESIKATIGPSTTVDVSVECVGMLERLMVAQAQECVFENTIAKGSTPGVSAKIARQVGIFYEEALSALIISPLKDHFDKGWISHVQLKAALFYGEACFRYGKELHEKEEIAEEIARLRSGASRLAEAKKSSRGAPAQLIEAMNTLESSINGNLDRAVKENDRVYLMRVPSPSSLSPLPAFSMVKPMNMTDILDASKEKMFSILVPDSSAKALSRYTEMVDDVIRTQAERLQQASELTRVRLKEMDLPDSILAVDGNSALPVDLKEDVEAVQISGGPAGLEAELQQLRDLKRVNQELLVHTEELLQKEATEDSQFRSQFGTRWTRPQSSTLTKNLQDRLNRFAANLKQAGESDVKIERSVRDNSALMSILDRRPIESAVPTLARPIMSLDATEDAIVGTLKQSLRQLENLGAQRAGLEDMLKEMKRKDDILPKLMTITGSYEDMFRKEISKYDHICEDISQNIEVQEQLLMQIQAQNEEFSTIFNLEDYKASKEKCYKQIQAAIMKYREIKENINEGLKFYVTLQDAITNVKQQCSDFVMTRSIQCRDMIEDVQRQMSGLSFQDHRSSGPYPSVHQPTASSPPPPPETQNPSHPHPHAPYYRPPEQMSRPGYSIPPYGPPPPYHTPHGQAPQPYPPQAQQQPHPSWQQGSYYDPQGQQPRPPYPGQSPYQPPHQGGGYYRQ

SEQ ID NO: 9736 - protein, 837 aa, Arabidopsis thaliana
MLAIHEKKTSSVDLYRPLRNYVTFTYSEREAQLIDDDLETLKQLRSDIERVSDPSPAARRDLLISYYKVLCLVETRFPISPDKDHVNAVSFVWYDAFKQKHKATQQNIHLEKAAVLFNLGASYSQIGLGHDRTTVDGRRQASHAFMAAAGAFAHLRDNESIKATIGPSTTVDVSVECVGMLERLMVAQAQECVFENTIAKGSTPGVSAKIARQVGIFYEEALSALIISPLKDHFDKGWISHVQLKAALFYGEACFRYGKELHEKEEIAEEIARLRSGASRLAEAKKSSRGAPAQLIEAMNTLESSINGNLDRAVKENDRVYLMRVPSPSSLSPLPAFSMVKPMNMTDILDASKEKMFSILVPDSSAKALSRYTEMVDDVIRTQAERLQQASELTRVRLKEMDLPDSILAVDGNSALPVDLKEDVEAVQISGGPAGLEAELQQLRDLKRVNQELLVHTEELLQKEATEDSQFRSQFGTRWTRPQSSTLTKNLQDRLNRFAANLKQAGESDVKIERSVRDNSALMSILDRRPIESAVPTLARPIMSLDATEDAIVGTLKQSLRQLENLGAQRAGLEDMLKEMKRKDDILPKLMTITGSYEDMFRKEISKYDHICEDISQNIEVQEQLLMQIQAQNEEFSTIFNLEDYKASKEKCYKQIQAAIMKYREIKENINEGLKFYVTLQDAITNVKQQCSDFVMTRSIQCRDMIEDVQRQMSGLSFQDHRSSGPYPSVHQPTASSPPPPPETQNPSHPHPHAPYYRPPEQMSRPGYSIPPYGPPPPYHTPHGQAPQPYPPQAQQQPHPSWQQGSYYDPQGQQPRPPYPGQSPYQPPHQGGGYYRQ

SEQ ID NO: 9737 - protein, 692 aa, Arabidopsis thaliana
MAAAGAFAHLRDNESIKATIGPSTTVDVSVECVGMLERLMVAQAQECVFENTIAKGSTPGVSAKIARQVGIFYEEALSALIISPLKDHFDKGWISHVQLKAALFYGEACFRYGKELHEKEEIAEEIARLRSGASRLAEAKKSSRGAPAQLIEAMNTLESSINGNLDRAVKENDRVYLMRVPSPSSLSPLPAFSMVKPMNMTDILDASKEKMFSILVPDSSAKALSRYTEMVDDVIRTQAERLQQASELTRVRLKEMDLPDSILAVDGNSALPVDLKEDVEAVQISGGPAGLEAELQQLRDLKRVNQELLVHTEELLQKEATEDSQFRSQFGTRWTRPQSSTLTKNLQDRLNRFAANLKQAGESDVKIERSVRDNSALMSILDRRPIESAVPTLARPIMSLDATEDAIVGTLKQSLRQLENLGAQRAGLEDMLKEMKRKDDILPKLMTITGSYEDMFRKEISKYDHICEDISQNIEVQEQLLMQIQAQNEEFSTIFNLEDYKASKEKCYKQIQAAIMKYREIKENINEGLKFYVTLQDAITNVKQQCSDFVMTRSIQCRDMIEDVQRQMSGLSFQDHRSSGPYPSVHQPTASSPPPPPETQNPSHPHPHAPYYRPPEQMSRPGYSIPPYGPPPPYHTPHGQAPQPYPPQAQQQPHPSWQQGSYYDPQGQQPRPPYPGQSPYQPPHQGGGYYRQ

SEQ ID NO: 9738 - DNA, 3420 bp, Arabidopsis thaliana
atggcgtttaggcctttcgggaaggacttaggtccgatgagctctaagccagcgccgtttacaccgttcggtgcttcttcaaccactaggcagtcgggttttgcttcttcatcttccttaggagaagctgcgagttgctttactttgctttttgttcttagattgtacctttcttttttattcttacacactgcgaatgttggatttgcttgtagtgattcatcaattcaaccaccggcgtctcaaaaccattcagcctttgcaggacaatcttttggacctggtggaattcgaagtggtccttcaattcagcgagcaccacctctgtcggcttctcaaaaccctcagctctctatagggaaaccttaccgaccaggtggggttcaaagtgttcctccaattaatagaataccatctccgtcggcttttcaaaatccatcaccctcctcaggacaaccttaccaacctggtggaattcaaaggatcccagaacctttcaatggaatagcatggggtccagaagcttcacgtacaagcccctctgtgagaccttaccaatttcctggagttcagaggcctaatttaaatcctcaatatgggcacgatggatcaaggaatttcttgaaagatcatggtgaacatagtcgagccacgtctccacctgctacatctcacattctttccagaatgggaactgatgctgttgagattggtcgatcacaagattcaaaaagaaaaaggtgtcggtcagatattcttcctgaccagaatatggggttttctcgaagaaatcaatcgccagtatcaggttttgagaatggaaacttggtagatggttttcagccactttctagccgaacttggatgcgctctccgtcttctgcggagaataatccggtgaggtcgaggagcaatcccaatcagttgattcatcaagaacaaaccggaaactcgtcattcccctatgcacatgaagtagctgaaattcaggaagctactagaagaaagtcttcggctgtagcaccttctgataaaccccttggagatgaccccatattgtctcaacatgactctcaaaggttttcgacatctccacctacgtcaggcacaaagtcatatacactttcaagaagttcagattctcaatttcctggacagccctcctctgtaaatagtttcaataatgcgcgtaagacaaacagttcacctgcaacaaaaaggacgagatctccacctgtatatccaattgaagaggatatcccgcgaaactctttcccttctcaagattgtacagaaggagaagagcaagccagggcaaagagactggcccgcttcaagggtgaactggagcctattgcagaccgacctgttgatattcaacttactaaatcacctgtaaataaaactatgaagcctctggacaacaaacaaacattcaattcgcttgaatcaagtagggatgccctgaagggagatgccttgcctgattatgaaaactcggagcagccctctcttatcattggagtatgccctgacatgtgtcctgagtcagaacggggggagcgtgagaggaagggtgacttggaccattatgagcgtgtggatggagataggaaccagacaagcaaatcccttgctgtgaagaaatatactaggacggcggagcgagaagcaattttgatacgaccaatgccaatcctgcaaaatacaatggaatatttgctgagtttgctagaccgaccttacaatgaaaactttcttggcatgtacaatttcttatgggataggatgagagctatacgtatggatctaagaatgcaacatattttcaaccaagaagctattactttgctggagcaaatgattagacttcacatcattgcaatgcatgagctatgtgaatatactaaaggagagggcttttcggaggggtttgatgcacacctgaatattgagcagatgaacaagacatctgttgagttgtttcaaatgtatgatgatcacaggaagaaaggaataactgttcctacagaaaaagagtttcgtggctattatgcccttctcaaactcgacaagcatcctggctataaggttgaaccttcagaactttctcttgatcttgccaatatgactccagaaataaggcaaacttcagaagttctctttgcccgcaatgtagccagagcttgcagaactggcaacttcatcgccttctttcgccttgcacggaaagcaagctatcttcaagcatgtctaatgcatgctcatttttcgaaactaagaactcaggcgcttgcctctctgcactcgggtctccaaattaatcagggtctcccagtttcagatatgtcaaattggatagggatggaggaagaggacatagaagccctgttggagtaccatgggttttcgataaaggtttttgaagagccatacatggtaaaaaatgacctatttctccatgctgataaggattacaaaacaaaatgctcaaaacttgttcacatgaaaaagtcaagaaccatagtggaagatgtttctgctcccacagtagtggaagatgtttctactccctttccattgccttccttgatcacagaagcaactatcggaaatcaacagtgtattaccgcccataaacacgaaatgccgcctgcgagaagtcttaagaaacaaacatcaatgcgtctatttgataaagaagtggctgactccaagacttccctcttagcagaggaggacaagccaatggggacatttgttatgaatccaccagggccattcgttataaatccagtggtgcatcaagagaaacaaaatgaccttacatcagctggtggatttcattctcccgtgaagctatattctccttttggttcccctaaatttcctcaaactaaatcgtcgaatttggagaaacaacctaatgacgatcgcatcggtatgtctcctggggaaattaaattttcaatcataggggatgtatatacgaatcatgtgcctggaccagctttgcaacaaagtccgaagtctatgccaatggagattatgcctgtaactaccattgcagagtgtccgacaagtgtagaaaacaaatatgctttggaagaatcagtaccggaggctgcaatgatttgtaccttggaaaaggagttcaatgacattgacgaggaagacgaggatgaggatggggtcatcttaaatcagtatgatgaggaagtggcgaaagcaaaactcaagttgatcataagattatggaagcggtggtcttcacgtcaaagtgaattgcgggagcgtcgacagttagcagcagctgctgcactgaattcactatccctgggtactcctatccgatttagcaaaactgatctcccggcgtgtctgtatggaacaaatgggttgcaaatgggtctgatatag

SEQ ID NO: 9739 - protein, 1139 aa, Arabidopsis thaliana
MAFRPFGKDLGPMSSKPAPFTPFGASSTTRQSGFASSSSLGEAASCFTLLFVLRLYLSFLFLHTANVGFACSDSSIQPPASQNHSAFAGQSFGPGGIRSGPSIQRAPPLSASQNPQLSIGKPYRPGGVQSVPPINRIPSPSAFQNPSPSSGQPYQPGGIQRIPEPFNGIAWGPEASRTSPSVRPYQFPGVQRPNLNPQYGHDGSRNFLKDHGEHSRATSPPATSHILSRMGTDAVEIGRSQDSKRKRCRSDILPDQNMGFSRRNQSPVSGFENGNLVDGFQPLSSRTWMRSPSSAENNPVRSRSNPNQLIHQEQTGNSSFPYAHEVAEIQEATRRKSSAVAPSDKPLGDDPILSQHDSQRFSTSPPTSGTKSYTLSRSSDSQFPGQPSSVNSFNNARKTNSSPATKRTRSPPVYPIEEDIPRNSFPSQDCTEGEEQARAKRLARFKGELEPIADRPVDIQLTKSPVNKTMKPLDNKQTFNSLESSRDALKGDALPDYENSEQPSLIIGVCPDMCPESERGERERKGDLDHYERVDGDRNQTSKSLAVKKYTRTAEREAILIRPMPILQNTMEYLLSLLDRPYNENFLGMYNFLWDRMRAIRMDLRMQHIFNQEAITLLEQMIRLHIIAMHELCEYTKGEGFSEGFDAHLNIEQMNKTSVELFQMYDDHRKKGITVPTEKEFRGYYALLKLDKHPGYKVEPSELSLDLANMTPEIRQTSEVLFARNVARACRTGNFIAFFRLARKASYLQACLMHAHFSKLRTQALASLHSGLQINQGLPVSDMSNWIGMEEEDIEALLEYHGFSIKVFEEPYMVKNDLFLHADKDYKTKCSKLVHMKKSRTIVEDVSAPTVVEDVSTPFPLPSLITEATIGNQQCITAHKHEMPPARSLKKQTSMRLFDKEVADSKTSLLAEEDKPMGTFVMNPPGPFVINPVVHQEKQNDLTSAGGFHSPVKLYSPFGSPKFPQTKSSNLEKQPNDDRIGMSPGEIKFSIIGDVYTNHVPGPALQQSPKSMPMEIMPVTTIAECPTSVENKYALEESVPEAAMICTLEKEFNDIDEEDEDEDGVILNQYDEEVAKAKLKLIIRLWKRWSSRQSELRERRQLAAAAALNSLSLGTPIRFSKTDLPACLYGTNGLQMGLI

SEQ ID NO: 9740 - protein, 1127 aa, Arabidopsis thaliana
MSSKPAPFTPFGASSTTRQSGFASSSSLGEAASCFTLLFVLRLYLSFLFLHTANVGFACSDSSIQPPASQNHSAFAGQSFGPGGIRSGPSIQRAPPLSASQNPQLSIGKPYRPGGVQSVPPINRIPSPSAFQNPSPSSGQPYQPGGIQRIPEPFNGIAWGPEASRTSPSVRPYQFPGVQRPNLNPQYGHDGSRNFLKDHGEHSRATSPPATSHILSRMGTDAVEIGRSQDSKRKRCRSDILPDQNMGFSRRNQSPVSGFENGNLVDGFQPLSSRTWMRSPSSAENNPVRSRSNPNQLIHQEQTGNSSFPYAHEVAEIQEATRRKSSAVAPSDKPLGDDPILSQHDSQRFSTSPPTSGTKSYTLSRSSDSQFPGQPSSVNSFNNARKTNSSPATKRTRSPPVYPIEEDIPRNSFPSQDCTEGEEQARAKRLARFKGELEPIADRPVDIQLTKSPVNKTMKPLDNKQTFNSLESSRDALKGDALPDYENSEQPSLIIGVCPDMCPESERGERERKGDLDHYERVDGDRNQTSKSLAVKKYTRTAEREAILIRPMPILQNTMEYLLSLLDRPYNENFLGMYNFLWDRMRAIRMDLRMQHIFNQEAITLLEQMIRLHIIAMHELCEYTKGEGFSEGFDAHLNIEQMNKTSVELFQMYDDHRKKGITVPTEKEFRGYYALLKLDKHPGYKVEPSELSLDLANMTPEIRQTSEVLFARNVARACRTGNFIAFFRLARKASYLQACLMHAHFSKLRTQALASLHSGLQINQGLPVSDMSNWIGMEEEDIEALLEYHGFSIKVFEEPYMVKNDLFLHADKDYKTKCSKLVHMKKSRTIVEDVSAPTVVEDVSTPFPLPSLITEATIGNQQCITAHKHEMPPARSLKKQTSMRLFDKEVADSKTSLLAEEDKPMGTFVMNPPGPFVINPVVHQEKQNDLTSAGGFHSPVKLYSPFGSPKFPQTKSSNLEKQPNDDRIGMSPGEIKFSIIGDVYTNHVPGPALQQSPKSMPMEIMPVTTIAECPTSVENKYALEESVPEAAMICTLEKEFNDIDEEDEDEDGVILNQYDEEVAKAKLKLIIRLWKRWSSRQSELRERRQLAAAAALNSLSLGTPIRFSKTDLPACLYGTNGLQMGLI

SEQ ID NO: 9741 - protein, 910 aa, Arabidopsis thaliana
MGTDAVEIGRSQDSKRKRCRSDILPDQNMGFSRRNQSPVSGFENGNLVDGFQPLSSRTWMRSPSSAENNPVRSRSNPNQLIHQEQTGNSSFPYAHEVAEIQEATRRKSSAVAPSDKPLGDDPILSQHDSQRFSTSPPTSGTKSYTLSRSSDSQFPGQPSSVNSFNNARKTNSSPATKRTRSPPVYPIEEDIPRNSFPSQDCTEGEEQARAKRLARFKGELEPIADRPVDIQLTKSPVNKTMKPLDNKQTFNSLESSRDALKGDALPDYENSEQPSLIIGVCPDMCPESERGERERKGDLDHYERVDGDRNQTSKSLAVKKYTRTAEREAILIRPMPILQNTMEYLLSLLDRPYNENFLGMYNFLWDRMRAIRMDLRMQHIFNQEAITLLEQMIRLHIIAMHELCEYTKGEGFSEGFDAHLNIEQMNKTSVELFQMYDDHRKKGITVPTEKEFRGYYALLKLDKHPGYKVEPSELSLDLANMTPEIRQTSEVLFARNVARACRTGNFIAFFRLARKASYLQACLMHAHFSKLRTQALASLHSGLQINQGLPVSDMSNWIGMEEEDIEALLEYHGFSIKVFEEPYMVKNDLFLHADKDYKTKCSKLVHMKKSRTIVEDVSAPTVVEDVSTPFPLPSLITEATIGNQQCITAHKHEMPPARSLKKQTSMRLFDKEVADSKTSLLAEEDKPMGTFVMNPPGPFVINPVVHQEKQNDLTSAGGFHSPVKLYSPFGSPKFPQTKSSNLEKQPNDDRIGMSPGEIKFSIIGDVYTNHVPGPALQQSPKSMPMEIMPVTTIAECPTSVENKYALEESVPEAAMICTLEKEFNDIDEEDEDEDGVILNQYDEEVAKAKLKLIIRLWKRWSSRQSELRERRQLAAAAALNSLSLGTPIRFSKTDLPACLYGTNGLQMGLI

SEQ ID NO: 9742 - DNA, 2620 bp, Arabidopsis thaliana
atgaaaaataaattcgacttcatctcccaaacagtttctgtcgatctctttggtgctcgagagagtgctttctgggaaaatgacatagcaaacgaaaggaaagagcaacagagagatctgtagtatcccatttcgtcttctctgtcgaattaccagtggttggagcgggagagaaggtggtttttccttgtatgtggagatggacgatgttgcgggtttacaagaggcagctggagccagatttagccagattgagttgattggaagaggctcttttggtgatgtctataaagcgtttgataaggacctcaataaagaagttgccattaaagtaatcgacctggaagaatcagaagatgagatcgaagatattcagaaggaaatttcagtattgtcacaatgtcgttgcccatatatcaccgaatactatggttcttaccttcatcagaccaagttgtggatcatcatggaatatatggccggtggctctgttgctgatcttcttcaatctaataatccgttggatgaaacatcaatcgcttgtatcacacgcgatttgcttcatgctgttgaatatctgcataatgagggaaagatccacagagacattaaagctgcgaatattttgttgagcgagaatggcgatgttaaggtggcggactttggtgtgtctgctcagctaacgcggacaatatcaagaaggaagacttttgtaggaaccccattttggatggcaccagaagttattcagaactcagaagggtataatgagaaggcagatatttggtcgctcggaataacagttattgagatggcaaaaggagaacctcccctagctgaccttcatcccatgagagtgctttttatcattcctcgagaaactccaccacagatgagcatttttcccgtcaagtaaaggagtttgtttcattatgcctgaagaaggcccctgccgagagaccaagtgccaaagaacttattaaacacagatttattaagaatgctaggaaaagtccgaaacttcttgagaggataagaaaatccagaataagcacgattgttattctgtccttttttcctctttaaagagagcggccaaagtaccaagtaaaagaagatgaagagactcctaggaatggggccaaagctccagttgaatcatctggtactgctaggatagctagagatgaaagaagccaaggcgcgcctggatatagttttcaggggaataccgtcaaaaatgctggatgggactttaccgttggggggtcacagagtattggaacagttcgtgctttaaaacctcctcaagcaagggagaggcgccaagaagtttctcctaatcggatttcgcaaagaacaacaagacctagtggtaatcaatggtcatctgcgactgggagtacaatttctgaagcttctgaaggaggttttgtcagaagacacccttttcagaatgaccatgaagatggcttccacgaagaggacgattcatcgctcagtggatcgggaactgttgtcataagaaccccaagaagttctcaatcatcttcagtattccgtgaaccaagctctgggtctagcggcaggtatgcagcttttgatgatgcttcagcaagtggaactgttgttgtccgtggacagtacgatgactctggatcacctcgaaccccgaaatctagactagggattcaagagagaacttcgagtgcatcagaagatagcaacgcaaatctcgcggaggcaaaggcagcacttgacgcaggtttcagaaggggtaaggctagagaaagacttggaatgggaaataacaataatgatgggaaggttaacagaagaagggagcaaatggcagatgattctgactattcaagaaattccggcgataagtctagtaaacaaaaagtagttccaaggtcagaacaagtgagtgatgaagaagatgactccatatgggaatcattgcctgcatcattgtcagtgttgctcataccgtccctaaaagaagctcttggtgacgattctaaagaatctactgtgcgtacagtgtcgagatcccttgtgatgatggaacgtgaaaagcctggttcttgtgaagcttttgttgccaagctgattgaacttttgggaagttcaaaagaagcttcggtgaaagaattgcacgatatggcggtctgtgtttttgccaagaccacacccgacaatacagagaacaaaatgaaacaagctaacaaggagtttagttccaacacaaatgttagcccactcggcagattcttactctcaagatggctaggccaatcatcacgtgatctttaatcccccaccctgagacaacctacagagatggaatcattggtttgtgcttctttattttctttgatgcattgatttttggtaatttatgttcatagtctgctttcaaaatgtatttataaattcctttttaattatttttttcgcattcctttccccaagtttttaagaggaatttctattcatagttgtgtataatcaagggtgtggcttttttcaatttttttgtattgttacaatttacaaatgtaaaatctccaagaccttatatttgataaacaataatatagatatttgacttttt

SEQ ID NO: 9743 - protein, 238 aa, Arabidopsis thaliana
MDDVAGLQEAAGARFSQIELIGRGSFGDVYKAFDKDLNKEVAIKVIDLEESEDEIEDIQKEISVLSQCRCPYITEYYGSYLHQTKLWIIMEYMAGGSVADLLQSNNPLDETSIACITRDLLHAVEYLHNEGKIHRDIKAANILLSENGDVKVADFGVSAQLTRTISRRKTFVGTPFWMAPEVIQNSEGYNEKADIWSLGITVIEMAKGEPPLADLHPMRVLFIIPRETPPQMSIFPVK

SEQ ID NO: 9744 - protein, 172 aa, Arabidopsis thaliana
MGNNNNDGKVNRRREQMADDSDYSRNSGDKSSKQKVVPRSEQVSDEEDDSIWESLPASLSVLLIPSLKEALGDDSKESTVRTVSRSLVMMEREKPGSCEAFVAKLIELLGSSKEASVKELHDMAVCVFAKTTPDNTENKMKQANKEFSSNTNVSPLGRFLLSRWLGQSSRDL

SEQ ID NO: 9745 - protein, 156 aa, Arabidopsis thaliana
MADDSDYSRNSGDKSSKQKVVPRSEQVSDEEDDSIWESLPASLSVLLIPSLKEALGDDSKESTVRTVSRSLVMMEREKPGSCEAFVAKLIELLGSSKEASVKELHDMAVCVFAKTTPDNTENKMKQANKEFSSNTNVSPLGRFLLSRWLGQSSRDL

SEQ ID NO: 9746 - DNA, 1673 bp, Arabidopsis thaliana
aaaacaaaattcaagagtcagctttatcagagaaagtttcccccattggtgaaaatttgtaagagatggacaaggaaaaggagcaaactttggagtggaacgaagcacagaagatagatataagcgttgaccttttggctgcagccaagaaacaccttctcttcctcggagctgttgatcggaaccgttgtctctacgatggccctgcactccaaagagccatctacagatacaatgcttattggcttcccttgcttgctcaatacaccgagtcttcttctatctgtcaaggaccattagtccctcctcttgactgtgaatgggtttggcattgccacaggcttaatccggtgaggtataagactgattgtgagcaattctatgggagagttctggacaattctggcgttgtatcttccgtaaatggaaactgcaaatcacaaactgaaactctatggaaaagattgtatcctacggagccttatgaccttgattttgccaatgcaatctcagagccagcagatgtctcagctcttgagaaatgtaccacttatgatcttgttttagctgtcaagagacaaagcccatttttctaccaggtttcaaaagctcatgtagataatgacgtctttctgcaagaagctgtggctagatacaaagcatttctctacttgatcaagggtaaccgagaaagatcgatcaaacttttctgtgttccgacttacgatattgatcttatctggcacacacatcagcttcatgctatctcttattgcaatgatttgactaagatgattggtaaggtcttggagcatgatgatacagactctgaccgtagcaaaggtaagaagctcgatactggtttctctggaactactgctcaatgggaagaaacatttggtcgaaggtattggaaagccggtgctatgaaccgtggtaataccccaaagccagtcacaacttctccttatgtttgttctggaaagaaatcaattgcgaaagaggaagagtcccagaatgtaatccaatatccagaggtgaaagtcattgaagttatcttggagattgttggggttaagaacttaccagatgctcacaaaggaaaggtctttgttctgttcagcaaaactcaaccagattctctgtttaacgctgagcgtaggcttaccgttttatctgagtcttgtggggaaaagcaagttgctttgttccagtgtgagcctacaggagagcttagtttccaactaatgtcttccaagtctaagagcttaggtttcacttctttatcgttttcggagtttctttctccagtaactaaactctctgttgagaagtggttggagttaacaccaactaaaaggggaaaggcagatgatccgaatcccatctctttgagagtcgctgtctcgttcaccccgccaactcgaagtccaactgttctacatttggttcaagcaagaccatcactgaaaggctcttgtttccttcctatgctccgaaaggtacgtcttgctaagagttttacacgcgttgttgatgaaaccgaaacagaggtgatcaacctccaaatgaggaactccaatgacgcagcaccaaaaggtgatagaagacaagttattggtgtaaaagagtgtggtgaaacttatgttttggcagagtatgatggcactttc

SEQ ID NO: 9747 - protein, 536 aa, Arabidopsis thaliana
MDKEKEQTLEWNEAQKIDISVDLLAAAKKHLLFLGAVDRNRCLYDGPALQRAIYRYNAYWLPLLAQYTESSSICQGPLVPPLDCEWVWHCHRLNPVRYKTDCEQFYGRVLDNSGVVSSVNGNCKSQTETLWKRLYPTEPYDLDFANAISEPADVSALEKCTTYDLVLAVKRQSPFFYQVSKAHVDNDVFLQEAVARYKAFLYLIKGNRERSIKLFCVPTYDIDLIWHTHQLHAISYCNDLTKMIGKVLEHDDTDSDRSKGKKLDTGFSGTTAQWEETFGRRYWKAGAMNRGNTPKPVTTSPYVCSGKKSIAKEEESQNVIQYPEVKVIEVILEIVGVKNLPDAHKGKVFVLFSKTQPDSLFNAERRLTVLSESCGEKQVALFQCEPTGELSFQLMSSKSKSLGFTSLSFSEFLSPVTKLSVEKWLELTPTKRGKADDPNPISLRVAVSFTPPTRSPTVLHLVQARPSLKGSCFLPMLRKVRLAKSFTRVVDETETEVINLQMRNSNDAAPKGDRRQVIGVKECGETYVLAEYDGTF

SEQ ID NO: 9748 - protein, 294 aa, Arabidopsis thaliana
MIGKVLEHDDTDSDRSKGKKLDTGFSGTTAQWEETFGRRYWKAGAMNRGNTPKPVTTSPYVCSGKKSIAKEEESQNVIQYPEVKVIEVILEIVGVKNLPDAHKGKVFVLFSKTQPDSLFNAERRLTVLSESCGEKQVALFQCEPTGELSFQLMSSKSKSLGFTSLSFSEFLSPVTKLSVEKWLELTPTKRGKADDPNPISLRVAVSFTPPTRSPTVLHLVQARPSLKGSCFLPMLRKVRLAKSFTRVVDETETEVINLQMRNSNDAAPKGDRRQVIGVKECGETYVLAEYDGTF

SEQ ID NO: 9749 - DNA, 1963 bp, Arabidopsis thaliana
cgcgttctactaaaataaaagtgaagcgccttcctcaggattttcccgagtgagtttcgctttcctccgagaaaatttcagacttaaattttccggaatctaataaggagaagccattgttgaagaaactagtctctctgtttcgaatcttcaaattcagattcaatatctatcaggaaaatttcgcatgggggtgaaagtagcttcttcgtctactttccttcaatggactactcagcctattattcatcagtcttcttcaccatctcaaaccctagcttcgggaaccataacatctccttcaaaacgacgtagcacagtacacgacggccggtttctatcatgtcgtttcgtgacacagagactaaaccgttcggctcttttcggaactccgtcgacgaagcttcatcgacccaagtcatgtgagctatggaaatcatcatcatcatcatctagaccgatcaaaactcagtcgtttcgaagagtttatagcgcaaacttagatccattctccgacgaagagttctcgaaaaaaatccaagagctaactctcagattcaatatcccacaccatgacgacgacgagaattcaatcgagccgccatggaacgagatggttcatttgtcgagtattgaaatgaaagcaaacagtgttgatcttcctctttcacttcgtattataaagaagaaacgtcaatgggaagaaggagttaaacaagctggtgaatctgcgtgttgctcgatgaataaagctttttcttcaatggtgtttatgatacgggagcttcagagctttactttacatatgagagagattctgttctacgaagacttgcaagagattttgctaagagttagagaagagatgcaacaatctttcgtttggttgtttcaacaagttttctctgctactcctacgttgatggtttatgttatgattctcttagccaatttcactgtttattctatcggtaacaacagctccgctttagccgctgttgctcctcttcctccgacgattacggagttaacaactgttagtgaaacagaggaaacaaacgtgaagtttgattcctcggtggtgaaaacgttctttgtatcatctcctagtgggagtatagcttcagttggtggtaacaacaatggcggcggtggaaacgtcaagccggtgttaagcggaactgacggtgatggatccgatggatcagaacagttcagaacaatcatacccgaaggagtttctcaattgtcatcatcgaatttcgggtcagagccgtcagtatcgggacaagatgaacatagattgtggaattcgatggtggaggaagcagaacgaatgcagtattcaaatattgacgattcgttggatcaggagacgaggaagcggttcgtgtctcatgtagaggctcgagtagaagcagaggaagacactggttacttcaaaacagagctaatgtatcaaacagaactgtctcaagagcctaataatcctctactactcgctaactatgctcagttcctttacctcgtctctaatgaccatgacagagcggaagagtatttcaagagagcggtaggagtggaaccgaaagatgcagaggcgtttagcaaatatgcgacgttcttatggagagcacgggacgatctttgggcggctgaggagactttcttagaagcaattgatgccgatccgaccaactcttactacgccgctaattacgccaatttcttgtggaataccggcggtgatgacacgtgtttccctcttgatgacgagtctcatgaagacaccatttagataagaatgtgcaccatcaaagtctctctatataaaatattgtatacaataagtacaactaatgaatatacacatatgtgcataccattaatgtattatgtatatgcatgtttgtcaccaaggctcggtgggtaaaagagttatataatacttatggttgcgatc

SEQ ID NO: 9750 - protein, 536 aa, Arabidopsis thaliana
MGVKVASSSTFLQWTTQPIIHQSSSPSQTLASGTITSPSKRRSTVHDGRFLSCRFVTQRLNRSALFGTPSTKLHRPKSCELWKSSSSSSRPIKTQSFRRVYSANLDPFSDEEFSKKIQELTLRFNIPHHDDDENSIEPPWNEMVHLSSIEMKANSVDLPLSLRIIKKKRQWEEGVKQAGESACCSMNKAFSSMVFMIRELQSFTLHMREILFYEDLQEILLRVREEMQQSFVWLFQQVFSATPTLMVYVMILLANFTVYSIGNNSSALAAVAPLPPTITELTTVSETEETNVKFDSSVVKTFFVSSPSGSIASVGGNNNGGGGNVKPVLSGTDGDGSDGSEQFRTIIPEGVSQLSSSNFGSEPSVSGQDEHRLWNSMVEEAERMQYSNIDDSLDQETRKRFVSHVEARVEAEEDTGYFKTELMYQTELSQEPNNPLLLANYAQFLYLVSNDHDRAEEYFKRAVGVEPKDAEAFSKYATFLWRARDDLWAAEETFLEAIDADPTNSYYAANYANFLWNTGGDDTCFPLDDESHEDTI

SEQ ID NO: 9751 - protein, 394 aa, Arabidopsis thaliana
MVHLSSIEMKANSVDLPLSLRIIKKKRQWEEGVKQAGESACCSMNKAFSSMVFMIRELQSFTLHMREILFYEDLQEILLRVREEMQQSFVWLFQQVFSATPTLMVYVMILLANFTVYSIGNNSSALAAVAPLPPTITELTTVSETEETNVKFDSSVVKTFFVSSPSGSIASVGGNNNGGGGNVKPVLSGTDGDGSDGSEQFRTIIPEGVSQLSSSNFGSEPSVSGQDEHRLWNSMVEEAERMQYSNIDDSLDQETRKRFVSHVEARVEAEEDTGYFKTELMYQTELSQEPNNPLLLANYAQFLYLVSNDHDRAEEYFKRAVGVEPKDAEAFSKYATFLWRARDDLWAAEETFLEAIDADPTNSYYAANYANFLWNTGGDDTCFPLDDESHEDTI

SEQ ID NO: 9752 - protein, 386 aa, Arabidopsis thaliana
MKANSVDLPLSLRIIKKKRQWEEGVKQAGESACCSMNKAFSSMVFMIRELQSFTLHMREILFYEDLQEILLRVREEMQQSFVWLFQQVFSATPTLMVYVMILLANFTVYSIGNNSSALAAVAPLPPTITELTTVSETEETNVKFDSSVVKTFFVSSPSGSIASVGGNNNGGGGNVKPVLSGTDGDGSDGSEQFRTIIPEGVSQLSSSNFGSEPSVSGQDEHRLWNSMVEEAERMQYSNIDDSLDQETRKRFVSHVEARVEAEEDTGYFKTELMYQTELSQEPNNPLLLANYAQFLYLVSNDHDRAEEYFKRAVGVEPKDAEAFSKYATFLWRARDDLWAAEETFLEAIDADPTNSYYAANYANFLWNTGGDDTCFPLDDESHEDTI

SEQ ID NO: 9753 - DNA, 2822 bp, Arabidopsis thaliana
ggttgccagttgccaccagacatacataacacattgaaagcagcttattcatcgacataccaaactctcactctcgccctcgctctctttctttcttcatgtaaattttttgttcttttccatgtatcgagattcgatcttcttcttcttcacacgaacctccttattgttttctcctgcattctctctattcttcgctaaaccttgaataaagacatgttctttaacatgggtttttccggtttaaagtagttgtatctttgtttcccctttaaaccgggtttaagctcaatcttttcttagaacaactccaactgtttgacgatttgactgagagaaaacagagtcatggaagagacttttgtgccgtttgaaggaatcaagaatgatcttaaaggaagattgatgtgctataagcaagattggactggtggattcaaagctggatttaggattctggctcccaccacttacatatttttcgcttctgcgattcctgtcatctcatttggtgaacaactcgaaagaagcaccggtaattctgcaaaaagtttctaccttgcactttttcagcttaggaatttgaaattggattctgaaatttttgcagatggagttctcacggctgttcaaaccttagcatctacagccatttgcggtatgatacattcgattatcggaggtcagccactgcttattctcggtgttgcagagcctactgtgattatgtacacattcatgtttaactttgcaaaggccagacctgaattgggacgagacctgttcttggcgtggtctggatgggtttgtgtttggactgctttgatgctgtttgtgttggcaatatgtggagcttgttctatcatcaataggtttactcgagtagctggagaattgtttggactgcttattgctatgcttttcatgcagcaagccatcaaagggctagttgatgaattccgcattcctgaacgagaaaatcagaagctgaaggagttcttaccttcctggaggtttgctaatgggatgtttgctctggttctctcctttggccttcttctgactggacttagaagcagaaaagccagatcatggcggtacggaactggctggctcagaagcttaatagctgactatggtgtaccactcatggtgctcgtgtggaccggtgtctcctacattccagcaggagatgttccaaaaggaattcctcggcgactttttagcccaaatccttggtctcctggtgcttatgggaactggaccgtagtaaaggagatgcttgatgttccaatcgtctacataattggagctttcattccagcatcaatgattgctgtgctttactacttcgaccatagtgtagcttcacagctcgcgcagcagaaagaattcaatttgagaaaaccgtcttcttaccactatgacttgcttcttcttgggtttctgacattaatgtgtggtctacttggagtccctccatcaaacggtgtcattcctcaatctccaatgcataccaagagcttagcaactcttaaataccagttgcttcgtaacagactggtcgcaacagcacgaagaagtatcaaaacaaatgcgagtttgggtcaactctatgacaatatgcaagaagcttaccatcacatgcagacaccattagtataccagcaaccccaaggtctaaaagagctcaaggaatcgacaatccaagctactacattcaccggaaacctcaatgctccagttgatgaaactctgttcgacatagagaaagaaatagatgatttactaccagttgaagtcaaagaacaacgggtaagcaacttgcttcagtctacaatggtaggaggatgcgttgcagctatgcctatccttaaaatgatcccaacatcagtcctttggggctattttgccttcatggccatcgaaagcttacccggaaaccaattctgggaaagaatcttacttctgttcaccgccccaagtcgccgcttcaaggttcttgaagattaccacgcgacattcgtggaaaccgttccattcaagacgattgcaatgtttactcttttccaaacgacttatctcttgatctgctttggtctcacatggataccaatcgcaggagtcatgttccctttaatgatcatgttcttaatccccgtacgacaatatctcctccctagattcttcaaaggagctcatcttcaggacttagatgcagcagagtatgaagaagctccagctttacccttcaatctcgcagcggaaacggagattggatccacaacatcgtatccgggagatttggagattcttgatgaggttatgacccgaagcagaggagagtttagacacacgagtagtcctaaggtgacaagttcaagttcgactccagtcaataatcggagtttgtcacaagtgtttagtccaagagtgagtggaatcaggttgggtcagatgagtcctcgagtcgtcgggaatagtccaaagccggcgagttgtgggaggagtcccttgaaccagtcgtcatcgaactgagattatatattcaggaagcttaataaaacaactaatctaatgaggatggattaagaatgtttaattagttaattaatttgatctttagctcttgaaaaagaaaagagcttcttgaatctctctttagtttatgttttgtgtgtttaatcccctttcgtggtgtttcatcttcagtcttatgtaaaatactaaaatgtctgtcttatttcgttatatatgtaaaattcgttaaatattttcagaaaaaaaaaaaaaaaaaaaactcgagggggggcccggtaccc

SEQ ID NO: 9754 - protein, 729 aa, Arabidopsis thaliana
MEETFVPFEGIKNDLKGRLMCYKQDWTGGFKAGFRILAPTTYIFFASAIPVISFGEQLERSTGNSAKSFYLALFQLRNLKLDSEIFADGVLTAVQTLASTAICGMIHSIIGGQPLLILGVAEPTVIMYTFMFNFAKARPELGRDLFLAWSGWVCVWTALMLFVLAICGACSIINRFTRVAGELFGLLIAMLFMQQAIKGLVDEFRIPERENQKLKEFLPSWRFANGMFALVLSFGLLLTGLRSRKARSWRYGTGWLRSLIADYGVPLMVLVWTGVSYIPAGDVPKGIPRRLFSPNPWSPGAYGNWTVVKEMLDVPIVYIIGAFIPASMIAVLYYFDHSVASQLAQQKEFNLRKPSSYHYDLLLLGFLTLMCGLLGVPPSNGVIPQSPMHTKSLATLKYQLLRNRLVATARRSIKTNASLGQLYDNMQEAYHHMQTPLVYQQPQGLKELKESTIQATTFTGNLNAPVDETLFDIEKEIDDLLPVEVKEQRVSNLLQSTMVGGCVAAMPILKMIPTSVLWGYFAFMAIESLPGNQFWERILLLFTAPSRRFKVLEDYHATFVETVPFKTIAMFTLFQTTYLLICFGLTWIPIAGVMFPLMIMFLIPVRQYLLPRFFKGAHLQDLDAAEYEEAPALPFNLAAETEIGSTTSYPGDLEILDEVMTRSRGEFRHTSSPKVTSSSSTPVNNRSLSQVFSPRVSGIRLGQMSPRVVGNSPKPASCGRSPLNQSSSN

SEQ ID NO: 9755 - protein, 710 aa, Arabidopsis thaliana
MCYKQDWTGGFKAGFRILAPTTYIFFASAIPVISFGEQLERSTGNSAKSFYLALFQLRNLKLDSEIFADGVLTAVQTLASTAICGMIHSIIGGQPLLILGVAEPTVIMYTFMFNFAKARPELGRDLFLAWSGWVCVWTALMLFVLAICGACSIINRFTRVAGELFGLLIAMLFMQQAIKGLVDEFRIPERENQKLKEFLPSWRFANGMFALVLSFGLLLTGLRSRKARSWRYGTGWLRSLIADYGVPLMVLVWTGVSYIPAGDVPKGIPRRLFSPNPWSPGAYGNWTVVKEMLDVPIVYIIGAFIPASMIAVLYYFDHSVASQLAQQKEFNLRKPSSYHYDLLLLGFLTLMCGLLGVPPSNGVIPQSPMHTKSLATLKYQLLRNRLVATARRSIKTNASLGQLYDNMQEAYHHMQTPLVYQQPQGLKELKESTIQATTFTGNLNAPVDETLFDIEKEIDDLLPVEVKEQRVSNLLQSTMVGGCVAAMPILKMIPTSVLWGYFAFMAIESLPGNQFWERILLLFTAPSRRFKVLEDYHATFVETVPFKTIAMFTLFQTTYLLICFGLTWIPIAGVMFPLMIMFLIPVRQYLLPRFFKGAHLQDLDAAEYEEAPALPFNLAAETEIGSTTSYPGDLEILDEVMTRSRGEFRHTSSPKVTSSSSTPVNNRSLSQVFSPRVSGIRLGQMSPRVVGNSPKPASCGRSPLNQSSSN

SEQ ID NO: 9756 - protein, 625 aa, Arabidopsis thaliana
MIHSIIGGQPLLILGVAEPTVIMYTFMFNFAKARPELGRDLFLAWSGWVCVWTALMLFVLAICGACSIINRFTRVAGELFGLLIAMLFMQQAIKGLVDEFRIPERENQKLKEFLPSWRFANGMFALVLSFGLLLTGLRSRKARSWRYGTGWLRSLIADYGVPLMVLVWTGVSYIPAGDVPKGIPRRLFSPNPWSPGAYGNWTVVKEMLDVPIVYIIGAFIPASMIAVLYYFDHSVASQLAQQKEFNLRKPSSYHYDLLLLGFLTLMCGLLGVPPSNGVIPQSPMHTKSLATLKYQLLRNRLVATARRSIKTNASLGQLYDNMQEAYHHMQTPLVYQQPQGLKELKESTIQATTFTGNLNAPVDETLFDIEKEIDDLLPVEVKEQRVSNLLQSTMVGGCVAAMPILKMIPTSVLWGYFAFMAIESLPGNQFWERILLLFTAPSRRFKVLEDYHATFVETVPFKTIAMFTLFQTTYLLICFGLTWIPIAGVMFPLMIMFLIPVRQYLLPRFFKGAHLQDLDAAEYEEAPALPFNLAAETEIGSTTSYPGDLEILDEVMTRSRGEFRHTSSPKVTSSSSTPVNNRSLSQVFSPRVSGIRLGQMSPRVVGNSPKPASCGRSPLNQSSSN

SEQ ID NO: 9757 - DNA, 1102 bp, Arabidopsis thaliana
gggggggggcccccgctgtgcaaagatatcactttcttgctcccaaagcaaaatcaactcttcttcttcttcttctcccagacatcagcaagattcaggagattaaaaccttaaattaaaacaatacaaactccaaattcaccggaggaaataacttaaaacttgaatctgaaaagatgagctgcaatggttgccgtgttctccggaaaggttgcagcgagaattgtatcctccggccatgtattcaatggattgaaaccgccgatgctcaaggccacgccaccgtcttcgtcgctaaattcttcggccgtgctggtctcatgtcctttatctccgctgttccggattctcaacgtcctgctttgtttcagtcgttgctctacgaagcttgtggaagaactgtcaatccagttaacggagcaatcggaatgttatggactggaaactggaatatctgtcaagcggctgttgaaacagtgcttcgcggcggttctttaagaccgatcccggagcttctcactcacggcggcggtttcgctggctttccttcgcctacatctgaagaagcatctgagatctgcaccgaaatgttgaatctccagcaaaatgattccaccgatcgtaacatctatcatcattcacgattctcaagctctagatctagatctactatggattcttcttctccgacgaaacgtaagagattatcatcggaagaccaaccatcttcggagcttgatctatctctcaaccctaattttcccattaagcaaacaacaccttcttctacacggcggcgatcagtaacaccgtcgatgaactcagaggactccgggacgacgacgactacgacggcgttttgtgacaagggtgatgtgtacggtaacggaggaggagaaacgaccaagttgcttaacctttttgtttaatgcaaaacggcgtcggttttctcagagttagtctagggttttaaatgtaattttacacattttcttcctttttcctggataaatattggaccggcgaattaacaactacgtcgttttgttctctaaaaaaaaaagaaaaaaaaaaaaaaaaaaaactcgagggggggcccggt

SEQ ID NO: 9758 - protein, 250 aa, Arabidopsis thaliana
MSCNGCRVLRKGCSENCILRPCIQWIETADAQGHATVFVAKFFGRAGLMSFISAVPDSQRPALFQSLLYEACGRTVNPVNGAIGMLWTGNWNICQAAVETVLRGGSLRPIPELLTHGGGFAGFPSPTSEEASEICTEMLNLQQNDSTDRNIYHHSRFSSSRSRSTMDSSSPTKRKRLSSEDQPSSELDLSLNPNFPIKQTTPSSTRRRSVTPSMNSEDSGTTTTTTAFCDKGDVYGNGGGETTKLLNLFV

SEQ ID NO: 9759 - protein, 202 aa, Arabidopsis thaliana
MSFISAVPDSQRPALFQSLLYEACGRTVNPVNGAIGMLWTGNWNICQAAVETVLRGGSLRPIPELLTHGGGFAGFPSPTSEEASEICTEMLNLQQNDSTDRNIYHHSRFSSSRSRSTMDSSSPTKRKRLSSEDQPSSELDLSLNPNFPIKQTTPSSTRRRSVTPSMNSEDSGTTTTTTAFCDKGDVYGNGGGETTKLLNLFV

SEQ ID NO: 9760 - protein, 166 aa, Arabidopsis thaliana
MLWTGNWNICQAAVETVLRGGSLRPIPELLTHGGGFAGFPSPTSEEASEICTEMLNLQQNDSTDRNIYHHSRFSSSRSRSTMDSSSPTKRKRLSSEDQPSSELDLSLNPNFPIKQTTPSSTRRRSVTPSMNSEDSGTTTTTTAFCDKGDVYGNGGGETTKLLNLFV

SEQ ID NO: 9761 - DNA, 1511 bp, Arabidopsis thaliana
aaacttttgtctctttttaactctcttaactttcgtttcttctcctaccttcttttaccaacctttcctttctcttacacacatatatatatatacatatatagagagagagaagaggacaaagagttgaaagatgaagactctcatgtcttcatagaaacaagtgatatgtgcgctaagaaagaagaagaagaagaagaagaagacagttctgaagccatgaacaacatacaaaattaccaaaatgacctcttctttcaccaactcatctctcatcatcaccatcatcatcatgatccttctcaatctgaaactttgggagcatccggtaacgttggatctggtttcactatcttctctcaagattccgtctctccaatatggtctctacctccacctacctcgatccaaccaccatttgatcagtttcctcctccttcttcttctccagcatctttctacggaagtttcttcaacagaagtcgagctcatcatcagggattacagttcgggtacgagggttttggtggagccacgtcagcagcacatcatcatcatgaacaacttcggatcttatcggaagctttaggtccggtagtacaagccgggtccggtccttttgggttacaagctgagttagggaagatgacagcacaagagatcatggacgctaaagctttggctgcttcaaagagtcatagtgaagctgagagaagaagaagagagagaatcaataatcatctcgctaagctccgtagcatattacccaacaccaccaaaacggataaagcgtcgttactagctgaagtgatccaacatgtgaaagagttgaagagagagacttcagtgatctcagagacaaatcttgtcccaacggaaagcgatgagttaacggtagctttcacggaggaggaagaaaccggagatggcagatttgtaattaaagcgtcgctttgctgtgaagacaggtcggatctcttgcctgacatgattaaaacattgaaagctatgcgtctcaaaacgctcaaggcggagataaccaccgttgggggacgagtcaagaacgttttgtttgttaccggagaagagagctccggtgaggaagtggaggaagagtactgtatagggacgattgaggaagcttagaaagcggtgatggagaagagcaatgtagaggaatcatcttcttctggaaatgctaagagacagagaatgagtagtcacaacactatcactatcgtcgaacaacagcaacaatataatcagaggtaatcaattttttacttaaatcgcttttttttttttttactttcggtgtatctactacgtgtgttgtttgctggttatggaaatgaatgttgtacgtcacgttatactatagatatatgtgtgtttgtgtgtatgtataacggaagtatttgtatccgttgtggtcttggacttttggtttggttctaagatacttatttttaaaaaaaaaaaaaaaaaaaactcgagggggggcccggtac

SEQ ID NO: 9762 - protein, 381 aa, Arabidopsis thaliana
KLLSLFNSLNFRFFSYLLLPTFPFSYTHIYIYIYREREEDKELKDEDSHVFIETSDMCAKKEEEEEEEDSSEAMNNIQNYQNDLFFHQLISHHHHHHHDPSQSETLGASGNVGSGFTIFSQDSVSPIWSLPPPTSIQPPFDQFPPPSSSPASFYGSFFNRSRAHHQGLQFGYEGFGGATSAAHHHHEQLRILSEALGPVVQAGSGPFGLQAELGKMTAQEIMDAKALAASKSHSEAERRRRERINNHLAKLRSILPNTTKTDKASLLAEVIQHVKELKRETSVISETNLVPTESDELTVAFTEEEETGDGRFVIKASLCCEDRSDLLPDMIKTLKAMRLKTLKAEITTVGGRVKNVLFVTGEESSGEEVEEEYCIGTIEEA

SEQ ID NO: 9763 - protein, 325 aa, Arabidopsis thaliana
MCAKKEEEEEEEDSSEAMNNIQNYQNDLFFHQLISHHHHHHHDPSQSETLGASGNVGSGFTIFSQDSVSPIWSLPPPTSIQPPFDQFPPPSSSPASFYGSFFNRSRAHHQGLQFGYEGFGGATSAAHHHHEQLRILSEALGPVVQAGSGPFGLQAELGKMTAQEIMDAKALAASKSHSEAERRRRERINNHLAKLRSILPNTTKTDKASLLAEVIQHVKELKRETSVISETNLVPTESDELTVAFTEEEETGDGRFVIKASLCCEDRSDLLPDMIKTLKAMRLKTLKAEITTVGGRVKNVLFVTGEESSGEEVEEEYCIGTIEEA

SEQ ID NO: 9764 - protein, 308 aa, Arabidopsis thaliana
MNNIQNYQNDLFFHQLISHHHHHHHDPSQSETLGASGNVGSGFTIFSQDSVSPIWSLPPPTSIQPPFDQFPPPSSSPASFYGSFFNRSRAHHQGLQFGYEGFGGATSAAHHHHEQLRILSEALGPVVQAGSGPFGLQAELGKMTAQEIMDAKALAASKSHSEAERRRRERINNHLAKLRSILPNTTKTDKASLLAEVIQHVKELKRETSVISETNLVPTESDELTVAFTEEEETGDGRFVIKASLCCEDRSDLLPDMIKTLKAMRLKTLKAEITTVGGRVKNVLFVTGEESSGEEVEEEYCIGTIEEA

SEQ ID NO: 9765 - DNA, 1358 bp, Arabidopsis thaliana
gaatccgtaattgtgtctcttctcttcttctggacaaaaaaaaaatggaatggatacaatcactgcccaaaatcgagcttcatgctcatctcaacggttccattagagactccactcttctagagcttgctagggttcttggtgagaaaggcgttatagtgtttgctgatgttgaacatgtcattcaaaaaaatgatcgatctttggtcgaagtcttcaagttgtttgatttgatccataagctcactactgatcacaaaactgtgacaaggatcacaagagaagttgtggaagattttgctttagagaatgtggtgtatcttgagttacgaactactccaaagaggagtgattcaataggtatgagtaaacgttcttacatggaagctgtaatccaaggtctaagatctgtcagtgaagtcgatattgattttgttaccgcatctgattctcaaaaactgcacaatgctggtgatgggattggaagaaagaagatttatgttagacttcttcttagtattgatcgtagggaaacaacagagtccgcaatggaaactgttaagctcgcattggaaatgagagatgtcggggtagttggtatcgatctttcggggaatcctcttgttggagaatggagcactttcttgcctgcattacaatatgccaaagacaatgatcttcacatcactcttcactgtggagagtgctttgtaggttcccaatccgaaagagatccaagccatgcttgattttaaaccgcatcggattggacatgcctgtttcttcaaagacgaagattggacaaagttgaaatctttccggattccggttgaaatatgtttaacatccaacattgtaaccaaatcgatatcttccatcgatatacaccatttcgctgatctttacaatgcaaagcatccattgattctatgcactgatgattttggagtattctccactagcctctccaacgagtacgccctctctgttcgttctcttggtcttagtaaaagtgaaacctttgcattggctagagcagccatagacgcaacatttgcagaagatgaagttaagcaacaacttaggttcatttttgattcagcctcgccagagcacgtttagtgagactgttgagtgcttcagattttaccggtttacttcattttgttggtttataccaaaccgaacaaaaggtgttttggttcattggttggttcgaaaaaataacattcatctcgaatattgattgtaataatataattataatttaaaattttcaaacttttgttctctgttaaaaataaaaattgatttcaacaaaaaaaaaaaaaaaaaaaactcgagggggggcccggtac

SEQ ID NO: 9766 - protein, 248 aa, Arabidopsis thaliana
IRNCVSSLLLDKKKMEWIQSLPKIELHAHLNGSIRDSTLLELARVLGEKGVIVFADVEHVIQKNDRSLVEVFKLFDLIHKLTTDHKTVTRITREVVEDFALENVVYLELRTTPKRSDSIGMSKRSYMEAVIQGLRSVSEVDIDFVTASDSQKLHNAGDGIGRKKIYVRLLLSIDRRETTESAMETVKLALEMRDVGVVGIDLSGNPLVGEWSTFLPALQYAKDNDLHITLHCGECFVGSQSERDPSHA

SEQ ID NO: 9767 - protein, 234 aa, Arabidopsis thaliana
MEWIQSLPKIELHAHLNGSIRDSTLLELARVLGEKGVIVFADVEHVIQKNDRSLVEVFKLFDLIHKLTTDHKTVTRITREVVEDFALENVVYLELRTTPKRSDSIGMSKRSYMEAVIQGLRSVSEVDIDFVTASDSQKLHNAGDGIGRKKIYVRLLLSIDRRETTESAMETVKLALEMRDVGVVGIDLSGNPLVGEWSTFLPALQYAKDNDLHITLHCGECFVGSQSERDPSHA

SEQ ID NO: 9768 - protein, 128 aa, Arabidopsis thaliana
MSKRSYMEAVIQGLRSVSEVDIDFVTASDSQKLHNAGDGIGRKKIYVRLLLSIDRRETTESAMETVKLALEMRDVGVVGIDLSGNPLVGEWSTFLPALQYAKDNDLHITLHCGECFVGSQSERDPSHA

SEQ ID NO: 9769 - DNA, 1434 bp, Arabidopsis thaliana
  misc_feature (1370)..(1371): n is a, c, g, or t
ggtacgaaacagactagttgcgaaacgcgaaagaacaagattcgacaaaagctaaaaataaaataaaagaagaagcaaaaccctagagctcaaggtaatcgccgtcgatttctcaatctctcaccggcgattacatgccgatgaaagttgtacaatagctgctgtaagagagagatttatcaggtatttttagaatcatgtatagagacagaggaacggtgaattcgagacctgaagttgtggatcgtaaacggatcaacgacgctcttgaacgtccttctccttcaacctctcgtcaagttaacggcaaaggcaaaggaaccgttacggcggcgacgacgacggcgaacttgattgggaagcagcagtcgaataacatcaaccatagagattctcgttctgcttctctctcgaagaacaatacggtttctgatgatgaatcagacacagatagtgaagaatcagatgtgagtggttctgatggagaggacacttcatggatatcttggttttgtaatctaagaggaaacgagttcttttgtgaagttgatgatgattacattcaagatgacttcaacttgtgtggactcagcagtctagttccctactacgagtacgctcttgatttgattttggatgttgaatcttctcagggagagatgtttacagaggaacagaatgaattgatcgagtcagcagctgagatgttgtatggactgattcatgctcgttacatattgactagcaaaggattggcagcaatgttagacaaatacaaaaactatgactttggaagatgtccaagagtttattgctgtggccaaccttgtcttccggttggtcaatcagacttaccgcgatctagcactgtgaagatatattgcgcgaaatgcgaagacatttattacccacgatcaaagtatcaaggcaacattgatggagcttactttgggacaacgtttccacatctgttcctgatgacttatgggcatctcaagccagcgaaggcaacacaaaactatgttcaaagagtgtttgggttcaaattacacaaaccgtgaaggaagtttgacgacaaaacccaaggatcaagatcatggcgttggaatggaactgagaaaagaagagacgtgtgtgaacagaaacggaaaataaaacgcactgtaatcacacgaatggtgaagagagcattcatgtctctatttgtcttcaggtacatacacattagaagaaagcaaaagcatggttagaaagaaaaaaaacacgaaaatcttttaatgagtttgttaaacttgaacatgtatttttctaccttcggtaaacttttttattttgtttcttttctcagtgtctgatttagtcatttatcnnaaaaaaaaaaaaaaaaaaaaaaaaaaaaaaagaaaaaaaaaaaaaaaaactcgagggggggcc

SEQ ID NO: 9770 - protein, 287 aa, Arabidopsis thaliana
MYRDRGTVNSRPEVVDRKRINDALERPSPSTSRQVNGKGKGTVTAATTTANLIGKQQSNNINHRDSRSASLSKNNTVSDDESDTDSEESDVSGSDGEDTSWISWFCNLRGNEFFCEVDDDYIQDDFNLCGLSSLVPYYEYALDLILDVESSQGEMFTEEQNELIESAAEMLYGLIHARYILTSKGLAAMLDKYKNYDFGRCPRVYCCGQPCLPVGQSDLPRSSTVKIYCAKCEDIYYPRSKYQGNIDGAYFGTTFPHLFLMTYGHLKPAKATQNYVQRVFGFKLHKP

SEQ ID NO: 9771 - DNA, 2183 bp, Arabidopsis thaliana
aaatcaaaactttgcctctccacaattcgcagccattttttactctcttcttcccctgagaacgacaggagaaagaataaaaaccctaaatttctttaatttcggcgcttcagattatcgttgttaaaggtttttgattgattttgtttaaatgggcgatcttgctatgtccgtagcagacatcaggatggagaatgagcctgatgatttagctagtgataatgttgctgagattgatgtgagtgatgaagagattgatgctgacgaccttgagagacggatgtggaaagatcgtgtcaggcttaaaagaatcaaagagcgacaaaaagctggctctcaaggagctcaaacgaaggagacacctaagaaaatctctgatcaagctcagaggaagaaaatgtctagagctcaagatggtatccttaagtacatgttgaagcttatggaagtctgcaaagttcgcgggtttgtctatggtataataccggaaaagggcaagcctgtgagtggttcctctgacaatataagagcttggtggaaagagaaagtgaagtttgataagaacggtcctgctgctattgctaaatacgaagaggagtgtttagcgtttgggaaatctgatgggaataggaattcacagtttgttctccaggatttgcaagatgctactttagggtctttgttatcttctttgatgcaacattgtgatcctcctcaaaggaagtatccgttggagaaagggacgcctccgccttggtggccaacggggaatgaagaatggtgggtgaaactcggtctgcctaaaagccagagtcctccttaccgaaaacctcatgatctcaagaagatgtggaaggttggagttttaacggcagtgatcaatcatatgttacctgatattgcaaagattaagaggcatgttcgtcagtcgaaatgtttacaggacaagatgacagctaaagagagtgcgatttggttggcggttttgaaccaagaggaatctttgattcagcagcctagcagtgacaatggaaactccaatgtgactgagacacatcgtaggggtaataacgctgacaggaggaaacctatggtcaacagtgacagtgactatgatgttgatgggacagaggaagcttcaggttcagtttcatctaaagacagtagaagaaatcagattcaaaaagaacaaccaacagccatctcacattcagtaagagatcaagataaagcagagaaacatcgcagaaggaaaagacctcgaattagatccggaactgtcaatcgacaagaggaagaacaacctgaagctcaacaaagaaacatcttacctgatatgaatcatgttgatgcccctctgctagaatataacatcaacggtactcatcaagaggacgatgttgtcgacccaaatattgccttaggaccagaggataatggtctggaactagtggttcctgagttcaataacaactatacttatcttccacttgttaatgaacaaactatgatgcctgtagacgaaaggccaatgctttatggaccaaaccctaaccaagagcttcaatttgggtcagggtacaacttctacaatccctctgcagtgtttgtacataaccaggaagacgacattctccatacacagatagaaatgaatacacaagcaccacctcacaacagtgggttcgaggaggccccaggaggagtacttcaaccccttggtttactcggaaatgaagacggtgtaacagggagtgagttgcctcagtatcagagtggcattctgtctccattgactgacttggactttgactatggtggttttggtgatgatttctcatggtttggagcttagtgtcttgccattttttttgggagattacatagttcaaaaggacatggcaatagtctggctagtacagttactttctcttcttcatttcttctgatcttatattcttcctctttttttcttataatattttcttagatttgttaagagaaacaattttccttttgaataagttgccagaagaactgctttgcccgttgtaatggtctctagggaaagcagttagcgtatcatcatttgtaaatttacctgtgagtaattcatcaagttaagagaatcattatttgtttcaaaaaaaaaaaaaaaaaaaactcgagggggggcccggtac

SEQ ID NO: 9772 - protein, 567 aa, Arabidopsis thaliana
MGDLAMSVADIRMENEPDDLASDNVAEIDVSDEEIDADDLERRMWKDRVRLKRIKERQKAGSQGAQTKETPKKISDQAQRKKMSRAQDGILKYMLKLMEVCKVRGFVYGIIPEKGKPVSGSSDNIRAWWKEKVKFDKNGPAAIAKYEEECLAFGKSDGNRNSQFVLQDLQDATLGSLLSSLMQHCDPPQRKYPLEKGTPPPWWPTGNEEWWVKLGLPKSQSPPYRKPHDLKKMWKVGVLTAVINHMLPDIAKIKRHVRQSKCLQDKMTAKESAIWLAVLNQEESLIQQPSSDNGNSNVTETHRRGNNADRRKPMVNSDSDYDVDGTEEASGSVSSKDSRRNQIQKEQPTAISHSVRDQDKAEKHRRRKRPRIRSGTVNRQEEEQPEAQQRNILPDMNHVDAPLLEYNINGTHQEDDVVDPNIALGPEDNGLELVVPEFNNNYTYLPLVNEQTMMPVDERPMLYGPNPNQELQFGSGYNFYNPSAVFVHNQEDDILHTQIEMNTQAPPHNSGFEEAPGGVLQPLGLLGNEDGVTGSELPQYQSGILSPLTDLDFDYGGFGDDFSWFGA

SEQ ID NO: 9773 - protein, 562 aa, Arabidopsis thaliana
MSVADIRMENEPDDLASDNVAEIDVSDEEIDADDLERRMWKDRVRLKRIKERQKAGSQGAQTKETPKKISDQAQRKKMSRAQDGILKYMLKLMEVCKVRGFVYGIIPEKGKPVSGSSDNIRAWWKEKVKFDKNGPAAIAKYEEECLAFGKSDGNRNSQFVLQDLQDATLGSLLSSLMQHCDPPQRKYPLEKGTPPPWWPTGNEEWWVKLGLPKSQSPPYRKPHDLKKMWKVGVLTAVINHMLPDIAKIKRHVRQSKCLQDKMTAKESAIWLAVLNQEESLIQQPSSDNGNSNVTETHRRGNNADRRKPMVNSDSDYDVDGTEEASGSVSSKDSRRNQIQKEQPTAISHSVRDQDKAEKHRRRKRPRIRSGTVNRQEEEQPEAQQRNILPDMNHVDAPLLEYNINGTHQEDDVVDPNIALGPEDNGLELVVPEFNNNYTYLPLVNEQTMMPVDERPMLYGPNPNQELQFGSGYNFYNPSAVFVHNQEDDILHTQIEMNTQAPPHNSGFEEAPGGVLQPLGLLGNEDGVTGSELPQYQSGILSPLTDLDFDYGGFGDDFSWFGA

SEQ ID NO: 9774 - protein, 555 aa, Arabidopsis thaliana
MENEPDDLASDNVAEIDVSDEEIDADDLERRMWKDRVRLKRIKERQKAGSQGAQTKETPKKISDQAQRKKMSRAQDGILKYMLKLMEVCKVRGFVYGIIPEKGKPVSGSSDNIRAWWKEKVKFDKNGPAAIAKYEEECLAFGKSDGNRNSQFVLQDLQDATLGSLLSSLMQHCDPPQRKYPLEKGTPPPWWPTGNEEWWVKLGLPKSQSPPYRKPHDLKKMWKVGVLTAVINHMLPDIAKIKRHVRQSKCLQDKMTAKESAIWLAVLNQEESLIQQPSSDNGNSNVTETHRRGNNADRRKPMVNSDSDYDVDGTEEASGSVSSKDSRRNQIQKEQPTAISHSVRDQDKAEKHRRRKRPRIRSGTVNRQEEEQPEAQQRNILPDMNHVDAPLLEYNINGTHQEDDVVDPNIALGPEDNGLELVVPEFNNNYTYLPLVNEQTMMPVDERPMLYGPNPNQELQFGSGYNFYNPSAVFVHNQEDDILHTQIEMNTQAPPHNSGFEEAPGGVLQPLGLLGNEDGVTGSELPQYQSGILSPLTDLDFDYGGFGDDFSWFGA

SEQ ID NO: 9775 - DNA, 2341 bp, Arabidopsis thaliana
atgagtaatcagaagaagagaaatttccagattgaagcgtttaagcaacgagtcgtcgttgatccaaaatacgccgataaaacttggaagatccttgaacatgcgattcatgagatttacaatcacaacgctagtggtctcagtttcgaagagctttacagaaacgcatacaacatggttctacataagtatggtgataagctttatactggacttgttaccactatgacatttcatctcaaagagatatgtaagtctattgaagaagctcaaggaggagcatttttagaattgcttaataggaaatggaatgatcataacaaagcgttgcaaatgattagggatattctcatgtatatggatcgtacttacgtttctactactaagaaaactcatgttcatgagcttggacttcatctctggagagataatgttgtgtattcgagtaagattcagactaggctattgaatacgcttcttgatttagttcataaggaacggactggtgaagttatagatagggtgttgatgaggaatgtgattaagatgtttatggatttaggtgaatctgtttatcaagatgattttgagaagccgtttttggaagcttctgctgagttttataaggttgagtcaatggagtttattgagtcttgtgattgtggtgagtatttgaagaaagctgagaagcctttagtggaagaagtcgaaagggttgtgaattatttggatgctaagagcgaagcgaagattactagtgtggttgaaagagagatgattgctaaccatgtgcagagactagttcatatggagaattcaggtttggttaatatgcttttgaatgataagtatgaggatatgggtagaatgtatagtttgttccgtagggttgctaatggtcttgtaacggttagagatgttatgactttgcatcttagggaaatgggaaaacagttggttactgatccagagaaatcaaaggatccggttgaatttgtgcagcgtctattggatgagcgggataagtatgacagaattatcaacatggcatttaacaacgataagacgttccagaatgcgctaaattcttcgtttgagtatttcgtcaacttgaacacacgttctcctgagtttatctccctgtttgttgatgataagctacgaaaaggactaaaaggtgtgggagaggaggatgtcgatcttattcttgataaggtgatgatgttgtttcgctacttacaggagaaagacgtttttgagaaatattacaaacagcatctggcgaaaaggcttttatctggaaaaactgtgtcggatgatgcagagaggaatctgatagtgaaactgaagacggaatgtgggtatcaattcacttcgaaacttgaaggtatgttcactgacatgaagacctcacacgacacgctgctaggattttataatagccatcccgagctttcagaaggacctacacttgttgttcaggttctcacaaccggttcttggcccacacagccaaccatacaatgtaacctacctgcagaagtttctgttctgtgtgagaagttcaggtcatattacctcgggactcacaccggtaggagattgtcttggcaaacgaatatgggaacagcagatatcaaagcagtgtttggaaagggtcagaagcatgaactaaacgtttcgactttccaaatgtgtgtccttatgttgttcaacaactctgatcgactaagctacaaagagatcgaacaggcaactgaaatccccaccccagacctaaagcgttgcttgcagtcaatggcgtgtgtaaaaggtaaaaacgtgctaagaaaagaaccaatgagcaaggagatagcagaggaggactggtttgttgtgaacgacaggttcgcaagcaagttctacaaagtgaagataggaactgtggtggcacaaaaggagacagaaccagagaagcaagagacaagacagagagtagaagaagacagaaaacctcagatcgaagcagccatcgtgaggataatgaagtctagacgagtgttggatcacaacaacataatcgcagaggtcaccaaacagttgcagacgcggttcttggcaaacccaacagagataaagaagagaattgaatcactcattgagcgtgatttcttggagagggataatacagaccggaaactttaccgctatctagcgtaaaaaagtctggattgattacacggtccctctgtttatttcgcatcgtttcttctgttagtcagcatttcttatttgttctgtagtctggtaagttataaacattttgtttccgttttgaaaagaaaatattgatttgcctgtt

SEQ ID NO: 9776 - protein, 732 aa, Arabidopsis thaliana
MSNQKKRNFQIEAFKQRVVVDPKYADKTWKILEHAIHEIYNHNASGLSFEELYRNAYNMVLHKYGDKLYTGLVTTMTFHLKEICKSIEEAQGGAFLELLNRKWNDHNKALQMIRDILMYMDRTYVSTTKKTHVHELGLHLWRDNVVYSSKIQTRLLNTLLDLVHKERTGEVIDRVLMRNVIKMFMDLGESVYQDDFEKPFLEASAEFYKVESMEFIESCDCGEYLKKAEKPLVEEVERVVNYLDAKSEAKITSVVEREMIANHVQRLVHMENSGLVNMLLNDKYEDMGRMYSLFRRVANGLVTVRDVMTLHLREMGKQLVTDPEKSKDPVEFVQRLLDERDKYDRIINMAFNNDKTFQNALNSSFEYFVNLNTRSPEFISLFVDDKLRKGLKGVGEEDVDLILDKVMMLFRYLQEKDVFEKYYKQHLAKRLLSGKTVSDDAERNLIVKLKTECGYQFTSKLEGMFTDMKTSHDTLLGFYNSHPELSEGPTLVVQVLTTGSWPTQPTIQCNLPAEVSVLCEKFRSYYLGTHTGRRLSWQTNMGTADIKAVFGKGQKHELNVSTFQMCVLMLFNNSDRLSYKEIEQATEIPTPDLKRCLQSMACVKGKNVLRKEPMSKEIAEEDWFVVNDRFASKFYKVKIGTVVAQKETEPEKQETRQRVEEDRKPQIEAAIVRIMKSRRVLDHNNIIAEVTKQLQTRFLANPTEIKKRIESLIERDFLERDNTDRKLYRYLA

SEQ ID NO: 9777 - protein, 674 aa, Arabidopsis thaliana
MVLHKYGDKLYTGLVTTMTFHLKEICKSIEEAQGGAFLELLNRKWNDHNKALQMIRDILMYMDRTYVSTTKKTHVHELGLHLWRDNVVYSSKIQTRLLNTLLDLVHKERTGEVIDRVLMRNVIKMFMDLGESVYQDDFEKPFLEASAEFYKVESMEFIESCDCGEYLKKAEKPLVEEVERVVNYLDAKSEAKITSVVEREMIANHVQRLVHMENSGLVNMLLNDKYEDMGRMYSLFRRVANGLVTVRDVMTLHLREMGKQLVTDPEKSKDPVEFVQRLLDERDKYDRIINMAFNNDKTFQNALNSSFEYFVNLNTRSPEFISLFVDDKLRKGLKGVGEEDVDLILDKVMMLFRYLQEKDVFEKYYKQHLAKRLLSGKTVSDDAERNLIVKLKTECGYQFTSKLEGMFTDMKTSHDTLLGFYNSHPELSEGPTLVVQVLTTGSWPTQPTIQCNLPAEVSVLCEKFRSYYLGTHTGRRLSWQTNMGTADIKAVFGKGQKHELNVSTFQMCVLMLFNNSDRLSYKEIEQATEIPTPDLKRCLQSMACVKGKNVLRKEPMSKEIAEEDWFVVNDRFASKFYKVKIGTVVAQKETEPEKQETRQRVEEDRKPQIEAAIVRIMKSRRVLDHNNIIAEVTKQLQTRFLANPTEIKKRIESLIERDFLERDNTDRKLYRYLA

SEQ ID NO: 9778 - protein, 657 aa, Arabidopsis thaliana
MTFHLKEICKSIEEAQGGAFLELLNRKWNDHNKALQMIRDILMYMDRTYVSTTKKTHVHELGLHLWRDNVVYSSKIQTRLLNTLLDLVHKERTGEVIDRVLMRNVIKMFMDLGESVYQDDFEKPFLEASAEFYKVESMEFIESCDCGEYLKKAEKPLVEEVERVVNYLDAKSEAKITSVVEREMIANHVQRLVHMENSGLVNMLLNDKYEDMGRMYSLFRRVANGLVTVRDVMTLHLREMGKQLVTDPEKSKDPVEFVQRLLDERDKYDRIINMAFNNDKTFQNALNSSFEYFVNLNTRSPEFISLFVDDKLRKGLKGVGEEDVDLILDKVMMLFRYLQEKDVFEKYYKQHLAKRLLSGKTVSDDAERNLIVKLKTECGYQFTSKLEGMFTDMKTSHDTLLGFYNSHPELSEGPTLVVQVLTTGSWPTQPTIQCNLPAEVSVLCEKFRSYYLGTHTGRRLSWQTNMGTADIKAVFGKGQKHELNVSTFQMCVLMLFNNSDRLSYKEIEQATEIPTPDLKRCLQSMACVKGKNVLRKEPMSKEIAEEDWFVVNDRFASKFYKVKIGTVVAQKETEPEKQETRQRVEEDRKPQIEAAIVRIMKSRRVLDHNNIIAEVTKQLQTRFLANPTEIKKRIESLIERDFLERDNTDRKLYRYLA

SEQ ID NO: 9779 - DNA, 1450 bp, Arabidopsis thaliana
gatccatccaaacgacaccatatttcttaaaccctctagacattggcactgagcttgagacggtgtgagatatcataaatcagtgagtgagtgagtcatgtccgataatctgaagcatcctctcgattctacagctagtgaggaatcactcgagagactctcaaaggttgcgagaatcgagggatttagtgacgaagaatcagaggaacagcagggattggccgacttggagtccatgaacccagtaaaccctagagtgcagcgttacttggttgccattgagtacatcggaactcgtttctccggttcacaacagcaagctaaggaccgcaccgtcgtcggtgtattgcaggaggcttttcataagtttataggccaaccagtaaagatcttttgctcaagtcgaacggatgccggagtgcatgcactgtcaaatgtttgtcatgttgatgtggaacgcatcagtaaaaggaagcctggtgaagtgttaccacctcatgagcctggtgtggtccagagagcggtgaaccattttttacagagaaaagatggtgatgttatggtgattgatgttcggtgtgtcccaagtaattatcatgccagatataaggcccaggagcgcacatacttctaccgcttgctatccgggtcagatccattatcaatccttgaaaaagaccgttgctggcatgttcctgaggagttaaatcttcgctttatgcaggaagcatgcagagttcttgttggatctcatgattttagctccttcagggcagctggttgccaggcaaagtcacctatgagatctttagatgaactaaatatcactgaagtaccatcaactccatattttccatctatcacggaaaggacgttgagtaacctaaacaatggagatcctctcgcatgttccaatcaacccaagtctgagactgctggtgttactactaatgttggagaagtggagggctctacagagggtgattcttttggtagaaggagacgccaccgctgctatgtagttacagcacgttcccgaggttttctgtaccaccaggttcgactgattgtaggagcactgaaatgcgtaggcactggagaattgacggtctcagacgttgaacgaatcctggaggcgaagacagtgagtgcagcaaaacccatggctcctgcatctggtctgtatcttgcccgtgtcagatatgagtttccatgaatacgtgaatttaattcatttccgcaacaatgggcgaggagtcaccaatattggtttttgttcagaagctgattagctgaatagatagagatactgagttcttatgtgttacaccatcactcctgagttactgaatccaatgaactggaaatagtgatgtacgggcggatcaatttcgagtatttcatttggaatgaaaaaaaaaaaaaaaaaaaactcgagggggggcccggt

SEQ ID NO: 9780 - protein, 372 aa, Arabidopsis thaliana
MSDNLKHPLDSTASEESLERLSKVARIEGFSDEESEEQQGLADLESMNPVNPRVQRYLVAIEYIGTRFSGSQQQAKDRTVVGVLQEAFHKFIGQPVKIFCSSRTDAGVHALSNVCHVDVERISKRKPGEVLPPHEPGVVQRAVNHFLQRKDGDVMVIDVRCVPSNYHARYKAQERTYFYRLLSGSDPLSILEKDRCWHVPEELNLRFMQEACRVLVGSHDFSSFRAAGCQAKSPMRSLDELNITEVPSTPYFPSITERTLSNLNNGDPLACSNQPKSETAGVTTNVGEVEGSTEGDSFGRRRRHRCYVVTARSRGFLYHQVRLIVGALKCVGTGELTVSDVERILEAKTVSAAKPMAPASGLYLARVRYEFP

SEQ ID NO: 9781 - protein, 326 aa, Arabidopsis thaliana
MNPVNPRVQRYLVAIEYIGTRFSGSQQQAKDRTVVGVLQEAFHKFIGQPVKIFCSSRTDAGVHALSNVCHVDVERISKRKPGEVLPPHEPGVVQRAVNHFLQRKDGDVMVIDVRCVPSNYHARYKAQERTYFYRLLSGSDPLSILEKDRCWHVPEELNLRFMQEACRVLVGSHDFSSFRAAGCQAKSPMRSLDELNITEVPSTPYFPSITERTLSNLNNGDPLACSNQPKSETAGVTTNVGEVEGSTEGDSFGRRRRHRCYVVTARSRGFLYHQVRLIVGALKCVGTGELTVSDVERILEAKTVSAAKPMAPASGLYLARVRYEFP

SEQ ID NO: 9782 - protein, 218 aa, Arabidopsis thaliana
MVIDVRCVPSNYHARYKAQERTYFYRLLSGSDPLSILEKDRCWHVPEELNLRFMQEACRVLVGSHDFSSFRAAGCQAKSPMRSLDELNITEVPSTPYFPSITERTLSNLNNGDPLACSNQPKSETAGVTTNVGEVEGSTEGDSFGRRRRHRCYVVTARSRGFLYHQVRLIVGALKCVGTGELTVSDVERILEAKTVSAAKPMAPASGLYLARVRYEFP

SEQ ID NO: 9783 - DNA, 1323 bp, Arabidopsis thaliana
agagagagacctttttcttttattttctccatcctcttaatcggcttatcggatccgaatccggacccgaaagcctgaaaacccgacgattaattgcacgatgtccgatgctccgtcgtcttccccggatgccacggcgtcgcactggtgctatcactgcaacaaacgcgtcgtcgttgaaaccttagatgactttgtcgtgtgctgcgaatgtaacaaaggtttcgtcgagtcaattcaaccgactcccgccgcttattcatcgccggcgccaccgcagccactttccccagatctgaatgtagaagactccagtattggctcgcatttcctccagatgctccgcttgttagcccacgcgccttctcagcgttcaccaccacgacaccttgatgttttatcttacgaagatgatttcttcaggttggagctcaatagtagaaacgaaatcgacgatgacgaagacgaagatgaagatgatggagatgaagaagaagaggatgaggaagagaatttaaccgtcaacgaagaagaagacgaagaagatgatctgaggaggagaaatcgttttcctctcacgacgacgcagtcgagaaccggaagaaacagaattctcgattgggctgagattttgatgggaatcgaagacaattcgattgagttccgtatggaatcagatcgatacgcaggaaatccggctgattacatagacgatgcagccggatacgaagctttgctacagaatttagcagaaggagatggtgggggtggcggaggaaggagaggcgcaccaccggctgcgaaatcggcaatagaggcattggagactttcgaggttagttcttcggagggagagatggttatggtttgtgctgtgtgtaaagatggaatggtgatgggagaaactggtaagaagttaccgtgtggacattgttaccacggagattgtattgtgccatggttaggaacaaggaactcttgtcctgtctgtagattccagcttgagactgatgatgctgaatatgaggaagagaggaaaaaaagaacttctaccgtgtcagattctgctgctgcttcttcttcttcttcaacttctcgttactgaagtggaggaaatgcccccatttgttgttacttttgttgttactctttctctttagattaaatctttgcttagtctctcaacactatttggttggttgcatgttgcatcaaagaagcgagaaaacagagaacaaaaaaaaaaatccggctccaaaaagacaattgttatttgtaagtgtgttgtatctttggcctaaacaatcccatagtggtttcttt

SEQ ID NO: 9784 - protein, 334 aa, Arabidopsis thaliana
MSDAPSSSPDATASHWCYHCNKRVVVETLDDFVVCCECNKGFVESIQPTPAAYSSPAPPQPLSPDLNVEDSSIGSHFLQMLRLLAHAPSQRSPPRHLDVLSYEDDFFRLELNSRNEIDDDEDEDEDDGDEEEEDEEENLTVNEEEDEEDDLRRRNRFPLTTTQSRTGRNRILDWAEILMGIEDNSIEFRMESDRYAGNPADYIDDAAGYEALLQNLAEGDGGGGGGRRGAPPAAKSAIEALETFEVSSSEGEMVMVCAVCKDGMVMGETGKKLPCGHCYHGDCIVPWLGTRNSCPVCRFQLETDDAEYEEERKKRTSTVSDSAAASSSSSTSRY

SEQ ID NO: 9785 - protein, 255 aa, Arabidopsis thaliana
MLRLLAHAPSQRSPPRHLDVLSYEDDFFRLELNSRNEIDDDEDEDEDDGDEEEEDEEENLTVNEEEDEEDDLRRRNRFPLTTTQSRTGRNRILDWAEILMGIEDNSIEFRMESDRYAGNPADYIDDAAGYEALLQNLAEGDGGGGGGRRGAPPAAKSAIEALETFEVSSSEGEMVMVCAVCKDGMVMGETGKKLPCGHCYHGDCIVPWLGTRNSCPVCRFQLETDDAEYEEERKKRTSTVSDSAAASSSSSTSRY

SEQ ID NO: 9786 - DNA, 2891 bp, Arabidopsis thaliana
aaaatctctgtggaagccccattttcacatctaaatctcacaaatctctctcaagcttcgatctttcttctagagacgagctagtgcttccacaaaccctaaactatgtccggcggtttcttccggggtacttccgccgagcaggatactcggttttctaacaagcaagctaaattgatgaaaagccagaaatttgctccggagttagagaatctggtggatatcactaaagtgaagatggatgttatgaaaccttggattgcgactagagtcactgagcttcttggtattgaagatgaagtgctgattaactttatctatggtctgcttgacgggaaggtagtgaatggtaaggagattcagataacgctaactggattcatggagaaaaatactggcaaatttatgaaagaactttggacacttcttctaagcgcacagaataatccaagtggtgttccacagcagtttttagatgctagagctgctgaaacaaagaagaaacaggaagaagcaaatgaaataatgaagaagagggagggagataagaagaacattgagcacgatatattgaggaaaatagacagcggtgtagaacataaggagacaaatggcatggatgcaaaaccttcaagagatcgtccagaggatgggagaagggctgacgagaagaatggtgtaaaagaaaggagaagggatctgatacctccacgtcgcggagatgcatcccgctcaccccttagagggtcacgttctaggtcaatcagcaaaacaaattcaggctcgaaaagttattctggcgaacggaaatccaggagcacatctcaatcatcagatgcctccatctcacctagaaagcgaagattgtcgaattcaagacgtagatccagatcacgttccgtgcgtaggtctctgtctcctcggcgacgtaggatacactctcctttcagaagcaggtcgcggtcacctattagacgtcacaggcgacctacgcatgagggacgccgtcaatcaccagccccttcaagacgtcgccgttctccatccccacctgctagacggcgcaggtcaccatccccacctgctagacggcgcaggtcaccatcaccacctgctagacggcacaggtctccaacaccacctgcaaggcagcgcaggtcaccatcgccccctgctaggcgtcaccgttctccaccgccagctaggcggcgtaggtctccttcaccgccagctaggcggcgtaggtctccttcaccgccagctaggcggcgtaggtctccatctccactctacaggcgtaacaggtctccatctccactctataggcgtaacaggtcacggtcaccgctggctaagcggggaaggtctgactcaccagggaggtctccgtcaccagtggctaggctcagggatcccactggggcaagattgccttcaccatccattgagcaaagattgccttcaccacccgttgcacaaaggttgccttcaccaccccctaggcgtgcaggattaccttcaccaccccctgcgcaaaggttgccttcaccaccccctaggcgtgcaggattaccttcaccaatgaggattggaggatctcatgcagccaatcacctggaatcaccatcacccagctcattgtcccctcctggtaggaaaaaagtgttaccatctccacctgttagaagacgcaggtcactgacacctgacgaagagcgagtctccctgtcacaaggtggacgccatacttccccttcacatatcaagcaagatggatctatgtcacctgttaggggtcgaggtaaatcttctccttcatctcgacatcagaaagcgcgctctcctgttcggcgcagatcaccaacacctgtcaaccggcgaagtcgaagatcttcatctgcttcacgatcacctgatagacgcaggagacggtctccatcttcgagcagatctccttctaggtcgcgatcacctcctgttcttcatagatctccttctccacgtggaagaaaacatcagagagagagaagatctcctgggcgtctatctgaagaacaagatagggttcaaaattccaagctgttaaagagaacttcagtgcctgatactgacaagaggaaacaattaccagagaagttgctagaagttgggcgtgtagaacattataaggagcaggagagaaagagtgataagttgtcagagaagcgatctgttcacagacaccatggttcacagatgtccccagtagaaaattcagaaggaaggagtcggcctgtttctagtaaagtgaaagacagtgagcaggttgagaaagaggataacagcgacctggatgcaaacctttcctgtgattctaaggataccatcagacatcaaattaaggataaaaatagaagaaagaataaaaggtcttcaagggaagaagtatcttcagatgataatggcagttctgattccgacgtagatgataggaaggaggctaaaaggaggaggaaggaggagaagaaaacgagaaaggaggagaagaaacgtaggcgagaggagagacatcgtaaaagggaagaacgtcgtggtggaaaggagaagcataagaaacaagagctttctgatacttcagaaggtgaagttgaggcccgtcctaagattaaaaaaggggaggaatctgatccaaagaggcttgaaattgagttgcgaaacaaagcactcgagtcattgaaagcaaagaagggcattagccactaagtcccttgtccagcgttatttgaacatcatcttttatgatactatcccttgctagatttatgaacatcatcttatgttgtgttttttcttacatgttccaaactttcttatgtggtctgtttgttggtggcagcaaaattggacaagtg

SEQ ID NO: 9787 - protein, 878 aa, Arabidopsis thaliana
MSGGFFRGTSAEQDTRFSNKQAKLMKSQKFAPELENLVDITKVKMDVMKPWIATRVTELLGIEDEVLINFIYGLLDGKVVNGKEIQITLTGFMEKNTGKFMKELWTLLLSAQNNPSGVPQQFLDARAAETKKKQEEANEIMKKREGDKKNIEHDILRKIDSGVEHKETNGMDAKPSRDRPEDGRRADEKNGVKERRRDLIPPRRGDASRSPLRGSRSRSISKTNSGSKSYSGERKSRSTSQSSDASISPRKRRLSNSRRRSRSRSVRRSLSPRRRRIHSPFRSRSRSPIRRHRRPTHEGRRQSPAPSRRRRSPSPPARRRRSPSPPARRRRSPSPPARRHRSPTPPARQRRSPSPPARRHRSPPPARRRRSPSPPARRRRSPSPPARRRRSPSPLYRRNRSPSPLYRRNRSRSPLAKRGRSDSPGRSPSPVARLRDPTGARLPSPSIEQRLPSPPVAQRLPSPPPRRAGLPSPPPAQRLPSPPPRRAGLPSPMRIGGSHAANHLESPSPSSLSPPGRKKVLPSPPVRRRRSLTPDEERVSLSQGGRHTSPSHIKQDGSMSPVRGRGKSSPSSRHQKARSPVRRRSPTPVNRRSRRSSSASRSPDRRRRRSPSSSRSPSRSRSPPVLHRSPSPRGRKHQRERRSPGRLSEEQDRVQNSKLLKRTSVPDTDKRKQLPEKLLEVGRVEHYKEQERKSDKLSEKRSVHRHHGSQMSPVENSEGRSRPVSSKVKDSEQVEKEDNSDLDANLSCDSKDTIRHQIKDKNRRKNKRSSREEVSSDDNGSSDSDVDDRKEAKRRRKEEKKTRKEEKKRRREERHRKREERRGGKEKHKKQELSDTSEGEVEARPKIKKGEESDPKRLEIELRNKALESLKAKKGISH

SEQ ID NO: 9788 - protein, 854 aa, Arabidopsis thaliana
MKSQKFAPELENLVDITKVKMDVMKPWIATRVTELLGIEDEVLINFIYGLLDGKVVNGKEIQITLTGFMEKNTGKFMKELWTLLLSAQNNPSGVPQQFLDARAAETKKKQEEANEIMKKREGDKKNIEHDILRKIDSGVEHKETNGMDAKPSRDRPEDGRRADEKNGVKERRRDLIPPRRGDASRSPLRGSRSRSISKTNSGSKSYSGERKSRSTSQSSDASISPRKRRLSNSRRRSRSRSVRRSLSPRRRRIHSPFRSRSRSPIRRHRRPTHEGRRQSPAPSRRRRSPSPPARRRRSPSPPARRRRSPSPPARRHRSPTPPARQRRSPSPPARRHRSPPPARRRRSPSPPARRRRSPSPPARRRRSPSPLYRRNRSPSPLYRRNRSRSPLAKRGRSDSPGRSPSPVARLRDPTGARLPSPSIEQRLPSPPVAQRLPSPPPRRAGLPSPPPAQRLPSPPPRRAGLPSPMRIGGSHAANHLESPSPSSLSPPGRKKVLPSPPVRRRRSLTPDEERVSLSQGGRHTSPSHIKQDGSMSPVRGRGKSSPSSRHQKARSPVRRRSPTPVNRRSRRSSSASRSPDRRRRRSPSSSRSPSRSRSPPVLHRSPSPRGRKHQRERRSPGRLSEEQDRVQNSKLLKRTSVPDTDKRKQLPEKLLEVGRVEHYKEQERKSDKLSEKRSVHRHHGSQMSPVENSEGRSRPVSSKVKDSEQVEKEDNSDLDANLSCDSKDTIRHQIKDKNRRKNKRSSREEVSSDDNGSSDSDVDDRKEAKRRRKEEKKTRKEEKKRRREERHRKREERRGGKEKHKKQELSDTSEGEVEARPKIKKGEESDPKRLEIELRNKALESLKAKKGISH

SEQ ID NO: 9789 - protein, 834 aa, Arabidopsis thaliana
MDVMKPWIATRVTELLGIEDEVLINFIYGLLDGKVVNGKEIQITLTGFMEKNTGKFMKELWTLLLSAQNNPSGVPQQFLDARAAETKKKQEEANEIMKKREGDKKNIEHDILRKIDSGVEHKETNGMDAKPSRDRPEDGRRADEKNGVKERRRDLIPPRRGDASRSPLRGSRSRSISKTNSGSKSYSGERKSRSTSQSSDASISPRKRRLSNSRRRSRSRSVRRSLSPRRRRIHSPFRSRSRSPIRRHRRPTHEGRRQSPAPSRRRRSPSPPARRRRSPSPPARRRRSPSPPARRHRSPTPPARQRRSPSPPARRHRSPPPARRRRSPSPPARRRRSPSPPARRRRSPSPLYRRNRSPSPLYRRNRSRSPLAKRGRSDSPGRSPSPVARLRDPTGARLPSPSIEQRLPSPPVAQRLPSPPPRRAGLPSPPPAQRLPSPPPRRAGLPSPMRIGGSHAANHLESPSPSSLSPPGRKKVLPSPPVRRRRSLTPDEERVSLSQGGRHTSPSHIKQDGSMSPVRGRGKSSPSSRHQKARSPVRRRSPTPVNRRSRRSSSASRSPDRRRRRSPSSSRSPSRSRSPPVLHRSPSPRGRKHQRERRSPGRLSEEQDRVQNSKLLKRTSVPDTDKRKQLPEKLLEVGRVEHYKEQERKSDKLSEKRSVHRHHGSQMSPVENSEGRSRPVSSKVKDSEQVEKEDNSDLDANLSCDSKDTIRHQIKDKNRRKNKRSSREEVSSDDNGSSDSDVDDRKEAKRRRKEEKKTRKEEKKRRREERHRKREERRGGKEKHKKQELSDTSEGEVEARPKIKKGEESDPKRLEIELRNKALESLKAKKGISH

SEQ ID NO: 9790 - DNA, 2790 bp, Arabidopsis thaliana
ggttgttgttgtattccgtacgtcggtcgttgtcgggagaattggcgcgtgaaatccttggctccgtcgaatacgtctgcctccgacggctgtgagtcgcatgattgagtcgtgggtttctcttgatgaagtctagaagtgaaagtaagaattgtaggcttgcacaagcctctagagtagcagtcaacaaagttctagacaaaagcagcgcccgtggctctcgaggcaagaagaagcaagatgataactgtgattccgctaagcgggataaaggcgtaaacggtaagggaaagcaagcgctcgacgcaagattgattgataacgttctagaggacaggggatgtggtaatgttgatgatgatgaaatgaatgattcagactgggaagactgtccaatccctagtcttgatagtacggttgatgataataatgttgatgacaccagagagctaaccatagaatttgatgatgatgttcctgatgctaagaagcagaagaatgcataccgtgcaacagcagaagacaaggtacgggcggaacttgtccataaggtgcacttgctctgtctgcttgcaagagggaggatagttgacagtgcttgtaatgatcccttgattcaggctgccttgctttcacttctaccatcatacttgacaaaagtatcaaatctcgagaaagttactgtcaaggatatagcccctcttcttcgttgggttcgtgaaaacttttctgttagttgttctcccagttctgagaaatcttttcgtacatccctagcatttgctcttgaatctcgtaaaggcacagcggaagagcttgcagcactggctgttgctttgcttagagcattaaagctcacaacccggtttgtgtctattcttgatgttgcatccttaaaacctggggccgataggaatgaatcatcaggtcaaaacagagctaaaatgaagcatgggatattcaggacgtcaacacttatggtaccaaaacagcaggccatctcgtcatacccgaagaaatcttcctcccatgttaagaataaaagtccctttgaaaagcctcagcttgggaatcccctgggctctgatcaggtacaagacaatgcagtcaattcatcttgtgaagcaggaatgtccataaaatctgacggaacaaggaggaaaggagatgttgagttcgagaggcaaatagccatggctttgtctgcaactgcagacaaccaacagagctctcaagtgaacaatacgaagaaagttcgtgaaataacaaaaataagtaatagctcgtcagtttctgaccaagtaatatccacggctttcggttctaagaaagtagattctcccctttgttggcttgaggtgtattgcaatggggaaaacatggatgggaaatgggtccatgtcgatgctgttaatggaatgatagatgcagagcaaaacattgaagcagcagctgccgcatgcaaaaccgttctcagatatgttgttgcatttgctgctggtggagctaaagatgtcactcgcaggtactgtacaaagtggcacactatttcatccaaacgggtgtcttcagtgtggtgggatatggtattagcaccgttagtacatctcgagtcaggtgcaactcacgatgaagacattgctctgagaaatttcaatggcctaaatcctgtttctagtagagcttcctcgagtagctcgtcgtttggtataaggagtgctcttgaagatatggagttggctacacgggcgctgactgagtctcttcctactaaccagcaggcttataaaagtcatgaaatatatgctattgagaaatggcttcacaagaaccagatacttcacccaaaaggtccagttctgggattttgctctggtcatccagtatatcctcgaacctgtgtgcagactcttaaaacaaaagaaagatggcttcgtgatgggctacaacttaaggcgaatgaagttccctcaaagattcttaagcgaaactcgaagttcaagaaagtaaaagattttgaagatggcgacaacaacattaaaggtggttcttcttgcatggaactatatgggaagtggcaaatggaaccattgtgtctccctcccgctgttaatggaattgtgcccaagaacgagcgcggtcaagttgatgtctggtctgagaaatgtctcccacctggaacagtccacttaaggtttcctcgaatatttgcggttgctaagagattcggtatagattatgcacctgccatggttggtttcgagtacagaagtggaggtgctactcctatttttgaaggtattgtggtctgtaccgagttcaaagacacaatcctcgaggcatatgcagaagaacaagaaaagaaagaagaagaggagagaagaagaaatgaggcacaagcagcttcgagatggtatcagcttctttcgtctatcttaacccgtgaaagattgaaaaaccgttacgctaataactctaacgatgtcgaagccaagagtttggaagtgaattcagaaacagtcgttaaggcaaagaatgtgaaagcacctgaaaagcagagagtggctaagagaggagaaaagtcacgagtaagaaagtctcgtaatgaagatgaaagtcatgaacatgtgtttcttgatgaggaagaaacctttgatgaggaaacctctgtgaaaacgaaacgctgcaaatgtggcttctctgtcgaagttgaacaaatgtagttttgacttcgtttactggccctaggagtctagctaggagtttcatttgtttagaaaatgattttcc

SEQ ID NO: 9791 - protein, 865 aa, Arabidopsis thaliana
MKSRSESKNCRLAQASRVAVNKVLDKSSARGSRGKKKQDDNCDSAKRDKGVNGKGKQALDARLIDNVLEDRGCGNVDDDEMNDSDWEDCPIPSLDSTVDDNNVDDTRELTIEFDDDVPDAKKQKNAYRATAEDKVRAELVHKVHLLCLLARGRIVDSACNDPLIQAALLSLLPSYLTKVSNLEKVTVKDIAPLLRWVRENFSVSCSPSSEKSFRTSLAFALESRKGTAEELAALAVALLRALKLTTRFVSILDVASLKPGADRNESSGQNRAKMKHGIFRTSTLMVPKQQAISSYPKKSSSHVKNKSPFEKPQLGNPLGSDQVQDNAVNSSCEAGMSIKSDGTRRKGDVEFERQIAMALSATADNQQSSQVNNTKKVREITKISNSSSVSDQVISTAFGSKKVDSPLCWLEVYCNGENMDGKWVHVDAVNGMIDAEQNIEAAAAACKTVLRYVVAFAAGGAKDVTRRYCTKWHTISSKRVSSVWWDMVLAPLVHLESGATHDEDIALRNFNGLNPVSSRASSSSSSFGIRSALEDMELATRALTESLPTNQQAYKSHEIYAIEKWLHKNQILHPKGPVLGFCSGHPVYPRTCVQTLKTKERWLRDGLQLKANEVPSKILKRNSKFKKVKDFEDGDNNIKGGSSCMELYGKWQMEPLCLPPAVNGIVPKNERGQVDVWSEKCLPPGTVHLRFPRIFAVAKRFGIDYAPAMVGFEYRSGGATPIFEGIVVCTEFKDTILEAYAEEQEKKEEEERRRNEAQAASRWYQLLSSILTRERLKNRYANNSNDVEAKSLEVNSETVVKAKNVKAPEKQRVAKRGEKSRVRKSRNEDESHEHVFLDEEETFDEETSVKTKRCKCGFSVEVEQM

SEQ ID NO: 9792 - protein, 785 aa, Arabidopsis thaliana
MNDSDWEDCPIPSLDSTVDDNNVDDTRELTIEFDDDVPDAKKQKNAYRATAEDKVRAELVHKVHLLCLLARGRIVDSACNDPLIQAALLSLLPSYLTKVSNLEKVTVKDIAPLLRWVRENFSVSCSPSSEKSFRTSLAFALESRKGTAEELAALAVALLRALKLTTRFVSILDVASLKPGADRNESSGQNRAKMKHGIFRTSTLMVPKQQAISSYPKKSSSHVKNKSPFEKPQLGNPLGSDQVQDNAVNSSCEAGMSIKSDGTRRKGDVEFERQIAMALSATADNQQSSQVNNTKKVREITKISNSSSVSDQVISTAFGSKKVDSPLCWLEVYCNGENMDGKWVHVDAVNGMIDAEQNIEAAAAACKTVLRYVVAFAAGGAKDVTRRYCTKWHTISSKRVSSVWWDMVLAPLVHLESGATHDEDIALRNFNGLNPVSSRASSSSSSFGIRSALEDMELATRALTESLPTNQQAYKSHEIYAIEKWLHKNQILHPKGPVLGFCSGHPVYPRTCVQTLKTKERWLRDGLQLKANEVPSKILKRNSKFKKVKDFEDGDNNIKGGSSCMELYGKWQMEPLCLPPAVNGIVPKNERGQVDVWSEKCLPPGTVHLRFPRIFAVAKRFGIDYAPAMVGFEYRSGGATPIFEGIVVCTEFKDTILEAYAEEQEKKEEEERRRNEAQAASRWYQLLSSILTRERLKNRYANNSNDVEAKSLEVNSETVVKAKNVKAPEKQRVAKRGEKSRVRKSRNEDESHEHVFLDEEETFDEETSVKTKRCKCGFSVEVEQM

SEQ ID NO: 9793 - protein, 592 aa, Arabidopsis thaliana
MKHGIFRTSTLMVPKQQAISSYPKKSSSHVKNKSPFEKPQLGNPLGSDQVQDNAVNSSCEAGMSIKSDGTRRKGDVEFERQIAMALSATADNQQSSQVNNTKKVREITKISNSSSVSDQVISTAFGSKKVDSPLCWLEVYCNGENMDGKWVHVDAVNGMIDAEQNIEAAAAACKTVLRYVVAFAAGGAKDVTRRYCTKWHTISSKRVSSVWWDMVLAPLVHLESGATHDEDIALRNFNGLNPVSSRASSSSSSFGIRSALEDMELATRALTESLPTNQQAYKSHEIYAIEKWLHKNQILHPKGPVLGFCSGHPVYPRTCVQTLKTKERWLRDGLQLKANEVPSKILKRNSKFKKVKDFEDGDNNIKGGSSCMELYGKWQMEPLCLPPAVNGIVPKNERGQVDVWSEKCLPPGTVHLRFPRIFAVAKRFGIDYAPAMVGFEYRSGGATPIFEGIVVCTEFKDTILEAYAEEQEKKEEEERRRNEAQAASRWYQLLSSILTRERLKNRYANNSNDVEAKSLEVNSETVVKAKNVKAPEKQRVAKRGEKSRVRKSRNEDESHEHVFLDEEETFDEETSVKTKRCKCGFSVEVEQM

SEQ ID NO: 9794 - DNA, 1105 bp, Arabidopsis thaliana
ctcactagtccccccccccccccgataaagcttccatggctaatcttgtttaagcttctcttcttcttctctctcctgtgtctcgttcactagttttttttcgggggagagtgatggagtgtgtttgttgaatagttttgacgatcacatggctgagatttgttacgagaacgagactatgatgattgaaacgacggcgacggtggtgaagaaggcaacgacgacaacgaggagacgagaacggagctcgtctcaagcagcgagaagaaggagaatggagatccggaggtttaagtttgtttccggcgaacaagaacctgtcttcgtcgacggtgacttacagaggcggaggagaagagaatccaccgtcgcagcctccacctccaccgtgttttacgaaacggcgaaggaagttgtcgtcctatgcgagtctcttagttcaacggttgtggcattgcctgatcctgaagcttatcctaaatacggcgtcgcttcagtctgtggaagaagacgtgaaatggaagacgccgtcgctgtgcatccgtttttttcccgtcatcagacggaatattcatccaccggatttcactattgcggcgtttacgatggccatggctgttcccatgtagcgatgaaatgtagagaaagactacacgagctagtacgtgaagagtttgaagctgatgctgactgggaaaagtcaatggcgcgtagcttcacgcgcatggacatggaggttgttgcgttgaacgccgatggtgcggcaaaatgccggtgcgagcttcagaggccggactgcgacgcggtgggatctaccgcagttgtgtctgtcctcacgccggagaaaatcatcgtggcgaattgcggtgactcacgtgccgttctctgtcgtaacggcaaagccattgctttatcctccgatcataaggttttgttcgttttttgataatctctcttgtttcgtttattcatcgttaaatgtttatccgttagatctacggttatggtttactcactgtaatggaaacgagaatttcgttacgtgttgcgttcgaaacttacctatcaattgtttaaacacaataaagttggaacgggagggggg

SEQ ID NO: 9795 - protein, 265 aa, Arabidopsis thaliana
MAEICYENETMMIETTATVVKKATTTTRRRERSSSQAARRRRMEIRRFKFVSGEQEPVFVDGDLQRRRRRESTVAASTSTVFYETAKEVVVLCESLSSTVVALPDPEAYPKYGVASVCGRRREMEDAVAVHPFFSRHQTEYSSTGFHYCGVYDGHGCSHVAMKCRERLHELVREEFEADADWEKSMARSFTRMDMEVVALNADGAAKCRCELQRPDCDAVGSTAVVSVLTPEKIIVANCGDSRAVLCRNGKAIALSSDHKVLFVF

SEQ ID NO: 9796 - protein, 255 aa, Arabidopsis thaliana
MMIETTATVVKKATTTTRRRERSSSQAARRRRMEIRRFKFVSGEQEPVFVDGDLQRRRRRESTVAASTSTVFYETAKEVVVLCESLSSTVVALPDPEAYPKYGVASVCGRRREMEDAVAVHPFFSRHQTEYSSTGFHYCGVYDGHGCSHVAMKCRERLHELVREEFEADADWEKSMARSFTRMDMEVVALNADGAAKCRCELQRPDCDAVGSTAVVSVLTPEKIIVANCGDSRAVLCRNGKAIALSSDHKVLFVF

SEQ ID NO: 9797 - protein, 254 aa, Arabidopsis thaliana
MIETTATVVKKATTTTRRRERSSSQAARRRRMEIRRFKFVSGEQEPVFVDGDLQRRRRRESTVAASTSTVFYETAKEVVVLCESLSSTVVALPDPEAYPKYGVASVCGRRREMEDAVAVHPFFSRHQTEYSSTGFHYCGVYDGHGCSHVAMKCRERLHELVREEFEADADWEKSMARSFTRMDMEVVALNADGAAKCRCELQRPDCDAVGSTAVVSVLTPEKIIVANCGDSRAVLCRNGKAIALSSDHKVLFVF

SEQ ID NO: 9798 - DNA, 1332 bp, Arabidopsis thaliana
ggagagagctcactagtcccccccccccaaattttagcagtccctttcttcatttccttcctctgcttcttctccggtggatgtcctctttcatcaatggcggcgaggataaacacttcgcttcataacgccctctcttttttaaagccttttaacactcccctcaataccaaaccattctcttttagaagaaacagcttcagattttccaaaaagcttccttattattctcagttttcctcagggaagagagctctctattgcacttccagttcccaggaaagtaccgtcgatgaaggcgagacatttgtcctcaccactcctctttattacgttaatgcccctccccacatgggtagtgcttacaccactatcgccgccgattcaatttctcgtttccagagactgcttggtaagaaggttatctttatcacaggaacagatgaacatggtgagaagatagctacttcagcagctgctaatggacgtaatcctcctgaacattgtgacctcatttctcaatcttatagaactctttggaaagatctcgatatagcttatgacaaattcattagaactactgatcctaagcatgaagctattgtaaaagagttctacgctcgtgttttcgcaaacggcgatatttacagagctgattatgaaggtctttactgtgttaactgcgaggaatataaggatgagaaagagttgcttgaaaacaattgttgccctgtccatcaaatgccatgtgttgcaaggaaagaagataactacttctttgctttgtcgaaatatcagaaaccacttgaagacattttggcccagaatcctcgttttgtgcagccttcgtatcgtcttaatgaggtgcaaagttggataaagagtggcttaagagatttttccatttctcgagcattagtggattggggaattcctgttcccgacgacgataagcaaaccatatatgtttggtttgatgctctacttggttacatatcagctctaacagaggacaacaaacaacaaaatctagaaactgctgtttcattgggctggcctgcttcattgcatttgatcggaaaggatattctacgatttcacgctgtctactggcctgccatgctaatgtctgctggtcttgaacttcccaagatggtgtttggccatgggtttctgacaaaggatggaatgaagatgggaaaatcgttggggaatactctagaaccgtttgagttggttcagaaatttgggccagatgccgtgaggtatttcttcctacgggaggttgaatttggaaacgatggggactattcatgtttaaacacaataaag

SEQ ID NO: 9799 - protein, 444 aa, Arabidopsis thaliana
GESSLVPPPQILAVPFFISFLCFFSGGCPLSSMAARINTSLHNALSFLKPFNTPLNTKPFSFRRNSFRFSKKLPYYSQFSSGKRALYCTSSSQESTVDEGETFVLTTPLYYVNAPPHMGSAYTTIAADSISRFQRLLGKKVIFITGTDEHGEKIATSAAANGRNPPEHCDLISQSYRTLWKDLDIAYDKFIRTTDPKHEAIVKEFYARVFANGDIYRADYEGLYCVNCEEYKDEKELLENNCCPVHQMPCVARKEDNYFFALSKYQKPLEDILAQNPRFVQPSYRLNEVQSWIKSGLRDFSISRALVDWGIPVPDDDKQTIYVWFDALLGYISALTEDNKQQNLETAVSLGWPASLHLIGKDILRFHAVYWPAMLMSAGLELPKMVFGHGFLTKDGMKMGKSLGNTLEPFELVQKFGPDAVRYFFLREVEFGNDGDYSCLNTIK

SEQ ID NO: 9800 - protein, 412 aa, Arabidopsis thaliana
MAARINTSLHNALSFLKPFNTPLNTKPFSFRRNSFRFSKKLPYYSQFSSGKRALYCTSSSQESTVDEGETFVLTTPLYYVNAPPHMGSAYTTIAADSISRFQRLLGKKVIFITGTDEHGEKIATSAAANGRNPPEHCDLISQSYRTLWKDLDIAYDKFIRTTDPKHEAIVKEFYARVFANGDIYRADYEGLYCVNCEEYKDEKELLENNCCPVHQMPCVARKEDNYFFALSKYQKPLEDILAQNPRFVQPSYRLNEVQSWIKSGLRDFSISRALVDWGIPVPDDDKQTIYVWFDALLGYISALTEDNKQQNLETAVSLGWPASLHLIGKDILRFHAVYWPAMLMSAGLELPKMVFGHGFLTKDGMKMGKSLGNTLEPFELVQKFGPDAVRYFFLREVEFGNDGDYSCLNTIK

SEQ ID NO: 9801 - protein, 327 aa, Arabidopsis thaliana
MGSAYTTIAADSISRFQRLLGKKVIFITGTDEHGEKIATSAAANGRNPPEHCDLISQSYRTLWKDLDIAYDKFIRTTDPKHEAIVKEFYARVFANGDIYRADYEGLYCVNCEEYKDEKELLENNCCPVHQMPCVARKEDNYFFALSKYQKPLEDILAQNPRFVQPSYRLNEVQSWIKSGLRDFSISRALVDWGIPVPDDDKQTIYVWFDALLGYISALTEDNKQQNLETAVSLGWPASLHLIGKDILRFHAVYWPAMLMSAGLELPKMVFGHGFLTKDGMKMGKSLGNTLEPFELVQKFGPDAVRYFFLREVEFGNDGDYSCLNTIK

SEQ ID NO: 9802 - DNA, 1842 bp, Arabidopsis thaliana
gatgagagatagacagagagggaaaacaactacacaagtcaaattttctgttctaaaaaagtaaaagaagtatggtggaggaaacgagctctggtggtggctcatcggcttctccgatcaaaaccatcgtcgttttggttcaggagaacaggtcgttcgatcacatgttaggttggttcaaggagcttaacccagaaatcgatggagtatccgaatccgaaccaagatccaacccactttctacatctgacccgaactctgctcaaatcttcttcggcaaagaatctcagaacattgatcctgatcccggtcactcttttcaggcgatctacgaacaagtgtttggaaaaccattcagcgacgagagtccgtacccggatccgaaaatgaacgggttcgtacaaaacgcagaggcgataacaaaagggatgtcggagaaagtagtgatgcaaggttttccgccggagaaacttccggtattcaaggaactagttcaagaattcgctgtctgcgatcggtggttctcgtcgttgccctcgtccacgcagcctaaccgactctacgtccacgcggcgacatcaaacggtgcgtttagtaatgacactaacacgcttgttcgtggctttcctcagaggacagtgttcgaatcacttgaagagagtggtttcacatttggaatttattaccaatcctttcctaattgcctcttttacaggaacatgaggaaactgaagtacgtggacaacttccatcaataccacttaagcttcaagaggcattgcaaagaagggaagcttccaaactatgtggttatagaaccaaggtacttcaagattttgtcggctccagctaatgatgaccatcccaaaaacgacgtcgttgaaggccaaaatctagtcaaagaaatctacgaagccttaagagctagtcctcagtggaacgagattctcttcgttgttgtttatgatgaacacggtggttattatgaccacgtccctactccagtcattggtgtcccaaatcctgatggtctagttggacctgagccctataactttaagtttgaccggcttggtgttagggttcctgctttgctaatctcgccttggatcgaacctggaacggtgttacacgagccaaatggaccagagccaacgtcgcagttcgaacattcatcaattccggcaacactgaagaaaatattcaacctcaagagctttcttacaaagcgtgacgaatgggctggaacactcgatgctgtcatcaaccggaccagcccaaggacggactgccccgtcacattaccggaacttcctagggcaagagacatagacattggaacacaagaagaagacgaagatctcactgattttcaaatcgaactgattcaagcagcggctgtactaaaaggagatcatatcaaagacatttacccgtttaagctcgcagataaaatgaaggttttggatgcggctaggtacgtagaagaagctttcactagattccatggtgagtccaagaaggctaaagaagaaggccgtgatgagcatgagatcgttgatctttctaaaggatctactcgtcactcgactcctaagtcttttgttcagaagttattctcgtgtttgatttgtgataattgatcttgagttgaaacagatttgatctctctgagatttggtgtatttctcggattttatgtgaagagcgtttgaaatttgatatttgtttgttttccaaattttatgttttacaaaaaaaaaaaaaaaaaaaactcgagggggggcccggtacccaattcgccctattgttaaacacaataaagttggaactggagggggg

SEQ ID NO: 9803 - protein, 523 aa, Arabidopsis thaliana
MVEETSSGGGSSASPIKTIVVLVQENRSFDHMLGWFKELNPEIDGVSESEPRSNPLSTSDPNSAQIFFGKESQNIDPDPGHSFQAIYEQVFGKPFSDESPYPDPKMNGFVQNAEAITKGMSEKVVMQGFPPEKLPVFKELVQEFAVCDRWFSSLPSSTQPNRLYVHAATSNGAFSNDTNTLVRGFPQRTVFESLEESGFTFGIYYQSFPNCLFYRNMRKLKYVDNFHQYHLSFKRHCKEGKLPNYVVIEPRYFKILSAPANDDHPKNDVVEGQNLVKEIYEALRASPQWNEILFVVVYDEHGGYYDHVPTPVIGVPNPDGLVGPEPYNFKFDRLGVRVPALLISPWIEPGTVLHEPNGPEPTSQFEHSSIPATLKKIFNLKSFLTKRDEWAGTLDAVINRTSPRTDCPVTLPELPRARDIDIGTQEEDEDLTDFQIELIQAAAVLKGDHIKDIYPFKLADKMKVLDAARYVEEAFTRFHGESKKAKEEGRDEHEIVDLSKGSTRHSTPKSFVQKLFSCLICDN

SEQ ID NO: 9804 - protein, 492 aa, Arabidopsis thaliana
MLGWFKELNPEIDGVSESEPRSNPLSTSDPNSAQIFFGKESQNIDPDPGHSFQAIYEQVFGKPFSDESPYPDPKMNGFVQNAEAITKGMSEKVVMQGFPPEKLPVFKELVQEFAVCDRWFSSLPSSTQPNRLYVHAATSNGAFSNDTNTLVRGFPQRTVFESLEESGFTFGIYYQSFPNCLFYRNMRKLKYVDNFHQYHLSFKRHCKEGKLPNYVVIEPRYFKILSAPANDDHPKNDVVEGQNLVKEIYEALRASPQWNEILFVVVYDEHGGYYDHVPTPVIGVPNPDGLVGPEPYNFKFDRLGVRVPALLISPWIEPGTVLHEPNGPEPTSQFEHSSIPATLKKIFNLKSFLTKRDEWAGTLDAVINRTSPRTDCPVTLPELPRARDIDIGTQEEDEDLTDFQIELIQAAAVLKGDHIKDIYPFKLADKMKVLDAARYVEEAFTRFHGESKKAKEEGRDEHEIVDLSKGSTRHSTPKSFVQKLFSCLICDN

SEQ ID NO: 9805 - protein, 418 aa, Arabidopsis thaliana
MNGFVQNAEAITKGMSEKVVMQGFPPEKLPVFKELVQEFAVCDRWFSSLPSSTQPNRLYVHAATSNGAFSNDTNTLVRGFPQRTVFESLEESGFTFGIYYQSFPNCLFYRNMRKLKYVDNFHQYHLSFKRHCKEGKLPNYVVIEPRYFKILSAPANDDHPKNDVVEGQNLVKEIYEALRASPQWNEILFVVVYDEHGGYYDHVPTPVIGVPNPDGLVGPEPYNFKFDRLGVRVPALLISPWIEPGTVLHEPNGPEPTSQFEHSSIPATLKKIFNLKSFLTKRDEWAGTLDAVINRTSPRTDCPVTLPELPRARDIDIGTQEEDEDLTDFQIELIQAAAVLKGDHIKDIYPFKLADKMKVLDAARYVEEAFTRFHGESKKAKEEGRDEHEIVDLSKGSTRHSTPKSFVQKLFSCLICDN

SEQ ID NO: 9806 - DNA, 812 bp, Arabidopsis thaliana
gattcgcaatcattttcttcttcttctttcccatgatcgtctctcgcttcccaacgcaatcttcttcacccaatctctgaatctctcctaaattccatgtctctcgcttccattcgccgtttagctgccggagctgccgtaattgccgctgcatccggtggcgctgtctacctgtctccgtcggttgcctccagcgacaaaggaggtggtccgattctagattcgttgaggcgtaggcttggtgatggaggggttcgttacttggagaaagctgttttcaatcttgattatggacagctgaagcttgtatttcacgctcttgaggagcgtaaacagctcattgagaatgcgccacatctctgtcatgctctgccctgtatgacaccttgttttgattggttcgaagttatctacttctggatggggttgaagatgtatgacttggttgctggaccacggttattgcatctgtccagatattactctgcaaaagagtctattgagctcttccccactcttgcaaggaaagggaaagacaagaatttgaggggtactgttgtgtattatgacgggcaaatgaacgattcacgtctgaatgtgggtttggcatgtactgccgcgttagctggtgcggcagttctcaaccatgccgaggttgtctcgcttattactgatgatgctactaagagaataattggtgcccgaattcgtaacaatctcacaggccaagaatttaacagctatgcaaaagtagttgttaatgcggcaggaccgttcttgttaaacacaataaagttggaactggagggggg

SEQ ID NO: 9807 - protein, 238 aa, Arabidopsis thaliana
MSLASIRRLAAGAAVIAAASGGAVYLSPSVASSDKGGGPILDSLRRRLGDGGVRYLEKAVFNLDYGQLKLVFHALEERKQLIENAPHLCHALPCMTPCFDWFEVIYFWMGLKMYDLVAGPRLLHLSRYYSAKESIELFPTLARKGKDKNLRGTVVYYDGQMNDSRLNVGLACTAALAGAAVLNHAEVVSLITDDATKRIIGARIRNNLTGQEFNSYAKVVVNAAGPFLLNTIKLELEG

SEQ ID NO: 9808 - protein, 144 aa, Arabidopsis thaliana
MTPCFDWFEVIYFWMGLKMYDLVAGPRLLHLSRYYSAKESIELFPTLARKGKDKNLRGTVVYYDGQMNDSRLNVGLACTAALAGAAVLNHAEVVSLITDDATKRIIGARIRNNLTGQEFNSYAKVVVNAAGPFLLNTIKLELEG

SEQ ID NO: 9809 - protein, 130 aa, Arabidopsis thaliana
MGLKMYDLVAGPRLLHLSRYYSAKESIELFPTLARKGKDKNLRGTVVYYDGQMNDSRLNVGLACTAALAGAAVLNHAEVVSLITDDATKRIIGARIRNNLTGQEFNSYAKVVVNAAGPFLLNTIKLELEG

SEQ ID NO: 9810 - DNA, 2237 bp, Arabidopsis thaliana
tttaacgtgggtccttcaatctttttgaaggaccccgccattgtcaatcacctttcaaagggatctttattctttttggttttaggctttttagattattgaattgattttgaatgataatcatgatgaattgttttccgtgtttcacttcacaaaagagcagaaacgctccatgcacgacgaacgagactaacgatgataacgttgaacacaacgaattcagaccacctgttgttgcgacgacgaaacggactgaagaaagagaacctgcagagcaacaaccaccggtgaaaacattcaatttccgggagttagcgacggcgaccaagaatttccggcaagaatgtcttttaggagaaggtggattcggtagggtttacaaaggaactcttcaatctactggccagttggtagctgtaaagcagctagacaagcatggattacatggtaacaagagtttctagctgaagtcttgtcattggctaaacttgaacacccgaatcttgttaagcttataggatactgtgctgatggagatcaacggcttttagtctttgagtatgtctctggaggttcccttcaagaccatctttacgaacaaaagccaggccagaagccgatggattggataacgaggatgaagattgcgtttggtgcagcgcaaggattggattacttgcacgataaagttactccagcggtgatataccgagatttgaaagcttctaacatcttgttagatgctgagttttaccctaagctttgtgattttggtctgcataatctagagccaggaacaggtgatagcttgtttctttcttcccgggttatggatacttatggttattcagcacctgagtacactcgaggggacgatctcactgtcaagtcagatgtttatagcttcggagttgtgttgctcgaactcatcaccggtagaagagctattgacaccactaagcctaatgatgagcaaaatctagttgcttgggcacaaccgatatttaaagacccgaaaagatatccggatatggcagatcctcttttgaggaagaatttctcagagagagggttaaatcaagcagtggcaataacatcaatgtgtctacaagaggaaccaactgctcgtcctttgataagtgatgtaatggttgctcttagcttcctttcaatgtctacagaagatggtattccagccacggttccaatggaatcgttcagggacaaaagtatgtcgattgctctaagcagacacggttcttgttctgtaactccattttgtatttctcggaaagatgtaggcaacaaatccagttcttcatcagactcggaggatgaagaagaagaaaaggaacaacaagcagaaaaagaagaagaatcaacaagtaagaaaagacaagagcaggaagaaaccgcgacagattcagatgatgagtctgattcaaactccgaaaaggatcaagaagaggaacagtctcagttagagaaagccagggagtctagtagctcatcctctgactctggaagtgagagaatatcaattgatgaaacaaacgcaactgctcagagcttgaagataagttacagtaattatagctctgaggaagaagataacgagaagctaagcagtaaaagcagttgtaaatcaaacgaagaaagcactttttcgcggtatgacagcggtagagatcacgatgattcgtcaagaaacacaagcatgcgaatcaatagtcttgctcatgatgataaggaggaagacgaggaggagaatcatgaaacacggagctatagtgatcacgatgattctccaagaaacactagcatgcgaatcaatagtctttctcatgatgatgatgatgaggaagaggaggaggagaatcatgaaactcggcttgagcacattcatagctcgaaatctgaagaccaaagtgtttattcagatgatgatgccggcgaggaaagtggtgagtcgtctttgcataggatcgaagcaaaggaagaagaacatatttcttctgaccatgattaatcttttgcaacgaggaaaaaaatgtttcaacttttcgttttggaacaaaccatttgtcatataagtctaatatacatatcacatttcttttgagaaaatatgaaacttaaacaaaaaaaaaattatgtatatatctttaataccgtatattaggaagaaaatgtttacaaaaaaaaaaaaaaaaaaaactcgagggggggcccggtac

SEQ ID NO: 9811 - protein, 469 aa, Arabidopsis thaliana
MDWITRMKIAFGAAQGLDYLHDKVTPAVIYRDLKASNILLDAEFYPKLCDFGLHNLEPGTGDSLFLSSRVMDTYGYSAPEYTRGDDLTVKSDVYSFGVVLLELITGRRAIDTTKPNDEQNLVAWAQPIFKDPKRYPDMADPLLRKNFSERGLNQAVAITSMCLQEEPTARPLISDVMVALSFLSMSTEDGIPATVPMESFRDKSMSIALSRHGSCSVTPFCISRKDVGNKSSSSSDSEDEEEEKEQQAEKEEESTSKKRQEQEETATDSDDESDSNSEKDQEEEQSQLEKARESSSSSSDSGSERISIDETNATAQSLKISYSNYSSEEEDNEKLSSKSSCKSNEESTFSRYDSGRDHDDSSRNTSMRINSLAHDDKEEDEEENHETRSYSDHDDSPRNTSMRINSLSHDDDDEEEEEENHETRLEHIHSSKSEDQSVYSDDDAGEESGESSLHRIEAKEEEHISSDHD

SEQ ID NO: 9812 - protein, 463 aa, Arabidopsis thaliana
MKIAFGAAQGLDYLHDKVTPAVIYRDLKASNILLDAEFYPKLCDFGLHNLEPGTGDSLFLSSRVMDTYGYSAPEYTRGDDLTVKSDVYSFGVVLLELITGRRAIDTTKPNDEQNLVAWAQPIFKDPKRYPDMADPLLRKNFSERGLNQAVAITSMCLQEEPTARPLISDVMVALSFLSMSTEDGIPATVPMESFRDKSMSIALSRHGSCSVTPFCISRKDVGNKSSSSSDSEDEEEEKEQQAEKEEESTSKKRQEQEETATDSDDESDSNSEKDQEEEQSQLEKARESSSSSSDSGSERISIDETNATAQSLKISYSNYSSEEEDNEKLSSKSSCKSNEESTFSRYDSGRDHDDSSRNTSMRINSLAHDDKEEDEEENHETRSYSDHDDSPRNTSMRINSLSHDDDDEEEEEENHETRLEHIHSSKSEDQSVYSDDDAGEESGESSLHRIEAKEEEHISSDHD

SEQ ID NO: 9813 - protein, 399 aa, Arabidopsis thaliana
MDTYGYSAPEYTRGDDLTVKSDVYSFGVVLLELITGRRAIDTTKPNDEQNLVAWAQPIFKDPKRYPDMADPLLRKNFSERGLNQAVAITSMCLQEEPTARPLISDVMVALSFLSMSTEDGIPATVPMESFRDKSMSIALSRHGSCSVTPFCISRKDVGNKSSSSSDSEDEEEEKEQQAEKEEESTSKKRQEQEETATDSDDESDSNSEKDQEEEQSQLEKARESSSSSSDSGSERISIDETNATAQSLKISYSNYSSEEEDNEKLSSKSSCKSNEESTFSRYDSGRDHDDSSRNTSMRINSLAHDDKEEDEEENHETRSYSDHDDSPRNTSMRINSLSHDDDDEEEEEENHETRLEHIHSSKSEDQSVYSDDDAGEESGESSLHRIEAKEEEHISSDHD

SEQ ID NO: 9814 - DNA, 1597 bp, Arabidopsis thaliana
ggtagttggaattttccagtttttggtttgtttctgtatctgtggtttaaaaaagtggagaagaagctttttagtgcttttctatggcgaggattctccgaaacgtttattcacttagaagctctctgttttcgtcagagttacttagaagaagtgtggttggaacatcgtttcagctccgaggctttgctgccaaagctaaaaagaaatccaagtcagatggaaatggatcatctgaagaaggtatgtcgaaaaaggagattgctcttcagcaagcacttgatcagattaccagttcatttggcaaagggtccataatgtatctcggtcgtgctgtttctcctagaaatgtcccggttttctctaccggatcttttgcccttgatgtagctttgggagttggtggccttcctaaggggcgtgttgtggagatatatggtcctgaagcatcgggaaagacaacacttgctcttcatgttattgcagaagcacaaaaacaaggaggaacctgtgtctttgtagatgctgagcatgctcttgattcgtcacttgctaaggcaatcggtgtaaatacagaaaatctgcttctatcacagcctgattgtggcgaacaggcccttagtcttgtggatactttaatccgaagtggttcagttgatgttattgtagttgacagtgtggctgctcttgtacctaaaggagaacttgagggcgagatgggtgatgcacatatggctatgcaagccagattgatgagccaagctttgcgtaaattgagccattctttatcgttatcgcaaacacttctgatctttataaatcaggtgagatcaaaactatctacgtttggaggatttggaggtccaacagaagttacttgtggtggaaatgctttgaagttttatgcttctatgcgtttgaatatcaagcgaattggacttatcaagaaaggcgaagagacaacgggaagtcaagtctccgtgaagatagtgaagaacaaactcgctccgccgtttagaactgctcagtttgagcttgaattcggcaaaggaatctgcaagatcacggagataatcgacctgagcataaagcacaagttcatcgcgaaaaacggaacattctacaatctcaacggtaaaaactaccatggaaaagaggctttaaagagattccttaaacagaacgaatctgatcaagaagagctcatgaagaagctccaagacaagctcatcgccgatgaagctgcagataaggaaactgaatctgaatctgaggaagaagattccctgagagttgtggtttcacctgacaacacagatgatgaatcaccagctcttgttgttggagctgctgcagtggttgttgaggcagcatgattagcgacctccggtttagtataatattcttcctttggcctagagttttccggtttaacgcggtttggattcggtttccttctcctcatgtaatttatgtgctagttaaatcacatttacatataaccgttgttgtgggtgagaaaattttgtagtttttatggggaaatttaatgttaacgaaaagccagaatattttaatgttattgatcaattttact

SEQ ID NO: 9815 - protein, 430 aa, Arabidopsis thaliana
MARILRNVYSLRSSLFSSELLRRSVVGTSFQLRGFAAKAKKKSKSDGNGSSEEGMSKKEIALQQALDQITSSFGKGSIMYLGRAVSPRNVPVFSTGSFALDVALGVGGLPKGRVVEIYGPEASGKTTLALHVIAEAQKQGGTCVFVDAEHALDSSLAKAIGVNTENLLLSQPDCGEQALSLVDTLIRSGSVDVIVVDSVAALVPKGELEGEMGDAHMAMQARLMSQALRKLSHSLSLSQTLLIFINQVRSKLSTFGGFGGPTEVTCGGNALKFYASMRLNIKRIGLIKKGEETTGSQVSVKIVKNKLAPPFRTAQFELEFGKGICKITEIIDLSIKHKFIAKNGTFYNLNGKNYHGKEALKRFLKQNESDQEELMKKLQDKLIADEAADKETESESEEEDSLRVVVSPDNTDDESPALVVGAAAVVVEAA

SEQ ID NO: 9816 - protein, 376 aa, Arabidopsis thaliana
MSKKEIALQQALDQITSSFGKGSIMYLGRAVSPRNVPVFSTGSFALDVALGVGGLPKGRVVEIYGPEASGKTTLALHVIAEAQKQGGTCVFVDAEHALDSSLAKAIGVNTENLLLSQPDCGEQALSLVDTLIRSGSVDVIVVDSVAALVPKGELEGEMGDAHMAMQARLMSQALRKLSHSLSLSQTLLIFINQVRSKLSTFGGFGGPTEVTCGGNALKFYASMRLNIKRIGLIKKGEETTGSQVSVKIVKNKLAPPFRTAQFELEFGKGICKITEIIDLSIKHKFIAKNGTFYNLNGKNYHGKEALKRFLKQNESDQEELMKKLQDKLIADEAADKETESESEEEDSLRVVVSPDNTDDESPALVVGAAAVVVEAA

SEQ ID NO: 9817 - protein, 352 aa, Arabidopsis thaliana
MYLGRAVSPRNVPVFSTGSFALDVALGVGGLPKGRVVEIYGPEASGKTTLALHVIAEAQKQGGTCVFVDAEHALDSSLAKAIGVNTENLLLSQPDCGEQALSLVDTLIRSGSVDVIVVDSVAALVPKGELEGEMGDAHMAMQARLMSQALRKLSHSLSLSQTLLIFINQVRSKLSTFGGFGGPTEVTCGGNALKFYASMRLNIKRIGLIKKGEETTGSQVSVKIVKNKLAPPFRTAQFELEFGKGICKITEIIDLSIKHKFIAKNGTFYNLNGKNYHGKEALKRFLKQNESDQEELMKKLQDKLIADEAADKETESESEEEDSLRVVVSPDNTDDESPALVVGAAAVVVEAA

SEQ ID NO: 9818 - DNA, 2761 bp, Arabidopsis thaliana
gttcgaatcaagaattttttttcatttttgaaagcaaataaataaataaaaatctcattatcttgttagagataaaaagagaaacaaccaaaaagaaagaagaagaagtgtttgttctgtttcagtcattcaagttcatgagaatagaaacgagtccaagtttgttgttcatgcaaaattctcatgactctgttacactcctgaatttcttctacttatattccattcaataacttttcttcttctatcagttcaacgttcacacactttttccatttcctcgacaaactcctttttttctctcacttatctcgaattcttttttttttttttttctctcaacgaaacataaatcctctgttttggtttaagagatggagatagaagcaagcagacaacaaaccaccgtaccggtttcagtcggcggtgggaattttccggttggtgggttaagtccgttgagtgaagctatatggagagagaaagctccaacggagtttgtcggagacgtgtcagcgaggcttacgtggcaagatctgacggtgatggtgactatgggagatggtgagactcaaaatgttcttgaaggtcttaccggttacgctgaaccgggatctctcacggctctcatgggcccttccggctccgggaaatctactatgctcgacgcattagctagccgcctcgctgctaacgcttttctctccggcaccgttcttcttaacggccgcaaaaccaaactctcctttggaacagctgcatatgtgacccaagacgataacttgattggtacgttaactgtgagagagacgatttggtattcagcgagagttcgtcttccggacaagatgttacggtcggagaagcgtgctctagtggaaaggacaataatagagatgggtcttcaggattgtgcagatactgtcataggaaattggcatttgcgtggaattagtggtggagagaagagaagagtcagtattgctcttgagattttaatgagacctcgtttgctgtttctcgatgagccaacaagtggtcttgatagtgcttctgctttctttgtgactcagactttgcgtgctttatcacgagatggaaggacggtgatagcatcgatccaccaaccgagcagtgaggtttttgagttgtttgatcggttgtatctgctttctggaggcaaaactgtttactttggtcaagcttcagatgcatatgagttctttgcacaagctgggtttccatgtcctgcgttaaggaacccttctgatcatttcctgagatgcataaactcagactttgacaaagttagagccactttgaaaggttctatgaagctaaggtttgaagcaagcgatgatccgttggaaaagattaccacagccgaagctattagactattggttgactattaccacacttctgattactactacacagcaaaggctaaggttgaggagatatcccaatttaaagggactattcttgactccggaggcagccaggctagtttccttctgcagacctacactttaacaaagcgatcattcatcaacatgtcaagggactttggttattactggctcagacttctaatttacatcttggtcacagtctgcattggaaccatctatctgaacgttgggactagctacagcgccattctggcacggggctcatgtgcgtctttcgtctttggctttgtaacattcatgtcaattggtggatttccttcgttcgttgaagacatgaaggtcttccaaagagagagactaaacgggcactatggagtagctgcgtttgtgatagccaacacattatctgcaacaccattcctgatcatgataactttcatctccgggacaatctgttacttcatggtgggtctgcatccaggattcactcactacctcttctttgttctctgcctctatgcaagtgtcaccgttgtggagagcttaatgatggcaattgctagtattgttcccaacttcctcatgggtatcatcatcggagctggaatccaggggatcttcatgctggtttctggattcttcaggcttccaaatgacatcccaaaacctttctggcgttacccaatgtcctacatcagcttccacttctgggctctacaaggtcagtaccagaatgatctgagaggcttgacgtttgacagccaagggagtgctttcaagattccgggtgaatatgttcttgagaacgtctttcagatcgacttgcatcgatcaaaatggattaacctcagtgtgattcttagcatgattatcatctaccgcatcatcttcttcatcatgattaagaccaacgaggatgttactccttgggtcagaggttacatagcacgcagaaggatgaagcagaagaatggaactcagaacaccacagttgcaccagatggtcttacccagtctccttctctgagaaattacattgctacacgaacagatggagctcgcagatggtagagcttgatcctgtccagtgtttgaagatacttcatgaaaattgatcaaagcaaagccaccatatttcactaggcctgcaatatcaaaactccatgtaatgtgacagcagagaaacttcgagtgtgttagttatagaaatattaaaaccacggatttgtctaaaataatcactactacatttatttttctactttggtattaacaagtaccatcttgttgcattacagtttgcattgtgccgaaattacagcagatagattaagttgtgaattgtt

SEQ ID NO: 9819 - protein, 703 aa, Arabidopsis thaliana
MEIEASRQQTTVPVSVGGGNFPVGGLSPLSEAIWREKAPTEFVGDVSARLTWQDLTVMVTMGDGETQNVLEGLTGYAEPGSLTALMGPSGSGKSTMLDALASRLAANAFLSGTVLLNGRKTKLSFGTAAYVTQDDNLIGTLTVRETIWYSARVRLPDKMLRSEKRALVERTIIEMGLQDCADTVIGNWHLRGISGGEKRRVSIALEILMRPRLLFLDEPTSGLDSASAFFVTQTLRALSRDGRTVIASIHQPSSEVFELFDRLYLLSGGKTVYFGQASDAYEFFAQAGFPCPALRNPSDHFLRCINSDFDKVRATLKGSMKLRFEASDDPLEKITTAEAIRLLVDYYHTSDYYYTAKAKVEEISQFKGTILDSGGSQASFLLQTYTLTKRSFINMSRDFGYYWLRLLIYILVTVCIGTIYLNVGTSYSAILARGSCASFVFGFVTFMSIGGFPSFVEDMKVFQRERLNGHYGVAAFVIANTLSATPFLIMITFISGTICYFMVGLHPGFTHYLFFVLCLYASVTVVESLMMAIASIVPNFLMGIIIGAGIQGIFMLVSGFFRLPNDIPKPFWRYPMSYISFHFWALQGQYQNDLRGLTFDSQGSAFKIPGEYVLENVFQIDLHRSKWINLSVILSMIIIYRIIFFIMIKTNEDVTPWVRGYIARRRMKQKNGTQNTTVAPDGLTQSPSLRNYIATRTDGARRW

SEQ ID NO: 9820 - protein, 646 aa, Arabidopsis thaliana
MVTMGDGETQNVLEGLTGYAEPGSLTALMGPSGSGKSTMLDALASRLAANAFLSGTVLLNGRKTKLSFGTAAYVTQDDNLIGTLTVRETIWYSARVRLPDKMLRSEKRALVERTIIEMGLQDCADTVIGNWHLRGISGGEKRRVSIALEILMRPRLLFLDEPTSGLDSASAFFVTQTLRALSRDGRTVIASIHQPSSEVFELFDRLYLLSGGKTVYFGQASDAYEFFAQAGFPCPALRNPSDHFLRCINSDFDKVRATLKGSMKLRFEASDDPLEKITTAEAIRLLVDYYHTSDYYYTAKAKVEEISQFKGTILDSGGSQASFLLQTYTLTKRSFINMSRDFGYYWLRLLIYILVTVCIGTIYLNVGTSYSAILARGSCASFVFGFVTFMSIGGFPSFVEDMKVFQRERLNGHYGVAAFVIANTLSATPFLIMITFISGTICYFMVGLHPGFTHYLFFVLCLYASVTVVESLMMAIASIVPNFLMGIIIGAGIQGIFMLVSGFFRLPNDIPKPFWRYPMSYISFHFWALQGQYQNDLRGLTFDSQGSAFKIPGEYVLENVFQIDLHRSKWINLSVILSMIIIYRIIFFIMIKTNEDVTPWVRGYIARRRMKQKNGTQNTTVAPDGLTQSPSLRNYIATRTDGARRW

SEQ ID NO: 9821 - protein, 643 aa, Arabidopsis thaliana
MGDGETQNVLEGLTGYAEPGSLTALMGPSGSGKSTMLDALASRLAANAFLSGTVLLNGRKTKLSFGTAAYVTQDDNLIGTLTVRETIWYSARVRLPDKMLRSEKRALVERTIIEMGLQDCADTVIGNWHLRGISGGEKRRVSIALEILMRPRLLFLDEPTSGLDSASAFFVTQTLRALSRDGRTVIASIHQPSSEVFELFDRLYLLSGGKTVYFGQASDAYEFFAQAGFPCPALRNPSDHFLRCINSDFDKVRATLKGSMKLRFEASDDPLEKITTAEAIRLLVDYYHTSDYYYTAKAKVEEISQFKGTILDSGGSQASFLLQTYTLTKRSFINMSRDFGYYWLRLLIYILVTVCIGTIYLNVGTSYSAILARGSCASFVFGFVTFMSIGGFPSFVEDMKVFQRERLNGHYGVAAFVIANTLSATPFLIMITFISGTICYFMVGLHPGFTHYLFFVLCLYASVTVVESLMMAIASIVPNFLMGIIIGAGIQGIFMLVSGFFRLPNDIPKPFWRYPMSYISFHFWALQGQYQNDLRGLTFDSQGSAFKIPGEYVLENVFQIDLHRSKWINLSVILSMIIIYRIIFFIMIKTNEDVTPWVRGYIARRRMKQKNGTQNTTVAPDGLTQSPSLRNYIATRTDGARRW

SEQ ID NO: 9822 - DNA, 3196 bp, Arabidopsis thaliana
aaaccctaacccgaatcggctttttgacaatccgaaattaggtaaccatgttcattgaatttatcgtttcaacacattcgaatcactgagtcctacgtttcagtttaattccctgatgcacattttgaattcggtttgcgtattggtcttcgagttttccgtcggcggccatggacgcgttcaaggaggagatagaaatcgggagctcggtggagtctttaatggagctattggattcgcagaaggtgctttttcatagccagatcgatcagctccaagatgtcgtcgttgcgcaatgcaaacttaccggcgttaatccccttgcgcaagaaatggctgctggtgctttgtccattaaaattggaaagcggccaagagacttgttgaatcctaaggctgttaagtatctacaagcagttttcgcaattaaagatgctattagtaagagggaatctcgggagataagtgctttatttggcatcacagtcgcccaggttcgagaattttttgttactcaaaagacaagagtgaggaaacaggtgaggctttcaagggagaaagtagttatgtccaatacgcatgctttacaagatgatggtgttccggaaaataacaatgccacaaatcatgttgaacccgttcccttgaactctatacatccggaggcatgttctataagctggggtgaaggtgaaacagtggcacttattccacctgaagatattccacctgacatcagcgattcagacaaatactttgttgagaatatattttctctgctgcgtaaagaggaaacattttcaggccaggtgaaactaatggagtggatcatgcagatacaagatgcttctgtgctgatctggtttttatcaaaaggaggggttttgatacttacaacatggttaagtcaagctgctagtgaagagcaaacaagtgtcttacttcttatcctgaaggttctttgtcatttacctctccacaaagcatctcctgaaaatatgtctgccatattacaaagcgttaatggacttcgtttctataggatatcagacatatcaaacagggcaaaaggtttgttatcaaggtggaccaagttatttgcgaaaatccaagctatgaagaaacaaaatcgtaacagttcgcaaattgattcgcagagtcaattgcttctgaaacagagtattgctgaaatcatgggtgatagtagcaatcctgaagatattcttagtctctcaaatggaaagtcagagaatgtcaggaggattgaatcgtcacagggtccaaaactgttgcttacttctgcagatgattccaccaagaaacacatgcttggttcaaatccatcgtataacaaagaacgcaggaaagtacagatggtggaacaaccaggccaaaaagctgctggaaagagtccgcagacagtaagaataggaacttcaggtcgaagccgcccaatgtctgctgatgatattcagaaagcaaagatgcgtgccctttatatgcagagcaagaacagtaaaaaggatcctttaccaagtgccattggtgattcgaaaatcgttgctcctgagaagcccttggctcttcattcagccaaggattctccacctattcagaacaatgaagctaagactgaagacacacctgtactctcgactgttcagcccgtcaatggattttcaactattcagcccgtcaatggaccttcagctgttcagcccgtcaatggacctttggctgttcagcctgtcaatggaccttcggctcttcagcccgtcaatggaccttcggccgtaattgtcccggtacaagctgatgaaattaaaaaaccttcaacacctcctaaaagcatttctagtaaggtgggagttatgatgaaaatgagttcacaaactattctcaagaattgcaagagaaaacagattgattggcatgtaccaccaggaatggaacttgacgaactctggagagtagccgctggtggtaatagcaaggaggctgatgttcagagaaacagaaaccggcgagaaagagaaacaacatatcagtctcttcaaactataccgttgaaccctaaagaaccatgggatagggaaatggactatgatgacagtttgacccctgaaattccatctcaacagccaccagaagaaagtttaacggaaccacaggattcacttgatgaacgaagaattgctgctggtgctgccacaacctcttcatctctaagcagtcctgaacctgatctcgagttattagctgcgttacttaagaacccagatcttgtttatgcactaacttcgggaaaacccagtaatttagccggccaagatatggtaaaactgcttgatgtgattaagactggtgcaccaaactcaagcagtagctcaaataaacaggttgaagaaagggtcgaagtttcccttccatctcccactccatcaactaatcctggaatgagtggatggggacaagaagggattcggaatccattttcaaggcaaaaccaagttggtactgcagttgctagatcgggtacacagcttcgtgttggttcaatgcaatggcatcaaacaaatgaacaatcaatcccacgacatgctccatcagcatacagtaactcgatcacattggctcacacagaaagagaacagcaacaatatatgcaaccaaaacttcatcacaatttacattttcaacaacaacaacaacaaccaatctcaacaacctcgtatgcagttagggaaccagtaggacaaatgggaacaggtacatcgagttcatggaggagtcagcagagtcagaacagttactactcacatcaagaaaacgagattgcatcggcttcacaagttacttcataccaagggaatagccagtacatgagtagcaatccaggatatgaatcatggagtcctgataatagcccaagtaggaaccagcttaacatgaggggacaacaacaacaagcatcaaggaaacatgattcttctactcatccatattggaaccaaaacaaaagatggcgttaaaccatatataagactatggttctttggtcctcaatatttgcttgtcatggttgaattagcattatactctgttcagacacagattttcatttttaactcacaacagattcatcagagataataaactaaaagaaagaatgaatggataaagttattactgtctc

SEQ ID NO: 9823 - protein, 953 aa, Arabidopsis thaliana
MDAFKEEIEIGSSVESLMELLDSQKVLFHSQIDQLQDVVVAQCKLTGVNPLAQEMAAGALSIKIGKRPRDLLNPKAVKYLQAVFAIKDAISKRESREISALFGITVAQVREFFVTQKTRVRKQVRLSREKVVMSNTHALQDDGVPENNNATNHVEPVPLNSIHPEACSISWGEGETVALIPPEDIPPDISDSDKYFVENIFSLLRKEETFSGQVKLMEWIMQIQDASVLIWFLSKGGVLILTTWLSQAASEEQTSVLLLILKVLCHLPLHKASPENMSAILQSVNGLRFYRISDISNRAKGLLSRWTKLFAKIQAMKKQNRNSSQIDSQSQLLLKQSIAEIMGDSSNPEDILSLSNGKSENVRRIESSQGPKLLLTSADDSTKKHMLGSNPSYNKERRKVQMVEQPGQKAAGKSPQTVRIGTSGRSRPMSADDIQKAKMRALYMQSKNSKKDPLPSAIGDSKIVAPEKPLALHSAKDSPPIQNNEAKTEDTPVLSTVQPVNGFSTIQPVNGPSAVQPVNGPLAVQPVNGPSALQPVNGPSAVIVPVQADEIKKPSTPPKSISSKVGVMMKMSSQTILKNCKRKQIDWHVPPGMELDELWRVAAGGNSKEADVQRNRNRRERETTYQSLQTIPLNPKEPWDREMDYDDSLTPEIPSQQPPEESLTEPQDSLDERRIAAGAATTSSSLSSPEPDLELLAALLKNPDLVYALTSGKPSNLAGQDMVKLLDVIKTGAPNSSSSSNKQVEERVEVSLPSPTPSTNPGMSGWGQEGIRNPFSRQNQVGTAVARSGTQLRVGSMQWHQTNEQSIPRHAPSAYSNSITLAHTEREQQQYMQPKLHHNLHFQQQQQQPISTTSYAVREPVGQMGTGTSSSWRSQQSQNSYYSHQENEIASASQVTSYQGNSQYMSSNPGYESWSPDNSPSRNQLNMRGQQQQASRKHDSSTHPYWNQNKRWR

SEQ ID NO: 9824 - protein, 936 aa, Arabidopsis thaliana
MELLDSQKVLFHSQIDQLQDVVVAQCKLTGVNPLAQEMAAGALSIKIGKRPRDLLNPKAVKYLQAVFAIKDAISKRESREISALFGITVAQVREFFVTQKTRVRKQVRLSREKVVMSNTHALQDDGVPENNNATNHVEPVPLNSIHPEACSISWGEGETVALIPPEDIPPDISDSDKYFVENIFSLLRKEETFSGQVKLMEWIMQIQDASVLIWFLSKGGVLILTTWLSQAASEEQTSVLLLILKVLCHLPLHKASPENMSAILQSVNGLRFYRISDISNRAKGLLSRWTKLFAKIQAMKKQNRNSSQIDSQSQLLLKQSIAEIMGDSSNPEDILSLSNGKSENVRRIESSQGPKLLLTSADDSTKKHMLGSNPSYNKERRKVQMVEQPGQKAAGKSPQTVRIGTSGRSRPMSADDIQKAKMRALYMQSKNSKKDPLPSAIGDSKIVAPEKPLALHSAKDSPPIQNNEAKTEDTPVLSTVQPVNGFSTIQPVNGPSAVQPVNGPLAVQPVNGPSALQPVNGPSAVIVPVQADEIKKPSTPPKSISSKVGVMMKMSSQTILKNCKRKQIDWHVPPGMELDELWRVAAGGNSKEADVQRNRNRRERETTYQSLQTIPLNPKEPWDREMDYDDSLTPEIPSQQPPEESLTEPQDSLDERRIAAGAATTSSSLSSPEPDLELLAALLKNPDLVYALTSGKPSNLAGQDMVKLLDVIKTGAPNSSSSSNKQVEERVEVSLPSPTPSTNPGMSGWGQEGIRNPFSRQNQVGTAVARSGTQLRVGSMQWHQTNEQSIPRHAPSAYSNSITLAHTEREQQQYMQPKLHHNLHFQQQQQQPISTTSYAVREPVGQMGTGTSSSWRSQQSQNSYYSHQENEIASASQVTSYQGNSQYMSSNPGYESWSPDNSPSRNQLNMRGQQQQASRKHDSSTHPYWNQNKRWR

SEQ ID NO: 9825 - protein, 899 aa, Arabidopsis thaliana
MAAGALSIKIGKRPRDLLNPKAVKYLQAVFAIKDAISKRESREISALFGITVAQVREFFVTQKTRVRKQVRLSREKVVMSNTHALQDDGVPENNNATNHVEPVPLNSIHPEACSISWGEGETVALIPPEDIPPDISDSDKYFVENIFSLLRKEETFSGQVKLMEWIMQIQDASVLIWFLSKGGVLILTTWLSQAASEEQTSVLLLILKVLCHLPLHKASPENMSAILQSVNGLRFYRISDISNRAKGLLSRWTKLFAKIQAMKKQNRNSSQIDSQSQLLLKQSIAEIMGDSSNPEDILSLSNGKSENVRRIESSQGPKLLLTSADDSTKKHMLGSNPSYNKERRKVQMVEQPGQKAAGKSPQTVRIGTSGRSRPMSADDIQKAKMRALYMQSKNSKKDPLPSAIGDSKIVAPEKPLALHSAKDSPPIQNNEAKTEDTPVLSTVQPVNGFSTIQPVNGPSAVQPVNGPLAVQPVNGPSALQPVNGPSAVIVPVQADEIKKPSTPPKSISSKVGVMMKMSSQTILKNCKRKQIDWHVPPGMELDELWRVAAGGNSKEADVQRNRNRRERETTYQSLQTIPLNPKEPWDREMDYDDSLTPEIPSQQPPEESLTEPQDSLDERRIAAGAATTSSSLSSPEPDLELLAALLKNPDLVYALTSGKPSNLAGQDMVKLLDVIKTGAPNSSSSSNKQVEERVEVSLPSPTPSTNPGMSGWGQEGIRNPFSRQNQVGTAVARSGTQLRVGSMQWHQTNEQSIPRHAPSAYSNSITLAHTEREQQQYMQPKLHHNLHFQQQQQQPISTTSYAVREPVGQMGTGTSSSWRSQQSQNSYYSHQENEIASASQVTSYQGNSQYMSSNPGYESWSPDNSPSRNQLNMRGQQQQASRKHDSSTHPYWNQNKRWR

SEQ ID NO: 9826 - DNA, 1179 bp, Arabidopsis thaliana
gagaagaccgccggactaagattcaaccagcggtgacttcgacacttattagccggtatatttcttcgccggagcttcctcaacgattatggccaccgatggcgagagtatctcgatgtcgttggcggtggctacctgcgtcgcgatggcactattctacgttttgatcctttacgttcccaccgtgatactccgtctcccgtcggcttcttcttacaccgaattcatgattcggcgattcatctgcgcggccatttgtactgtagcatctctcgtcttcacagcttttatacttccgataaaaagctgggaggcctcttatatacttggagtttatggcataaggaaagatcatctgtggcaaggagtggtgtatcctcttctattgacctcgctcgtttatgctgggtctttggtgttgaagttgttatttctcctggaatcatggaaggaaaatggcggaggatgtagttcctttaattacatcagaagctttttccaaacaatccctgcttcggtattgacaagtgcttctaatgtttccgtttggcgcaattttatcgtggcaccagtaactgaggagctggttttccgatcatgtatgatacctttgcttctgtgtgctgggtttaggattaacactgccatctttctgtgcccagttctctttagcttggctcacttaaaccattttagagagatgtacatcaggcataaccgcagctatctccgggcttcacttattgttggtcttcagcttggctacacagtcatttttggtgcatatgcatcgtttctcttcatcagaaccggacatcttgctgctcctttgtttgctcatatattttgcaactacatgggattgcctgtgctatacgcaaatggaaaaggtttggtgagtgcagcgttcttaggcggtgtggttgggttcgtcttacttctctttcctttaacaaagcctctcatgtacaacgatagtaccaacgattgtccgtgttggcttggctattgtttgaggaattgacacttctccaagtttttttttatatatcatcatgtcttagaatctattttttgacacaatattggaattatggtcttttactgcaagctaatgtttcttgatagtttatgtagttttttccttgtaaatatataataataataataattggttcg

SEQ ID NO: 9827 - protein, 311 aa, Arabidopsis thaliana
MATDGESISMSLAVATCVAMALFYVLILYVPTVILRLPSASSYTEFMIRRFICAAICTVASLVFTAFILPIKSWEASYILGVYGIRKDHLWQGVVYPLLLTSLVYAGSLVLKLLFLLESWKENGGGCSSFNYIRSFFQTIPASVLTSASNVSVWRNFIVAPVTEELVFRSCMIPLLLCAGFRINTAIFLCPVLFSLAHLNHFREMYIRHNRSYLRASLIVGLQLGYTVIFGAYASFLFIRTGHLAAPLFAHIFCNYMGLPVLYANGKGLVSAAFLGGVVGFVLLLFPLTKPLMYNDSTNDCPCWLGYCLRN

SEQ ID NO: 9828 - protein, 302 aa, Arabidopsis thaliana
MSLAVATCVAMALFYVLILYVPTVILRLPSASSYTEFMIRRFICAAICTVASLVFTAFILPIKSWEASYILGVYGIRKDHLWQGVVYPLLLTSLVYAGSLVLKLLFLLESWKENGGGCSSFNYIRSFFQTIPASVLTSASNVSVWRNFIVAPVTEELVFRSCMIPLLLCAGFRINTAIFLCPVLFSLAHLNHFREMYIRHNRSYLRASLIVGLQLGYTVIFGAYASFLFIRTGHLAAPLFAHIFCNYMGLPVLYANGKGLVSAAFLGGVVGFVLLLFPLTKPLMYNDSTNDCPCWLGYCLRN

SEQ ID NO: 9829 - protein, 292 aa, Arabidopsis thaliana
MALFYVLILYVPTVILRLPSASSYTEFMIRRFICAAICTVASLVFTAFILPIKSWEASYILGVYGIRKDHLWQGVVYPLLLTSLVYAGSLVLKLLFLLESWKENGGGCSSFNYIRSFFQTIPASVLTSASNVSVWRNFIVAPVTEELVFRSCMIPLLLCAGFRINTAIFLCPVLFSLAHLNHFREMYIRHNRSYLRASLIVGLQLGYTVIFGAYASFLFIRTGHLAAPLFAHIFCNYMGLPVLYANGKGLVSAAFLGGVVGFVLLLFPLTKPLMYNDSTNDCPCWLGYCLRN

SEQ ID NO: 9830 - DNA, 762 bp, Arabidopsis thaliana
gaaccacctaatctctcctcctctccttctctctattttgccggaatacatatgatcgagtgaaacggcggacaaagctgtcgtgttgagtactaattcgccgtcgtttttctcagtgaaggagtggtgagagatgtcgagtctcgaagatatcaagaacgagactgttgatctggaaaaaattccgattgaggaagttttccagcagctaaaatgttcaagggaaggattgacaacgcaggaaggggaggacaggattcagatctttggccccaacaagctcgaagagaaaaaggaaagcaaacttctgaagtttttggggtttatgtggaatccactttcatgggtcatggaaatggctgcaatcatggccattgctttggccaacggtgatggtaggcctccggattggcagcattttgttggtattatctgtctgttggttatcaactctaccatcagttttatcgaagaaaacaatgctggtaatgctgctgctgctcttatggctggtcttgctcctaaaaccaaggttcttagggatggaaagtggagtgaacaagaagctgctattcttgtcccaggagatattgttagcattaaattaggagacattatcccagctgatgcccacatagggagagatctttgtttattgccataactcttcccaaaccttattgttagtgttcttgtttctcaaatatgtacttttgcataatttgctcttttgaagaaacaaggcatgcctttgtgtttggc

SEQ ID NO: 9831 - protein, 176 aa, Arabidopsis thaliana
MSSLEDIKNETVDLEKIPIEEVFQQLKCSREGLTTQEGEDRIQIFGPNKLEEKKESKLLKFLGFMWNPLSWVMEMAAIMAIALANGDGRPPDWQHFVGIICLLVINSTISFIEENNAGNAAAALMAGLAPKTKVLRDGKWSEQEAAILVPGDIVSIKLGDIIPADAHIGRDLCLLP

SEQ ID NO: 9832 - protein, 112 aa, Arabidopsis thaliana
MWNPLSWVMEMAAIMAIALANGDGRPPDWQHFVGIICLLVINSTISFIEENNAGNAAAALMAGLAPKTKVLRDGKWSEQEAAILVPGDIVSIKLGDIIPADAHIGRDLCLLP

SEQ ID NO: 9833 - protein, 104 aa, Arabidopsis thaliana
MEMAAIMAIALANGDGRPPDWQHFVGIICLLVINSTISFIEENNAGNAAAALMAGLAPKTKVLRDGKWSEQEAAILVPGDIVSIKLGDIIPADAHIGRDLCLLP

SEQ ID NO: 9834 - DNA, 1554 bp, Arabidopsis thaliana
gagagagagagagctcactagtccccccccccccggggacgatggtgatgctcggtgtgctccagcttccctgccgcctccatcactctctcttttactcctcttcccaaattgcttcttctcgccctcaaggtgttgctaaagtggttctgaaaaaaggcaagacacagctcttcaaagacggaagtccaatggtgtacagtggagctgtcgacaggatcatcggaaaaccacctcctcagacaggagatgttgtcattgtagctgatggcactgagaatcccattggttggggtttgtataactctgtttctatgttctgtgttcgccttatgcagcttcaacacgaatccaccagagatccttcttgtgcattgaacattgagaagcttctccaaacaagaatcgctgaagcagttcagttgcgaaagagtttggcacttccctcggctaatactaatgcttatcgtcttgtcaacagtgaaggagatagattgtctggattgattgtggatgtgtttggagatatagctgtggtagcatcctctgctgcttggcttgaaaagtacaggattgaagtggagagttgcttaagatcaattgacggaattaatcatataaactggagaccttctcttgatgttcttaaagaagatggttttgacatctcaagtctgaaacagacacaatcatctactctcccacagagatcaatggttgtggaaaatgggatctcatacgcaatttcgctagagggacagaagacagggttctacacggatcagcgcgaaaaccgtcacttcatatcaaccatctctgctggtaaaagagttcttgatctttgctgctatagtggtggatttgcactgaatgcagcgagaggaggtgctaccagtgttatcggaattgattcatctttacctgctttggagctcgccagagagaatgtaatcctcaacaatatggatccagagaaggttgttttctttaaacaagattcaacagaattcatgaagggtgcactgtcaagagaagagacatgggacatcgtgatcctagaccctcctaagctagctccgcggaaaaaggttttgcacaacgcttcaggaatgtacagaaatctcaactcgttggcaatgcgattgacaagaagtggcggtcttatgatgacatgctcatgttcaggggcaatgacacagagcgggaagttcttggggatacttcagagtgctgcagcaatgtcaggaaggaagatcacagtggtgcgggaggcaggagctgcgtctgaccacccactcgacccatcttaccctcaaggccaatatctctccaaccttctgcttcgggtgctgtgagcgcacggaagtttggtttgttagttcaacttttttttgtccgtagtttgtaaccatacatagaagacttataaaaggcagatttggggacaaaagtaatatattagactggtttggaacaacaacaacaaagtattatgtgggatttaagctctcaaaaaaaaaaaaaaaaaactcgagggggggcccggtacccaat

SEQ ID NO: 9835 - protein, 450 aa, Arabidopsis thaliana
ERESSLVPPPPGTMVMLGVLQLPCRLHHSLFYSSSQIASSRPQGVAKVVLKKGKTQLFKDGSPMVYSGAVDRIIGKPPPQTGDVVIVADGTENPIGWGLYNSVSMFCVRLMQLQHESTRDPSCALNIEKLLQTRIAEAVQLRKSLALPSANTNAYRLVNSEGDRLSGLIVDVFGDIAVVASSAAWLEKYRIEVESCLRSIDGINHINWRPSLDVLKEDGFDISSLKQTQSSTLPQRSMVVENGISYAISLEGQKTGFYTDQRENRHFISTISAGKRVLDLCCYSGGFALNAARGGATSVIGIDSSLPALELARENVILNNMDPEKVVFFKQDSTEFMKGALSREETWDIVILDPPKLAPRKKVLHNASGMYRNLNSLAMRLTRSGGLMMTCSCSGAMTQSGKFLGILQSAAAMSGRKITVVREAGAASDHPLDPSYPQGQYLSNLLLRVL

SEQ ID NO: 9836 - protein, 437 aa, Arabidopsis thaliana
MVMLGVLQLPCRLHHSLFYSSSQIASSRPQGVAKVVLKKGKTQLFKDGSPMVYSGAVDRIIGKPPPQTGDVVIVADGTENPIGWGLYNSVSMFCVRLMQLQHESTRDPSCALNIEKLLQTRIAEAVQLRKSLALPSANTNAYRLVNSEGDRLSGLIVDVFGDIAVVASSAAWLEKYRIEVESCLRSIDGINHINWRPSLDVLKEDGFDISSLKQTQSSTLPQRSMVVENGISYAISLEGQKTGFYTDQRENRHFISTISAGKRVLDLCCYSGGFALNAARGGATSVIGIDSSLPALELARENVILNNMDPEKVVFFKQDSTEFMKGALSREETWDIVILDPPKLAPRKKVLHNASGMYRNLNSLAMRLTRSGGLMMTCSCSGAMTQSGKFLGILQSAAAMSGRKITVVREAGAASDHPLDPSYPQGQYLSNLLLRVL

SEQ ID NO: 9837 - protein, 435 aa, Arabidopsis thaliana
MLGVLQLPCRLHHSLFYSSSQIASSRPQGVAKVVLKKGKTQLFKDGSPMVYSGAVDRIIGKPPPQTGDVVIVADGTENPIGWGLYNSVSMFCVRLMQLQHESTRDPSCALNIEKLLQTRIAEAVQLRKSLALPSANTNAYRLVNSEGDRLSGLIVDVFGDIAVVASSAAWLEKYRIEVESCLRSIDGINHINWRPSLDVLKEDGFDISSLKQTQSSTLPQRSMVVENGISYAISLEGQKTGFYTDQRENRHFISTISAGKRVLDLCCYSGGFALNAARGGATSVIGIDSSLPALELARENVILNNMDPEKVVFFKQDSTEFMKGALSREETWDIVILDPPKLAPRKKVLHNASGMYRNLNSLAMRLTRSGGLMMTCSCSGAMTQSGKFLGILQSAAAMSGRKITVVREAGAASDHPLDPSYPQGQYLSNLLLRVL

SEQ ID NO: 9838 - DNA, 2507 bp, Arabidopsis thaliana
gaaaggataactcattagacacagagacgagctttttagtttgagctctctctcactatgtctctctcgcaaacgaatttcctcagttcttcattactctcatcgagccatgacctgcgaattccttattctagagcggtactttcttatccccgtatccaaacacaccggattctctgtgctgcgaagcgaaccgggaagcggagatatccttctgagaggaggaagctgaggacagagcagaaggaagctgtggctaaggttaagaacaagcttgaaggagtttggcgtctctctaagctcggagttcctgttggagatgaccctggaaaggactttctcgggatttcagaaggtttgcttcaagccatcgctaaagttatcgagtttccggttgcttcaatgctgccagaagaagcattttcagtgattaggaaatcttttgacgctaggaagattctgaaagaagccaagtttgtttacactgtggatttggatgtgaagacgctccttgagttagagcctcgtgctcatgatttcattttccggttagagcctaagattgggcttattgaacatgtgcctaccgagaagagtgtttcaggggacttgatcagtgtggtgaatgactgtaaaaggatcaacagtgagacagcatccggagaatatgaacctcagattatcaatggctctggagatccacaccatcatggaggaggacgaagcaaaccgaaaattgcagttgttggtggtggtccatctggtttgtttgctgctcttgtacttgcagagttcggtgcagatgtgacattgattgaaagagggcaagcagtagaagaaaggggacgtgatataggcgctttggtagttcgcaagattttggatatggagagtaatttctgctttggcgagggtggtgcaggtacttggagtgatggaaagcttgttactcgaataggaaagaatagtgccaccgttctagcggttagtattttgagactgccaaatgtgttgaaaacgttggttcgctttggggctcctgataatatattggtcaacggaaagcctcatctaggaacagataagctagttccattactccgtaatttcagacattatcttcaaagtgcgggagtgactatcaagtttggaactcgggtagatgatcttctggtagaggattctcgtgttgttggagtcagggtttcggattcaacaaaccaattgcagactacctcccagaatttaaaggttgatgcagttgttcttgcagttggtcattcagcacgtgacacatatgagatgcttcattctcgtaatgtcgaattgattccaaaagattttgctgttggtttgcgtattgagcatcctcaggagctaattaacagtatacagtactcggatttggctaatgaagttcttaaagggcgaggtaaagtaccagtggcggattataaggttgttcagtatgtgaatgataagaccgaggatctctcgcagtcttcatcgaaacgcagttgctactccttctgcatgtgtcctggtggtcaggttgttctcaccagcacaaacccaaccgaactctgcatcaatggcatgtcattttctcgccgttcatccaaatgggccaatgctgcactcgtcgttacagtctcagcaaaagattttgatgttctcaatcttaaaggacccttagctggaattgagtttcagagagaatttgaaagaagagcagccataatgggtggtggcgattttacagttcctgtacaaagggttactgattttctgcaaaacaagctatctgaaacacctttacctccatcaagctatagattaggagtgaagtctgcaaatctgcatgaactgtttcctgctcatatcacagaggctctgcgagagtctatctctatgtttgaaaaggagttaccgggattcatctcagaggaagcactcctccacggcgtagagacaagaacaagctcccctgttcggatacctcgaagcaatgagacgtacgagagtacgagcttaaaaggtctatacccagttggtgaaggagctggttatgctggtggaattgtaagtgctgcagtggatggtatgttttcgggttttgctgttgcgaaaagctttgatctctttgatggaaccatagagtcagttattggaaaggctcaaggtgctggacttgtaaagtactgatgatgctgatgatgaggatgatgaagaagacagtcatagctttcatccatctttgtttgttcgggttttgtcgaggtaaaagaacatcaagggggactgctccaaaatccagttttgttgtaccatagctcaaggacttatacagaaaaggcccaaatcagaagcggtaaggaatcgtcatcagcagccagaagagaattttgccttagttatgtaactaacccaaacagtagtactgaagaaagtaagctagtgtatccaatgactatcttttcatcagtactgttatgaaaatttacttc

SEQ ID NO: 9839 - protein, 715 aa, Arabidopsis thaliana
MSLSQTNFLSSSLLSSSHDLRIPYSRAVLSYPRIQTHRILCAAKRTGKRRYPSERRKLRTEQKEAVAKVKNKLEGVWRLSKLGVPVGDDPGKDFLGISEGLLQAIAKVIEFPVASMLPEEAFSVIRKSFDARKILKEAKFVYTVDLDVKTLLELEPRAHDFIFRLEPKIGLIEHVPTEKSVSGDLISVVNDCKRINSETASGEYEPQIINGSGDPHHHGGGRSKPKIAVVGGGPSGLFAALVLAEFGADVTLIERGQAVEERGRDIGALVVRKILDMESNFCFGEGGAGTWSDGKLVTRIGKNSATVLAVSILRLPNVLKTLVRFGAPDNILVNGKPHLGTDKLVPLLRNFRHYLQSAGVTIKFGTRVDDLLVEDSRVVGVRVSDSTNQLQTTSQNLKVDAVVLAVGHSARDTYEMLHSRNVELIPKDFAVGLRIEHPQELINSIQYSDLANEVLKGRGKVPVADYKVVQYVNDKTEDLSQSSSKRSCYSFCMCPGGQVVLTSTNPTELCINGMSFSRRSSKWANAALVVTVSAKDFDVLNLKGPLAGIEFQREFERRAAIMGGGDFTVPVQRVTDFLQNKLSETPLPPSSYRLGVKSANLHELFPAHITEALRESISMFEKELPGFISEEALLHGVETRTSSPVRIPRSNETYESTSLKGLYPVGEGAGYAGGIVSAAVDGMFSGFAVAKSFDLFDGTIESVIGKAQGAGLVKY

SEQ ID NO: 9840 - protein, 600 aa, Arabidopsis thaliana
MLPEEAFSVIRKSFDARKILKEAKFVYTVDLDVKTLLELEPRAHDFIFRLEPKIGLIEHVPTEKSVSGDLISVVNDCKRINSETASGEYEPQIINGSGDPHHHGGGRSKPKIAVVGGGPSGLFAALVLAEFGADVTLIERGQAVEERGRDIGALVVRKILDMESNFCFGEGGAGTWSDGKLVTRIGKNSATVLAVSILRLPNVLKTLVRFGAPDNILVNGKPHLGTDKLVPLLRNFRHYLQSAGVTIKFGTRVDDLLVEDSRVVGVRVSDSTNQLQTTSQNLKVDAVVLAVGHSARDTYEMLHSRNVELIPKDFAVGLRIEHPQELINSIQYSDLANEVLKGRGKVPVADYKVVQYVNDKTEDLSQSSSKRSCYSFCMCPGGQVVLTSTNPTELCINGMSFSRRSSKWANAALVVTVSAKDFDVLNLKGPLAGIEFQREFERRAAIMGGGDFTVPVQRVTDFLQNKLSETPLPPSSYRLGVKSANLHELFPAHITEALRESISMFEKELPGFISEEALLHGVETRTSSPVRIPRSNETYESTSLKGLYPVGEGAGYAGGIVSAAVDGMFSGFAVAKSFDLFDGTIESVIGKAQGAGLVKY

SEQ ID NO: 9841 - protein, 439 aa, Arabidopsis thaliana
MESNFCFGEGGAGTWSDGKLVTRIGKNSATVLAVSILRLPNVLKTLVRFGAPDNILVNGKPHLGTDKLVPLLRNFRHYLQSAGVTIKFGTRVDDLLVEDSRVVGVRVSDSTNQLQTTSQNLKVDAVVLAVGHSARDTYEMLHSRNVELIPKDFAVGLRIEHPQELINSIQYSDLANEVLKGRGKVPVADYKVVQYVNDKTEDLSQSSSKRSCYSFCMCPGGQVVLTSTNPTELCINGMSFSRRSSKWANAALVVTVSAKDFDVLNLKGPLAGIEFQREFERRAAIMGGGDFTVPVQRVTDFLQNKLSETPLPPSSYRLGVKSANLHELFPAHITEALRESISMFEKELPGFISEEALLHGVETRTSSPVRIPRSNETYESTSLKGLYPVGEGAGYAGGIVSAAVDGMFSGFAVAKSFDLFDGTIESVIGKAQGAGLVKY

SEQ ID NO: 9842 - DNA, 1586 bp, Arabidopsis thaliana
actagtccccccccccccaaataaatataactcccgtatttgattctttcttcaagatatcaatcaagatcaagagtaagacagagacacaaaggcgagagctatgtcgtcgtcggtggatttcgtgacggaacaggggagatgcggcgacgatggtaacggcgccggagagacagtaaagaatggcgaaattgatcatttgctttccgaaccgtcggctccgactatttctctccctacggaatctttcctcagagcagcgacgttactcaagaaccaggttctggaggccacgtggaaaggtggtgtcgaagctcttgcctctggttcgggtccagtgctggatccgactgtgtacacaggactactcggcacagcgttcacctgcttgaagtcgtacgaggtaacgcggaaccatcaagatctgctaacttgcgcagagataatcgacacgtgtgccaacgttgcgcgtgccacaaccaggcacgtgacatttttatgtggaagaggaggagtttgtacgcttggtgcaattgtagccaattacagaggggaccaatcaaagcgtgacttcttcctcggtctttttcttgagcttgcagaagagagagagttaccagcaggaccagaggaaggaggatttgggatgtcatatgaccttctctatggaagagcgggtttcctttgggctgctctgttcctaaaccgatatctcggccaaggaactgttcctgaccatctcttatcacccattgttgcagccatcttagccggtgggcgagttggagctgcagatcatgaagcttgtcctctgttatacaggtttcacggaacgcgattttggggtgctgcgaatggattagctggaatcttgtatgtattgctgcattttccactatcggaagaggatgttaaagatgttcaagggacattgaggtatatgatgagtaataggtttccgaacagcggaaactacccgtgcagcgaagggaatccgagggataagctagtccaatgggctcatggagcaaccggcatggccattactttggctaaagcatctcaggtgtttcccaaggaaagggatttccgcgaagcagccattgaagcaggagaagtagtgtggaagagtggcttggtgaagaaggtaggtttagccgatggagttgctggtaatgcctacgctttcttatccctttatcgcttaaccggagatgttgtatatgaagagagagcaaaagcgtttgcgagttacttgtgccgtgatgcgatagagctcgtgaatatgacaagccaagaaacagaacatgattattcgcttttccggggactagctggaccagtatgcctctggttcgatcttgtgtcaccggtagattctaagtttcctggttatgagatataatttaaaacaggtaatagataaaccgtaggttctattatgactatctctttgtgaaaggatcttaggttctccggtttattccactttctataatctattgaagtaacttgagatttgggagaaaaaaaaaaaaaaaaaaactcgagggggggcccggtacccaattcgccctatagtgatg

SEQ ID NO: 9843 - protein, 433 aa, Arabidopsis thaliana
MSSSVDFVTEQGRCGDDGNGAGETVKNGEIDHLLSEPSAPTISLPTESFLRAATLLKNQVLEATWKGGVEALASGSGPVLDPTVYTGLLGTAFTCLKSYEVTRNHQDLLTCAEIIDTCANVARATTRHVTFLCGRGGVCTLGAIVANYRGDQSKRDFFLGLFLELAEERELPAGPEEGGFGMSYDLLYGRAGFLWAALFLNRYLGQGTVPDHLLSPIVAAILAGGRVGAADHEACPLLYRFHGTRFWGAANGLAGILYVLLHFPLSEEDVKDVQGTLRYMMSNRFPNSGNYPCSEGNPRDKLVQWAHGATGMAITLAKASQVFPKERDFREAAIEAGEVVWKSGLVKKVGLADGVAGNAYAFLSLYRLTGDVVYEERAKAFASYLCRDAIELVNMTSQETEHDYSLFRGLAGPVCLWFDLVSPVDSKFPGYEI

SEQ ID NO: 9844 - protein, 252 aa, Arabidopsis thaliana
MSYDLLYGRAGFLWAALFLNRYLGQGTVPDHLLSPIVAAILAGGRVGAADHEACPLLYRFHGTRFWGAANGLAGILYVLLHFPLSEEDVKDVQGTLRYMMSNRFPNSGNYPCSEGNPRDKLVQWAHGATGMAITLAKASQVFPKERDFREAAIEAGEVVWKSGLVKKVGLADGVAGNAYAFLSLYRLTGDVVYEERAKAFASYLCRDAIELVNMTSQETEHDYSLFRGLAGPVCLWFDLVSPVDSKFPGYEI

SEQ ID NO: 9845 - DNA, 3497 bp, Arabidopsis thaliana
gacagttgaacctttttgctacagttcctgaaagcatagttcttctctaacgagccattccagagagacttagggtttacgcgagagctcataagatagaagctgctcgattcttccgagttttacgaatttcgatactcattgtttggattcgttgatttgatcaggtgatagtctgacttacaatggctccagttccggatccgaacagtgttggcggtggtgcgaagcgggacgaagctacgacgaagattccttctaaggattccaagaagaaagatgataaaaaggaagaggatctgtctgaagaggacttgcaactaaagcagaatctggagctctatgttgagagagttcaggaccccaatcctgagttacagaagattgctcttgaaagcatgaggaaggaaattcgtgactcaacaagctccatgacatcagttccaaaacccctcaagtttctccgccctcattatggagttcttaaagaatttcatgcaaaaatggcagagtctgatctcaaaaaaatgttggctgatatactttctgtcctggcactgaccatgtctgctgaaggtgaaaggatttgtgttttgtggttcttggtagaatttgacttaagctatttgttgctgatcctttgttatgcaatactctttcaggaaagcttaaactataggttgaatggatcagagagtgacatcggatcgtggggtcacgagtatgtcaggaatttggctggagagattgcaaaagagtatacaatacgtcagggtgaagagtcctctattgaagacttaatggatcttgtgcagcaaattgtttcttttcacatgaagcataatgccgaaaccgaagctgttgaccttttaatggatgttgaggatcttgatctcttacttgagcatgttgacaatacaaatttcaggaggacgtgcaactatctcacgagtgcagcaaagtatcttccaggaccagatgacatgttggttctagatattgcttacatgatctacattaagtttgcagaatatccaaacgcgctgcaaattgcattatttcttgataacatgcagtatgtgaagcaagtatttacctcatgtaccgatctggtaaaaaagaaacagttctgctacatgattgcacgtcatggtatgacctttgagcttgaccaagagatggttgcaaatgacgaagacaaagaagcgctacaggatattgttaacaactctaagttgagtgaaggatatctgacgcttgctagggatattgaggtcatggaggccaagacgcctgaagacatctacaaggctcacttgcttgatggtagggctagctctggtccaagtgtggactcagctaggcaaaatctatctgcgacttttgtgaatgcatttgtaaatgctggattcggccaggacaaattaatgacagtaccatctgactcaaccagtggatcggctggaaactggctcttcaaaaataaagaacatggaaagaccagtgcagttgctagtctggtatacctcatcttacttgataaattgattagctatgtttttattttggaaggtatgattcaattgtgggatgtggagaccggactaggtcatctcgacaaatatttccatagtaacgataatcccgtcgttgctggagctctgctgggagttgggattgttaattgtggcattaagaatgattgtgaccctgcatttgcccttctttcaggttatattgacaatgaggattcatctgtccgaattggtgctattatgggtctcgggattgcatatgcgggttcccaaaatgatcagataaaaatcaggttgtctccaatactaaatgatgccaacgcacctctcgatgtgattgcatttgctgcacttagtttggggatgatttatgttggttcgtgtaacgaagaggttgcacaatctattatatttgctttgatggatcggagcgaggcagagctgggtgaagccctcactcgtttcttgcctcttggacttggtcttttgtaccttggcaaacaggtgggcagccagtcatacttgattatttttcttgttcgtgaaagtgtggaggctactgcagaagtttcaaagacgttcaatgagaaaatcagaaagtattgtgatatgacacttctttcatgtgcatatgctggaaccgggaatgtccttaaggtatctgatcaatttagtctgactcttcaaactattcaaactattcaggtccaagaccttctggctcagtgtggagagcatctggtgaaaggtgatatccaccagggtccagctgtgattggattagctatggttgctatgtctgaggaattgggtctggatatggagatccgttctttggagcgcgtactacagtatggagagcagaacattcgacgtgcagtgcctttggctcttggtctcctatgtatatcaaacccaaaggtgactgttatggacactttgagcagactaagccatgacacagattcagaagttgcaatggcagcaattatctcccttggattgataggcgctggaaccaacaatgcaaggatagctggcatgcttagaaatctctccagctattattacaaggatgccagccttcttttctgtgtaacgttttatgatttctttttaagttttcatggaataaacacggtttctacttatgataggcttgttctcattgtcttaagtcacaatgcaggtgcgcatcgctcaagggtttgtgcatatgggaaagggtctcttaactctcaatcctttccactccgaacggctcttgctatgccaaccgcacttgctggtatagtgacattgttgcatgcatgccttgacatgaaatccattatactggggaaatatcactatgtgctctacttccttgttttggcgatgcagccaaggatgatgctgacggtggatcagagcctgaagcccatctcggtgccagtgcgggtaggacaagcggttgatgtggttggacaggcaggccgacctaagacaatcactgggttccaaacgcactcaacacctgttctccttgctgctggggagagagctgaactcgcaaccgagaagtatgttgttcctctaatccccttgttacattatcctactcgaaataaaactctgttttacatattggaatctaaaaaaactctgcttctttttgggtcacaggtacattccgttgtcgcccatattagaaggtttcgtcatattgaaggaaaatccagactacagagaggagtaaatccaaagttgcaagcatttgaagaaagagagagagcctttgaatactttcactacggttgtcaaaagttttttagtttattcccgtctgttcccaggaaatggttcacaatctctccttttaaaagaaaaaatagcttcattgcaatatataggaacttcttgtgcactactttaatatcgcattctaaaagctggataagtttccaaatccaattctcttaa

SEQ ID NO: 9846 - protein, 1103 aa, Arabidopsis thaliana
MAPVPDPNSVGGGAKRDEATTKIPSKDSKKKDDKKEEDLSEEDLQLKQNLELYVERVQDPNPELQKIALESMRKEIRDSTSSMTSVPKPLKFLRPHYGVLKEFHAKMAESDLKKMLADILSVLALTMSAEGERICVLWFLVEFDLSYLLLILCYAILFQESLNYRLNGSESDIGSWGHEYVRNLAGEIAKEYTIRQGEESSIEDLMDLVQQIVSFHMKHNAETEAVDLLMDVEDLDLLLEHVDNTNFRRTCNYLTSAAKYLPGPDDMLVLDIAYMIYIKFAEYPNALQIALFLDNMQYVKQVFTSCTDLVKKKQFCYMIARHGMTFELDQEMVANDEDKEALQDIVNNSKLSEGYLTLARDIEVMEAKTPEDIYKAHLLDGRASSGPSVDSARQNLSATFVNAFVNAGFGQDKLMTVPSDSTSGSAGNWLFKNKEHGKTSAVASLVYLILLDKLISYVFILEGMIQLWDVETGLGHLDKYFHSNDNPVVAGALLGVGIVNCGIKNDCDPAFALLSGYIDNEDSSVRIGAIMGLGIAYAGSQNDQIKIRLSPILNDANAPLDVIAFAALSLGMIYVGSCNEEVAQSIIFALMDRSEAELGEALTRFLPLGLGLLYLGKQVGSQSYLIIFLVRESVEATAEVSKTFNEKIRKYCDMTLLSCAYAGTGNVLKVSDQFSLTLQTIQTIQVQDLLAQCGEHLVKGDIHQGPAVIGLAMVAMSEELGLDMEIRSLERVLQYGEQNIRRAVPLALGLLCISNPKVTVMDTLSRLSHDTDSEVAMAAIISLGLIGAGTNNARIAGMLRNLSSYYYKDASLLFCVTFYDFFLSFHGINTVSTYDRLVLIVLSHNAGAHRSRVCAYGKGSLNSQSFPLRTALAMPTALAGIVTLLHACLDMKSIILGKYHYVLYFLVLAMQPRMMLTVDQSLKPISVPVRVGQAVDVVGQAGRPKTITGFQTHSTPVLLAAGERAELATEKYVVPLIPLLHYPTRNKTLFYILESKKTLLLFGSQVHSVVAHIRRFRHIEGKSRLQRGVNPKLQAFEERERAFEYFHYGCQKFFSLFPSVPRKWFTISPFKRKNSFIAIYRNFLCTTLISHSKSWISFQIQFS

SEQ ID NO: 9847 - protein, 1032 aa, Arabidopsis thaliana
MRKEIRDSTSSMTSVPKPLKFLRPHYGVLKEFHAKMAESDLKKMLADILSVLALTMSAEGERICVLWFLVEFDLSYLLLILCYAILFQESLNYRLNGSESDIGSWGHEYVRNLAGEIAKEYTIRQGEESSIEDLMDLVQQIVSFHMKHNAETEAVDLLMDVEDLDLLLEHVDNTNFRRTCNYLTSAAKYLPGPDDMLVLDIAYMIYIKFAEYPNALQIALFLDNMQYVKQVFTSCTDLVKKKQFCYMIARHGMTFELDQEMVANDEDKEALQDIVNNSKLSEGYLTLARDIEVMEAKTPEDIYKAHLLDGRASSGPSVDSARQNLSATFVNAFVNAGFGQDKLMTVPSDSTSGSAGNWLFKNKEHGKTSAVASLVYLILLDKLISYVFILEGMIQLWDVETGLGHLDKYFHSNDNPVVAGALLGVGIVNCGIKNDCDPAFALLSGYIDNEDSSVRIGAIMGLGIAYAGSQNDQIKIRLSPILNDANAPLDVIAFAALSLGMIYVGSCNEEVAQSIIFALMDRSEAELGEALTRFLPLGLGLLYLGKQVGSQSYLIIFLVRESVEATAEVSKTFNEKIRKYCDMTLLSCAYAGTGNVLKVSDQFSLTLQTIQTIQVQDLLAQCGEHLVKGDIHQGPAVIGLAMVAMSEELGLDMEIRSLERVLQYGEQNIRRAVPLALGLLCISNPKVTVMDTLSRLSHDTDSEVAMAAIISLGLIGAGTNNARIAGMLRNLSSYYYKDASLLFCVTFYDFFLSFHGINTVSTYDRLVLIVLSHNAGAHRSRVCAYGKGSLNSQSFPLRTALAMPTALAGIVTLLHACLDMKSIILGKYHYVLYFLVLAMQPRMMLTVDQSLKPISVPVRVGQAVDVVGQAGRPKTITGFQTHSTPVLLAAGERAELATEKYVVPLIPLLHYPTRNKTLFYILESKKTLLLFGSQVHSVVAHIRRFRHIEGKSRLQRGVNPKLQAFEERERAFEYFHYGCQKFFSLFPSVPRKWFTISPFKRKNSFIAIYRNFLCTTLISHSKSWISFQIQFS

SEQ ID NO: 9848 - protein, 1021 aa, Arabidopsis thaliana
MTSVPKPLKFLRPHYGVLKEFHAKMAESDLKKMLADILSVLALTMSAEGERICVLWFLVEFDLSYLLLILCYAILFQESLNYRLNGSESDIGSWGHEYVRNLAGEIAKEYTIRQGEESSIEDLMDLVQQIVSFHMKHNAETEAVDLLMDVEDLDLLLEHVDNTNFRRTCNYLTSAAKYLPGPDDMLVLDIAYMIYIKFAEYPNALQIALFLDNMQYVKQVFTSCTDLVKKKQFCYMIARHGMTFELDQEMVANDEDKEALQDIVNNSKLSEGYLTLARDIEVMEAKTPEDIYKAHLLDGRASSGPSVDSARQNLSATFVNAFVNAGFGQDKLMTVPSDSTSGSAGNWLFKNKEHGKTSAVASLVYLILLDKLISYVFILEGMIQLWDVETGLGHLDKYFHSNDNPVVAGALLGVGIVNCGIKNDCDPAFALLSGYIDNEDSSVRIGAIMGLGIAYAGSQNDQIKIRLSPILNDANAPLDVIAFAALSLGMIYVGSCNEEVAQSIIFALMDRSEAELGEALTRFLPLGLGLLYLGKQVGSQSYLIIFLVRESVEATAEVSKTFNEKIRKYCDMTLLSCAYAGTGNVLKVSDQFSLTLQTIQTIQVQDLLAQCGEHLVKGDIHQGPAVIGLAMVAMSEELGLDMEIRSLERVLQYGEQNIRRAVPLALGLLCISNPKVTVMDTLSRLSHDTDSEVAMAAIISLGLIGAGTNNARIAGMLRNLSSYYYKDASLLFCVTFYDFFLSFHGINTVSTYDRLVLIVLSHNAGAHRSRVCAYGKGSLNSQSFPLRTALAMPTALAGIVTLLHACLDMKSIILGKYHYVLYFLVLAMQPRMMLTVDQSLKPISVPVRVGQAVDVVGQAGRPKTITGFQTHSTPVLLAAGERAELATEKYVVPLIPLLHYPTRNKTLFYILESKKTLLLFGSQVHSVVAHIRRFRHIEGKSRLQRGVNPKLQAFEERERAFEYFHYGCQKFFSLFPSVPRKWFTISPFKRKNSFIAIYRNFLCTTLISHSKSWISFQIQFS

SEQ ID NO: 9849 - DNA, 684 bp, Arabidopsis thaliana
ttgttcgagatgatccgagtacataaagcccgtcctgagcgacatgaccctcctcttcagcgtcaattgcgcaagttgtcccggtattgatcgactcagccattctcgacaagatgaagttcaccaacagcatcacacattccgctcttggactggtaaccattctaccaggcctcgctgttgcccagaactctggaaagttcaacgtcctcacttacaacgttgccggtctgccggcattcctcaacaacaacgaagttccaggagataaggcgacaaactcgcgactcattggagctgcgttgggcagagagggtcacgatattgttcatgtccaagaggacttcaactatcatgcctacatctacgagaccgacactcatcctgtcaggactcccacttctggaggagttcccttcggtgatggcctgaacacgctggccaactacgactatacgaccttcacccgcacgaagtggaacaagtgctctctcaactcaggtgactgcctgacgcccaagggcttcaccttcatgcgcatgcctaccatcggcttcgagcttcacctgtacaacctacacgcggacgctgggtaggttcatcgacaagcgtgtactggttcttcgactaatgaccatcttagctcgaacagcgacgatgtcgcagcgcgatctgcaggtatcg

SEQ ID NO: 9850 - protein, 160 aa, Arabidopsis thaliana
MKFTNSITHSALGLVTILPGLAVAQNSGKFNVLTYNVAGLPAFLNNNEVPGDKATNSRLIGAALGREGHDIVHVQEDFNYHAYIYETDTHPVRTPTSGGVPFGDGLNTLANYDYTTFTRTKWNKCSLNSGDCLTPKGFTFMRMPTIGFELHLYNLHADAG

SEQ ID NO: 9851 - DNA, 2915 bp, Arabidopsis thaliana
cccccggtcttcatcactttcctcaaatcccatcactctctttctttcgtttggtccctcaaaaactatataaaatcccaatttcccagctctattaaaaaaaccatatacgtacacacatacaaatactctctgattattttttgtatgtgtgtacgaaaacgcatagctctttgttgtttttgatcgagatttttgctgaatctatcttcgcagtgagatcgattttgttatttgatttcgtttactcgtcaattggaagttcgatcggaaattgaatgcgtggatctgattacgatcaaatgacctccagcttaagggctactgacattaaggaaattggcaatgggagagacgggagatgatgctgggccatcagagcaaggaccttctaatcaaacctggtggccttcagaatttgtggagaaatttggttctgtttatctgggatcgcaagaagagacatctagtactaaagactcacctagaaatcttgggcaagatgggctgccatctagtactgcttcgaatattctttggagtactggttcactttctgagcccatcccaaatggcttctactctgtgatcccggataatagattgaagcagctatttaataacattcctacattggaagatcttcatgctctgggtgacgaaggtcttaaggctgatgtgattctagttgattttcagaaagataaaaagcttttcaggcagaagcagttgattaccaaacttgtcagtggattgaactcaaagccagctactattattaagaaaattgctggactggtagcagatgtttataagcaatcaactctgcagagtccagcaaaaagtacgcagtcatttgaaaactgtggtattcaactgctaggacagatcaagcatggttcttgtcgtcctcgagcaatcttgttcaaagtcttagctgataccgttggcctgcaaagtcgacttgtagtgggtttgccaagtgatggagctgctgagagtgtggactcatatagtcatatttctgtcactgttttgctgaattctgtggaaatgctggttgacctaatgcgatttcctggtcagcttattcctctatcaaccaaagcaatttttatgagtcatatctcagcggcaggggaaagtgattctgcagagaatgactcttgtgattcacctttggagccaaacagtcccatgtttggttatccagagaaatttgaccatgaaaatgcagaaaaagatgaaaacctttcgttgcacaggaaactggatgggtctccaaatacgtctggtccaccatcaaggaatatgctgttacgatctgcctctgcgctagagaggaaattaagtttctcacagagcgagtcaaacatggctaacgagttttggcggcagagccggaggaaggtcattgctgatcagcggactgctagttccagtcccgaacatctttccttccgagcccgtacaaagtccatgctaagtggcgacaagaacttggcacgagatttcaccggggatgttgccacatcaagctgcaaatctgttggaggagcaaaaatggaaactaagagaataaggaggagaagcatcagtataactcctgagattggcgatgatattgtcagggcagtacgagcgatgaatgaagccttgaagcagaatcgcctctcaaaagagcaaggggatgatgattcatctcctaactctccaaatgacagaaccgagagctctcatctccagaaaaatgtctctggttttcatcttgatgcccatgaccaagtttctggtggaaggtcgacactttcaagggaaccactagatccgcagaaggcaatctcactaccttcttctccccagaactaccgaagccaatatgaacagagtggatcgtcacatcgcaatataagccacatctgggataaagtattgggatctcccatgttccagaataagccattattaccttatgaagaatggaacatagacttctctgagctgactgttgggacacgtgtcggaattggatttttcggagaagtattccgtgggatctggaacgggacagacgttgctatcaaagtgttccttgagcaagaccttacagctgagaacatggaggatttctgcaatgagatatcaattcttagccgacttagacatcccaatgttatactgttccttggagcatgcacaaagcctccacgattatcactgatcactgagtacatggaaatgggatctttgtattacttgctccacttgagtggacaaaaaaagaggttaagctggcggaggaagctaaagatgctgcgggacatttgcaggggattgatgtgtatacaccggatggggatagtacaccgtgatataaagagtgcaaactgtcttttgagcaacaaatggacagtcaagatctgtgattttgggctgtcgagaataatgacagggacaacaatgagagacacagtctctgcaggaactccagagtggatggctcctgaacttatccgcaatgagcccttctcagaaaagtgtgatatcttcagtttaggtgtaataatgtgggagctatgcactttaaccagaccttgggaaggagtaccgcctgaacgggttgtttatgctattgcttacgagggagctcggcttgagattcctgaaggaccactgggaaagcttattgcagattgttggacagaaccggaacaaagaccgagttgcaatgagatactctctcgtttgctggattgtgagtattcgctttgctaactttctctcaatcatattttccttctgtgaatataaaactttgcagcgagagaggttttttgttttcttcgtttcttttttttgaatattgttggctttctcctttgagtttgtacaaaagaactttggcgctttcacat

SEQ ID NO: 9852 - protein, 809 aa, Arabidopsis thaliana
MGETGDDAGPSEQGPSNQTWWPSEFVEKFGSVYLGSQEETSSTKDSPRNLGQDGLPSSTASNILWSTGSLSEPIPNGFYSVIPDNRLKQLFNNIPTLEDLHALGDEGLKADVILVDFQKDKKLFRQKQLITKLVSGLNSKPATIIKKIAGLVADVYKQSTLQSPAKSTQSFENCGIQLLGQIKHGSCRPRAILFKVLADTVGLQSRLVVGLPSDGAAESVDSYSHISVTVLLNSVEMLVDLMRFPGQLIPLSTKAIFMSHISAAGESDSAENDSCDSPLEPNSPMFGYPEKFDHENAEKDENLSLHRKLDGSPNTSGPPSRNMLLRSASALERKLSFSQSESNMANEFWRQSRRKVIADQRTASSSPEHLSFRARTKSMLSGDKNLARDFTGDVATSSCKSVGGAKMETKRIRRRSISITPEIGDDIVRAVRAMNEALKQNRLSKEQGDDDSSPNSPNDRTESSHLQKNVSGFHLDAHDQVSGGRSTLSREPLDPQKAISLPSSPQNYRSQYEQSGSSHRNISHIWDKVLGSPMFQNKPLLPYEEWNIDFSELTVGTRVGIGFFGEVFRGIWNGTDVAIKVFLEQDLTAENMEDFCNEISILSRLRHPNVILFLGACTKPPRLSLITEYMEMGSLYYLLHLSGQKKRLSWRRKLKMLRDICRGLMCIHRMGIVHRDIKSANCLLSNKWTVKICDFGLSRIMTGTTMRDTVSAGTPEWMAPELIRNEPFSEKCDIFSLGVIMWELCTLTRPWEGVPPERVVYAIAYEGARLEIPEGPLGKLIADCWTEPEQRPSCNEILSRLLDCEYSLC

SEQ ID NO: 9853 - protein, 573 aa, Arabidopsis thaliana
MLVDLMRFPGQLIPLSTKAIFMSHISAAGESDSAENDSCDSPLEPNSPMFGYPEKFDHENAEKDENLSLHRKLDGSPNTSGPPSRNMLLRSASALERKLSFSQSESNMANEFWRQSRRKVIADQRTASSSPEHLSFRARTKSMLSGDKNLARDFTGDVATSSCKSVGGAKMETKRIRRRSISITPEIGDDIVRAVRAMNEALKQNRLSKEQGDDDSSPNSPNDRTESSHLQKNVSGFHLDAHDQVSGGRSTLSREPLDPQKAISLPSSPQNYRSQYEQSGSSHRNISHIWDKVLGSPMFQNKPLLPYEEWNIDFSELTVGTRVGIGFFGEVFRGIWNGTDVAIKVFLEQDLTAENMEDFCNEISILSRLRHPNVILFLGACTKPPRLSLITEYMEMGSLYYLLHLSGQKKRLSWRRKLKMLRDICRGLMCIHRMGIVHRDIKSANCLLSNKWTVKICDFGLSRIMTGTTMRDTVSAGTPEWMAPELIRNEPFSEKCDIFSLGVIMWELCTLTRPWEGVPPERVVYAIAYEGARLEIPEGPLGKLIADCWTEPEQRPSCNEILSRLLDCEYSLC

SEQ ID NO: 9854 - protein, 568 aa, Arabidopsis thaliana
MRFPGQLIPLSTKAIFMSHISAAGESDSAENDSCDSPLEPNSPMFGYPEKFDHENAEKDENLSLHRKLDGSPNTSGPPSRNMLLRSASALERKLSFSQSESNMANEFWRQSRRKVIADQRTASSSPEHLSFRARTKSMLSGDKNLARDFTGDVATSSCKSVGGAKMETKRIRRRSISITPEIGDDIVRAVRAMNEALKQNRLSKEQGDDDSSPNSPNDRTESSHLQKNVSGFHLDAHDQVSGGRSTLSREPLDPQKAISLPSSPQNYRSQYEQSGSSHRNISHIWDKVLGSPMFQNKPLLPYEEWNIDFSELTVGTRVGIGFFGEVFRGIWNGTDVAIKVFLEQDLTAENMEDFCNEISILSRLRHPNVILFLGACTKPPRLSLITEYMEMGSLYYLLHLSGQKKRLSWRRKLKMLRDICRGLMCIHRMGIVHRDIKSANCLLSNKWTVKICDFGLSRIMTGTTMRDTVSAGTPEWMAPELIRNEPFSEKCDIFSLGVIMWELCTLTRPWEGVPPERVVYAIAYEGARLEIPEGPLGKLIADCWTEPEQRPSCNEILSRLLDCEYSLC

SEQ ID NO: 9855 - DNA, 2045 bp, Arabidopsis thaliana
atcagagagttctttctcaaaaactatttacacatcaaaaataaaatcaaaataaattgttgtgatcatagagttctcttgcaccaatgagtgctccaaagtttggttatgtattactattgattgtattaatcaatattagcaataatggcgtcgatgcatttcacaaagttttcaagaaattgcaatcaaaatcgacatcattggagtcagtaagtcctcttcacagaaccgcttatcactttcaacctccccgccattggatcaacgatccgaatgctccaatgctctacaagggagtttaccatctcttctaccaatacaatcccaaaggtgcggtttggggtaacattgtgtgggctcactcggtttctaaggacttgatcaattgggaagcccttgaaccagccatttacccatccaaatggttcgacatcaacggtacatggtccggttcagctacccacgtaccgggaaaaggaccggttatcctctacaccggtatcaccgagaaccagactcagattcaaaactacgccattccacaagatctttccgacccatacctcaagacatggataaagccagacgataaccccatcgtaaaacccgataatggcgagaacggatccgctttccgtgacccgaccacggcttggttcaacaaaaaagatgggtattggagaatgcttgttggctcaaagagaaagaacagaggaattgcttatatgtacaagagccgtgacttcaaaaaatgggtcaaaagcaaacgtcctatccactcaagaaagaaaaccggtatgtgggaatgtcccgatttcttcccggtatccgtaaccgacaagaaaaacggtttggacttcagctacgacggtccaaacgccaagcatgtgttgaaggttagtttggacttgaccagatacgagtactacactcttggaacgtatgacaccaagaaggatcgttacaggccagacagttacactcctgacggttgggatggtttgagatttgattatggtaactactatgcgtcaaagacattctttgatgacaagacgaacagaagaattctttgggggtgggccaatgaatccgacaccgttcaagatgataccgtgaagggttgggccggaattcagcttatcccaagaacaatcttgcttgactctagcggtaagcaactcgtgttttggcctattgaagagattgagtcattgagaggaaagaatgtccaaatgaccaaccagaaaatggagatgggccaacgctttgaggtccaaggaatcactcctgctcaggtggatgtggatgtgacattcaacgttggaaatctagagaaggccgaaaagtttgacgaaagcttcgcaactaaaccactagagttatgtaacttgaaaggttcgaatgtgaatggtggagttggtccttttggtttgatcacgttggctacatctgacttagaagaatacactcctgttttctttagagtcttcaaagatgccgcatccaacaagcctaaggttctcatgtgctctgacgccaagccttcgagtctcaaaaaagacaccgggactgacgccaaggagaggatgtacaaaccatcgtttgctggttttgtggatgtcggtctccttgacggaaagatctctctaaggagtttgattgatcactcggttgtggagagctttggagcaaaaggaaagacagtgataacatctagagtgtatccgacaaaagcagtaggagaaaaagctcatttgtttgtctttaacaacggctcacaacctgtgaccgtagagagcctcaatgcatggaacatgcagaagcctctgaagatgaaccaaggtgcaaagtgatcacatcattctttaattttttcgttgacaaatttaattcattcgttaaaacagagagtctgtcacaatatattgtagaaaaaaggaacctattgtgtttcttttacaatcaatacaatttgtacatagtttatcactactaacaaagtattgatcttatattttattaatgaaacacgtttcctt

SEQ ID NO: 9856 - protein, 590 aa, Arabidopsis thaliana
MSAPKFGYVLLLIVLINISNNGVDAFHKVFKKLQSKSTSLESVSPLHRTAYHFQPPRHWINDPNAPMLYKGVYHLFYQYNPKGAVWGNIVWAHSVSKDLINWEALEPAIYPSKWFDINGTWSGSATHVPGKGPVILYTGITENQTQIQNYAIPQDLSDPYLKTWIKPDDNPIVKPDNGENGSAFRDPTTAWFNKKDGYWRMLVGSKRKNRGIAYMYKSRDFKKWVKSKRPIHSRKKTGMWECPDFFPVSVTDKKNGLDFSYDGPNAKHVLKVSLDLTRYEYYTLGTYDTKKDRYRPDSYTPDGWDGLRFDYGNYYASKTFFDDKTNRRILWGWANESDTVQDDTVKGWAGIQLIPRTILLDSSGKQLVFWPIEEIESLRGKNVQMTNQKMEMGQRFEVQGITPAQVDVDVTFNVGNLEKAEKFDESFATKPLELCNLKGSNVNGGVGPFGLITLATSDLEEYTPVFFRVFKDAASNKPKVLMCSDAKPSSLKKDTGTDAKERMYKPSFAGFVDVGLLDGKISLRSLIDHSVVESFGAKGKTVITSRVYPTKAVGEKAHLFVFNNGSQPVTVESLNAWNMQKPLKMNQGAK

SEQ ID NO: 9857 - protein, 524 aa, Arabidopsis thaliana
MLYKGVYHLFYQYNPKGAVWGNIVWAHSVSKDLINWEALEPAIYPSKWFDINGTWSGSATHVPGKGPVILYTGITENQTQIQNYAIPQDLSDPYLKTWIKPDDNPIVKPDNGENGSAFRDPTTAWFNKKDGYWRMLVGSKRKNRGIAYMYKSRDFKKWVKSKRPIHSRKKTGMWECPDFFPVSVTDKKNGLDFSYDGPNAKHVLKVSLDLTRYEYYTLGTYDTKKDRYRPDSYTPDGWDGLRFDYGNYYASKTFFDDKTNRRILWGWANESDTVQDDTVKGWAGIQLIPRTILLDSSGKQLVFWPIEEIESLRGKNVQMTNQKMEMGQRFEVQGITPAQVDVDVTFNVGNLEKAEKFDESFATKPLELCNLKGSNVNGGVGPFGLITLATSDLEEYTPVFFRVFKDAASNKPKVLMCSDAKPSSLKKDTGTDAKERMYKPSFAGFVDVGLLDGKISLRSLIDHSVVESFGAKGKTVITSRVYPTKAVGEKAHLFVFNNGSQPVTVESLNAWNMQKPLKMNQGAK

SEQ ID NO: 9858 - protein, 390 aa, Arabidopsis thaliana
MLVGSKRKNRGIAYMYKSRDFKKWVKSKRPIHSRKKTGMWECPDFFPVSVTDKKNGLDFSYDGPNAKHVLKVSLDLTRYEYYTLGTYDTKKDRYRPDSYTPDGWDGLRFDYGNYYASKTFFDDKTNRRILWGWANESDTVQDDTVKGWAGIQLIPRTILLDSSGKQLVFWPIEEIESLRGKNVQMTNQKMEMGQRFEVQGITPAQVDVDVTFNVGNLEKAEKFDESFATKPLELCNLKGSNVNGGVGPFGLITLATSDLEEYTPVFFRVFKDAASNKPKVLMCSDAKPSSLKKDTGTDAKERMYKPSFAGFVDVGLLDGKISLRSLIDHSVVESFGAKGKTVITSRVYPTKAVGEKAHLFVFNNGSQPVTVESLNAWNMQKPLKMNQGAK

SEQ ID NO: 9859 - DNA, 1359 bp, Arabidopsis thaliana
cccccgaacagaatctgaagatcgaaggacagtgaaatcgaagaattgaagcacaagcttctccatctctgcaatctctctatccatctctcgtcatcgcatgtttcgcttcccaattcggaagaaagagagacgacgcgtctgaagcatatctccgtaatcggggtgaagaaaaacgcggcgagaagaagaggcagattttcgttttgggagggtagacaaatctggcgaaagtggagggcctaagggcgaggccgtggcttaagccaggagcttgtataaatggagatcaatatgactacgacggttcggaagacgaccattccaggccttggtggcgccgtcgtctcagatccttgtatatggcagccatgtcctttactccgtccacttttcgaatcgctatctcgttgctccttcttgttgctatcgtctccgccgtcatttttctcccggtcgaacagaaattgaaggacttcttgttatggattaaggaagatcttggaccttttggtccacttgcattggctttggcttatattcctctcacaattgtggcggttcctgcttctgtactcacgctaggtggtggttacctttttggcctgccagtaggatttgtagccgactctcttggagctacattaggtgcaacagcggcatttctgcttggtagaacgattggtaaatcttatgtcacttcaaaaataaagcattacccaaagtttcaagctgtttccgttgcaattcaaaaatctggcttcaagatagtcttgctgctacgcgttgtccccatactgcccttcaatatgttgaattacctcctatctgtaactcctgttcgcttaggggaatacatgctggccacttggttgggaatgatgcccattacatttgcgctagtatatgttggaactactctgaaagatctttctgatattacacatggatggcatgaggtgtcagtatttcgttgggtaattatgatggttggcgtagctctagctgtaattctgataatatgcataacaagagtggcgaaatcatccttggacaaagcattggctgagaatggtactgaattagatgggaagaagaatgacgacgcttccgtactcccgatcgcagagccaccaccggatctacaagagcctctcgttatcagaatcgacccatccaatacttgaataatatagacaagaagaaacctcttgagtttgtaaatttcgcgaaattttcttaccgagtgagttattagaaacgttttgtatagcatcataataccatacttcacagtttaattcgtttgttctttagttaaaaaaaaaaaaaaaaaaaactcgagggggggcccggtac

SEQ ID NO: 9860 - protein, 274 aa, Arabidopsis thaliana
MAAMSFTPSTFRIAISLLLLVAIVSAVIFLPVEQKLKDFLLWIKEDLGPFGPLALALAYIPLTIVAVPASVLTLGGGYLFGLPVGFVADSLGATLGATAAFLLGRTIGKSYVTSKIKHYPKFQAVSVAIQKSGFKIVLLLRVVPILPFNMLNYLLSVTPVRLGEYMLATWLGMMPITFALVYVGTTLKDLSDITHGWHEVSVFRWVIMMVGVALAVILIICITRVAKSSLDKALAENGTELDGKKNDDASVLPIAEPPPDLQEPLVIRIDPSNT

SEQ ID NO: 9861 - protein, 271 aa, Arabidopsis thaliana
MSFTPSTFRIAISLLLLVAIVSAVIFLPVEQKLKDFLLWIKEDLGPFGPLALALAYIPLTIVAVPASVLTLGGGYLFGLPVGFVADSLGATLGATAAFLLGRTIGKSYVTSKIKHYPKFQAVSVAIQKSGFKIVLLLRVVPILPFNMLNYLLSVTPVRLGEYMLATWLGMMPITFALVYVGTTLKDLSDITHGWHEVSVFRWVIMMVGVALAVILIICITRVAKSSLDKALAENGTELDGKKNDDASVLPIAEPPPDLQEPLVIRIDPSNT

SEQ ID NO: 9862 - DNA, 1814 bp, Arabidopsis thaliana
gagcgatctttgtttgactgagatgggcagtggctgctcttctctctcttactcatcatcttccacttgcagtgccactgttttctctatttcttctcctccatcatcttcttcttcgctgaaactcaatccaagtagcttccttttccagaaccctaaaactctgagaaatcagccacctttgaggtgtgggagatcatttaagatggaatcacagaaacccattttcgatttggagaagttagatgatgagtttgttcagaaactggtttatgatgctctcgtttggtcttctcttcacggactcgtcgtcggtgacaaaacttatcagaaatcaggaaatgttccaggagttggattgatgcacgcacctattgcattgctaccaactggattcccagaagcttactggaagcaagcttgtgatgttactcctcttttcaatgaattgattgatcgtgttagcttggatggcaaattcttacaggatagtctctctagaacgaagaaagttgatgtctttacatctagacttcttgacattcactccaagatgctagaaagaaataagaaagaggacattcgtttgggtttacaccggtttgattatatgcttgacgaagaaacaaattcacttcttcagattgagatgaatactatctcgtgttcgtttcctggccttagtcgtcttgttagccagctacatcagtcattgcttcgatcttatggggatcagattggcatagactctgaacgtgtacctataaacacatccacaatccaatttgctgatgcattggctaaagcttggttggagtacagtaacccaagagcggtagtcatggtaattgtacagccagaagaacgcaacatgtacgatcaacatttgctgagcagtatattgagagaaaagcataatatagttgtcatcaggaagactctagcagaagtcgaaaaagaagggagtgtacaagaggatgaaacccttattgttggcggccaagcagtcgcagtggtttatttcagatctggctatactcctaatgatcatccgtctgaatcagaatggaatgctaggctgcttattgaggagtcttcagctgtcaaatgcccgagcatagcttaccatttaactggctccaagaaaatccagcaagaactggctaaaccaggtgttctcgagaggtttctggacaacaaagaggacattgctaagctgaggaaatgctttgctgggctttggagcttggatgactcagaaattgtcaagcaggctatcgaaaaacccggattgtttgttatgaagcctcagagagaaggcggaggaaacaacatctatggagatgatgtgagggaaaatcttttgagactgcagaaagaaggagaggaaggaaacgctgcgtatatcctgatgcagaggatattcccaaaagtctcaaacatgttcttggtgcgagaaggcgtttaccataagcatcaagctatatcagaactcggtgtctatggtgcttacctcaggagcaaagacaaagttatagtaaacgagcagagtggttatctaatgcgcacgaagatcgcatcatcagatgaaggcggcgttgcagctggttttggagtcttggacagcatttatctgaattgagatggataactttcacaaccatcctgatcaattttactggtttattccttcttcttctcttcttgcttgttaaagatttgtgtattaatcatgaagatcaataagactaggcaaagctctttacaattctttccacaggaccgcaaagcctacattgcttattgttattttg

SEQ ID NO: 9863 - protein, 546 aa, Arabidopsis thaliana
SDLCLTEMGSGCSSLSYSSSSTCSATVFSISSPPSSSSSLKLNPSSFLFQNPKTLRNQPPLRCGRSFKMESQKPIFDLEKLDDEFVQKLVYDALVWSSLHGLVVGDKTYQKSGNVPGVGLMHAPIALLPTGFPEAYWKQACDVTPLFNELIDRVSLDGKFLQDSLSRTKKVDVFTSRLLDIHSKMLERNKKEDIRLGLHRFDYMLDEETNSLLQIEMNTISCSFPGLSRLVSQLHQSLLRSYGDQIGIDSERVPINTSTIQFADALAKAWLEYSNPRAVVMVIVQPEERNMYDQHLLSSILREKHNIVVIRKTLAEVEKEGSVQEDETLIVGGQAVAVVYFRSGYTPNDHPSESEWNARLLIEESSAVKCPSIAYHLTGSKKIQQELAKPGVLERFLDNKEDIAKLRKCFAGLWSLDDSEIVKQAIEKPGLFVMKPQREGGGNNIYGDDVRENLLRLQKEGEEGNAAYILMQRIFPKVSNMFLVREGVYHKHQAISELGVYGAYLRSKDKVIVNEQSGYLMRTKIASSDEGGVAAGFGVLDSIYLN

SEQ ID NO: 9864 - protein, 539 aa, Arabidopsis thaliana
MGSGCSSLSYSSSSTCSATVFSISSPPSSSSSLKLNPSSFLFQNPKTLRNQPPLRCGRSFKMESQKPIFDLEKLDDEFVQKLVYDALVWSSLHGLVVGDKTYQKSGNVPGVGLMHAPIALLPTGFPEAYWKQACDVTPLFNELIDRVSLDGKFLQDSLSRTKKVDVFTSRLLDIHSKMLERNKKEDIRLGLHRFDYMLDEETNSLLQIEMNTISCSFPGLSRLVSQLHQSLLRSYGDQIGIDSERVPINTSTIQFADALAKAWLEYSNPRAVVMVIVQPEERNMYDQHLLSSILREKHNIVVIRKTLAEVEKEGSVQEDETLIVGGQAVAVVYFRSGYTPNDHPSESEWNARLLIEESSAVKCPSIAYHLTGSKKIQQELAKPGVLERFLDNKEDIAKLRKCFAGLWSLDDSEIVKQAIEKPGLFVMKPQREGGGNNIYGDDVRENLLRLQKEGEEGNAAYILMQRIFPKVSNMFLVREGVYHKHQAISELGVYGAYLRSKDKVIVNEQSGYLMRTKIASSDEGGVAAGFGVLDSIYLN

SEQ ID NO: 9865 - protein, 478 aa, Arabidopsis thaliana
MESQKPIFDLEKLDDEFVQKLVYDALVWSSLHGLVVGDKTYQKSGNVPGVGLMHAPIALLPTGFPEAYWKQACDVTPLFNELIDRVSLDGKFLQDSLSRTKKVDVFTSRLLDIHSKMLERNKKEDIRLGLHRFDYMLDEETNSLLQIEMNTISCSFPGLSRLVSQLHQSLLRSYGDQIGIDSERVPINTSTIQFADALAKAWLEYSNPRAVVMVIVQPEERNMYDQHLLSSILREKHNIVVIRKTLAEVEKEGSVQEDETLIVGGQAVAVVYFRSGYTPNDHPSESEWNARLLIEESSAVKCPSIAYHLTGSKKIQQELAKPGVLERFLDNKEDIAKLRKCFAGLWSLDDSEIVKQAIEKPGLFVMKPQREGGGNNIYGDDVRENLLRLQKEGEEGNAAYILMQRIFPKVSNMFLVREGVYHKHQAISELGVYGAYLRSKDKVIVNEQSGYLMRTKIASSDEGGVAAGFGVLDSIYLN

SEQ ID NO: 9866 - DNA, 1623 bp, Arabidopsis thaliana
ataattcgaacaaggaaacaaatccaaagcttcattatcatcatctgttacttcttagatttgcttatccttcttcactttctcaattttgaatctgagaattcgtgcctccgatctctctccctctcgccgtggatagagatggagagcttaccaacgacggtctcagggaaatcagaccggcgaggtaggttttccaagtctcagaacacctccaagccctctcttatcttggccttcttctcttgtcttgcttggctctacgtcgctggccggttatggcaagatgcgcagtacagagcagcactcaatactgtgcttaagaggaattatgatcagaggcctaaggttcttacggtggaggacaaacttgtggtccttggatgcaaagatcttgagaggagaattgttgaaactgaaatggagttggcacaggcaaagagtcaaggctatcttaaaaaacagaaaagtgtctcttcttcagggaagaaaatgctagctgttattggagtttacacaggctttggaagtcacttgaagcgcaataaatttagaggctcttggatgccacgagatgatgctcttaaaaaacttgaggaaagaggagttgtcatacgctttgtgattggtcggagtgcaaccgaggtgatagcctagatagaaaaattgacgaagaaaatcgtgcaactaaagactttttgattcttgagaatcacgaggaagcccaagaagagttaccgaagaaagtgaagttcttctacagtgctgctgttcagaattgggacgcagagttttatgtcaaagttgatgacaacgttgacttggatcttgaggggatgattgcgcttcttgaaagtcgtcgtagtcaagatggtgcttacattgggtgcatgaaatctggagatgtgattactgaagagggaagtcaatggtatgagcctgagtggtggaaatttggggacgacaaatcgtatttccgtcatgcaactggttcgctggtaatactctcaaagaatctggctcagtatgtcaatataaacagtggattgttgaagacatatgcgtttgatgataccaccattggatcatggatgattggcgtccaggcaacatatatagacgacaatcgcctttgctgcagcagcacaagacaagaaaaagtgtgttccatggcatgatcactgcatagatgatcctcttgtcccagagcaaagacggcggtttctcatcgcattcatggcgctccgatactcttttggggcagattcttggaccggatactgaacttatcattagttttgttagaatgggagtatgattaggccattcattacagtttatgattagaggcatgcgtatcccttgagctttggagtaagaaaatggggaaatggtatagatgtgaatgaagtataatttttcctttggtatcatatcaccatcatttgtccgtccattctagcccaatctctggcaggcgtttaatgttcgaaccttaagtttgcatttttggttgctggtttttaaaaatgtgttagttaagacttaagaggacaaaagaaaatcgtctgctttaagctcataaacacttcggaccaatacgtggttaaaaatacttcattg

SEQ ID NO: 9867 - protein, 218 aa, Arabidopsis thaliana
IIRTRKQIQSFIIIICYFLDLLILLHFLNFESENSCLRSLSLSPWIEMESLPTTVSGKSDRRGRFSKSQNTSKPSLILAFFSCLAWLYVAGRLWQDAQYRAALNTVLKRNYDQRPKVLTVEDKLVVLGCKDLERRIVETEMELAQAKSQGYLKKQKSVSSSGKKMLAVIGVYTGFGSHLKRNKFRGSWMPRDDALKKLEERGVVIRFVIGRSATEVIA

SEQ ID NO: 9868 - protein, 171 aa, Arabidopsis thaliana
MESLPTTVSGKSDRRGRFSKSQNTSKPSLILAFFSCLAWLYVAGRLWQDAQYRAALNTVLKRNYDQRPKVLTVEDKLVVLGCKDLERRIVETEMELAQAKSQGYLKKQKSVSSSGKKMLAVIGVYTGFGSHLKRNKFRGSWMPRDDALKKLEERGVVIRFVIGRSATEVIA

SEQ ID NO: 9869 - protein, 113 aa, Arabidopsis thaliana
MIALLESRRSQDGAYIGCMKSGDVITEEGSQWYEPEWWKFGDDKSYFRHATGSLVILSKNLAQYVNINSGLLKTYAFDDTTIGSWMIGVQATYIDDNRLCCSSTRQEKVCSMA

SEQ ID NO: 9870 - DNA, 2490 bp, Arabidopsis thaliana
cccccccccccccgaggaaataattaagagcgtcatttttggtatcccgcgcaactttttcttctcagtttcagtttctctacatcgattcatcgattccactctcttgattgctgtttagatcaatccgtctcgaacccaggggttagtatatagtggatcaaactgatccgacccgacccgacccgaattattaatgtcggaagttaatgagatgagtggtggttctattggcggcgaattgttgagagcgtcgccgaaggttttaacggccggtgatcggaaattactcaaggtggagcttcggccaggggatacgacgtatgtttcgtggaagaagcttatgagggatgctggtaaggtcaatggtttatcggcttcggttcccgacccgcctcctaatgctaaccctaaccttgagtttcgaattgcaccggggcatccagtagagattgaaacgaatgaacaacctcattctaacagtttcaacgctgttattgagaagatagagaggctctataaggggaacgatagaagtgatggggaagagttagacggtgctcctgatgatgatgagtatgacactgaagattcatttatagatgatgctgaactggatgagtatttcgaagttgataattcaacagttaaacatgatggattttatgtaaatagaggcaagttggagcggatggaaccttcaacaacatctaaccagcaacccaaaaaacggcgacgaaaagattcagcaaaaccctgtcgtgatgcagttgacgtatccgataaacacaccaagttgtctataacagctaggaaaaaggatcaatcaactgctcctgggtcctggaaaacacaggagtcacctttgccttctggagcgcaagatgcaaatacttcagtacctctggatgatgtgaagcattctgatagagcaaatcatcagtctaggaatgatacaagtcacaagtcaagggaaactggatcctctagtgcccttcatcagaaatacagcaacaaaagcttacaccaacaatctacgtccctgctaggaaaatctccccccaatgtctttgcagaggtaacagtagtccgtcagaaagaaaacaatggtatgcatcagctggcaaatgtaacgggaagcagacaatctagtcaagcgtctaaaaaagatggttctaatgtgaagtctaaaacctcaatcctcgagaaagccataagggaactggagaaggtggttgtggaatcaaggcctcctgctatcactgaaaatcaagaagctgatacctcatcccaggcagtgaagagaagattgcccagggatgttaaattgaaacttgctaaagttgctaggattgcgcaggcaagccagggaaaacattcaacagagttaatcaaccgtcttatgagcattgttggtcacctaatccagcttaggtctcttaagaggaacttgaaaatcatgattgatatgggagattctgcaacccgagaaaaggatactaggttcaagcaaatcaacaatgaagttcttgatatgataaaggccaaagtttctttgatggaatcacaggcaatcaaaccagaaggtgcaacatcagacgattttcaggactcagtagaaaagccatctttgaagaagtttgtcatggatgcggcattggaggataaattgtgtgacctatatgacatatttatcgacggattggatgaagatcaaggtccacaaacaaaaaagctatatgtcaatttggctgaactctggccaaatagattgatggattatcgtgggatcaaacatgcaattttccgggcaaaggagagacgaaaagcattgtatggaaaccttgcgaaagagatggatcaaacaaagatgaagaagagtatgaagcagttggtaccaagaacagactgtactgctcagcccaacaccgaattagtggttcagagacaacacagtggggaaaaaaaattgattgttgatccaaatgcaaccagcacttccgtggtcactagtcaaactatggttgacagatcaaatcagcagcagcctgagaagctaaagggaatctcaagctcttgcaatcctacagaggaaacaagagtggtcaagagaaagaacgaggctgtaatggctgagaaacaagtcgttcttgccctgaagaagcccgaacatccacagacacgtgtaatcccagctcctcagaatctgaacatcccacgaacaaccccggacctgaacttgccaagttgacatcacgattgacaaaggagctcttagaaacgccggagacaataacctctggcctcttccttccttgtattttgaggtggcacggcattagtcctggcgatgccgatgcttggtttttttagctacaaagcatggtttataaagttgtctgtattccagtttggctcttattaagttagttactctatttacgtgtcctttttcaaaactctaatgtataaagttatgattttacggac

SEQ ID NO: 9871 - protein, 684 aa, Arabidopsis thaliana
MSEVNEMSGGSIGGELLRASPKVLTAGDRKLLKVELRPGDTTYVSWKKLMRDAGKVNGLSASVPDPPPNANPNLEFRIAPGHPVEIETNEQPHSNSFNAVIEKIERLYKGNDRSDGEELDGAPDDDEYDTEDSFIDDAELDEYFEVDNSTVKHDGFYVNRGKLERMEPSTTSNQQPKKRRRKDSAKPCRDAVDVSDKHTKLSITARKKDQSTAPGSWKTQESPLPSGAQDANTSVPLDDVKHSDRANHQSRNDTSHKSRETGSSSALHQKYSNKSLHQQSTSLLGKSPPNVFAEVTVVRQKENNGMHQLANVTGSRQSSQASKKDGSNVKSKTSILEKAIRELEKVVVESRPPAITENQEADTSSQAVKRRLPRDVKLKLAKVARIAQASQGKHSTELINRLMSIVGHLIQLRSLKRNLKIMIDMGDSATREKDTRFKQINNEVLDMIKAKVSLMESQAIKPEGATSDDFQDSVEKPSLKKFVMDAALEDKLCDLYDIFIDGLDEDQGPQTKKLYVNLAELWPNRLMDYRGIKHAIFRAKERRKALYGNLAKEMDQTKMKKSMKQLVPRTDCTAQPNTELVVQRQHSGEKKLIVDPNATSTSVVTSQTMVDRSNQQQPEKLKGISSSCNPTEETRVVKRKNEAVMAEKQVVLALKKPEHPQTRVIPAPQNLNIPRTTPDLNLPS

SEQ ID NO: 9872 - protein, 678 aa, Arabidopsis thaliana
MSGGSIGGELLRASPKVLTAGDRKLLKVELRPGDTTYVSWKKLMRDAGKVNGLSASVPDPPPNANPNLEFRIAPGHPVEIETNEQPHSNSFNAVIEKIERLYKGNDRSDGEELDGAPDDDEYDTEDSFIDDAELDEYFEVDNSTVKHDGFYVNRGKLERMEPSTTSNQQPKKRRRKDSAKPCRDAVDVSDKHTKLSITARKKDQSTAPGSWKTQESPLPSGAQDANTSVPLDDVKHSDRANHQSRNDTSHKSRETGSSSALHQKYSNKSLHQQSTSLLGKSPPNVFAEVTVVRQKENNGMHQLANVTGSRQSSQASKKDGSNVKSKTSILEKAIRELEKVVVESRPPAITENQEADTSSQAVKRRLPRDVKLKLAKVARIAQASQGKHSTELINRLMSIVGHLIQLRSLKRNLKIMIDMGDSATREKDTRFKQINNEVLDMIKAKVSLMESQAIKPEGATSDDFQDSVEKPSLKKFVMDAALEDKLCDLYDIFIDGLDEDQGPQTKKLYVNLAELWPNRLMDYRGIKHAIFRAKERRKALYGNLAKEMDQTKMKKSMKQLVPRTDCTAQPNTELVVQRQHSGEKKLIVDPNATSTSVVTSQTMVDRSNQQQPEKLKGISSSCNPTEETRVVKRKNEAVMAEKQVVLALKKPEHPQTRVIPAPQNLNIPRTTPDLNLPS

SEQ ID NO: 9873 - protein, 635 aa, Arabidopsis thaliana
MRDAGKVNGLSASVPDPPPNANPNLEFRIAPGHPVEIETNEQPHSNSFNAVIEKIERLYKGNDRSDGEELDGAPDDDEYDTEDSFIDDAELDEYFEVDNSTVKHDGFYVNRGKLERMEPSTTSNQQPKKRRRKDSAKPCRDAVDVSDKHTKLSITARKKDQSTAPGSWKTQESPLPSGAQDANTSVPLDDVKHSDRANHQSRNDTSHKSRETGSSSALHQKYSNKSLHQQSTSLLGKSPPNVFAEVTVVRQKENNGMHQLANVTGSRQSSQASKKDGSNVKSKTSILEKAIRELEKVVVESRPPAITENQEADTSSQAVKRRLPRDVKLKLAKVARIAQASQGKHSTELINRLMSIVGHLIQLRSLKRNLKIMIDMGDSATREKDTRFKQINNEVLDMIKAKVSLMESQAIKPEGATSDDFQDSVEKPSLKKFVMDAALEDKLCDLYDIFIDGLDEDQGPQTKKLYVNLAELWPNRLMDYRGIKHAIFRAKERRKALYGNLAKEMDQTKMKKSMKQLVPRTDCTAQPNTELVVQRQHSGEKKLIVDPNATSTSVVTSQTMVDRSNQQQPEKLKGISSSCNPTEETRVVKRKNEAVMAEKQVVLALKKPEHPQTRVIPAPQNLNIPRTTPDLNLPS

SEQ ID NO: 9874 - DNA, 1250 bp, Arabidopsis thaliana
ccgggaagtttctctgatcgccatttccacgtcgtactaagcttctctttcgccatccgttttaggcaacgaagacgaagatcatgaaagggattacgaggcttctcaattctctttcgcgacatacagcttccgtaacttgttctccatcttcttcttctcttctgatatcacgtcgctctctgtttatctcggcggcgacacactttccggtgaatttctcggagtcgataacaactaatgcttctcgtaactgttcgagatcttcttcatttcccttcaattggatcgagcaaaggaggacaatgtttatccagacacaatcaacaccaaacccttcttctctaatgtttagtcctggtaaaccagttatggagattggaagtgctgatttccctaattctcgttctgctatgagttcacctttagctaaagccattttcgccattgatggtgtagttcgagttttctatgggtcagattttgttactgtaacaaagtcagatgatgtaacatgggatatactcaagcctgatatctttgcagtggtaatggacttttactcttctggtcagcctttgtttctcgactcacaagctacagctgccaaggataccgctattcatgaggatgactctgaaactgtagcaatgattaaggaactcttggagacgcgtatccgaccatcagttcaagatgatggaggggacatcgagtattgtggatttgatacggaaactggtatagttaagcttagaatgcaaggagcttgtagcggctgtccaagctcatctgttactttgaaatccggaattgagaatatgcttatgcattatgtatccgaggtcaaaggtgttgagcaagaattcgatggtgaagaggagggaacatcttctggtccaatggagtagagtaacagaaatgcatcacaaaaaaacttgagatttgttgctgctcttcaatatacagaagaagaataaactagaggtacattagttttgtcttctcctgaacctggcagcctcagaaaactatagactactggaaaacatggagttgtctcatataacccaataattgaaatttttacggttatatacttatatggcttctagtgagcgttcacaagtgtagctgaaagggtaaagatttgttgcacaaagttaagtagaagtttttgctgatttgaagttatataaggtttgtgatcaaaaaaaaaaaaaaaaaaaactcgagggggggcccggtac

SEQ ID NO: 9875 - protein, 275 aa, Arabidopsis thaliana
MKGITRLLNSLSRHTASVTCSPSSSSLLISRRSLFISAATHFPVNFSESITTNASRNCSRSSSFPFNWIEQRRTMFIQTQSTPNPSSLMFSPGKPVMEIGSADFPNSRSAMSSPLAKAIFAIDGVVRVFYGSDFVTVTKSDDVTWDILKPDIFAVVMDFYSSGQPLFLDSQATAAKDTAIHEDDSETVAMIKELLETRIRPSVQDDGGDIEYCGFDTETGIVKLRMQGACSGCPSSSVTLKSGIENMLMHYVSEVKGVEQEFDGEEEGTSSGPME

SEQ ID NO: 9876 - protein, 201 aa, Arabidopsis thaliana
MFIQTQSTPNPSSLMFSPGKPVMEIGSADFPNSRSAMSSPLAKAIFAIDGVVRVFYGSDFVTVTKSDDVTWDILKPDIFAVVMDFYSSGQPLFLDSQATAAKDTAIHEDDSETVAMIKELLETRIRPSVQDDGGDIEYCGFDTETGIVKLRMQGACSGCPSSSVTLKSGIENMLMHYVSEVKGVEQEFDGEEEGTSSGPME

SEQ ID NO: 9877 - protein, 187 aa, Arabidopsis thaliana
MFSPGKPVMEIGSADFPNSRSAMSSPLAKAIFAIDGVVRVFYGSDFVTVTKSDDVTWDILKPDIFAVVMDFYSSGQPLFLDSQATAAKDTAIHEDDSETVAMIKELLETRIRPSVQDDGGDIEYCGFDTETGIVKLRMQGACSGCPSSSVTLKSGIENMLMHYVSEVKGVEQEFDGEEEGTSSGPME

SEQ ID NO: 9878 - DNA, 2300 bp, Arabidopsis thaliana
gagaaaatggatacaccggaaaagagtgaaacccagatcggtactacagtttctaaactcaaagtcgaggttttttattctatacctatctcaaagtttcatgctttattagttttctcgttgttcctctgtttctgtgatgggttttttggtgtctgttagacttttcttcattgaatcgtacggttttgtgtaaagcccttgtcttaatttgttgcattttagtcaaagtttcagtttttaatcggttattggaatgaattgtgttgaaagttatggttttgatgattggagaagaatttgagatcaaagtgtttttttgtgcaatgcaggattcaccagtgtttagttacatatgcaatctctcaccaattaagactatcaaaccaattccaatcacttgtcctttaagctctctcaatttcgcatctccaccttctgttttcacttctcctcacgcggtttctcataaagagtctcgtttcagaagtcaaaaagatgtgtctgcttctaaagaagttggagaagaagaagctttagtcggtagcgaaccggaacaaagctacaagaatgactgcaatactcctagagttaccaatgatgtgaaagacaatggttgtgggaaggatttgcaggtgatgatggacaatgtcaagaagaaaagtgatactccggattgggaaactttgattgctgctacaacagaactgatttatggctcaccgagagagtcagaggcttttagttgcttgttgaagaaaacttcaaactctgaagcacgtctacgtggtagtataactgcaacatcggtggctgttacgaataccgatgtagtcaacaatgaatctgaatctgttgatgctctttcgatattgcaccgtggtgtgagaagacggtgtttagactttgaggttaaggggaaaaatcagcaaacattaggagaatcttcatctagttgtgtagtacctagcattggtctgcatcttaacaccattgcaatgtcctctaaggacaagaatgttgctaatgaatattcattttccggtaacataaaagtcggtgtgcaaagttctctgactccggtgcttcattcgcagcacgacatcgtgagagaaaatgaaagcgggaaagattcaggacaaattatagaagtggttccaaagtctttagcttcagtagacttgactccaataagccccaagaagaaaaggcgtaagtccgaacaatcaggagaaggcgactcgtcatgtaaacggtgcaactgcaaaaaatccaagtgtttgaagctttactgtgaatgctttgctgctggattttattgcatagagccatgttcatgtataaattgcttcaacaaacctatccataaagatgttgtcctggcgactcgcaaacagattgaatcccgcaatccacttgcatttgctcctaaagtcatcagaaactcagattccatcattgaagttggtgaggatgcaagtaaaactccagcttcagcgcgacacaaacgaggctgtaactgcaagaaatcaaactgtctgaagaaatactgtgaatgctatcagggcggagttggttgttctataaactgtagatgtgaaggatgtaaaaatgcatttggcagaaaagatgggtctttgttcgaacaagatgaggagaatgaaacatctggcacacccggaacaaagaaaacacaacagaatgtcgagttgttcaaacctgcagctccaccttcaacaccaattccatttagacaaccactggcgcaacttccaatctcatccaacaacagactgctacctccacagtctcattttcatcatggagctattggatcatcttcctcagggatatacaacatcagaaaaccagacatgagtttgttgtctcattcaagaatcgagacaatcacagaggatattgatgatatgtctgagaatctaatccattctccaataactactctatctcccaacagcaaaagggtttcgttgtctcatcttgattcaccagagtcgactccatggagaagaaatggtggggggaggaatctgatacgttcgttcccaacgtttccttctctcactccacaccattaaaattctttgaatgtcaacttctagttggtagttttaacttacacagacaacatacgcaaacatttacaagtttagtagcagtattgcgttagtttttacaatggttgtgtaataaaaatgttaagtcatttatcaatatcttgacaacattcctcgtctaatatcacaaatgtaaccttatttattcaacaattttcatgt

SEQ ID NO: 9879 - protein, 607 aa, Arabidopsis thaliana
MVLMIGEEFEIKVFFCAMQDSPVFSYICNLSPIKTIKPIPITCPLSSLNFASPPSVFTSPHAVSHKESRFRSQKDVSASKEVGEEEALVGSEPEQSYKNDCNTPRVTNDVKDNGCGKDLQVMMDNVKKKSDTPDWETLIAATTELIYGSPRESEAFSCLLKKTSNSEARLRGSITATSVAVTNTDVVNNESESVDALSILHRGVRRRCLDFEVKGKNQQTLGESSSSCVVPSIGLHLNTIAMSSKDKNVANEYSFSGNIKVGVQSSLTPVLHSQHDIVRENESGKDSGQIIEVVPKSLASVDLTPISPKKKRRKSEQSGEGDSSCKRCNCKKSKCLKLYCECFAAGFYCIEPCSCINCFNKPIHKDVVLATRKQIESRNPLAFAPKVIRNSDSIIEVGEDASKTPASARHKRGCNCKKSNCLKKYCECYQGGVGCSINCRCEGCKNAFGRKDGSLFEQDEENETSGTPGTKKTQQNVELFKPAAPPSTPIPFRQPLAQLPISSNNRLLPPQSHFHHGAIGSSSSGIYNIRKPDMSLLSHSRIETITEDIDDMSENLIHSPITTLSPNSKRVSLSHLDSPESTPWRRNGGGRNLIRSFPTFPSLTPHH

SEQ ID NO: 9880 - protein, 604 aa, Arabidopsis thaliana
MIGEEFEIKVFFCAMQDSPVFSYICNLSPIKTIKPIPITCPLSSLNFASPPSVFTSPHAVSHKESRFRSQKDVSASKEVGEEEALVGSEPEQSYKNDCNTPRVTNDVKDNGCGKDLQVMMDNVKKKSDTPDWETLIAATTELIYGSPRESEAFSCLLKKTSNSEARLRGSITATSVAVTNTDVVNNESESVDALSILHRGVRRRCLDFEVKGKNQQTLGESSSSCVVPSIGLHLNTIAMSSKDKNVANEYSFSGNIKVGVQSSLTPVLHSQHDIVRENESGKDSGQIIEVVPKSLASVDLTPISPKKKRRKSEQSGEGDSSCKRCNCKKSKCLKLYCECFAAGFYCIEPCSCINCFNKPIHKDVVLATRKQIESRNPLAFAPKVIRNSDSIIEVGEDASKTPASARHKRGCNCKKSNCLKKYCECYQGGVGCSINCRCEGCKNAFGRKDGSLFEQDEENETSGTPGTKKTQQNVELFKPAAPPSTPIPFRQPLAQLPISSNNRLLPPQSHFHHGAIGSSSSGIYNIRKPDMSLLSHSRIETITEDIDDMSENLIHSPITTLSPNSKRVSLSHLDSPESTPWRRNGGGRNLIRSFPTFPSLTPHH

SEQ ID NO: 9881 - protein, 590 aa, Arabidopsis thaliana
MQDSPVFSYICNLSPIKTIKPIPITCPLSSLNFASPPSVFTSPHAVSHKESRFRSQKDVSASKEVGEEEALVGSEPEQSYKNDCNTPRVTNDVKDNGCGKDLQVMMDNVKKKSDTPDWETLIAATTELIYGSPRESEAFSCLLKKTSNSEARLRGSITATSVAVTNTDVVNNESESVDALSILHRGVRRRCLDFEVKGKNQQTLGESSSSCVVPSIGLHLNTIAMSSKDKNVANEYSFSGNIKVGVQSSLTPVLHSQHDIVRENESGKDSGQIIEVVPKSLASVDLTPISPKKKRRKSEQSGEGDSSCKRCNCKKSKCLKLYCECFAAGFYCIEPCSCINCFNKPIHKDVVLATRKQIESRNPLAFAPKVIRNSDSIIEVGEDASKTPASARHKRGCNCKKSNCLKKYCECYQGGVGCSINCRCEGCKNAFGRKDGSLFEQDEENETSGTPGTKKTQQNVELFKPAAPPSTPIPFRQPLAQLPISSNNRLLPPQSHFHHGAIGSSSSGIYNIRKPDMSLLSHSRIETITEDIDDMSENLIHSPITTLSPNSKRVSLSHLDSPESTPWRRNGGGRNLIRSFPTFPSLTPHH

SEQ ID NO: 9882 - DNA, 1921 bp, Arabidopsis thaliana
  misc_feature (1835)..(1835): n is a, c, g, or t
gaataaaaaactgtccttttttgctttcccaattacaacgaaccctaaattcaaaattcagaatctgtagcaaatttgagtaatttataaggattgttgcagataacgaaaaccttattgggatgtgggagagttctaatccgtttaaaatctggatgacgttatgcagaagcggagaatcatcactgtgaacccctccgcgtctattgagatgagtcagtacgagaataatgaagttccttactcaagtgtcggtgctgatgaggttccatcatcaccgcctaaagctaccgataagattcggaaagtttccatgttgccacttgttttcctcatattctatgaagtctcaggaggtccttttggtgtagaggatagtgtgaatgcagcaggaccattattagctcttctagggtttgtgatctttcctttcatttggagtatccctgaggctttgattactgcggagatgggaacaatgtatcccgagaatggtggttatgttgtgtgggtttcctctgctttgggacctttttgggggtttcagcaaggttggatgaaatggcttagtggtgttattgataacgctttgtatcctgttctgtttcttgactatttgaagtctggagtcccggctttaggtagcggtttaccgagagttgcatcgatcttggtgctgactattttgttgacgtatctgaactacaggggactaactatagttggttgggttgctgtgcttatgggagttttctccatccttccgtttgctgtgatgggtttgatttcgattccgcagctagagccttcgagatggcttgtgatggacttagggaatgtgaactggaatttgtatcttaacacgcttttctggaatctaaactattgggactcgattagtacactagctggtgaagttgaaaaccccaaccatacacttccaaaggctttgttttatggtgtgatcttagttgcttgttcttacatcttccctcttttggctggaatcggggcaatcccgctagagcgtgagaaatggacagatgggtatttttctgatgtggccaaagctcttggtggagcgtggttgagatggtgggttcaagcggctgcagctacatcaaacatgggaatgtttatagccgagatgagtagtgactcttttcagcttctcggaatggctgagcgcggtatgcttcccgagttctttgccaaaaggtcacgttacgggacacctttactagggattctgttttcagcgtcaggtgttgttctcttgtcttggctaagctttcaagagattgtagctgcagagaacttactctactgcgttggtatgatcttagagtttatagcgtttgttagaatgagaatgaaacaccctgctgcatcaagaccgtacaagatacctattggaaccacaggttcgatcctcatgtgtattcctccaaccatactgatctgtgctgttgtagcactctcgtctcttaaagtagctgcagtgagcattgtgatgatgatcattggtttcctgatacatcctttactgaaccatatggatcgaaagagatgggtcaaattctccatcagttctgacttaccggaccttcaacagcagactcgggaatacgaagaaactctaatacgttaagaatgtccttagttatttccctcgtctatgttaagtacagagcttggaagctatagccaaaaaagcttaatttctcatagtctgtactctgttttattcacagcttgttctaaagttgtagttttttcgtaaagttaggtcatcgttagcacggttccaataaaatgtgcaatgtttgtatcanaaaaaaaaaaaaaaaaaaaaaaaaaaaaaaaaaaaaaaaaaaaaaaaaaagaaaaaaaaaaaaaaaaacctcgagggggggcccgg

SEQ ID NO: 9883 - protein, 495 aa, Arabidopsis thaliana
MQKRRIITVNPSASIEMSQYENNEVPYSSVGADEVPSSPPKATDKIRKVSMLPLVFLIFYEVSGGPFGVEDSVNAAGPLLALLGFVIFPFIWSIPEALITAEMGTMYPENGGYVVWVSSALGPFWGFQQGWMKWLSGVIDNALYPVLFLDYLKSGVPALGSGLPRVASILVLTILLTYLNYRGLTIVGWVAVLMGVFSILPFAVMGLISIPQLEPSRWLVMDLGNVNWNLYLNTLFWNLNYWDSISTLAGEVENPNHTLPKALFYGVILVACSYIFPLLAGIGAIPLEREKWTDGYFSDVAKALGGAWLRWWVQAAAATSNMGMFIAEMSSDSFQLLGMAERGMLPEFFAKRSRYGTPLLGILFSASGVVLLSWLSFQEIVAAENLLYCVGMILEFIAFVRMRMKHPAASRPYKIPIGTTGSILMCIPPTILICAVVALSSLKVAAVSIVMMIIGFLIHPLLNHMDRKRWVKFSISSDLPDLQQQTREYEETLIR

SEQ ID NO: 9884 - protein, 479 aa, Arabidopsis thaliana
MSQYENNEVPYSSVGADEVPSSPPKATDKIRKVSMLPLVFLIFYEVSGGPFGVEDSVNAAGPLLALLGFVIFPFIWSIPEALITAEMGTMYPENGGYVVWVSSALGPFWGFQQGWMKWLSGVIDNALYPVLFLDYLKSGVPALGSGLPRVASILVLTILLTYLNYRGLTIVGWVAVLMGVFSILPFAVMGLISIPQLEPSRWLVMDLGNVNWNLYLNTLFWNLNYWDSISTLAGEVENPNHTLPKALFYGVILVACSYIFPLLAGIGAIPLEREKWTDGYFSDVAKALGGAWLRWWVQAAAATSNMGMFIAEMSSDSFQLLGMAERGMLPEFFAKRSRYGTPLLGILFSASGVVLLSWLSFQEIVAAENLLYCVGMILEFIAFVRMRMKHPAASRPYKIPIGTTGSILMCIPPTILICAVVALSSLKVAAVSIVMMIIGFLIHPLLNHMDRKRWVKFSISSDLPDLQQQTREYEETLIR

SEQ ID NO: 9885 - protein, 445 aa, Arabidopsis thaliana
MLPLVFLIFYEVSGGPFGVEDSVNAAGPLLALLGFVIFPFIWSIPEALITAEMGTMYPENGGYVVWVSSALGPFWGFQQGWMKWLSGVIDNALYPVLFLDYLKSGVPALGSGLPRVASILVLTILLTYLNYRGLTIVGWVAVLMGVFSILPFAVMGLISIPQLEPSRWLVMDLGNVNWNLYLNTLFWNLNYWDSISTLAGEVENPNHTLPKALFYGVILVACSYIFPLLAGIGAIPLEREKWTDGYFSDVAKALGGAWLRWWVQAAAATSNMGMFIAEMSSDSFQLLGMAERGMLPEFFAKRSRYGTPLLGILFSASGVVLLSWLSFQEIVAAENLLYCVGMILEFIAFVRMRMKHPAASRPYKIPIGTTGSILMCIPPTILICAVVALSSLKVAAVSIVMMIIGFLIHPLLNHMDRKRWVKFSISSDLPDLQQQTREYEETLIR

SEQ ID NO: 9886 - DNA, 1583 bp, Arabidopsis thaliana
tcactagtcccccccccccctgttatctccttcaatctgcaatttccagcgacgaaacaatgtcaacgggagaaaaatcgttgcgcagggatcaagactaaacgacggaaatagccgtccggcgggaaacaaagggaaagtaagtctgaaaggtaacaaagagaatatatggagcgttgacaacgaaatggcggagaaggataagcgtaaggtgaagccaaaaggaagaaaaagcgggaagagattaggtggaggaagaaagggtaaattcggtagagttttggtttcagggacgatgttgatcgaatccgagactgttcttcaaactcaggagcctgtgataaaaccagtttggagaacatttgcgagtagtgtaagtgggatttggaaaggtgtaggagctgtgttctcgccgattactggagagatggaaccgattgaaattgggaagaagaatgagagtctttatgattgttatactctttctaagattgaagcgttaccatctccttctagtggagctaatacagagtctgagatacagaggaagatcaattgggttactttaaatcctcatggagagtgttctgagagtaaagatgaggtttttgttgatcagagtggtgtagatagtcgtttgcctaagtttgagtcttttaacttgaaagcaagtgatgtcatggaagaggattccatggtagatgcacccggcctcgtttacttcgaggatggatcgtattccagaggtccagttacaatccctgttggggagatgagtgaatccaactattacctcacaccgactttcaagtttgaacagtgtctggtgaagggttgccataagagactgagagtagttcacactatagaattcgccaatggtggtgcagatatacagataatgagagttggtgtttatgaagaactgtgggttagtccttcaaattatgaagagcaaagtgacaacgacgcaccattggagttaaaaccattctcacagaggaaacgcacgcaaccatcagaactaacaggatcatggaaagtatttgaagtaaatgcaactccactctacggagaagaagccgaattcgaacagccaggtgaaagcactccagttgtgtacctctgcacagaagctctaaagagaaggaacttaccggaaactttggtttcgtttggggaggaagagatgatagatatgcaagatgtgtctgtgatgtggctaccaggtggtgtgagtgcatacgtggatgtgaagaaagatggagtgttgtgcattggagttggatggtattcagatgaaggaatcaatcttgtgatggagagagattatggtttggatgggaatcttaaagaagttcgatccaaatccgaaatgaagagacgatggacagaagaacccaagtaaaactcctctgttttagatttgatactatctagtacaaatgtagtaacactagctgatgtttggtaaggcaataaattgttatttgctggtatagtgaaaacaaatcaacacaataatgttgaagtaattcttcgaaagaaaaaaaaaaaaaaaaaaactcgagggggggcccggt

SEQ ID NO: 9887 - protein, 406 aa, Arabidopsis thaliana
MAEKDKRKVKPKGRKSGKRLGGGRKGKFGRVLVSGTMLIESETVLQTQEPVIKPVWRTFASSVSGIWKGVGAVFSPITGEMEPIEIGKKNESLYDCYTLSKIEALPSPSSGANTESEIQRKINWVTLNPHGECSESKDEVFVDQSGVDSRLPKFESFNLKASDVMEEDSMVDAPGLVYFEDGSYSRGPVTIPVGEMSESNYYLTPTFKFEQCLVKGCHKRLRVVHTIEFANGGADIQIMRVGVYEELWVSPSNYEEQSDNDAPLELKPFSQRKRTQPSELTGSWKVFEVNATPLYGEEAEFEQPGESTPVVYLCTEALKRRNLPETLVSFGEEEMIDMQDVSVMWLPGGVSAYVDVKKDGVLCIGVGWYSDEGINLVMERDYGLDGNLKEVRSKSEMKRRWTEEPK

SEQ ID NO: 9888 - protein, 370 aa, Arabidopsis thaliana
MLIESETVLQTQEPVIKPVWRTFASSVSGIWKGVGAVFSPITGEMEPIEIGKKNESLYDCYTLSKIEALPSPSSGANTESEIQRKINWVTLNPHGECSESKDEVFVDQSGVDSRLPKFESFNLKASDVMEEDSMVDAPGLVYFEDGSYSRGPVTIPVGEMSESNYYLTPTFKFEQCLVKGCHKRLRVVHTIEFANGGADIQIMRVGVYEELWVSPSNYEEQSDNDAPLELKPFSQRKRTQPSELTGSWKVFEVNATPLYGEEAEFEQPGESTPVVYLCTEALKRRNLPETLVSFGEEEMIDMQDVSVMWLPGGVSAYVDVKKDGVLCIGVGWYSDEGINLVMERDYGLDGNLKEVRSKSEMKRRWTEEPK

SEQ ID NO: 9889 - protein, 326 aa, Arabidopsis thaliana
MEPIEIGKKNESLYDCYTLSKIEALPSPSSGANTESEIQRKINWVTLNPHGECSESKDEVFVDQSGVDSRLPKFESFNLKASDVMEEDSMVDAPGLVYFEDGSYSRGPVTIPVGEMSESNYYLTPTFKFEQCLVKGCHKRLRVVHTIEFANGGADIQIMRVGVYEELWVSPSNYEEQSDNDAPLELKPFSQRKRTQPSELTGSWKVFEVNATPLYGEEAEFEQPGESTPVVYLCTEALKRRNLPETLVSFGEEEMIDMQDVSVMWLPGGVSAYVDVKKDGVLCIGVGWYSDEGINLVMERDYGLDGNLKEVRSKSEMKRRWTEEPK

SEQ ID NO: 9890 - DNA, 1448 bp, Arabidopsis thaliana
gtactgtatgttgacaaattgaatagtctctgatgatttcgatcaaagagaagccacggggggagcggtagcacttaaaggacgaaagctgtgttagtattctctccactgtaaaggacaagatgtctcagaagcgaaatcttacttcttggatgagttctagggatcccgagattactccgagtaagtctcattgtaagaagcctaaggatgaaggaccaaccgaagagcacaacagtagaaatgccccttccaacaagtcagaacacgccgagccaagttcaaataccactgaattctctaaacttatggaaggcgttgtttttgtactttcgggctttgttaatcctgagaggagtacactgaggtcacaagccttgacaatgggagccacctatcaacctgactggaacgctggctctaccttgttgatttgtgcttttcctaacactccaaagttccgtcaagttgaaacaaatggtggaacaattatctcaaaggagtggataactgagtgttatgcgcagaagaagttggtagatatcgagcaataccttatgcatgctggaaaaccatggaggaaaagcagtagtccccaagatgctaatcgagaaaagagagaacacctgtctaaaaaaccagagaagcaagtagagaaaaaaacagaaacaaggggaacaccatctacctcatccaagaatagatcagcttgcaatcttgtgaaagagccattttctgttacagaggtgaagaaatgggccagggatgacctaagtcaaaccatctcatggcttgagagtcaggaggaaaaaccagaaccaggcgaaatcaagcgaatagctgcggaaggagtcttaacctgcttacaagacgccatagattctcttgaacagaagcaggacattggatcagttacagagctatggagctttgtccctcgtgtagtgaaggagcttggaaagatggaatcgtcttctaaaaaggaaaattcaacagcatcaaaggaagaagtttgcaaacaagcaaagtcgtggaaaaagatctacgaagctgagctagcaaaaccgggcgaagatgaatcgacctctcgggttgcttgtggctatgacagtgatatgaccgttgagatgactgaagaagagatcgaacttgcttataggaacgtttctttagagtgtctttagatcaaacttgtttcattttgcatatgatctcttaaggaattccaagaattcttgttatactcggtttgttcggtttgagtaggatgttattactgataaaaatttgaaattaatccggtctgcttggttcggaaagaatgtttctaattagaatttatttatgctggtttggattcgattgagagatgtaatcggttgcaattaataagtcggtttgatttgatagaaaaaaaaaaaaaaaaaaaactcgagggggggcccggt

SEQ ID NO: 9891 - protein, 353 aa, Arabidopsis thaliana
MSQKRNLTSWMSSRDPEITPSKSHCKKPKDEGPTEEHNSRNAPSNKSEHAEPSSNTTEFSKLMEGVVFVLSGFVNPERSTLRSQALTMGATYQPDWNAGSTLLICAFPNTPKFRQVETNGGTIISKEWITECYAQKKLVDIEQYLMHAGKPWRKSSSPQDANREKREHLSKKPEKQVEKKTETRGTPSTSSKNRSACNLVKEPFSVTEVKKWARDDLSQTISWLESQEEKPEPGEIKRIAAEGVLTCLQDAIDSLEQKQDIGSVTELWSFVPRVVKELGKMESSSKKENSTASKEEVCKQAKSWKKIYEAELAKPGEDESTSRVACGYDSDMTVEMTEEEIELAYRNVSLECL

SEQ ID NO: 9892 - protein, 343 aa, Arabidopsis thaliana
MSSRDPEITPSKSHCKKPKDEGPTEEHNSRNAPSNKSEHAEPSSNTTEFSKLMEGVVFVLSGFVNPERSTLRSQALTMGATYQPDWNAGSTLLICAFPNTPKFRQVETNGGTIISKEWITECYAQKKLVDIEQYLMHAGKPWRKSSSPQDANREKREHLSKKPEKQVEKKTETRGTPSTSSKNRSACNLVKEPFSVTEVKKWARDDLSQTISWLESQEEKPEPGEIKRIAAEGVLTCLQDAIDSLEQKQDIGSVTELWSFVPRVVKELGKMESSSKKENSTASKEEVCKQAKSWKKIYEAELAKPGEDESTSRVACGYDSDMTVEMTEEEIELAYRNVSLECL

SEQ ID NO: 9893 - protein, 291 aa, Arabidopsis thaliana
MEGVVFVLSGFVNPERSTLRSQALTMGATYQPDWNAGSTLLICAFPNTPKFRQVETNGGTIISKEWITECYAQKKLVDIEQYLMHAGKPWRKSSSPQDANREKREHLSKKPEKQVEKKTETRGTPSTSSKNRSACNLVKEPFSVTEVKKWARDDLSQTISWLESQEEKPEPGEIKRIAAEGVLTCLQDAIDSLEQKQDIGSVTELWSFVPRVVKELGKMESSSKKENSTASKEEVCKQAKSWKKIYEAELAKPGEDESTSRVACGYDSDMTVEMTEEEIELAYRNVSLECL

SEQ ID NO: 9894 - DNA, 1709 bp, Arabidopsis thaliana
gattttacactttcttaattcttgacaccttctttaaagtttatttttttggggtgaaagagagttcttgaaaggatttttatcagaagcaaaaatggaggagaagaaactaaatttagatgctccattcctatccgtgaggcgagttccgactaaacctgatgatccaaacgaatcagagaacaccaagaagaagacgatgacgacgagaaggagagaaatcaaagattcatgtcaagaaacagagaatgaaattctgattcgattattacaagaccagagtttcgagcatgtaatggaaccatcgtcagttcctttcaaatgggaacaaacacctggaaagccaaaggataaaaaaaacctagtcgaagagtcagacctaatcaaagctatggaaatggtttcttcaaccgcaagtttctctgttaattgcagctcaagtggagtaagtgagttcgagaataatggagatggagacagatcgagtaatgtttcaagagatgacgtcattcttgaatatcgtgatctcatcatgtcgagatttttaccagccgcggaagcaatctccttgaaaatgaagaaagaagcttctcgagttaaagcggagaagaagaagaaacagagcattgctctacagagagtctccatggcaattaatcaagatttgaacaacgacgttgatgatgaggagcattgtgatcataatcatgtggatggtattgatgcattagtttactcaaatgactccaagaaaggtcagttagggttcttgccatggttctgttccaagaactcagtggatgttcttaccccggttctctctcggatcaagacatgtcaggatgttggagtaaaatcggaaaatatcataaaccctaaatcgatagattctgtttacaaaacgaaatcaacatcaccgagaatcttcaaatcaagcaaggttatgagtaagtctcaagaaatcgatgcaacgccaagattttcaaacgatatttccaggatttctctacctaaatccagagaaacactccagatcccgagaaatcattcgaggttgcaacaaacaaccgatcagaatcagagacaagagattaggtttcttgtggaagaagtaaagagaaggagcaacagaaacaaaaacaggtagagaatctctctgtttctcaacctccattgcctaaaactccttcagagtcttggctttgccggacacttccgagaagctcgaccacctcctccgtcgtctctggtcaattcgccgtagtcgtctccggtcaagcagcccgttttaagaagaatatggagaaaaagactgactctcagtctaaaaaatgggagacgattgtgaaaacatcgtattcacaccatgatcatgttcgctattcagaggggcttattgttgttcatcctactcgtcaacacaaattctgaaaaccggaatcgtttttactccatacagagtttccttttttccggtacataaatatctattagtacacatatatgtattttgtacatgagatcatgatgtcggataaattctgtgtcggaccggatcgggttaggtttgaaatagccacattattttcacacaatatcaacatcaatccggacagttttagaaattgtgtttgatccaaacatttggtatgagaaaattgtattcgtttaaaaaaaaaaaaaaaaaaactcgagggggggcccggtac

SEQ ID NO: 9895 - protein, 350 aa, Arabidopsis thaliana
MEEKKLNLDAPFLSVRRVPTKPDDPNESENTKKKTMTTRRREIKDSCQETENEILIRLLQDQSFEHVMEPSSVPFKWEQTPGKPKDKKNLVEESDLIKAMEMVSSTASFSVNCSSSGVSEFENNGDGDRSSNVSRDDVILEYRDLIMSRFLPAAEAISLKMKKEASRVKAEKKKKQSIALQRVSMAINQDLNNDVDDEEHCDHNHVDGIDALVYSNDSKKGQLGFLPWFCSKNSVDVLTPVLSRIKTCQDVGVKSENIINPKSIDSVYKTKSTSPRIFKSSKVMSKSQEIDATPRFSNDISRISLPKSRETLQIPRNHSRLQQTTDQNQRQEIRFLVEEVKRRSNRNKNR

SEQ ID NO: 9896 - protein, 315 aa, Arabidopsis thaliana
MTTRRREIKDSCQETENEILIRLLQDQSFEHVMEPSSVPFKWEQTPGKPKDKKNLVEESDLIKAMEMVSSTASFSVNCSSSGVSEFENNGDGDRSSNVSRDDVILEYRDLIMSRFLPAAEAISLKMKKEASRVKAEKKKKQSIALQRVSMAINQDLNNDVDDEEHCDHNHVDGIDALVYSNDSKKGQLGFLPWFCSKNSVDVLTPVLSRIKTCQDVGVKSENIINPKSIDSVYKTKSTSPRIFKSSKVMSKSQEIDATPRFSNDISRISLPKSRETLQIPRNHSRLQQTTDQNQRQEIRFLVEEVKRRSNRNKNR

SEQ ID NO: 9897 - protein, 283 aa, Arabidopsis thaliana
MEPSSVPFKWEQTPGKPKDKKNLVEESDLIKAMEMVSSTASFSVNCSSSGVSEFENNGDGDRSSNVSRDDVILEYRDLIMSRFLPAAEAISLKMKKEASRVKAEKKKKQSIALQRVSMAINQDLNNDVDDEEHCDHNHVDGIDALVYSNDSKKGQLGFLPWFCSKNSVDVLTPVLSRIKTCQDVGVKSENIINPKSIDSVYKTKSTSPRIFKSSKVMSKSQEIDATPRFSNDISRISLPKSRETLQIPRNHSRLQQTTDQNQRQEIRFLVEEVKRRSNRNKNR

SEQ ID NO: 9898 - DNA, 3193 bp, Arabidopsis thaliana
gagcctcaccaactccgcttataaactttctctcttctgaaaacagatctctctactttgcttcttcactcgacttgtatctatcatccatggcttccgagaatcctttccgaagcatattgaaggcgttagagaagcctgatggtggtgaattcggtaactactacagcttacctgctttgaacgatcccaggatcgataaactaccttattccattaggatacttcttgaatcggccatacgtaactgtgatgagttccaagttaagagcaaagatgttgagaagattcttgattgggagaatacttctcccaagcaggttgagattccgttcaagcctgctcgggttcttcttcaggactttactggtgttcctgctgttgttgatcttgcttgcatgagagatgccatgaataatctcggtggtgattctaataaaattaatccgctggtccctgtagatcttgtcattgatcactccgttcaggtggatgtggcgagatcagagaacgcagtgcaggcaaacatggagcttgagttccagcgtaacaaggaaagatttgcttttcttaagtggggatccaacgcctttcacaacatgcttgtcgtacctcctggatctggaatagttcatcaagtcaacctagaataccttgccagagttgttttcaacacaaatggacttctttacccagacagtgttgttggcacagactctcacaccactatgattgatggactgggtgttgctggatggggagttggcggtatagaagcggaagctaccatgcttggtcagccaatgagcatggtcctacccggtgttgtgggtttcaagctaacgggaaagttaagagatggaatgacagctactgatttggtcttaacagtgactcagatgttgaggaaacatggagtagttggaaagtttgttgaattccacggggaagggatgagagaattgtctttagctgaccgtgctacaattgccaatatgtctcctgagtacggtgcgaccatgggattcttcccagtcgatcatgtcactttgcagtatctaaggttgacaggcaggagcgatgacactgtctccatgatagaggcgtatttacgagcaaacaagatgtttgtggattacagtgagccggagagtaagacagtttattcctcatgtctggaattgaatctcgaggatgtggaaccttgtgtttctggtcccaagaggcctcatgatcgtgttcctttgaaggaaatgaaagcggactggcattcttgcttggacaatagagtaggattcaagggtttcgctgtacctaaagaagcacagagtaaggctgtagagttcaattttaacgggaccacagcacagcttagacatggagatgttgttatagcagcaatcaccagttgcacaaatacttcaaaccctagtgtaatgcttggcgctgccttagttgcaaaaaaggcctgcgacctaggactggaggttaagccatggatcaaaactagtcttgctccaggctctggagttgtaacaaagtacttggcaaagagtggcttgcagaagtacttgaatcagctcggcttcagtatcgttggttatgggtgcaccacatgcattggaaactcgggggatatccatgaagctgtggcttcagcaatagttgataatgacttggtggcatccgctgtgttgtctgggaacagaaattttgagggacgtgttcacccgttaacaagagctaactatctagcttccccaccgcttgttgtagcctatgctctggctggaactgttgacattgattttgagacacagcccattggaactgggaaagatggaaaacagatatttttcagggacatttggccctctaacaaagaagttgctgaggttgttcaatctagtgtccttcctgatatgttcaaagctacatatgaagcaatcaccaaaggaaattccatgtggaatcagttatctgtggcgtcaggtactctctatgagtgggacccgaaatcaacttacattcacgagccgccttatttcaagggcatgaccatgtctccacccggtccacatggtgtgaaagacgcatactgtttactcaattttggagacagtattaccactgatcacatctcaccagctggtagcatccacaaggacagtcctgcggctaagtacttgatggaacgaggtgtggatagaagagacttcaactcatacgggagtcgccgtggtaatgatgagattatggcgagaggcacttttgcaaatatccgtattgtcaacaaacacttgaaaggagaagttggtcccaaaacagttcacattcccactggagagaagctttctgttttcgatgctgccatgaaatataggaacgagggacgcgacacaatcattttggctggtgctgaatacggtagtggaagttctcgtgattgggctgccaagggtccaatgcttctgggtgtgaaagctgtgatttcaaagagcttcgagcgaattcaccgaagcaatttggtgggaatgggaatcatacctttgtgcttcaaggcgggagaagatgctgagacccttggcctaacgggtcaggagctttacaccattgagctcccaaacaatgttagtgagatcaaaccaggacaagatgtaacagtcgtcacaaacaatggcaaatctttcacatgtacactccgatttgacacagaggtggagttggcttatttcgatcacggagggattttgcaatacgttatcaggaacttgatcaaacaataaatctggtaacaccagagacttgagttatatatcccaaggtttgttgcaataaaaatgtttgcagggaggaggacgagaatgactttaatttaaacttttgcttttgttcttcttcgtctcttgcttcgtgctagtcaattggaaacattatcactgtcgagtcattttttttctttcaaataaacatgcgagctctttttttgttgttgttgttcataagcattgtcaatgctgcattgatagaagtatactctaccattagaaaataaacacaaatacacaaagtaatctaaagagctagaggatgaaaattatcttgtgaaggttgtacaaaaacattaaaaaaaatctgagatgatccaaaggattgattatcacattcgaagtgatggtcagagattacctct

SEQ ID NO: 9899 - protein, 927 aa, Arabidopsis thaliana
ASPTPLINFLSSENRSLYFASSLDLYLSSMASENPFRSILKALEKPDGGEFGNYYSLPALNDPRIDKLPYSIRILLESAIRNCDEFQVKSKDVEKILDWENTSPKQVEIPFKPARVLLQDFTGVPAVVDLACMRDAMNNLGGDSNKINPLVPVDLVIDHSVQVDVARSENAVQANMELEFQRNKERFAFLKWGSNAFHNMLVVPPGSGIVHQVNLEYLARVVFNTNGLLYPDSVVGTDSHTTMIDGLGVAGWGVGGIEAEATMLGQPMSMVLPGVVGFKLTGKLRDGMTATDLVLTVTQMLRKHGVVGKFVEFHGEGMRELSLADRATIANMSPEYGATMGFFPVDHVTLQYLRLTGRSDDTVSMIEAYLRANKMFVDYSEPESKTVYSSCLELNLEDVEPCVSGPKRPHDRVPLKEMKADWHSCLDNRVGFKGFAVPKEAQSKAVEFNFNGTTAQLRHGDVVIAAITSCTNTSNPSVMLGAALVAKKACDLGLEVKPWIKTSLAPGSGVVTKYLAKSGLQKYLNQLGFSIVGYGCTTCIGNSGDIHEAVASAIVDNDLVASAVLSGNRNFEGRVHPLTRANYLASPPLVVAYALAGTVDIDFETQPIGTGKDGKQIFFRDIWPSNKEVAEVVQSSVLPDMFKATYEAITKGNSMWNQLSVASGTLYEWDPKSTYIHEPPYFKGMTMSPPGPHGVKDAYCLLNFGDSITTDHISPAGSIHKDSPAAKYLMERGVDRRDFNSYGSRRGNDEIMARGTFANIRIVNKHLKGEVGPKTVHIPTGEKLSVFDAAMKYRNEGRDTIILAGAEYGSGSSRDWAAKGPMLLGVKAVISKSFERIHRSNLVGMGIIPLCFKAGEDAETLGLTGQELYTIELPNNVSEIKPGQDVTVVTNNGKSFTCTLRFDTEVELAYFDHGGILQYVIRNLIKQ

SEQ ID NO: 9900 - protein, 898 aa, Arabidopsis thaliana
MASENPFRSILKALEKPDGGEFGNYYSLPALNDPRIDKLPYSIRILLESAIRNCDEFQVKSKDVEKILDWENTSPKQVEIPFKPARVLLQDFTGVPAVVDLACMRDAMNNLGGDSNKINPLVPVDLVIDHSVQVDVARSENAVQANMELEFQRNKERFAFLKWGSNAFHNMLVVPPGSGIVHQVNLEYLARVVFNTNGLLYPDSVVGTDSHTTMIDGLGVAGWGVGGIEAEATMLGQPMSMVLPGVVGFKLTGKLRDGMTATDLVLTVTQMLRKHGVVGKFVEFHGEGMRELSLADRATIANMSPEYGATMGFFPVDHVTLQYLRLTGRSDDTVSMIEAYLRANKMFVDYSEPESKTVYSSCLELNLEDVEPCVSGPKRPHDRVPLKEMKADWHSCLDNRVGFKGFAVPKEAQSKAVEFNFNGTTAQLRHGDVVIAAITSCTNTSNPSVMLGAALVAKKACDLGLEVKPWIKTSLAPGSGVVTKYLAKSGLQKYLNQLGFSIVGYGCTTCIGNSGDIHEAVASAIVDNDLVASAVLSGNRNFEGRVHPLTRANYLASPPLVVAYALAGTVDIDFETQPIGTGKDGKQIFFRDIWPSNKEVAEVVQSSVLPDMFKATYEAITKGNSMWNQLSVASGTLYEWDPKSTYIHEPPYFKGMTMSPPGPHGVKDAYCLLNFGDSITTDHISPAGSIHKDSPAAKYLMERGVDRRDFNSYGSRRGNDEIMARGTFANIRIVNKHLKGEVGPKTVHIPTGEKLSVFDAAMKYRNEGRDTIILAGAEYGSGSSRDWAAKGPMLLGVKAVISKSFERIHRSNLVGMGIIPLCFKAGEDAETLGLTGQELYTIELPNNVSEIKPGQDVTVVTNNGKSFTCTLRFDTEVELAYFDHGGILQYVIRNLIKQ

SEQ ID NO: 9901 - protein, 795 aa, Arabidopsis thaliana
MRDAMNNLGGDSNKINPLVPVDLVIDHSVQVDVARSENAVQANMELEFQRNKERFAFLKWGSNAFHNMLVVPPGSGIVHQVNLEYLARVVFNTNGLLYPDSVVGTDSHTTMIDGLGVAGWGVGGIEAEATMLGQPMSMVLPGVVGFKLTGKLRDGMTATDLVLTVTQMLRKHGVVGKFVEFHGEGMRELSLADRATIANMSPEYGATMGFFPVDHVTLQYLRLTGRSDDTVSMIEAYLRANKMFVDYSEPESKTVYSSCLELNLEDVEPCVSGPKRPHDRVPLKEMKADWHSCLDNRVGFKGFAVPKEAQSKAVEFNFNGTTAQLRHGDVVIAAITSCTNTSNPSVMLGAALVAKKACDLGLEVKPWIKTSLAPGSGVVTKYLAKSGLQKYLNQLGFSIVGYGCTTCIGNSGDIHEAVASAIVDNDLVASAVLSGNRNFEGRVHPLTRANYLASPPLVVAYALAGTVDIDFETQPIGTGKDGKQIFFRDIWPSNKEVAEVVQSSVLPDMFKATYEAITKGNSMWNQLSVASGTLYEWDPKSTYIHEPPYFKGMTMSPPGPHGVKDAYCLLNFGDSITTDHISPAGSIHKDSPAAKYLMERGVDRRDFNSYGSRRGNDEIMARGTFANIRIVNKHLKGEVGPKTVHIPTGEKLSVFDAAMKYRNEGRDTIILAGAEYGSGSSRDWAAKGPMLLGVKAVISKSFERIHRSNLVGMGIIPLCFKAGEDAETLGLTGQELYTIELPNNVSEIKPGQDVTVVTNNGKSFTCTLRFDTEVELAYFDHGGILQYVIRNLIKQ

SEQ ID NO: 9902 - DNA, 1842 bp, Arabidopsis thaliana
ggaacccagaaaaaagattcataaaaccaggcaatagaaatttcatctgaagaaaagaaaaagtaaagctattaaaaatcaaagccacgagaagaaagtagaaaaagttacagtctctgtctatcaaaatcccaacggtaactgaaaatcgccggaaccgaatctgcggcgagccaaaacttgtggatcttttaatgaaaacttgaagattcctctttccacggttgcttctagggttttctcttcgattcaccacatcgtcatgaaccaaatctctttctggtgcctttctttactccttacggtggtgattgctgcagaagagactcctatcactcgtatagccttcggatcatgcgctaatcaaagtgctccacagccgatatgggatgcgataaacaagtttgatccgcaactgtttatttggttgggtgataacatctacggagatataagaagaccacttacagtcattgggaaagagagaacttttgggccatggaggaattcaccgaggtttgtaccttcttcagaggaagaaatgaaactaagatacgctaaagccaaagctaatcctggatattctcgtattcagagaaaagctaaggttattggtacatgggatgatcatgattacggattgaatgacgctggaaaagagtttgatcgtaaagtcattaaccaaaaacttatgcttgatttcttgaatgagcctcttgatagtcctaggagaaagcaagctggtgtttatgcttcttatacttatggtccgcctaatcggaaagttaaggttatagttttagatactagatatcatagagaccctttaagaagtgacgggagcatattgggtgatacgcagtgggactggctcgaaaatgaattgagcggtccccgaagcgaaatcactatcataggatcctctgttcaggtgatatcaaatctttctgctaccactggacctctcttttatatggaatcatggggtcgttttccaaaggaaaggaaacgtctttttaaactgatagcagatactaagagagatggagttatattcatcagtggagatgtacattttggagaaatcacgagatatgattgttctgttgggtacccattatatgatgtcacctccagtggtctagtacaatctgttgagaaagttgtccctcgtcccttgcgttccatagttaggcttcttttttggtatactccaagcacgatgagagttatcaatgataactgcaaattcaaatcttgcacatacggacaacaaaattttggagcaatatcgatagattggaatgcaaatccggttaccataaagctcgagatcagagatgttaacggagacactgtactaggcacgaatgtttcattatctgaactccaaccaggaggctcgaattctttaaaagatacaacaactaagggaaagtctcaacgatattgcacactcgaaattgaattaccaggaacgaccagataccgattggcagttctcatctacttcaccattgctgtcttggcaatggcgatattaggacttatcattggagctgtattggccataacagcatgcgtttataaatgcaaggtcgattgattgttgatgacattaatcaactttttttggtccaacaaaagtgtctttatgacttataatctgtattagttggattattcagggattacaattcggatgtagcttataatgttaaaaattgttgaacacatggattttgatcttgtgatgggaattctaagcttgagctgttattaattaaacttctttgaaagagaaaaaaaaaaaaaaaaaaaactcgagggggggcccggtac

SEQ ID NO: 9903 - protein, 447 aa, Arabidopsis thaliana
MNQISFWCLSLLLTVVIAAEETPITRIAFGSCANQSAPQPIWDAINKFDPQLFIWLGDNIYGDIRRPLTVIGKERTFGPWRNSPRFVPSSEEEMKLRYAKAKANPGYSRIQRKAKVIGTWDDHDYGLNDAGKEFDRKVINQKLMLDFLNEPLDSPRRKQAGVYASYTYGPPNRKVKVIVLDTRYHRDPLRSDGSILGDTQWDWLENELSGPRSEITIIGSSVQVISNLSATTGPLFYMESWGRFPKERKRLFKLIADTKRDGVIFISGDVHFGEITRYDCSVGYPLYDVTSSGLVQSVEKVVPRPLRSIVRLLFWYTPSTMRVINDNCKFKSCTYGQQNFGAISIDWNANPVTIKLEIRDVNGDTVLGTNVSLSELQPGGSNSLKDTTTKGKSQRYCTLEIELPGTTRYRLAVLIYFTIAVLAMAILGLIIGAVLAITACVYKCKVD

SEQ ID NO: 9904 - protein, 354 aa, Arabidopsis thaliana
MKLRYAKAKANPGYSRIQRKAKVIGTWDDHDYGLNDAGKEFDRKVINQKLMLDFLNEPLDSPRRKQAGVYASYTYGPPNRKVKVIVLDTRYHRDPLRSDGSILGDTQWDWLENELSGPRSEITIIGSSVQVISNLSATTGPLFYMESWGRFPKERKRLFKLIADTKRDGVIFISGDVHFGEITRYDCSVGYPLYDVTSSGLVQSVEKVVPRPLRSIVRLLFWYTPSTMRVINDNCKFKSCTYGQQNFGAISIDWNANPVTIKLEIRDVNGDTVLGTNVSLSELQPGGSNSLKDTTTKGKSQRYCTLEIELPGTTRYRLAVLIYFTIAVLAMAILGLIIGAVLAITACVYKCKVD

SEQ ID NO: 9905 - protein, 304 aa, Arabidopsis thaliana
MLDFLNEPLDSPRRKQAGVYASYTYGPPNRKVKVIVLDTRYHRDPLRSDGSILGDTQWDWLENELSGPRSEITIIGSSVQVISNLSATTGPLFYMESWGRFPKERKRLFKLIADTKRDGVIFISGDVHFGEITRYDCSVGYPLYDVTSSGLVQSVEKVVPRPLRSIVRLLFWYTPSTMRVINDNCKFKSCTYGQQNFGAISIDWNANPVTIKLEIRDVNGDTVLGTNVSLSELQPGGSNSLKDTTTKGKSQRYCTLEIELPGTTRYRLAVLIYFTIAVLAMAILGLIIGAVLAITACVYKCKVD

SEQ ID NO: 9906 - DNA, 539 bp, Arabidopsis thaliana
caccagagctcactagtcccccccccccccccctcttctccgtcttcttccgacaagctcgacggcgacacagccaaagaaactacgcatcaccgagagaaatggcgttaaggcagaagttaggatggtcagaaggagatctgatgagatcagatgctaagccatgttcaagactgatgaaacaaacagctgccattttcactgttggtggagctcttggtttctgggttctttgcagacttcactatggtccaaggatcacagtgccaaggagtctgcggtgggctgggtgtggtgctttgtccgtaagcacatcaactgcaatgcttgtccgtctcttcagccctgaatgtgaaccacaaaacattgctgcatatgataacatcaaaacccctcaagcttcactcccttaaaccccatcataatctggctttacctatgatgtgtatggacctcatcttctgtacattttcttgcagtacatgaatttaggtaactatttataatactaccaaattctgtcactttttgtttccttt

SEQ ID NO: 9907 - protein, 136 aa, Arabidopsis thaliana
PELTSPPPPPLFSVFFRQARRRHSQRNYASPREMALRQKLGWSEGDLMRSDAKPCSRLMKQTAAIFTVGGALGFWVLCRLHYGPRITVPRSLRWAGCGALSVSTSTAMLVRLFSPECEPQNIAAYDNIKTPQASLP

SEQ ID NO: 9908 - protein, 103 aa, Arabidopsis thaliana
MALRQKLGWSEGDLMRSDAKPCSRLMKQTAAIFTVGGALGFWVLCRLHYGPRITVPRSLRWAGCGALSVSTSTAMLVRLFSPECEPQNIAAYDNIKTPQASLP

SEQ ID NO: 9909 - protein, 89 aa, Arabidopsis thaliana
MRSDAKPCSRLMKQTAAIFTVGGALGFWVLCRLHYGPRITVPRSLRWAGCGALSVSTSTAMLVRLFSPECEPQNIAAYDNIKTPQASLP

SEQ ID NO: 9910 - DNA, 1575 bp, Arabidopsis thaliana
aatctctctatatataaattcctctgtctttcaagtttcagagcaactttcagtagatctatcacacgccttgaccctctcatccaacggtcattattcactccaaacccactctgcttcttcttcttccaaacatctctcagcagagctaaccatctctcttttgtaatggcttcacttatttcccttgttcttcttcttttgctcactttatcttcagcagagtccaagactttctggggtgacgtggcagctctcaaagacttcaagaactcagtggatgccaaatccatgagtccaggctcttgcctgagttcttgggatttctccgtcgatccctgcgacaatatattcagcgacacattcacttgtgggttccgctgcgactccgtcgttaccggatcgggtcgggtcacggagctcagtcaggaccaagccggttactcaggctccctctcctccgtctctttcaaccttccttatctccagaccctcgatctctccggcaactacttctccggtccacttcccgactcgctctccaatctcacccgtctcacccgcctcactgtgtccggaaactccttctccggatccatacccgattcagtcgggtcaatgacggttcttgaggagctcgtgctagacagcaaccgcctctacggctccattccggcgagcttcaacggcctttccagcctgaaacgactggaaatccagctaaacaacatctccggcgaattccctgatctgagctcactcaaaaacctgtattacctcgacgcgagcgataaccgcatctccggtcggatcccatcatttttacccgaatctatagtccaaatctcaatgcgaaacaacctcttccaaggaacgatccctgaaagcttcaaacttctaaattctctcgaagtaatcgatcttagccacaacaaactcagtggctcaatcccatcgtttatcttcactcatcagtctctacagcagctaacactctccttcaatggcttcacctctttagagtcaccctactattctcccttgggtctccccagcgagctcatatccgtagatctcagcaacaatcagattctcggtgcgttacctctgttcatgggtctatcaccaaagctctcagcattgtcgttagagaacaacaagttctttggtatgattccgacccagtacgtctggaaaaccgtatcgcccggatccgaattcgccgggtttcagagactattactaggcggaaatttcttattcggagtcgtaccgggtcctttgatggcgttaaagcctggatcagcgaacgtgcagctcgccggaaactgcttctcatggtgtccggcgacgttattcttctgccaaggacaagaacagagatctccgaaggaatgtagaaagtttagccgcgtcgtcccgtaatcttctctttccttgttagtatccggtccggtcgagtttttccggcaattgcttaacccgataattgcatcggttaaattgtgattaatttaataaaattgccgtttggagagaaaaaaaaaaaaaaaaaaaactcgagggggggcccgg

SEQ ID NO: 9911 - protein, 474 aa, Arabidopsis thaliana
NLSIYKFLCLSSFRATFSRSITRLDPLIQRSLFTPNPLCFFFFQTSLSRANHLSFVMASLISLVLLLLLTLSSAESKTFWGDVAALKDFKNSVDAKSMSPGSCLSSWDFSVDPCDNIFSDTFTCGFRCDSVVTGSGRVTELSQDQAGYSGSLSSVSFNLPYLQTLDLSGNYFSGPLPDSLSNLTRLTRLTVSGNSFSGSIPDSVGSMTVLEELVLDSNRLYGSIPASFNGLSSLKRLEIQLNNISGEFPDLSSLKNLYYLDASDNRISGRIPSFLPESIVQISMRNNLFQGTIPESFKLLNSLEVIDLSHNKLSGSIPSFIFTHQSLQQLTLSFNGFTSLESPYYSPLGLPSELISVDLSNNQILGALPLFMGLSPKLSALSLENNKFFGMIPTQYVWKTVSPGSEFAGFQRLLLGGNFLFGVVPGPLMALKPGSANVQLAGNCFSWCPATLFFCQGQEQRSPKECRKFSRVVP

SEQ ID NO: 9912 - protein, 418 aa, Arabidopsis thaliana
MASLISLVLLLLLTLSSAESKTFWGDVAALKDFKNSVDAKSMSPGSCLSSWDFSVDPCDNIFSDTFTCGFRCDSVVTGSGRVTELSQDQAGYSGSLSSVSFNLPYLQTLDLSGNYFSGPLPDSLSNLTRLTRLTVSGNSFSGSIPDSVGSMTVLEELVLDSNRLYGSIPASFNGLSSLKRLEIQLNNISGEFPDLSSLKNLYYLDASDNRISGRIPSFLPESIVQISMRNNLFQGTIPESFKLLNSLEVIDLSHNKLSGSIPSFIFTHQSLQQLTLSFNGFTSLESPYYSPLGLPSELISVDLSNNQILGALPLFMGLSPKLSALSLENNKFFGMIPTQYVWKTVSPGSEFAGFQRLLLGGNFLFGVVPGPLMALKPGSANVQLAGNCFSWCPATLFFCQGQEQRSPKECRKFSRVVP

SEQ ID NO: 9913 - protein, 377 aa, Arabidopsis thaliana
MSPGSCLSSWDFSVDPCDNIFSDTFTCGFRCDSVVTGSGRVTELSQDQAGYSGSLSSVSFNLPYLQTLDLSGNYFSGPLPDSLSNLTRLTRLTVSGNSFSGSIPDSVGSMTVLEELVLDSNRLYGSIPASFNGLSSLKRLEIQLNNISGEFPDLSSLKNLYYLDASDNRISGRIPSFLPESIVQISMRNNLFQGTIPESFKLLNSLEVIDLSHNKLSGSIPSFIFTHQSLQQLTLSFNGFTSLESPYYSPLGLPSELISVDLSNNQILGALPLFMGLSPKLSALSLENNKFFGMIPTQYVWKTVSPGSEFAGFQRLLLGGNFLFGVVPGPLMALKPGSANVQLAGNCFSWCPATLFFCQGQEQRSPKECRKFSRVVP

SEQ ID NO: 9914 - DNA, 2038 bp, Arabidopsis thaliana
gaaaaatccggttttcgaagtcgaagtggtcttcaaatctccggcggatggtattcgtcggcggatggtttagactttagagataacagaagaagacctcatctttagagtccggagcgaaattaatggcggccatagctcgtcttccactaactcattctcttccctccatcttcaatccttcatccttcctctctcagtctctctcttttcctacttatctccatcgctctccctttcgctccttctcctccgtctctccaatcctctgcacctcccatcgcgattcgagatcgccggggagtgattctaatgcgtcgattgttggggatcttctggattatcttaatgaatcctggacacagtttcacgccactgctgaggcgaagagacagcttttggctgctgggtttgatctcctcagtgaaaacgaagactggaatctgaaacctggtggccgttacttctttacacgaaacatgtcctgtttggttgcttttgctgtcggagaaaagtatgttcctggtaatggttttcatgccatagctgctcacaccgatagcccgtgtcttaaacttaaaccgaagtctgcttcatccaagtctggctatctcatggtgaatgttcagacttatggaggtggtttgtggcacacatggtttgatcgagacttgagtgttgcggggcgagcaattgtgagagccagtgatggctcgtttgttcataggcttgtcaaagtgaaaaggccattactaagagtgcccactttggccattcatcttgatcgcacagtgaacagtgatggatttaaaccaaatttggagacccaacttgttccgctactggcaacaaaatcagatgaatcctcagcagagtccaaggacaaaaatgtatcctccaaagatgctcatcatccattactcatgcagattttgtcagatgacctggactgtaaggttgaggatatagtgagtcttgagttaaatatctgtgacacccaacctagctgccttggaggagcaaacaatgaattcatattctctggaagacttgataatcttgcatcaagtttctgtgctttgagagctctcattgattcatgtgaatcatcggaaagtctgtcgactgaacatgatatccggatgatagctttatttgacaacgaggaggttggttcagattcatgtcaaggtgcaggggcgcccactatgtttcaagcaatgagacggattgtgagttccctaggaaataagcaggtcactgagtgtacatttgaccgtgctatccggaaatcttttcttgtgtctgcagacatggctcatggagtccaccccaactttgcagacaagcatgaagagaaccaccgtcctcaactacacaagggtctggttatcaaacataacgcaaatcaacgctatgcaaccagtggaatcacttcttttcttttcaaagaagtagcaaagctccatgatcttccaattcaggagtttgtggtgagaaacgatatgggatgtggttcaacaataggacctatattggcttcaggagtagggatccgaaccgttgattgtggcatagctcagctttctatgcatagtgtgagagagatttgtggaacagacgatatagacatcgcgtacagacatttcaaggcgttttatcgatctttctcaagcgtagacaagaagctcgttgtggatgattaactccccggatattctctctaggcaacaaagatcttaagacatggtgagaaatgttaagctagttgcttctgttcgtggatggtcctcagtctcacaacaagaacagaacctaaaattgattttcttgtttaggaaattatagaaaccaaattggaatgtaatcttctaggttaaggttccggtttgtaacactgcatattgttttaccttgacaaataagcttctttctaatttgtcgaatatttatatttttcagaagaacctttaattttctttccaaaaaaaaaaaaaaaaaaaaaaaaactcgagggggggcccggtacccaattcgc

SEQ ID NO: 9915 - protein, 526 aa, Arabidopsis thaliana
MAAIARLPLTHSLPSIFNPSSFLSQSLSFPTYLHRSPFRSFSSVSPILCTSHRDSRSPGSDSNASIVGDLLDYLNESWTQFHATAEAKRQLLAAGFDLLSENEDWNLKPGGRYFFTRNMSCLVAFAVGEKYVPGNGFHAIAAHTDSPCLKLKPKSASSKSGYLMVNVQTYGGGLWHTWFDRDLSVAGRAIVRASDGSFVHRLVKVKRPLLRVPTLAIHLDRTVNSDGFKPNLETQLVPLLATKSDESSAESKDKNVSSKDAHHPLLMQILSDDLDCKVEDIVSLELNICDTQPSCLGGANNEFIFSGRLDNLASSFCALRALIDSCESSESLSTEHDIRMIALFDNEEVGSDSCQGAGAPTMFQAMRRIVSSLGNKQVTECTFDRAIRKSFLVSADMAHGVHPNFADKHEENHRPQLHKGLVIKHNANQRYATSGITSFLFKEVAKLHDLPIQEFVVRNDMGCGSTIGPILASGVGIRTVDCGIAQLSMHSVREICGTDDIDIAYRHFKAFYRSFSSVDKKLVVDD

SEQ ID NO: 9916 - protein, 408 aa, Arabidopsis thaliana
MSCLVAFAVGEKYVPGNGFHAIAAHTDSPCLKLKPKSASSKSGYLMVNVQTYGGGLWHTWFDRDLSVAGRAIVRASDGSFVHRLVKVKRPLLRVPTLAIHLDRTVNSDGFKPNLETQLVPLLATKSDESSAESKDKNVSSKDAHHPLLMQILSDDLDCKVEDIVSLELNICDTQPSCLGGANNEFIFSGRLDNLASSFCALRALIDSCESSESLSTEHDIRMIALFDNEEVGSDSCQGAGAPTMFQAMRRIVSSLGNKQVTECTFDRAIRKSFLVSADMAHGVHPNFADKHEENHRPQLHKGLVIKHNANQRYATSGITSFLFKEVAKLHDLPIQEFVVRNDMGCGSTIGPILASGVGIRTVDCGIAQLSMHSVREICGTDDIDIAYRHFKAFYRSFSSVDKKLVVDD

SEQ ID NO: 9917 - protein, 363 aa, Arabidopsis thaliana
MVNVQTYGGGLWHTWFDRDLSVAGRAIVRASDGSFVHRLVKVKRPLLRVPTLAIHLDRTVNSDGFKPNLETQLVPLLATKSDESSAESKDKNVSSKDAHHPLLMQILSDDLDCKVEDIVSLELNICDTQPSCLGGANNEFIFSGRLDNLASSFCALRALIDSCESSESLSTEHDIRMIALFDNEEVGSDSCQGAGAPTMFQAMRRIVSSLGNKQVTECTFDRAIRKSFLVSADMAHGVHPNFADKHEENHRPQLHKGLVIKHNANQRYATSGITSFLFKEVAKLHDLPIQEFVVRNDMGCGSTIGPILASGVGIRTVDCGIAQLSMHSVREICGTDDIDIAYRHFKAFYRSFSSVDKKLVVDD

SEQ ID NO: 9918 - DNA, 2581 bp, Arabidopsis thaliana
gaaagcctctgagacgagtagaaggttctctctggtgaagaaaccaatgcatttcggcgacagcctgaaactgaaaagccatcgatcgaccgagaaagcgaaaagagagagagatgagactcgtcgtctcaagctgtctactagttgcagctccttttctctcctctctgttacgagtctcactcgccactgttgtcctcaattccatctccgcctcttttgccgatctcccagccaaatttgacggctccgtgaccaaaaacggaatctgtggagctctatacgtcgcagatcctctcgacggttgctcaccgcttctccacgccgccgcatccaactggacgcaacacagaactactaagttcgctttgataatcagaggcgaatgttcttttgaggataagctgctcaatgcccagaactcaggttttcaagctgtgattgtctatgacaacattgacaacgaagatctcatcgtcatgaaggtgaaccctcaggacattacagttgatgcagtcttcgtttcaaatgtcgccggtgagattttgagaaagtacgcgagaggccgagatggtgaatgctgccttaatccgccagacagagggagcgcttggactgtgttggccatctccttcttctctctccttcttatagtcactttcctgttgattgccttctttgcacccagacactggacccaatggcgagggaggcacaccaggaccatcaggttagatgcaaagctcgtccacacactcccctgcttcaccttcactgattctgctcaccacaaggccggggaaacatgtgctatatgtctcgaggattacagatttggagaaagcctcagacttctcccctgccaacatgcttttcacttgaattgcatcgactcttggttgacaaaatggggtacatcttgccctgtgtgcaagcatgacataagaaccgagactatgtcttctgaggtacataaacgagagagtccgagaacagatacaagtacgagtagatttgcctttgcccaatccagtcaaagccgttagagttattatcggcttagcagctgaacactcatatcagtgctcggttacctggatcaggtccaggtttgcatcttatattgaatggttaatcatggtgggataagtttaggtaaagggaccggatctgccatactggtcgtgctttgctggattcccagatcaaaaagatatgagttgctttgcctctttttctttgcatgtgtacatttacatacgctctgagtcatgtgtacatttgatcattgtgtgtgtgtgtgtgttatagattgaaaaaatgtgtgtgatagtacagatatgcaaacaaattgatagaaaacaaatgttggtctaatcagattttctctctccgatccaggcaaatctcaatgttatcttgttgataatttctttgcctaaagtttgtataatatgaatattgaatctgattcccttacatgggggaatggaatccattgaacgtggctttgattttgtcttgtctgtagtaataataagaaaagaacacgtcatcctcatctctacctaacgactcatccaatacgatgactcgttcatgggtttgttagttgcgcaattccatcaccaaaactttctattacatactcaacttcttttgattactaaattcagccaacatttccttctcatctctaatcagtgaacacgttttctatgcaggctttggggcctatcttaccatagctgtctaagaagactattatcttatattctttattgtagatttcatttacttgcgtatggaattggaaacaaatttctaattgttgaatcatataccattatttttatattggccatgcatgtgtataagtggaagatagaacaatattaaaacaatattattgtgtttggtcctatttattactctctgctctcttcctgaagcttcttcatctttttgtttgacaagaagaggtagagaagaagatgtctcaatcaatctcctccagcacaaaggcagaagaagttgttagtgtagatgtgagccaagccaagactctcctccagtctgggcatcaatatcttgacgttaggactcaggacgagtttaggagaggccattgtgaggcagctaagatcgtcaacattccctacatgctcaacacacctcaaggtagagtgaagaatcaagagttcttggagcaagtatcttctcttctaaacccagctgatgatatccttgtgggttgtcagagtggagccagatccttaaaagccacaactgaacttgttgctgcaggttacaagaaagtgagaaacgtgggaggtggctacttggcttgggtggatcacagctttcccatcaacacggaggaggaggagccatctgctaattaataatcttaagattctcttcttttcttaatcaaataatataactgcctgtgtgatgtagtaatcattttcaatttaaaattccagtttcttgtaatcaaaactttcgtgtaccaaattcaataaaagctgtgtttctctaaaaaaaaaaaaaaaaaaaactcgagggggggcccggt

SEQ ID NO: 9919 - protein, 310 aa, Arabidopsis thaliana
MRLVVSSCLLVAAPFLSSLLRVSLATVVLNSISASFADLPAKFDGSVTKNGICGALYVADPLDGCSPLLHAAASNWTQHRTTKFALIIRGECSFEDKLLNAQNSGFQAVIVYDNIDNEDLIVMKVNPQDITVDAVFVSNVAGEILRKYARGRDGECCLNPPDRGSAWTVLAISFFSLLLIVTFLLIAFFAPRHWTQWRGRHTRTIRLDAKLVHTLPCFTFTDSAHHKAGETCAICLEDYRFGESLRLLPCQHAFHLNCIDSWLTKWGTSCPVCKHDIRTETMSSEVHKRESPRTDTSTSRFAFAQSSQSR

SEQ ID NO: 9920 - protein, 188 aa, Arabidopsis thaliana
MKVNPQDITVDAVFVSNVAGEILRKYARGRDGECCLNPPDRGSAWTVLAISFFSLLLIVTFLLIAFFAPRHWTQWRGRHTRTIRLDAKLVHTLPCFTFTDSAHHKAGETCAICLEDYRFGESLRLLPCQHAFHLNCIDSWLTKWGTSCPVCKHDIRTETMSSEVHKRESPRTDTSTSRFAFAQSSQSR

SEQ ID NO: 9921 - DNA, 2205 bp, Arabidopsis thaliana
ctagtcccccccccccccgatcttccttctcgataaacccttttcttttaacctactcagtttttctgtttgcgtcgctctcatcccagggcgagaaagatggtgaaacggagtaaaaagagtaagagtaagagggtgaccttgaagcagaagcataaggtcctgaaaaaggtgaaggagcaccacaagaagaaggcaaaggatgctaaaaagcttggccttcaccgtaagccaagagtagagaaagacccaggtatacccaatgactggcctttcaaggaacaagagcttaaagcccttgaagttcgacgtgcccgtgctcttgaggagattgaacagaagaaagaagctcgcaaagaaagggccaaaaagaggaaacttggtttggttgatgatgaggataccaagacagaaggagagaccatagaagacttacctaaagttgtcaatgttcgagataactcggagagggctttctacaaggagctagttaaagtcattgaattgtctgatgtcattttggaggttcttgatgcccgtgatcctcttggcactcgttgtactgacatggagaggatggtgatgcaagccggtcccaataagcatcttgtgttgctgctgaacaagattgatcttgttccccgagaggctgctgagaaatggcttatgtaccttagggaagaatttccagctgttgccttcaagtgtagcacccaggaacagagatcaaacttgggttggaaatcatctaaggcatcaaaaccaagcaatatgttgcagacgagtgattgtcttggagcagacactcttatcaaattgttgaagaactactcaagaagtcatgagttaaaaaaatctatcacagttggtattattggactgcctaatgtcggcaagagtagtcttattaacagtctgaagagagcgcatgttgtcaatgttggtgccactcctggactgactagatctctgcaagaggttcacttggacaaaaacgtgaagttgctggattgtcctggagttgtgatgttgaaatcatcaggaaatgatgcttccatagctctccgaaattgtaaaagaatcgagaagttggatgacccagttagtccagtgaaggaaattctcaagctttgtcctgaagatatgctggtgactctctacaaaatcccgagcttcgaggcagttgatgatttcctttacaaagtcgccactgtaaggggtaaacttaaaaagggtggtcttgtggatattgatgctgctgccagaattgttttgcatgactggaatgaaggtaaaatcccatactatacaatgccgccaaagagggaccagggtggacatgcagagtcaaagattgtgactgagctggccaaggatttcaacatcgatgaggtttacagtggtgaatcctctttcattgggagcttgaagacggttaacgaattcaaccctgttattattccttcaaatggtcctctcaatttcgatgaaactatgatcgaggatgagtctaagacgcagacggaagaggaggctgagcatgagagtgatgatgatgagtcaatgggaggggaggaggaggaagaggcaggaaagacgaaggagaaatcagagacggggaggcagaacgtgaagctatacgcagcggaaagcatgttgaatacaaagaaacagaaagcagagaagaagaagaggaagaaagcaaagaaagcaggagctgatgaggaggatctgatggacggagattatgatttcaaagtggattataggaagaacaaagatggagaagacgaagaattccagattgatgctaaaatcccaatggctggacttttgcctgaagaatgagtgattggaaaccacaacgttttttttttttttttttttttgtatttggcgtttatgagtcggtcggttaaactttccgatatatgtgcttcatgaactagtagtaatactgaagcgattttgatttctttaattaacgtttcttctattccaaaaaaaaaaaaaaaaaaaaaaaaaaaaaaaaaaaaaaaaaaaaaaaaaaaaaaaaaaaaaaaaaaaaaaaaaaaacaaaaaaaaaaaaaaaaaaaaaattcactgaccaaaaaaaaaaaaaaaaaaaaaaaaggccccggggggggggggggcccccaattccccctaaaaagggggggattaaaaacagtgggggggtttttt

SEQ ID NO: 9922 - protein, 582 aa, Arabidopsis thaliana
MVKRSKKSKSKRVTLKQKHKVLKKVKEHHKKKAKDAKKLGLHRKPRVEKDPGIPNDWPFKEQELKALEVRRARALEEIEQKKEARKERAKKRKLGLVDDEDTKTEGETIEDLPKVVNVRDNSERAFYKELVKVIELSDVILEVLDARDPLGTRCTDMERMVMQAGPNKHLVLLLNKIDLVPREAAEKWLMYLREEFPAVAFKCSTQEQRSNLGWKSSKASKPSNMLQTSDCLGADTLIKLLKNYSRSHELKKSITVGIIGLPNVGKSSLINSLKRAHVVNVGATPGLTRSLQEVHLDKNVKLLDCPGVVMLKSSGNDASIALRNCKRIEKLDDPVSPVKEILKLCPEDMLVTLYKIPSFEAVDDFLYKVATVRGKLKKGGLVDIDAAARIVLHDWNEGKIPYYTMPPKRDQGGHAESKIVTELAKDFNIDEVYSGESSFIGSLKTVNEFNPVIIPSNGPLNFDETMIEDESKTQTEEEAEHESDDDESMGGEEEEEAGKTKEKSETGRQNVKLYAAESMLNTKKQKAEKKKRKKAKKAGADEEDLMDGDYDFKVDYRKNKDGEDEEFQIDAKIPMAGLLPEE

SEQ ID NO: 9923 - protein, 426 aa, Arabidopsis thaliana
MERMVMQAGPNKHLVLLLNKIDLVPREAAEKWLMYLREEFPAVAFKCSTQEQRSNLGWKSSKASKPSNMLQTSDCLGADTLIKLLKNYSRSHELKKSITVGIIGLPNVGKSSLINSLKRAHVVNVGATPGLTRSLQEVHLDKNVKLLDCPGVVMLKSSGNDASIALRNCKRIEKLDDPVSPVKEILKLCPEDMLVTLYKIPSFEAVDDFLYKVATVRGKLKKGGLVDIDAAARIVLHDWNEGKIPYYTMPPKRDQGGHAESKIVTELAKDFNIDEVYSGESSFIGSLKTVNEFNPVIIPSNGPLNFDETMIEDESKTQTEEEAEHESDDDESMGGEEEEEAGKTKEKSETGRQNVKLYAAESMLNTKKQKAEKKKRKKAKKAGADEEDLMDGDYDFKVDYRKNKDGEDEEFQIDAKIPMAGLLPEE

SEQ ID NO: 9924 - protein, 423 aa, Arabidopsis thaliana
MVMQAGPNKHLVLLLNKIDLVPREAAEKWLMYLREEFPAVAFKCSTQEQRSNLGWKSSKASKPSNMLQTSDCLGADTLIKLLKNYSRSHELKKSITVGIIGLPNVGKSSLINSLKRAHVVNVGATPGLTRSLQEVHLDKNVKLLDCPGVVMLKSSGNDASIALRNCKRIEKLDDPVSPVKEILKLCPEDMLVTLYKIPSFEAVDDFLYKVATVRGKLKKGGLVDIDAAARIVLHDWNEGKIPYYTMPPKRDQGGHAESKIVTELAKDFNIDEVYSGESSFIGSLKTVNEFNPVIIPSNGPLNFDETMIEDESKTQTEEEAEHESDDDESMGGEEEEEAGKTKEKSETGRQNVKLYAAESMLNTKKQKAEKKKRKKAKKAGADEEDLMDGDYDFKVDYRKNKDGEDEEFQIDAKIPMAGLLPEE

SEQ ID NO: 9925 - DNA, 3317 bp, Arabidopsis thaliana
gactattggtcaaaaaggctcacacacacgagggtacttgtggagcaggtaggtagagtcaacccagttccgaattatgaccacggaagaaggtttaagctttttaaaatggcagacaagtcaagatcaaacctagcaaacacccatcaagggattttgccatcccagaagctttctcttatccgcttgcctttttggaaaattctcttagggaactagtactagtattgctgatctcaatagtgaggcaccatggtgttccctcaaagactctatctacatgcgctccttgttgcctgttgttgcgtccttctgcttgccgatgctcaaagaacccacccttcagaagtcactgctttacgatctgttaaaagaagtctacttgaccctaaagattatttgagaaactggaatagaggtgacccttgcagatcaaattggactggagttatctgctttaatgagattggtactgacgactacctgcatgtccgagaactcctgctgatgaatatgaatctctccgggactttgtcaccagagctccaaaaattagctcatctcgaaatattagatttcatgtggaataatataagtggttcaattccaaacgagataggacagatatcatccctggtactcttgctgctgaatggaaacaaactttcagggactttaccaagcgaactcgggtatctttcgaacttgaacaggttccagatagatgagaataacatcacaggaccaataccaaagtccttttccaacttgaaaaaagtgaaacatcttcacttcaacaataattcgttgaccggccagattccagttgagctttccaatcttactaacatctttcatgtgctgctagacaacaataaattatctggaaatcttccaccacaactctctgcattgccaaacctgcaaatcctgcaacttgataataacaacttcagtggatccgatatcccagcttcctatggaaacttttcgaatattctaaagctgagtcttagaaattgtagtttgaaaggggcacttcctgattttagcaagatacgtcatctcaaatacttggatcttagctggaatgaactcacaggacctataccttcctctaatttttctaaggatgtgacaaccattaatttatcaaacaacatacttaacggatccatcccgcagggcttctcagatctccctttacttcagatgctattgctgaaaaacaatatgttatctggatctgtccctgattccctttggaagaatatctcttttccgaagaaagctagacttctacttgatcttaggaataattctctgtcacgtgttcaaggagatctaactcctccacaaaatgtcactttaaggcttgatggcaatctgatctgcactaatggaagcatatcaaacggaaacctattctgtgagtccaaaggcaaagagtggatatcactaccaaacaattcaaccaattctgcactggactgtcctcctcttgcctgtcccactcctgacttctacgaatacagtccagcatccccattacgatgcttttgtgcagcgcctcttagaattggatatcgtctcaaaagtcctagtttctcatacttccctccatatattgatcaatttggtgagtatgttaccgatttccttcaaatggaaccatatcaactctggatcgactcatatcaatgggagaaagggcctcgtctgaggatgtatctgaaactttttccgaaagttaatgaaacctatacaagaacatttaacgagagtgaagttctcagaatccgaggcatattcgcttcatggagatttcctggtagtgacttatttggcccgtatgaactgctcaacttcactctgcaggggccttattcatatgttaacttcaacagtgaaaggaaaggcgtcagctggcgacgattggcagcaataactgcaggggctgtggtgactgctgttgcgatatccgctgtggttgcagccttgttgcttagaagatacagcaagcacgagcgagagatatctagaagacggtcatcctcgaaggcttccttgttgaattctgggataagaggctttagtttcaaagagctagcagaggccaccgacgattttagcagctcaactttggttgggcgcggaggctatggaaaggtttacagaggtgtcttatctgacaatactgttgctgcaataaagcgagcagatgaagggtctttgcaaggtgaaaaggagttcttgaatgaaatagagctgctctcgaggttgcatcatcggaatctagtgtcactgatcggttactgtgatgaagaaagcgagcagatgctggtgtacgaatttatgtcaaatggcaccctgcgcgactggttgtctgctaaggggaaggagtcattgagctttgggatgaggattcgtgttgcgttgggagcagcaaaaggtattctctaccttcacacagaagccaacccgccagttttccaccgagacatcaaagccagtaacatcctcctcgaccccaacttcaatgccaaagttgcagactttggactgtctcgacttgctcctgttttggaggacgaagaggatgtgcctaagcacgtctcaaccgttgtccgtgggactccagggtacctggatcctgaatatttcctgacacacaagctgacggacaagagcgatgtttacagcatcggagttgtgttcttggagctgctgactggtatgcacgccatatcccatggaaaaaatatagtacgagaggtgaagacggctgagcagagggatatgatggtatcgctgatagacaagagaatggagccgtggtcgatggaaagtgttgaaaagtttgcggctttggcactgaggtgtagccacgactcaccagagatgaggccaggaatggcggaggtggtgaaggagctggagtcactgctccaagcagcccccgatagggagacaagagtggaattggcgtcatcttcgtcagtgctgtcaacatcgtcgtcgaatgtgacaagagacctttacgagtcgtcgagccttctaggaagcgatctcagcagcggctttgttcccagcatcgctcctcgctgactccaaccattgcatctatgtacaaatctctatacatatactttgactccacctttcttactttttaaccaattagatatcttccagttacactgtaatatattcttttcaaaaatcgttaataccaaacttcgaatcaaaaaaaaaaaaaaaaaaaaaattcgttataccaaaaaaaaaaaaaaaaaaaactcgagggggggcccggt

SEQ ID NO: 9926 - protein, 951 aa, Arabidopsis thaliana
MVFPQRLYLHALLVACCCVLLLADAQRTHPSEVTALRSVKRSLLDPKDYLRNWNRGDPCRSNWTGVICFNEIGTDDYLHVRELLLMNMNLSGTLSPELQKLAHLEILDFMWNNISGSIPNEIGQISSLVLLLLNGNKLSGTLPSELGYLSNLNRFQIDENNITGPIPKSFSNLKKVKHLHFNNNSLTGQIPVELSNLTNIFHVLLDNNKLSGNLPPQLSALPNLQILQLDNNNFSGSDIPASYGNFSNILKLSLRNCSLKGALPDFSKIRHLKYLDLSWNELTGPIPSSNFSKDVTTINLSNNILNGSIPQGFSDLPLLQMLLLKNNMLSGSVPDSLWKNISFPKKARLLLDLRNNSLSRVQGDLTPPQNVTLRLDGNLICTNGSISNGNLFCESKGKEWISLPNNSTNSALDCPPLACPTPDFYEYSPASPLRCFCAAPLRIGYRLKSPSFSYFPPYIDQFGEYVTDFLQMEPYQLWIDSYQWEKGPRLRMYLKLFPKVNETYTRTFNESEVLRIRGIFASWRFPGSDLFGPYELLNFTLQGPYSYVNFNSERKGVSWRRLAAITAGAVVTAVAISAVVAALLLRRYSKHEREISRRRSSSKASLLNSGIRGFSFKELAEATDDFSSSTLVGRGGYGKVYRGVLSDNTVAAIKRADEGSLQGEKEFLNEIELLSRLHHRNLVSLIGYCDEESEQMLVYEFMSNGTLRDWLSAKGKESLSFGMRIRVALGAAKGILYLHTEANPPVFHRDIKASNILLDPNFNAKVADFGLSRLAPVLEDEEDVPKHVSTVVRGTPGYLDPEYFLTHKLTDKSDVYSIGVVFLELLTGMHAISHGKNIVREVKTAEQRDMMVSLIDKRMEPWSMESVEKFAALALRCSHDSPEMRPGMAEVVKELESLLQAAPDRETRVELASSSSVLSTSSSNVTRDLYESSSLLGSDLSSGFVPSIAPR

SEQ ID NO: 9927 - protein, 866 aa, Arabidopsis thaliana
MNMNLSGTLSPELQKLAHLEILDFMWNNISGSIPNEIGQISSLVLLLLNGNKLSGTLPSELGYLSNLNRFQIDENNITGPIPKSFSNLKKVKHLHFNNNSLTGQIPVELSNLTNIFHVLLDNNKLSGNLPPQLSALPNLQILQLDNNNFSGSDIPASYGNFSNILKLSLRNCSLKGALPDFSKIRHLKYLDLSWNELTGPIPSSNFSKDVTTINLSNNILNGSIPQGFSDLPLLQMLLLKNNMLSGSVPDSLWKNISFPKKARLLLDLRNNSLSRVQGDLTPPQNVTLRLDGNLICTNGSISNGNLFCESKGKEWISLPNNSTNSALDCPPLACPTPDFYEYSPASPLRCFCAAPLRIGYRLKSPSFSYFPPYIDQFGEYVTDFLQMEPYQLWIDSYQWEKGPRLRMYLKLFPKVNETYTRTFNESEVLRIRGIFASWRFPGSDLFGPYELLNFTLQGPYSYVNFNSERKGVSWRRLAAITAGAVVTAVAISAVVAALLLRRYSKHEREISRRRSSSKASLLNSGIRGFSFKELAEATDDFSSSTLVGRGGYGKVYRGVLSDNTVAAIKRADEGSLQGEKEFLNEIELLSRLHHRNLVSLIGYCDEESEQMLVYEFMSNGTLRDWLSAKGKESLSFGMRIRVALGAAKGILYLHTEANPPVFHRDIKASNILLDPNFNAKVADFGLSRLAPVLEDEEDVPKHVSTVVRGTPGYLDPEYFLTHKLTDKSDVYSIGVVFLELLTGMHAISHGKNIVREVKTAEQRDMMVSLIDKRMEPWSMESVEKFAALALRCSHDSPEMRPGMAEVVKELESLLQAAPDRETRVELASSSSVLSTSSSNVTRDLYESSSLLGSDLSSGFVPSIAPR

SEQ ID NO: 9928 - protein, 864 aa, Arabidopsis thaliana
MNLSGTLSPELQKLAHLEILDFMWNNISGSIPNEIGQISSLVLLLLNGNKLSGTLPSELGYLSNLNRFQIDENNITGPIPKSFSNLKKVKHLHFNNNSLTGQIPVELSNLTNIFHVLLDNNKLSGNLPPQLSALPNLQILQLDNNNFSGSDIPASYGNFSNILKLSLRNCSLKGALPDFSKIRHLKYLDLSWNELTGPIPSSNFSKDVTTINLSNNILNGSIPQGFSDLPLLQMLLLKNNMLSGSVPDSLWKNISFPKKARLLLDLRNNSLSRVQGDLTPPQNVTLRLDGNLICTNGSISNGNLFCESKGKEWISLPNNSTNSALDCPPLACPTPDFYEYSPASPLRCFCAAPLRIGYRLKSPSFSYFPPYIDQFGEYVTDFLQMEPYQLWIDSYQWEKGPRLRMYLKLFPKVNETYTRTFNESEVLRIRGIFASWRFPGSDLFGPYELLNFTLQGPYSYVNFNSERKGVSWRRLAAITAGAVVTAVAISAVVAALLLRRYSKHEREISRRRSSSKASLLNSGIRGFSFKELAEATDDFSSSTLVGRGGYGKVYRGVLSDNTVAAIKRADEGSLQGEKEFLNEIELLSRLHHRNLVSLIGYCDEESEQMLVYEFMSNGTLRDWLSAKGKESLSFGMRIRVALGAAKGILYLHTEANPPVFHRDIKASNILLDPNFNAKVADFGLSRLAPVLEDEEDVPKHVSTVVRGTPGYLDPEYFLTHKLTDKSDVYSIGVVFLELLTGMHAISHGKNIVREVKTAEQRDMMVSLIDKRMEPWSMESVEKFAALALRCSHDSPEMRPGMAEVVKELESLLQAAPDRETRVELASSSSVLSTSSSNVTRDLYESSSLLGSDLSSGFVPSIAPR

SEQ ID NO: 9929 - DNA, 1173 bp, Arabidopsis thaliana
ggaaagaaaaaaaatcaacacaccgagaaaaaaaatggaagatctatggaagagagcgaaatcgtttgcagaagaagcagcgaagaaatcacaaaccataacactacaatcatcttcaacaacattcgtcaatctcgtcaccgaaaccgctaaaaaatccaaagagttcgctctcgaagcttctaagaaagctgattcgatcaatgtctccgagttcgtcgccgagacggcgaagaagtcaaaggaattcgctgctgaggtttcaacgaaagcggatcagctcaaagtcgtagcattgaaacaagctgatcagatccagaatataaaatcgattgccgacattatacctggaggattaggaggatcaggatctggtggtggtggttctgagatttctgaatctgagcttgttagttttggtattactgatgatttgagagagtttgttaaaggtttgacatctgctacgttccaggcttttcctgaacaagatgaatcgtcggaagtttctgatttggaaacaagtgcgtcgaatgttcggaaggatctttctgagtggcaggagagacatgccactcttgttcttggttctgtcaagcaaatttcgaagttgagatatgaactatgcccacgagttatgaaagaaaggaggttctggaggatatactttaccttagtgagcactcatgttgcaccatatgaaaggaagtacatggaggaacttaggaacaaagcagagagtaaagatgaagaagctaagaagagtccagggcttggaaggacagaatcagctgaaaagaacagaatatctactgcatcgtctgagcaagatctcgatacattcctgctgggagatctagaagacagtgacgaagctcctgatgatggtgatggtgatgatggaggaagcctgggtgatgatgactttgacaagattggcaactctgatgttgaggaagagaaagaatcaaatgcagcaaaaaattagaaatattattaagttttgttacatacccaattgttgggaagtaaatgaggatggtatatgatctgtttcatcatcagtgattcagtgtatagcttttgatgcaaaagatgaagacacattttattcattcgaattcgcaaattataagaaaaaaaaaaaaaaaaaaactcgagggggggcccggt

SEQ ID NO: 9930 - protein, 328 aa, Arabidopsis thaliana
ERKKINTPRKKMEDLWKRAKSFAEEAAKKSQTITLQSSSTTFVNLVTETAKKSKEFALEASKKADSINVSEFVAETAKKSKEFAAEVSTKADQLKVVALKQADQIQNIKSIADIIPGGLGGSGSGGGGSEISESELVSFGITDDLREFVKGLTSATFQAFPEQDESSEVSDLETSASNVRKDLSEWQERHATLVLGSVKQISKLRYELCPRVMKERRFWRIYFTLVSTHVAPYERKYMEELRNKAESKDEEAKKSPGLGRTESAEKNRISTASSEQDLDTFLLGDLEDSDEAPDDGDGDDGGSLGDDDFDKIGNSDVEEEKESNAAKN

SEQ ID NO: 9931 - protein, 317 aa, Arabidopsis thaliana
MEDLWKRAKSFAEEAAKKSQTITLQSSSTTFVNLVTETAKKSKEFALEASKKADSINVSEFVAETAKKSKEFAAEVSTKADQLKVVALKQADQIQNIKSIADIIPGGLGGSGSGGGGSEISESELVSFGITDDLREFVKGLTSATFQAFPEQDESSEVSDLETSASNVRKDLSEWQERHATLVLGSVKQISKLRYELCPRVMKERRFWRIYFTLVSTHVAPYERKYMEELRNKAESKDEEAKKSPGLGRTESAEKNRISTASSEQDLDTFLLGDLEDSDEAPDDGDGDDGGSLGDDDFDKIGNSDVEEEKESNAAKN

SEQ ID NO: 9932 - DNA, 1288 bp, Arabidopsis thaliana
gagatccctccatcattgttcaccatggacaaggcttcaatcactgaaggaaagccgattcgatgcaaagcagcaatcttaagaaaagcaggagaaccattggtgatagaagagatccaagttgatccacctcaagcttacgaagtcagaatcaaaattttatgcacttctctatgtcacacggatgttactttctggaaactagacagtggaccgcttgcaagatttcctaggattctaggtcatgaagcagtcggtgtggtcgagagtattggagaaaaggtagacggatttaaacaaggcgacgtcgttttgccagtgtttcatcctcaatgtgaagaatgcaaagagtgcaaatctccaaagagcaactggtgcacaagatatacaaacgattacttatcaaacacaagacgatatggaatgacttcaagattcaaggactctcttggagaagatattcaccatttcatctttgtctcaagttttactgaatataccgtagtagatatcgcacatctcgtcaaaatctctcctgaaattcccgttgatatagcggccttgctcagctgcagtgttgccacaggaattggagctgcgtggaaagtagctgacgtagaggaaggttccactgtcgttatctttggccttggtgctgttggactagcggttgcagaaggagtcagattgcgtggagccgcaaaaatcatcggtgtggatagcaatcccgcgaaatttgaaataggtaaaagatttggaatcacggattttgtcaatcctgctttgtgtggggagaagaaaattagcgaggtgattagagaaatgacagatgtaggagctgactacagttttgaatgcattggtttagcttccttgatggaagaggcattcaagagtactcgcccgggatcgggtaaaacgatagtattggggatggaacaaaaggctttgccaataagcttgggtagttatgatcttctcagaggcagaactgtatgcggcactttatttggcggtttgaaacccaaacttgatattcctattctcgtggatcgttatttgaaaaaggagcttaatctagaggatctgattacacacgaattaagctttgaagaaattaacaaagctttccatttattggctgagggaaactctatccgttgcattatatggatggataaataatccttttatcttcatttgaattttcttcctagttcttctatgtcccaaaacatagtacttggtaacaaaaaaaaaaaaaaaaaaactcgagggggggcccggt

SEQ ID NO: 9933 - protein, 394 aa, Arabidopsis thaliana
EIPPSLFTMDKASITEGKPIRCKAAILRKAGEPLVIEEIQVDPPQAYEVRIKILCTSLCHTDVTFWKLDSGPLARFPRILGHEAVGVVESIGEKVDGFKQGDVVLPVFHPQCEECKECKSPKSNWCTRYTNDYLSNTRRYGMTSRFKDSLGEDIHHFIFVSSFTEYTVVDIAHLVKISPEIPVDIAALLSCSVATGIGAAWKVADVEEGSTVVIFGLGAVGLAVAEGVRLRGAAKIIGVDSNPAKFEIGKRFGITDFVNPALCGEKKISEVIREMTDVGADYSFECIGLASLMEEAFKSTRPGSGKTIVLGMEQKALPISLGSYDLLRGRTVCGTLFGGLKPKLDIPILVDRYLKKELNLEDLITHELSFEEINKAFHLLAEGNSIRCIIWMDK

SEQ ID NO: 9934 - protein, 386 aa, Arabidopsis thaliana
MDKASITEGKPIRCKAAILRKAGEPLVIEEIQVDPPQAYEVRIKILCTSLCHTDVTFWKLDSGPLARFPRILGHEAVGVVESIGEKVDGFKQGDVVLPVFHPQCEECKECKSPKSNWCTRYTNDYLSNTRRYGMTSRFKDSLGEDIHHFIFVSSFTEYTVVDIAHLVKISPEIPVDIAALLSCSVATGIGAAWKVADVEEGSTVVIFGLGAVGLAVAEGVRLRGAAKIIGVDSNPAKFEIGKRFGITDFVNPALCGEKKISEVIREMTDVGADYSFECIGLASLMEEAFKSTRPGSGKTIVLGMEQKALPISLGSYDLLRGRTVCGTLFGGLKPKLDIPILVDRYLKKELNLEDLITHELSFEEINKAFHLLAEGNSIRCIIWMDK

SEQ ID NO: 9935 - protein, 253 aa, Arabidopsis thaliana
MTSRFKDSLGEDIHHFIFVSSFTEYTVVDIAHLVKISPEIPVDIAALLSCSVATGIGAAWKVADVEEGSTVVIFGLGAVGLAVAEGVRLRGAAKIIGVDSNPAKFEIGKRFGITDFVNPALCGEKKISEVIREMTDVGADYSFECIGLASLMEEAFKSTRPGSGKTIVLGMEQKALPISLGSYDLLRGRTVCGTLFGGLKPKLDIPILVDRYLKKELNLEDLITHELSFEEINKAFHLLAEGNSIRCIIWMDK

SEQ ID NO: 9936 - DNA, 521 bp, Arabidopsis thaliana
  misc_feature (3)..(5): n is a, c, g, or t
gannnaaaattgaaagcaacaaatttcttcttctcttcttcaagctcatcaatcaatggcgtcgtctctatctccaccggaagaagcttcgtatcaccaccgtcataccaaaaggtacacctcctccgcttcctccaccaccaacggaaccgtcgaatcatcggtttccgatttcgtcaaacgtcccaaaatctctcatccgaattacatatcaagttccgagatcgaatcagagttttctcatcacgatccagatttcgcaagaatcaacaacggtagttttggttgttgtccgtcatcaatcctagctttacaacgagattggcagctccggttccttcgtcaaccggatcgattctatttcgacgaactcaaaccaaaaatctccgattctagatctgtaatcaaacggttaataaacgccgagcatgacgatgaagtctcgatcgtcgataacgcaacaaccgcagctgcaatcgttcttcaacaaaccgcttggggcttttcgtgaaggtcggttc

SEQ ID NO: 9937 - protein, 151 aa, Arabidopsis thaliana
MASSLSPPEEASYHHRHTKRYTSSASSTTNGTVESSVSDFVKRPKISHPNYISSSEIESEFSHHDPDFARINNGSFGCCPSSILALQRDWQLRFLRQPDRFYFDELKPKISDSRSVIKRLINAEHDDEVSIVDNATTAAAIVLQQTAWGFS

SEQ ID NO: 9938 - protein, 101 aa, Arabidopsis thaliana
  misc_feature (1)..(1): Xaa can be any naturally occurring amino acid
XKIESNKFLLLFFKLINQWRRLYLHRKKLRITTVIPKGTPPPLPPPPTEPSNHRFPISSNVPKSLIRITYQVPRSNQSFLITIQISQESTTVVLVVVRHQS

SEQ ID NO: 9939 - protein, 92 aa, Arabidopsis thaliana
  misc_feature (1)..(2): Xaa can be any naturally occurring amino acid
XXKLKATNFFFSSSSSSINGVVSISTGRSFVSPPSYQKVHLLRFLHHQRNRRIIGFRFRQTSQNLSSELHIKFRDRIRVFSSRSRFRKNQQR

SEQ ID NO: 9940 - DNA, 1897 bp, Arabidopsis thaliana
gaccggaaaataatgctgctccggtcatttcgcaccgtcgagcttctccgccgaatctccacttcttcagtctctggatatcgaacttctccttcacttttacaacgttgcaatggcttccaaacctatttaccacacagagtaacaacaacagagagtcctttcccttcacacatctctcgattctgttcttctcagagcgcgaattcgcaaaatgagaatcgacacacgactctatcatcaccggtttcttcacggagggttaataacagaaagatttcacggcggaggaaggcgggaaaatcattatcaatctcgccggcggcggatgcggttgatttggcgttagactcagtggtgaagatcttcactgtttctacaagtcctagttactttcttccttggcagaataagtctcaacgagaatctatgggctctggatttgtgatttctggaaggaagattataacgaatgcgcatgtcgtggctgatcactcctttgtgttagttagaaagcatggatcgtcgataaaacacagagcagaagttcaagcggttggtcatgaatgtgatttggctatattggtagttgatagtgaagtgttttgggaaggtatgaatgctttggagctaggagatataccgtttcttcaggaagctgtggctgtagttggctatcctcaaggtggtgacaacatttctgttacaaaaggtgttgtgtctcgagttgaaccgacacaatatgttcacggtgccacccagctaatggctatacaaatagatgctgctattaaccccggaaatagtggtggcccagctatcatgggaaacaaagtagctggtgtcgcatttcaaaatctttcaggtgctgagaatataggctatataattccaacaccagtgataaagcatttcataaatggcgttgaagaatgtggtaaatacattggtttttgttcaatgggtgtatcatgtcagcctatggagaatggtgaacttcgtagtggttttcagatgagttctgaaatgacaggggttcttgttagcaaaataaaccctctatcagatgctcacaaaattttgaagaaagatgatgttcttcttgcatttgatggtgttcctatagcaaatgatggaacagttccttttcggaacagggagagaatcactttcgaccatttggtttctatgaagaaaccagatgaaacagccttggttaaagttttgagagaggggaaagaacatgaattcagtatcacactaagacctctgcaaccactagttccagtgcatcaatttgatcagcttcccagttattatatatttgcgggcttcgtatttgtacctcttactcagccataccttcatgaatatggagaagattggtataacacttctccccgcacattgtgccatcgtgcattaaaagatttgcccaaaaaagccggtcaacaacttgtcattgtctctcaggtgttaatggatgatatcaacacaggatacgagcgtctcgcagaactacaagtgaataaagtgaacggagtagaagtgaataatctgagacatctatgtcagctcatagagaactgcaacaccgaaaagctgaggatagacttagacgatgagagtagggtaatcgtcttgaactaccaatccgcaaaaattgccacttctttgattttgaaacgacacagaatagcatcagcgatttccagcgatctgcttatcgaacaaaatctagaaaccgagttggcttcttgttctgcggtttgagctatcgccaacacgtatggcatgttgtacacttacaaattcattcataatttgtaaactacaatgttgtatactcataaacatttaggatttgataagtggcttgtcacgagcctgaattttg

SEQ ID NO: 9941 - protein, 590 aa, Arabidopsis thaliana
DRKIMLLRSFRTVELLRRISTSSVSGYRTSPSLLQRCNGFQTYLPHRVTTTESPFPSHISRFCSSQSANSQNENRHTTLSSPVSSRRVNNRKISRRRKAGKSLSISPAADAVDLALDSVVKIFTVSTSPSYFLPWQNKSQRESMGSGFVISGRKIITNAHVVADHSFVLVRKHGSSIKHRAEVQAVGHECDLAILVVDSEVFWEGMNALELGDIPFLQEAVAVVGYPQGGDNISVTKGVVSRVEPTQYVHGATQLMAIQIDAAINPGNSGGPAIMGNKVAGVAFQNLSGAENIGYIIPTPVIKHFINGVEECGKYIGFCSMGVSCQPMENGELRSGFQMSSEMTGVLVSKINPLSDAHKILKKDDVLLAFDGVPIANDGTVPFRNRERITFDHLVSMKKPDETALVKVLREGKEHEFSITLRPLQPLVPVHQFDQLPSYYIFAGFVFVPLTQPYLHEYGEDWYNTSPRTLCHRALKDLPKKAGQQLVIVSQVLMDDINTGYERLAELQVNKVNGVEVNNLRHLCQLIENCNTEKLRIDLDDESRVIVLNYQSAKIATSLILKRHRIASAISSDLLIEQNLETELASCSAV

SEQ ID NO: 9942 - protein, 586 aa, Arabidopsis thaliana
MLLRSFRTVELLRRISTSSVSGYRTSPSLLQRCNGFQTYLPHRVTTTESPFPSHISRFCSSQSANSQNENRHTTLSSPVSSRRVNNRKISRRRKAGKSLSISPAADAVDLALDSVVKIFTVSTSPSYFLPWQNKSQRESMGSGFVISGRKIITNAHVVADHSFVLVRKHGSSIKHRAEVQAVGHECDLAILVVDSEVFWEGMNALELGDIPFLQEAVAVVGYPQGGDNISVTKGVVSRVEPTQYVHGATQLMAIQIDAAINPGNSGGPAIMGNKVAGVAFQNLSGAENIGYIIPTPVIKHFINGVEECGKYIGFCSMGVSCQPMENGELRSGFQMSSEMTGVLVSKINPLSDAHKILKKDDVLLAFDGVPIANDGTVPFRNRERITFDHLVSMKKPDETALVKVLREGKEHEFSITLRPLQPLVPVHQFDQLPSYYIFAGFVFVPLTQPYLHEYGEDWYNTSPRTLCHRALKDLPKKAGQQLVIVSQVLMDDINTGYERLAELQVNKVNGVEVNNLRHLCQLIENCNTEKLRIDLDDESRVIVLNYQSAKIATSLILKRHRIASAISSDLLIEQNLETELASCSAV

SEQ ID NO: 9943 - protein, 447 aa, Arabidopsis thaliana
MGSGFVISGRKIITNAHVVADHSFVLVRKHGSSIKHRAEVQAVGHECDLAILVVDSEVFWEGMNALELGDIPFLQEAVAVVGYPQGGDNISVTKGVVSRVEPTQYVHGATQLMAIQIDAAINPGNSGGPAIMGNKVAGVAFQNLSGAENIGYIIPTPVIKHFINGVEECGKYIGFCSMGVSCQPMENGELRSGFQMSSEMTGVLVSKINPLSDAHKILKKDDVLLAFDGVPIANDGTVPFRNRERITFDHLVSMKKPDETALVKVLREGKEHEFSITLRPLQPLVPVHQFDQLPSYYIFAGFVFVPLTQPYLHEYGEDWYNTSPRTLCHRALKDLPKKAGQQLVIVSQVLMDDINTGYERLAELQVNKVNGVEVNNLRHLCQLIENCNTEKLRIDLDDESRVIVLNYQSAKIATSLILKRHRIASAISSDLLIEQNLETELASCSAV

SEQ ID NO: 9944 - DNA, 904 bp, Arabidopsis thaliana
gacaagattctatgaggatttttcagtaaatggatagcctgacacgagaaagctgacctcactcgctacttgggttgattgagtatatatatgtaagtatcgccgttgagaaattgggactctgatctgttgcagaaagccgaaagctttggtctttggagctctaacctctgcctctgaacacacacagaatctcccatggctgcatttgcaacggcagaagcgtgtgacagcaacgcagaactaatatcaaatggagacttacgcgctcttcacccaatcttcaagatctatggccaaagaagatgcttctcaggaccaatcgtgactctcaaggtctttgaagacaatgtcctcgtcagaaaccaactagaaacgaaaggagaaggcggagtcttagttatagacggtggtggaagcatgagatgcgcgcttgttggaggaaacctcggacagttagctcagaacaacgggtggtcggggattgttgtgaatggatgcgttagagatgtggatgagatcaatgactgcgatgttggggtcagggcattgggatctaacccgttgaaatctactaagaaaggtcatggtgagaagaatgtgccggttcatattggaggaactttgattagagatggagagtggctatatgctgatagtgatggtatcttgatctccaagaccgaactctctgtttgagtcagaacgtttccgtgatagtgctaagagactacagcttcttggagcaaggtggtttattggaattcttaagaatctgtttaatactccaaataatcatttttattacaatatacttacgttttatgaaattacaaaataaaagtctatatagttcaacaagtttggatcatgtgatagtataagaaactctcatgaatgaaag

SEQ ID NO: 9945 - protein, 166 aa, Arabidopsis thaliana
MAAFATAEACDSNAELISNGDLRALHPIFKIYGQRRCFSGPIVTLKVFEDNVLVRNQLETKGEGGVLVIDGGGSMRCALVGGNLGQLAQNNGWSGIVVNGCVRDVDEINDCDVGVRALGSNPLKSTKKGHGEKNVPVHIGGTLIRDGEWLYADSDGILISKTELSV

SEQ ID NO: 9946 - protein, 92 aa, Arabidopsis thaliana
MRCALVGGNLGQLAQNNGWSGIVVNGCVRDVDEINDCDVGVRALGSNPLKSTKKGHGEKNVPVHIGGTLIRDGEWLYADSDGILISKTELSV

SEQ ID NO: 9947 - DNA, 1068 bp, Arabidopsis thaliana
gcggtggttcttctgccatggcgatcatggccgttgccgctctctttcacgcccgcttccctcttctcctccgtcgcagtatcccgttactgtcggctcctacttctgttatttacaatcacagaactcttctatccgatggactcagtactcgattatgctcgattctccgttattcatcgtctgacggcgtcaacggcggaagtagcggtggcgatttcggtaacgataacgattccgttagtgttgtttcggatgttcagagtcctaattacttaaaattcaccgatgaagaattgatgaagcaatgtagattagagacatttagagtttcaggacctggaggacaacaccggaacaagcgtgactccgccgtgcgtctgaaacatctccccaccggaatcgtagctcaagccgtcgaagatcgttcacagcacaagaaccgtgcttctgctctaaaccgtcttcgtacgctcctcgccattaaagtgagaaacaaagtggacattgaagcttatgctcctcctccagagcttcttcagattctacctcctaagtctaccattagaacttcttctggttcacagattggtcccaacaatcctaaatttgtacctggaatgcaagctttgcttgatgttatttctgcttctgacggttctatcgctgattctgccaaattgctaggtttgagcactggtggcttatctcgtttgatactctcccatgatggtcttcgtatggctgtcaatagcatgagagcagccaagggaataaagcctctcaaatagttgggatgtatcggcatttgaaagatgacgttcgggccttcgacaagttgtatgtggattgcagcacagtgattaccattttatgcaccatattttgtatacaaaaaaaaaggtgaaatgttgagttcagtttaacatttgttcttctaacatcataaaaatagtcacgtatttgagatgatatactataggttgttcaaagggttactgttgtgattgttgttggaagctaatacagttggaaacatggtggattatattaattattctttctgct

SEQ ID NO: 9948 - protein, 262 aa, Arabidopsis thaliana
GGSSAMAIMAVAALFHARFPLLLRRSIPLLSAPTSVIYNHRTLLSDGLSTRLCSILRYSSSDGVNGGSSGGDFGNDNDSVSVVSDVQSPNYLKFTDEELMKQCRLETFRVSGPGGQHRNKRDSAVRLKHLPTGIVAQAVEDRSQHKNRASALNRLRTLLAIKVRNKVDIEAYAPPPELLQILPPKSTIRTSSGSQIGPNNPKFVPGMQALLDVISASDGSIADSAKLLGLSTGGLSRLILSHDGLRMAVNSMRAAKGIKPLK

SEQ ID NO: 9949 - protein, 257 aa, Arabidopsis thaliana
MAIMAVAALFHARFPLLLRRSIPLLSAPTSVIYNHRTLLSDGLSTRLCSILRYSSSDGVNGGSSGGDFGNDNDSVSVVSDVQSPNYLKFTDEELMKQCRLETFRVSGPGGQHRNKRDSAVRLKHLPTGIVAQAVEDRSQHKNRASALNRLRTLLAIKVRNKVDIEAYAPPPELLQILPPKSTIRTSSGSQIGPNNPKFVPGMQALLDVISASDGSIADSAKLLGLSTGGLSRLILSHDGLRMAVNSMRAAKGIKPLK

SEQ ID NO: 9950 - protein, 254 aa, Arabidopsis thaliana
MAVAALFHARFPLLLRRSIPLLSAPTSVIYNHRTLLSDGLSTRLCSILRYSSSDGVNGGSSGGDFGNDNDSVSVVSDVQSPNYLKFTDEELMKQCRLETFRVSGPGGQHRNKRDSAVRLKHLPTGIVAQAVEDRSQHKNRASALNRLRTLLAIKVRNKVDIEAYAPPPELLQILPPKSTIRTSSGSQIGPNNPKFVPGMQALLDVISASDGSIADSAKLLGLSTGGLSRLILSHDGLRMAVNSMRAAKGIKPLK

SEQ ID NO: 9951 - DNA, 1690 bp, Arabidopsis thaliana
tttcttctcttcctcctacattctcgactctctctttttattagggttttcaattttaatcaaaaaaaaaccctcaaatctcatttttggatttggtttcttctgcgatctctgagattcaatttcttctatcaaaggaaacaaaaaacttcatctttccgaagattttttttccttccttctggagctcttttgaatcaggtgaatttctaattgaatctgaaagtttacgatgaacaatttgatatgatgataagttttgtttgatggagctttcaccaacaagcagtgacaagaaaacaatgaagagatggtttttcatagataaacgagttggatagagtgttattgaagataaagaaagcaaaaaacagaagttcttgcattgaagcattggttttagagtttattgaagcattgtttagagttttgattaatggatttaaactcaaaccacaaatcctctgttcttaaagatccttcaccatcagttaaccaatcaagactcggcgtgtctagtagatttatgatgagtcaatggaagaaacctgcgaaactcgatgatgttagatccaatggttggttagatgcaatgatttcatcttctccaccgcgtaagaagcttgtcaaagattttaatgttgaagttgctcctgaagatgattttgctcaacgtgcttggatggtgaaatatccttcggcgattagctcgtttgcgcatattgcagctcaagcaaagaagaaaaagattgctgtatttctagattatgatggtactctttctccaatagttgatgatcctgatcgtgccatcatgtctgatgcaatgcgttctgcggttaaagatgtcgcgagttacttcccaaccgcaataattagcggtagaagccgtgacaaggtttatcagttggtaggactaacagaactttattacgcgggtagtcatggaatggacataatgacttcttctgatggtccgaattgtttcaaatccactgaccaacagggtaaggaagtgaatctgtttcagcccgcgagagaattcataccggttatcgacgaggtttttagaacccttgttgagaaaatgaaagatatcaaaggtgcaaaagtagagaaccacaagttctgtgcatctgtacattaccgtaacgttgacgaaaaggattggcctattattgctcagcgtgttcatgaccacttgaaacaataccctcgtttgcgtctaactcatgggaggaaggttttagaggttcgtcctgtgatagactggaacaaaggaagagcggtcgagtttctattagaatctctcggattaagcaataaagacgatttgcttcctatctacattggtgatgacacaaccgatgaagatgcgttcaaggtactgagagatgggaaccgaggtttcggcatcctagtatcgtctataccgaaagaaagcaatgcgttttactcccttagagatccatccgaggtgaagaagtttctaaagactttggtgaaatgggcaaagttggagaagaattctactggtttttgaataatatagtggaattttatgattaaatgcttatttacacttttttttgtttctttaatcttttttcatctctacccagttttagtcacagcttaatttatgattttccatttatctggtggaagttaagttattaaagttacatgt

SEQ ID NO: 9952 - protein, 368 aa, Arabidopsis thaliana
MDLNSNHKSSVLKDPSPSVNQSRLGVSSRFMMSQWKKPAKLDDVRSNGWLDAMISSSPPRKKLVKDFNVEVAPEDDFAQRAWMVKYPSAISSFAHIAAQAKKKKIAVFLDYDGTLSPIVDDPDRAIMSDAMRSAVKDVASYFPTAIISGRSRDKVYQLVGLTELYYAGSHGMDIMTSSDGPNCFKSTDQQGKEVNLFQPAREFIPVIDEVFRTLVEKMKDIKGAKVENHKFCASVHYRNVDEKDWPIIAQRVHDHLKQYPRLRLTHGRKVLEVRPVIDWNKGRAVEFLLESLGLSNKDDLLPIYIGDDTTDEDAFKVLRDGNRGFGILVSSIPKESNAFYSLRDPSEVKKFLKTLVKWAKLEKNSTGF

SEQ ID NO: 9953 - protein, 338 aa, Arabidopsis thaliana
MMSQWKKPAKLDDVRSNGWLDAMISSSPPRKKLVKDFNVEVAPEDDFAQRAWMVKYPSAISSFAHIAAQAKKKKIAVFLDYDGTLSPIVDDPDRAIMSDAMRSAVKDVASYFPTAIISGRSRDKVYQLVGLTELYYAGSHGMDIMTSSDGPNCFKSTDQQGKEVNLFQPAREFIPVIDEVFRTLVEKMKDIKGAKVENHKFCASVHYRNVDEKDWPIIAQRVHDHLKQYPRLRLTHGRKVLEVRPVIDWNKGRAVEFLLESLGLSNKDDLLPIYIGDDTTDEDAFKVLRDGNRGFGILVSSIPKESNAFYSLRDPSEVKKFLKTLVKWAKLEKNSTGF

SEQ ID NO: 9954 - protein, 337 aa, Arabidopsis thaliana
MSQWKKPAKLDDVRSNGWLDAMISSSPPRKKLVKDFNVEVAPEDDFAQRAWMVKYPSAISSFAHIAAQAKKKKIAVFLDYDGTLSPIVDDPDRAIMSDAMRSAVKDVASYFPTAIISGRSRDKVYQLVGLTELYYAGSHGMDIMTSSDGPNCFKSTDQQGKEVNLFQPAREFIPVIDEVFRTLVEKMKDIKGAKVENHKFCASVHYRNVDEKDWPIIAQRVHDHLKQYPRLRLTHGRKVLEVRPVIDWNKGRAVEFLLESLGLSNKDDLLPIYIGDDTTDEDAFKVLRDGNRGFGILVSSIPKESNAFYSLRDPSEVKKFLKTLVKWAKLEKNSTGF

SEQ ID NO: 9955 - DNA, 1158 bp, Arabidopsis thaliana
gaaagaaactcattctgatttttaatctctgacgagcaaagaaccctatagctaaaagactaaaccaatggcgattatctctgagatggaggaggcgagaccctcgatggtgcctttcaccgcaagttttgatccttcaaacccattagcgtttctggagaaagttcttgacgttatcgggaaagagagcaattttctgaagaaagacacggctgagaaggagatcatgattgctgttatggctgcgaagcagaggttgagggaagcggagaagaagaagttggagaaggagagtgttaagtccatggaggttgagaagccaaagaaagatagcttgaagcccacggaggtggagaagccgaaggaggagagcttgatggcgactgatcccatggagattgagaagcctaaagaggagaaagaatcgggtcccatcgttcctaacaaaggcaatgggcttgattttgagaaatactcaagggggacagaatctccaagaggtcacaattaacattccagtgccggaaggcactaaatcaaggtctgttacctgtgaaatcaagaagaaccgtctcaaagttggtctgaaagggcaagagctaatcatcgatggagaattcttcaattctgtcaagcctgacgactgcttctggaatatcgaggatcaaaagatgatatcggtgcttttgacaaagcaagaccagatggagtggtggaagtattgtgtgaagggagaacctgagatagacactcagaaagttgaaccagagaccagcaaacttggtgatctcgaccctgaaactcgcgcatccgttgagaagatgatgtttgatcaaaggcagaagcagatgggactaccaacgagtgatgagatagagaagaaagatatgctcaagaagttcatggctcagaatcctgggatggacttctctaatgcaaagtttaactgatgatctttactcaactcttcttcgtttaagccagttttgtgttccaatataatcttgttatgtcttcaagattacaatcctgcccttttggtttacttcaagacagttgttgattcgttaaatacctacttccttaagaaaacttcatctgtttttttgcttattgaagtgttcatgagtcatgactatgaatatagtttcgttttct

SEQ ID NO: 9956 - protein, 165 aa, Arabidopsis thaliana
MGLILRNTQGGQNLQEVTINIPVPEGTKSRSVTCEIKKNRLKVGLKGQELIIDGEFFNSVKPDDCFWNIEDQKMISVLLTKQDQMEWWKYCVKGEPEIDTQKVEPETSKLGDLDPETRASVEKMMFDQRQKQMGLPTSDEIEKKDMLKKFMAQNPGMDFSNAKFN

SEQ ID NO: 9957 - protein, 147 aa, Arabidopsis thaliana
MAIISEMEEARPSMVPFTASFDPSNPLAFLEKVLDVIGKESNFLKKDTAEKEIMIAVMAAKQRLREAEKKKLEKESVKSMEVEKPKKDSLKPTEVEKPKEESLMATDPMEIEKPKEEKESGPIVPNKGNGLDFEKYSRGTESPRGHN

SEQ ID NO: 9958 - protein, 141 aa, Arabidopsis thaliana
MEEARPSMVPFTASFDPSNPLAFLEKVLDVIGKESNFLKKDTAEKEIMIAVMAAKQRLREAEKKKLEKESVKSMEVEKPKKDSLKPTEVEKPKEESLMATDPMEIEKPKEEKESGPIVPNKGNGLDFEKYSRGTESPRGHN

SEQ ID NO: 9959 - DNA, 1681 bp, Arabidopsis thaliana
actcaaaagtagtaacaactaagaatggaagatatcatcatcggcgtggtggctctcgccgcggttctccttttcttcctctaccaaaaaccgaaaaccaaacggtacaagctacctccagggccatcaccacttccggtgatcggaaacctccttcagcttcagaagcttaacccacaacgcttcttcgctggatgggccaaaaaatacggtccaatcttgtcatacaggataggaagcagaacaatggtggtgatatcttcagctgagctagctaaagagcttctcaagacgcaagatgtcaactttgcggaccggcctccacatcgtggccatgagttcatatcctacggcaggcgtgacatggcattaaaccactacacaccgtattaccgagagataaggaagatggggatgaaccacttgttctcaccaacacgtgtggccacctttaagcatgtacgagaggaagaggctaggaggatgatggataagatcaacaaggccgcggataaatccgaagtagtcgatataagtgagcttatgttgaccttcacgaactcggttgtgtgtagacaagcgttcgggaagaagtacaatgaagatggagaagagatgaagaggttcatcaagattctttatgggactcaaagcgttttggggaagatctttttctctgattttttcccatattgtggctttcttgatgatttatcaggcctcacagcttatatgaaagagtgtttcgaaagacaagacacttatattcaagaggttgtcaatgagaccttgatcctaagagagtcaagcccgaaaccgagagcatgattgatctcttgatggggatctacaaagaacaacctttcgcttctgaatttactgtagataatgtcaaagccgtcatcttggatattgtagtggcgggaacagatactgcagctgcggcggttgtgtgggggatgacgtatctaatgaagtacccacaagtgttgaagaaagctcaagcagaagtgagagagtatatgaaagagaaaggttaacgttcgttactgaagacgatgtcaagaaccttccttacttcagagctttagttaaagaaaccctaaggatcgaaccagtgattcctctcctaatccctcgtgcttgcattcaagataccaagatcgccggttacgacatccccgcaggaacaacggtcaacgtcaacgcgtgggccgtgtcacgtgacgagaaagaatggggaccgaaccctgatgagttcaggcccgagaggtttcttgagaaggaagttgacttcaaaggcacggactacgagtttataccgttcgggtcaggccggagaatgtgcccgggaatgcgtcttggggccgcgatgcttgaggttccttatgcgaaccttctcctcagcttcaattttaaactccctaatgggatgaaaccagatgatatcaacatggatgtcatgactggtcttgctatgcacaagtcgcagcatctcaagcttgttccagagaaagtgaacaagtattagctaatatatatcaaataaatctaccttctctgattatatagtatatgttcctccaatgtattctgcttcaatgtttggtttctttcttaaatggcaatcgtctctctatctttctcttcacattttgatatgaaggaagcaaattcacat

SEQ ID NO: 9960 - protein, 267 aa, Arabidopsis thaliana
MEDIIIGVVALAAVLLFFLYQKPKTKRYKLPPGPSPLPVIGNLLQLQKLNPQRFFAGWAKKYGPILSYRIGSRTMVVISSAELAKELLKTQDVNFADRPPHRGHEFISYGRRDMALNHYTPYYREIRKMGMNHLFSPTRVATFKHVREEEARRMMDKINKAADKSEVVDISELMLTFTNSVVCRQAFGKKYNEDGEEMKRFIKILYGTQSVLGKIFFSDFFPYCGFLDDLSGLTAYMKECFERQDTYIQEVVNETLILRESSPKPRA

SEQ ID NO: 9961 - protein, 193 aa, Arabidopsis thaliana
MVVISSAELAKELLKTQDVNFADRPPHRGHEFISYGRRDMALNHYTPYYREIRKMGMNHLFSPTRVATFKHVREEEARRMMDKINKAADKSEVVDISELMLTFTNSVVCRQAFGKKYNEDGEEMKRFIKILYGTQSVLGKIFFSDFFPYCGFLDDLSGLTAYMKECFERQDTYIQEVVNETLILRESSPKPRA

SEQ ID NO: 9962 - protein, 154 aa, Arabidopsis thaliana
MALNHYTPYYREIRKMGMNHLFSPTRVATFKHVREEEARRMMDKINKAADKSEVVDISELMLTFTNSVVCRQAFGKKYNEDGEEMKRFIKILYGTQSVLGKIFFSDFFPYCGFLDDLSGLTAYMKECFERQDTYIQEVVNETLILRESSPKPRA

SEQ ID NO: 9963 - DNA, 518 bp, Arabidopsis thaliana
cacagattccgtccacggctttgctttccgacggtgtggctgaggctgcgcagctttactgtgagcttgtccgtcttggtgctcatatgaaagtgattgatattggtggtgggttggggattgattacgacgggtctaaatcgggggagtcggatctctctgttgcttatagtctcgaggagtatgctgcagctgttgtggcttcggttaggtttgtttgtgatcagaagtctgtgaagcatccggtgatttgcagcgagagcggtcgagccattgtgtctcatcactcggtgttgatctttgaagctgtctcagctggtcaacaacatgagacccctactgatcatcagtttatgcttgaagggtactctgaggaagttcgaggtgattacgagaatctttatggtgctgctatgcgtggtgatcgttaaagctgcttgctttatgttgatcagctgaagcagagatgtgttgaagggttcaaagaaggttccttgggcattgaacagttagctggt

SEQ ID NO: 9964 - protein, 142 aa, Arabidopsis thaliana
QIPSTALLSDGVAEAAQLYCELVRLGAHMKVIDIGGGLGIDYDGSKSGESDLSVAYSLEEYAAAVVASVRFVCDQKSVKHPVICSESGRAIVSHHSVLIFEAVSAGQQHETPTDHQFMLEGYSEEVRGDYENLYGAAMRGDR

SEQ ID NO: 9965 - protein, 114 aa, Arabidopsis thaliana
MKVIDIGGGLGIDYDGSKSGESDLSVAYSLEEYAAAVVASVRFVCDQKSVKHPVICSESGRAIVSHHSVLIFEAVSAGQQHETPTDHQFMLEGYSEEVRGDYENLYGAAMRGDR

SEQ ID NO: 9966 - DNA, 1777 bp, Arabidopsis thaliana
aagctttttttacaaaagacgtacacgtctctctctctcactccctctttaagatcagaagctcatttcttcgatacgatcaaccattagagatgggttcggcgaacaacgagtacgagtttctgagtgagattgggctgacttctcacaacttgggatcttacgttgctggcaaatggcaagccaacggacctcttgtttcaactctcaatcctgctaacaatcagccaattgctcaagttgtggaagcttctctagaggattacgagcaaggtttgaaagcttgcgaggaagcagctaaaatatggatgcaggttacggctcctaagagaggtgatatcgtcagacagattggggatgcactaagatccaaacttgactatcttggtcgtcttctttctcttgaaatgggaaagatccttgctgaaggtattggagaagttcaggaagtaattgacatgtgtgattttgctgttggtttgagccgacaactcaatggatcggttataccttcagaacgccctaaccacatgatgttggagatgtggaatcctcttggcattgttggtgttatcacagcgtttaattttccctgtgcagttcttggttggaatgcttgtattgctcttgtctgtggaaactgtgtagtctggaaaggtgctccaactacaccgttaataactatcgcaatgaccaagctagtagctgaagttttagagaaaaacaacttacccggtgccatttttacggccatgtgtggtggtgctgaaattggtgaagcaatagccaaagacacacgcattcccttagtatcctttactggaagctccagggtgggctcaatggtacaacaaacagtgaatgcgagatctgggaaaactttgcttgagttgagtggaaacaatgcaatcatagtcatggacgatgctgatatacagttagcggctcgatctgttctattcgctgcggttggaactgctggtcaacgttgcacaacttgccgtaggctgcttttgcatgagagtgtctatgacaaagtactcgagcaactgcttacctcatacaaacaagtcaaaatcggcaatcctcttgagaaagggacattgttaggaccattacatactcctgaatcaaaaaagaactttgagaaaggaattgaagtcatcaaatcccagggtggtaaaatactaacgggaggtaaagcagtcgaaggtgaaggaaactttgtggagcctacgataatcgagatatcagcagatgctgctgtcgtcaaagaagagctatttgctccggttctatatgttctaaagtttaagtcatttggagaggctgttgcgataaacaactcggttcctcaaggtctaagcagctcgatattcactcggaaccctgaaaacatcttcaggtggatcggaccactgggaagtgactgtggcattgtgaatgtgaacataccgacgaatggagctgagattggtggagcttttggaggcgagaaagcgactggtggtggtcgtgaagctggaagcgactcatggaaacagtacatgcgtcgatcgacttgtaccatcaactatggaaacgagttacctctagcgcaaggaattaacttcggttagatttttcagagatttactcgttaattaataatgttatgttggttcgatttcgatacttgtattgtatgccttgttctctccaagcctttgacttaagatgattacgcttttaatatatataaaaaaatattgaatatattttgattgttaatttgaag

SEQ ID NO: 9967 - protein, 538 aa, Arabidopsis thaliana
AFFTKDVHVSLSHSLFKIRSSFLRYDQPLEMGSANNEYEFLSEIGLTSHNLGSYVAGKWQANGPLVSTLNPANNQPIAQVVEASLEDYEQGLKACEEAAKIWMQVTAPKRGDIVRQIGDALRSKLDYLGRLLSLEMGKILAEGIGEVQEVIDMCDFAVGLSRQLNGSVIPSERPNHMMLEMWNPLGIVGVITAFNFPCAVLGWNACIALVCGNCVVWKGAPTTPLITIAMTKLVAEVLEKNNLPGAIFTAMCGGAEIGEAIAKDTRIPLVSFTGSSRVGSMVQQTVNARSGKTLLELSGNNAIIVMDDADIQLAARSVLFAAVGTAGQRCTTCRRLLLHESVYDKVLEQLLTSYKQVKIGNPLEKGTLLGPLHTPESKKNFEKGIEVIKSQGGKILTGGKAVEGEGNFVEPTIIEISADAAVVKEELFAPVLYVLKFKSFGEAVAINNSVPQGLSSSIFTRNPENIFRWIGPLGSDCGIVNVNIPTNGAEIGGAFGGEKATGGGREAGSDSWKQYMRRSTCTINYGNELPLAQGINFG

SEQ ID NO: 9968 - protein, 508 aa, Arabidopsis thaliana; identical to SEQ ID NO: 936

SEQ ID NO: 9969 - protein, 436 aa, Arabidopsis thaliana; identical to SEQ ID NO: 937

SEQ ID NO: 9970 - DNA, 1167 bp, Arabidopsis thaliana
accttacgctgttcttcccctttccttccgaaattagggcttccgtgtttcgcagtgctctccttcaatccccagcttgacaatgcctcgctatgatgatcgctatgggaacactcgtctctacgttggccgattatcatcgagaactaggacccgagaccttgaacgtctttttagcagatacggaagagtgcgagatgtggatatgaagcgagattatgctttcgttgaatttggtgatccccgtgatgctgatgatgcaagacattacctggacggacgagactttgatggaagtcgcatcactgtggagttttcacgaggggcacctcgtggttctcgggattttgatagcagaggcccaccacctggagctggtcgctgttttaactgtggtgtagatggtcattgggctcgtgactgcacagcaggggactggaagaacaagtgttaccgttgtggagagagatgacacattgagagaaactgcaaaaacagccccaagaagcttaggcgcagtggaagctactccaggtcacctgtaagatcccgttctcctcgtcgtagaagaagcccaagccggagtcttagccgtagccgaagctacagccgatcacgatccccggtgagaagaagagagaggagtgtggaggagagatcacgcagtccaaagcggatggatgactctctatcgccaagagccagagatcgtagtccggttcttgatgatgaaggcagcccaaagatcatagacgggagcccaccaccatcaccaaagcttcaaaaggaagtcggatctgaccgtgacggtggtagcccccaagacaatggcagaaactctgttgtcagtcctgttgtaggagccggtggtgacagttcgaaagaggaccggagccctgttgatgatgattacgagccaaaccgcacttcccctagaggaagtgagtctccttaactttgatggctcatggccacggcttgcaggcattgtagcatgtatactattggatcgactgttcctttctcttttaagtgtgtttgctttagaaccttttaagtttcatgttaccaagagttttttcatttgagacataatgttgttgcgtttcttttggacaatttttcgaagattgttataaggatttataaaagtttcaatctgaggag

SEQ ID NO: 9971 - protein, 129 aa, Arabidopsis thaliana
MPRYDDRYGNTRLYVGRLSSRTRTRDLERLFSRYGRVRDVDMKRDYAFVEFGDPRDADDARHYLDGRDFDGSRITVEFSRGAPRGSRDFDSRGPPPGAGRCFNCGVDGHWARDCTAGDWKNKCYRCGER

SEQ ID NO: 9972 - protein, 92 aa, Arabidopsis thaliana
MDDSLSPRARDRSPVLDDEGSPKIIDGSPPPSPKLQKEVGSDRDGGSPQDNGRNSVVSPVVGAGGDSSKEDRSPVDDDYEPNRTSPRGSESP

SEQ ID NO: 9973 - protein, 88 aa, Arabidopsis thaliana
MKRDYAFVEFGDPRDADDARHYLDGRDFDGSRITVEFSRGAPRGSRDFDSRGPPPGAGRCFNCGVDGHWARDCTAGDWKNKCYRCGER

SEQ ID NO: 9974 - DNA, 1223 bp, Arabidopsis thaliana
aaaagacttaaaagctagaaaaacctttccaaaaatggcaaagaaccgtaacttagtcttcttcttaggggtattagcgtcttttacactctccagtttcccggtaactgtttccggcgagccccctatcttattcactttcggcgactcttcctacgatgtgggcaacacgaagttcttctcgtcggagttcgatccagccaccacgtggccttacggcgattccatcgatgatccctccggtcgttggtctgacggccacattgtcccagatttcgtcggtcgattgattggtcatcgtgaaccgattcctccggtacttgatccaaaagctgatctttctcgtggagcaagctttgccattgctggagcagttgttcttggatctcaatctactactgcatccatgaattttggacaacagatatcgaagtttttagagttacataagcaatggactgataaagaacgagcagaagctatatacatggtaaacataggagctgaggactacttgaatttcgcaaaggctcatccaaatgccaatactgtggagcagctaactcaagttgcccacgttctccaaaggataccaagagagctcacgagtttatacagggcaggtggagcgaggaagtttgcggtacagaatttgggaccgcttggttgtttaccgatagtgagacaagagtttaagacaggtgagaattgtatggagatggttaacttcatggtgaaaacacacaatgaaaggcttagtcgtttgctcgttgcgataaccgtaccgttactgtaccgtggcttccggtacagcctctttgatttcaatggtgaaattctccggaggatcaatgaaccatcactccatggatatactgatacaacgacttcttgctgcggaactggatcgagaaatgcatacgggtgcggttatagtaacgtgcatgctaagctctgcagctaccagaaatcatttttgttcttcgacgggcgtcacaacaccgagaaaaccgatgaagaagttgctaatctgttttattccggagacaaacatgtcgtctctccgatgaatataaaggatctcgtaggtaaagcagcgaccgatcttcttgcgcaagaaatctagaaatcccaatcgtgttctgttctgtttctttgaaataagtaaatggttgttgttgtaaactgtaaaactctgtattcaacttcatatatatatgatg

SEQ ID NO: 9975 - protein, 374 aa, Arabidopsis thaliana
KDLKARKTFPKMAKNRNLVFFLGVLASFTLSSFPVTVSGEPPILFTFGDSSYDVGNTKFFSSEFDPATTWPYGDSIDDPSGRWSDGHIVPDFVGRLIGHREPIPPVLDPKADLSRGASFAIAGAVVLGSQSTTASMNFGQQISKFLELHKQWTDKERAEAIYMVNIGAEDYLNFAKAHPNANTVEQLTQVAHVLQRIPRELTSLYRAGGARKFAVQNLGPLGCLPIVRQEFKTGENCMEMVNFMVKTHNERLSRLLVAITVPLLYRGFRYSLFDFNGEILRRINEPSLHGYTDTTTSCCGTGSRNAYGCGYSNVHAKLCSYQKSFLFFDGRHNTEKTDEEVANLFYSGDKHVVSPMNIKDLVGKAATDLLAQEI

SEQ ID NO: 9976 - protein, 363 aa, Arabidopsis thaliana
MAKNRNLVFFLGVLASFTLSSFPVTVSGEPPILFTFGDSSYDVGNTKFFSSEFDPATTWPYGDSIDDPSGRWSDGHIVPDFVGRLIGHREPIPPVLDPKADLSRGASFAIAGAVVLGSQSTTASMNFGQQISKFLELHKQWTDKERAEAIYMVNIGAEDYLNFAKAHPNANTVEQLTQVAHVLQRIPRELTSLYRAGGARKFAVQNLGPLGCLPIVRQEFKTGENCMEMVNFMVKTHNERLSRLLVAITVPLLYRGFRYSLFDFNGEILRRINEPSLHGYTDTTTSCCGTGSRNAYGCGYSNVHAKLCSYQKSFLFFDGRHNTEKTDEEVANLFYSGDKHVVSPMNIKDLVGKAATDLLAQEI

SEQ ID NO: 9977 - protein, 239 aa, Arabidopsis thaliana
MNFGQQISKFLELHKQWTDKERAEAIYMVNIGAEDYLNFAKAHPNANTVEQLTQVAHVLQRIPRELTSLYRAGGARKFAVQNLGPLGCLPIVRQEFKTGENCMEMVNFMVKTHNERLSRLLVAITVPLLYRGFRYSLFDFNGEILRRINEPSLHGYTDTTTSCCGTGSRNAYGCGYSNVHAKLCSYQKSFLFFDGRHNTEKTDEEVANLFYSGDKHVVSPMNIKDLVGKAATDLLAQEI

SEQ ID NO: 9978 - DNA, 632 bp, Arabidopsis thaliana
ctagaacatcctaatcgaaaaacaacaaaattcattatctgccaaagagaaagaaaaccatattttttataaacagagttaaattgttcttaaacatgatgatgaacaaaaacgttctgagttcgattctgttcttcatgttgattggttcggttcttgtcgagagtcgtccgcttggtctaacaaagaccgaggagaagttcgtggctagtttattcgatggcttatcacttggttcgatcaaagactcaggtccaagtccaggcgagggtcataaggtcgtggacaggaaggatacgtttcgatttgttaagcactcaggtccaagcccaagcggaccgggccactaatgtttcaatctttagttcaaaccgggccggttaaagtgcccatacccatctaggtcgagaaaattatttcatttttttgtttcagtttcattagtggaaaatattatacatgtctcatgtttctgatcgatacataggaagaagaatggcaaaaacaataattgatgtctcatttttctatatttaggattattgttttgttagtgaaataaagttacttgaaaagtatacaaataaaatgtattaatcaaatttatttatttatttgaatgtaataataat

SEQ ID NO: 9979 - protein, 84 aa, Arabidopsis thaliana
MMMNKNVLSSILFFMLIGSVLVESRPLGLTKTEEKFVASLFDGLSLGSIKDSGPSPGEGHKVVDRKDTFRFVKHSGPSPSGPGH

SEQ ID NO: 9980 - protein, 83 aa, Arabidopsis thaliana
MMNKNVLSSILFFMLIGSVLVESRPLGLTKTEEKFVASLFDGLSLGSIKDSGPSPGEGHKVVDRKDTFRFVKHSGPSPSGPGH

SEQ ID NO: 9981 - protein, 82 aa, Arabidopsis thaliana
MNKNVLSSILFFMLIGSVLVESRPLGLTKTEEKFVASLFDGLSLGSIKDSGPSPGEGHKVVDRKDTFRFVKHSGPSPSGPGH

SEQ ID NO: 9982 - DNA, 1678 bp, Arabidopsis thaliana
gtgatcttcctatttctgacgctaattcgaatccttcactcttcaaattgattctttcacggatcaaacaaattatctgagagtaccgattggtaagatctgagctttacgctatgaatttcttcaaatccgtcttcacggaagacctagatcctccagaaaccgaatccgaatccgattcaccgaaacacagcgaagagcatgaacatccagagcaagaacatccagagcaatctgaatctaacgacgacggtggatggagcttcggtggtctgatgaaaactctagccaccagatccgaatccgtgattgaaacctaccgacgagatctcgaagaatttggcacaggtttgaagaaagagatcgaggtggctcagggatcgcttggtacggtgggacatgcgattgatgagcttgggaacacggtgctaaaaggtacggctgagattattgctcaaggtaaggaagcgattttagccgctggtaatgaatctgattcttctgataacaatagtagtcagagttttggtcgtcgtgatagcttcagttcgaaaccatatagtcgtttcgatgctcagattcgtgctgttcaaggagatctcaacacttactgtgaagagcctgaggattcagatgattacaaaaagtgggaatctgcgttttctctggatggaaaagctgaggagatggagaaattgttggaggaaaatggtgatatgaaaggagtgtataaaagggtcgttccgagtatggttgatcacgagaccttctggtttaggtatttctatagggttaacaagctcaagcaagctgaggatttaagggctaatcttgtgaaacgagccatctctctggatgatgaagaagaattgagctgggatattgatgatgaagaggagagcagcgagaaagttgttgaagctaccaaagatgtttcaaggttgaaacttgaagggaatgatggtatgggtggtggagatgtgagtgaaactgtgaaagatgaagtggaaagtacatattcagtggctaaagtgagcacgcaagatgaagtgacaagtgcagattcagtgactgaagtgagcaatgttggtttgaagacagataaagattctgaggaaaagaaggagactgatagtgaggaagttccagaagaaaaatcatttgttgatgctgctcctcctgcgtctgatgaggctccaatccaagattctgtcaaaccaacatctgatgaggctccaatccaagattctgtcaaaccaaaatctgatgaggctgctccatcccaagactcagctaaaccagatgtggctgcttcttcatcaactcaacaaccatctgaagaggatttgggatgggacgagatcgaggatatgagtagcatagatggtaaggaaacgagtcggtctggtggtagtccaaacagagctgagctgcgtaaacgtctgagtgctgcagaggaagatgaagatttaagttgggacattgatgaagatgacgaagaagaatcatcatcatccaaagcttaatgttagttttaaagtggtgtgctttcttacttttgccaatccttttacttgtttttacaagtttctggcgctttgcccccattcttcagttgtttttctcttcaacgtttctattttacattgatttgaaaatatgtttttaaattttactt

SEQ ID NO: 9983 - protein, 470 aa, Arabidopsis thaliana
MNFFKSVFTEDLDPPETESESDSPKHSEEHEHPEQEHPEQSESNDDGGWSFGGLMKTLATRSESVIETYRRDLEEFGTGLKKEIEVAQGSLGTVGHAIDELGNTVLKGTAEIIAQGKEAILAAGNESDSSDNNSSQSFGRRDSFSSKPYSRFDAQIRAVQGDLNTYCEEPEDSDDYKKWESAFSLDGKAEEMEKLLEENGDMKGVYKRVVPSMVDHETFWFRYFYRVNKLKQAEDLRANLVKRAISLDDEEELSWDIDDEEESSEKVVEATKDVSRLKLEGNDGMGGGDVSETVKDEVESTYSVAKVSTQDEVTSADSVTEVSNVGLKTDKDSEEKKETDSEEVPEEKSFVDAAPPASDEAPIQDSVKPTSDEAPIQDSVKPKSDEAAPSQDSAKPDVAASSSTQQPSEEDLGWDEIEDMSSIDGKETSRSGGSPNRAELRKRLSAAEEDEDLSWDIDEDDEEESSSSKA

SEQ ID NO: 9984 - protein, 416 aa, Arabidopsis thaliana
MKTLATRSESVIETYRRDLEEFGTGLKKEIEVAQGSLGTVGHAIDELGNTVLKGTAEIIAQGKEAILAAGNESDSSDNNSSQSFGRRDSFSSKPYSRFDAQIRAVQGDLNTYCEEPEDSDDYKKWESAFSLDGKAEEMEKLLEENGDMKGVYKRVVPSMVDHETFWFRYFYRVNKLKQAEDLRANLVKRAISLDDEEELSWDIDDEEESSEKVVEATKDVSRLKLEGNDGMGGGDVSETVKDEVESTYSVAKVSTQDEVTSADSVTEVSNVGLKTDKDSEEKKETDSEEVPEEKSFVDAAPPASDEAPIQDSVKPTSDEAPIQDSVKPKSDEAAPSQDSAKPDVAASSSTQQPSEEDLGWDEIEDMSSIDGKETSRSGGSPNRAELRKRLSAAEEDEDLSWDIDEDDEEESSSSKA

SEQ ID NO: 9985 - protein, 279 aa, Arabidopsis thaliana
MEKLLEENGDMKGVYKRVVPSMVDHETFWFRYFYRVNKLKQAEDLRANLVKRAISLDDEEELSWDIDDEEESSEKVVEATKDVSRLKLEGNDGMGGGDVSETVKDEVESTYSVAKVSTQDEVTSADSVTEVSNVGLKTDKDSEEKKETDSEEVPEEKSFVDAAPPASDEAPIQDSVKPTSDEAPIQDSVKPKSDEAAPSQDSAKPDVAASSSTQQPSEEDLGWDEIEDMSSIDGKETSRSGGSPNRAELRKRLSAAEEDEDLSWDIDEDDEEESSSSKA

SEQ ID NO: 9986 - DNA, 2532 bp, Arabidopsis thaliana
gagaaaggactcgagaagtcatggcttctgcttaatctcctcttccttaaaaaccagaagatcctttgttccacgtttctcgtttgtagcttcttctctctcagaattcaattcgaattttgacaagtcttgacgaagaagaagaaacagagctgcttcaatggcttctaactcattactacgttcttcttcaaatttcttcttaggatcccatatcataatctcatctcccacccctaaaaccaccagaaaaccctctttccctttctccttcgtctcccgtgctaaataccaaatcactcgatcgtctcaagacgaaaattcgccaaatggtaaacccaattcgccattctcgtcgcaagtagccttagcagctattctactatcttcaatttcatcttcgccgctagctttagctgtagtggacgaaccagcttctccgtctgtcgttatagaatctcaagctgtgaagccatcgacgccatcgcaattgttcattcagaacgagatacttaaggctcctagtcctaaatcatcggatctcccagaaggatcacagtggcgatacagcgagtttcttaacgctgtgaagaaagggaaagtcgagagagttagattcagcaaagatggttctgttgttcagcttactgccgtcgacaatcgccgtgcttcagtcatcgtccctaacgaccctgaccttattgatatcttggctatgaacggagttgatatatccgtctctgaaggagaatcctcaggcaatgacttgttcactgtcattggaaacttgattttcccgcttttggcctttggtggactcttcttgcttttcaggcgagctcagggaggccctggtggtggtcctggtggcttgggtggtcctatggatttcggacgttctaaatccaagttccaggaagtgcctgagactggtgtgtcatttgcagatgttgctggggctgatcaagctaagttggagttacaggaagttgtggatttcttgaagaatcctgataagtacacagccttgggtgctaagattcctaaagggtgtttgcttgttggaccgcctggtacgggtaagacactcctggctagggcggtggctggggaagctggagtgccgttcttctcttgcgcggcctcggagttcgtagagctttttgtgggtgtgggtgcatcgagagttagggatttgttcgagaaggctaagtctaaagccccttgtattgtattcattgatgagattgacgctgtgggtaggcagagaggagctgggatgggaggaggaaatgatgagagagaacagactattaatcagctgttgacagagatggatggattttctggcaactctggtgtgatagttttggcagctacgaataggccggacgttcttgattcggctttgttgaggcctggaaggtttgatcgacaggtcacggtggataggcctgatgtggctggcagagtcaagattcttcaggttcattctagggggaaggcactcggtaaagatgtggactttgacaaggttgccagaaggacccctggtttcacgggtgctgacttacaaaacctgatgaatgaagcggcgattcttgcggctaggcgtgagcttaaggaaataagcaaggatgaaatctctgatgctcttgagaggatcattgctggacctgagaagaagaatgcagttgtctctgaagagaagaagagacttgttgcataccatgaggctggtcatgctctagtgggtgctcttatgccagaatatgatccggttgcaaagatttctatcattcctcgtggccaagctggtgggctcactttttttgctccaagcgaagaaagacttgagtctggattgtacagtaggagctaccttgagaatcaaatggctgttgcacttggcggaagggttgcagaggaggtgatctttggggatgagaatgtgacgactggagcatcaaatgatttcatgcaggtgtctcgtgtggcacgtcaaatgattgagagatttgggttcagcaaaaagattggacaagttgctgttggtggccctggtggaaatcccttcatgggtcaacaaatgtcatcacagaaagattactcaatggcaactgcggatattgtagatgctgaggtgcgagagttagttgagaaggcatacaagagagcaacggagatcataacaactcatattgatatcctacacaagcttgcacagctcctgatcgagaaagaaactgttgacggtgaagagttcatgagtctctttattgacggccaagctgagttgtatatttcttgattccttaaagttgccattgcttagtgcttacaataccataagctaataagtatattcgtgttcatatgtgtcaccgattcagtactcaccaattcagtatatttgtgtatattccgttgttttagtgaatctaaatatactttgtaatgcaatgcaatgtgtttaaagaaaagtaatttgatcaaaaaaaaaaaaaaaaaaaactcgagggggggcccggt

SEQ ID NO: 9987 - protein, 716 aa, Arabidopsis thaliana
MASNSLLRSSSNFFLGSHIIISSPTPKTTRKPSFPFSFVSRAKYQITRSSQDENSPNGKPNSPFSSQVALAAILLSSISSSPLALAVVDEPASPSVVIESQAVKPSTPSQLFIQNEILKAPSPKSSDLPEGSQWRYSEFLNAVKKGKVERVRFSKDGSVVQLTAVDNRRASVIVPNDPDLIDILAMNGVDISVSEGESSGNDLFTVIGNLIFPLLAFGGLFLLFRRAQGGPGGGPGGLGGPMDFGRSKSKFQEVPETGVSFADVAGADQAKLELQEVVDFLKNPDKYTALGAKIPKGCLLVGPPGTGKTLLARAVAGEAGVPFFSCAASEFVELFVGVGASRVRDLFEKAKSKAPCIVFIDEIDAVGRQRGAGMGGGNDEREQTINQLLTEMDGFSGNSGVIVLAATNRPDVLDSALLRPGRFDRQVTVDRPDVAGRVKILQVHSRGKALGKDVDFDKVARRTPGFTGADLQNLMNEAAILAARRELKEISKDEISDALERIIAGPEKKNAVVSEEKKRLVAYHEAGHALVGALMPEYDPVAKISIIPRGQAGGLTFFAPSEERLESGLYSRSYLENQMAVALGGRVAEEVIFGDENVTTGASNDFMQVSRVARQMIERFGFSKKIGQVAVGGPGGNPFMGQQMSSQKDYSMATADIVDAEVRELVEKAYKRATEIITTHIDILHKLAQLLIEKETVDGEEFMSLFIDGQAELYIS

SEQ ID NO: 9988 - protein, 531 aa, Arabidopsis thaliana
MNGVDISVSEGESSGNDLFTVIGNLIFPLLAFGGLFLLFRRAQGGPGGGPGGLGGPMDFGRSKSKFQEVPETGVSFADVAGADQAKLELQEVVDFLKNPDKYTALGAKIPKGCLLVGPPGTGKTLLARAVAGEAGVPFFSCAASEFVELFVGVGASRVRDLFEKAKSKAPCIVFIDEIDAVGRQRGAGMGGGNDEREQTINQLLTEMDGFSGNSGVIVLAATNRPDVLDSALLRPGRFDRQVTVDRPDVAGRVKILQVHSRGKALGKDVDFDKVARRTPGFTGADLQNLMNEAAILAARRELKEISKDEISDALERIIAGPEKKNAVVSEEKKRLVAYHEAGHALVGALMPEYDPVAKISIIPRGQAGGLTFFAPSEERLESGLYSRSYLENQMAVALGGRVAEEVIFGDENVTTGASNDFMQVSRVARQMIERFGFSKKIGQVAVGGPGGNPFMGQQMSSQKDYSMATADIVDAEVRELVEKAYKRATEIITTHIDILHKLAQLLIEKETVDGEEFMSLFIDGQAELYIS

SEQ ID NO: 9989 - protein, 475 aa, Arabidopsis thaliana
MDFGRSKSKFQEVPETGVSFADVAGADQAKLELQEVVDFLKNPDKYTALGAKIPKGCLLVGPPGTGKTLLARAVAGEAGVPFFSCAASEFVELFVGVGASRVRDLFEKAKSKAPCIVFIDEIDAVGRQRGAGMGGGNDEREQTINQLLTEMDGFSGNSGVIVLAATNRPDVLDSALLRPGRFDRQVTVDRPDVAGRVKILQVHSRGKALGKDVDFDKVARRTPGFTGADLQNLMNEAAILAARRELKEISKDEISDALERIIAGPEKKNAVVSEEKKRLVAYHEAGHALVGALMPEYDPVAKISIIPRGQAGGLTFFAPSEERLESGLYSRSYLENQMAVALGGRVAEEVIFGDENVTTGASNDFMQVSRVARQMIERFGFSKKIGQVAVGGPGGNPFMGQQMSSQKDYSMATADIVDAEVRELVEKAYKRATEIITTHIDILHKLAQLLIEKETVDGEEFMSLFIDGQAELYIS

SEQ ID NO: 9990 - DNA, 1207 bp, Arabidopsis thaliana
acggttaaaggggtgccttgtgatgtgaagatctttgcctctcgctctcgctttcggtgacaatgggaagctcgtcgaaggaagagacggcgagtgacggagatacggcgagcggtggcgcctcaccgtccaacgacggcagactcttctcggagggcgagcgtgttctcgcttaccatggtcctcgcgtctacggagccaaggttcaaaaggtcgagcttcggaaaaaggagtggaaatactttgtgcactatcttggttggaacaaaaattgggatgaatgggttagtgcggatagattgttgaaacataccgaggagaatcttgtcaaacagaaagctctagacaaaaagcaaggagttgaaaaaggtaccaagtctggccgttccgctcagacaaaaactagaagctctgcagacacaaaggctgataaagatgacaccaagaccaatgctgcaaaagggaagaaacgaaagcacgagtcaggcaatgagaaggataatgtaacggcggagaagctaatgaagatccaaattcccgcatcacttaaaaagcaactcactgacgactgggagtatattgcgcagaaggacaaggttgtgaaacttcctcgttcacctaacgtcgatgagatattgtccaagtaccttgaattcaaaaccaagaaggatggaatggtaactgattcggtcgctgaaatattgaaaggcataaggagttatttcgacaaggcattgccagtgatgctcctatataagaaagagaggcgacaataccaagaatcaatcgtggatgatacttcaccttcaactgtttatggcgccgagcatttgctccgtctctttgtcaagttgccagatcttttttcatatgtaaacatggaagaagaaacatggagtcgcatgcaacaaacattatcagacttcctcaagtttattcagaagaatcagagcaatttcttgctaccatcagcatatgattctgataaggtttcagatggtaaaggcaaaggaaaagacgactgacatctccaggaaaaaaatattgttgtaatttagaattccttcatttttctgatgaattcataattgtaagatttgcagctgaatatgaaatattttacaggcctttgaagttaactatttggttcatgtaaaaaaaaaaaaaaagaaaaaaaaaaaaaaaaaaactcgagggggggcccggt

SEQ ID NO: 9991 - protein, 320 aa, Arabidopsis thaliana
MGSSSKEETASDGDTASGGASPSNDGRLFSEGERVLAYHGPRVYGAKVQKVELRKKEWKYFVHYLGWNKNWDEWVSADRLLKHTEENLVKQKALDKKQGVEKGTKSGRSAQTKTRSSADTKADKDDTKTNAAKGKKRKHESGNEKDNVTAEKLMKIQIPASLKKQLTDDWEYIAQKDKVVKLPRSPNVDEILSKYLEFKTKKDGMVTDSVAEILKGIRSYFDKALPVMLLYKKERRQYQESIVDDTSPSTVYGAEHLLRLFVKLPDLFSYVNMEEETWSRMQQTLSDFLKFIQKNQSNFLLPSAYDSDKVSDGKGKGKDD

SEQ ID NO: 9992 - protein, 167 aa, Arabidopsis thaliana
MKIQIPASLKKQLTDDWEYIAQKDKVVKLPRSPNVDEILSKYLEFKTKKDGMVTDSVAEILKGIRSYFDKALPVMLLYKKERRQYQESIVDDTSPSTVYGAEHLLRLFVKLPDLFSYVNMEEETWSRMQQTLSDFLKFIQKNQSNFLLPSAYDSDKVSDGKGKGKDD

SEQ ID NO: 9993 - DNA, 1485 bp, Arabidopsis thaliana
gagagagctactagtcccccccccccccggacctcactctctctcgccactgttccgctctctctcattcttcctaattttacccccaaaacctccgattattactcaaacgccactgctctctcgccgggattccggtgaagaggaggagatggatgtcggagtttcaccggcgaagtctatacttgcgaaacctctgaagctactcactgaagaggacatttctctgctcactcgcgaagactgccgcaaattcctcaaagacaaaggaatgcgaagaccgtcgtggaacaaatctcaggcgatccagcaagttttatctcttaaagctctctatgaacctggagacgattccggcgccggtatcttccgcaagatcctcgtttctcagccagtaaatccgcctagcgtcacaacaacgttgattgagccaagcaacgagctggaagcttgtggccgggtttcttatccggaagataacggcgcgtgccatagaatggattctccaagatcagctgagttttccggtgggtctggtcactttgtagccgagaaagatggccacaagacgactatttctcccagaagcccagctgaaacaagtgagctcgttgggcaaatgacgatattctatagtggaaaagtgaatgtgtatgatggaataccacctgaaaaggcccggtcaatcatgcactttgcagccaatccaattgatttgcctgaaaatggtatttttgcttccagtagaatgatttcaaagctcataagtaaagagaagatgatggaacttccccaaaaaggccttgagaaggcgaattcttctcgtgattctggtatggagggccaggcgaacagaaaggtatctttgcaaagatatcgtgaaaagcggaaagacagaaaattctcaaaggccaaaaagtgtccaggagttgcgtcctctagcttggagatgtttctgaattgtcagccacggatgaaagctgcatattcgcaaaacctaggctgcaccggatctccactgcatagccagtcacctgaaagccagacaaaaagtcccaatctttcagttgatctaaacagtgaaggcatttaacaagataccgaaacgtggagatgctataagctgtgaataggcgttgaaacagttgcttgcttgtaagctcaaagatatgaagaaaagaaacctctcttcggatcggccttcttttgtgtttccggggttttgcacccatattttttggtctatagttttgagtagagcttagtaggttagtggtaatttcttgtttctgattctttttgtgaggatatagtcacagagagtagagacaagagaggtgaaagaagggctttcattttctaggtgttgtaatgtgtaaatgatgtcttatttgacacttttaacgagagagaccttttagccaaaaaaaaaaaaaaaaaaaaaaaaaaaaaaaaaaaaaaaaaaaaactcgagggggggcccgg

SEQ ID NO: 9994 - protein, 363 aa, Arabidopsis thaliana
RELLVPPPPGPHSLSPLFRSLSFFLILPPKPPIITQTPLLSRRDSGEEEEMDVGVSPAKSILAKPLKLLTEEDISLLTREDCRKFLKDKGMRRPSWNKSQAIQQVLSLKALYEPGDDSGAGIFRKILVSQPVNPPSVTTTLIEPSNELEACGRVSYPEDNGACHRMDSPRSAEFSGGSGHFVAEKDGHKTTISPRSPAETSELVGQMTIFYSGKVNVYDGIPPEKARSIMHFAANPIDLPENGIFASSRMISKLISKEKMMELPQKGLEKANSSRDSGMEGQANRKVSLQRYREKRKDRKFSKAKKCPGVASSSLEMFLNCQPRMKAAYSQNLGCTGSPLHSQSPESQTKSPNLSVDLNSEGI

SEQ ID NO: 9995 - protein, 313 aa, Arabidopsis thaliana
MDVGVSPAKSILAKPLKLLTEEDISLLTREDCRKFLKDKGMRRPSWNKSQAIQQVLSLKALYEPGDDSGAGIFRKILVSQPVNPPSVTTTLIEPSNELEACGRVSYPEDNGACHRMDSPRSAEFSGGSGHFVAEKDGHKTTISPRSPAETSELVGQMTIFYSGKVNVYDGIPPEKARSIMHFAANPIDLPENGIFASSRMISKLISKEKMMELPQKGLEKANSSRDSGMEGQANRKVSLQRYREKRKDRKFSKAKKCPGVASSSLEMFLNCQPRMKAAYSQNLGCTGSPLHSQSPESQTKSPNLSVDLNSEGI

SEQ ID NO: 9996 - protein, 273 aa, Arabidopsis thaliana
MRRPSWNKSQAIQQVLSLKALYEPGDDSGAGIFRKILVSQPVNPPSVTTTLIEPSNELEACGRVSYPEDNGACHRMDSPRSAEFSGGSGHFVAEKDGHKTTISPRSPAETSELVGQMTIFYSGKVNVYDGIPPEKARSIMHFAANPIDLPENGIFASSRMISKLISKEKMMELPQKGLEKANSSRDSGMEGQANRKVSLQRYREKRKDRKFSKAKKCPGVASSSLEMFLNCQPRMKAAYSQNLGCTGSPLHSQSPESQTKSPNLSVDLNSEGI

SEQ ID NO: 9997 - DNA, 1901 bp, Arabidopsis thaliana
gacgcgcgtgaggtaaaatgttcaacaagttacgtaggtggagaaccttcgtaatactttttcattagtcttttcttcatttgattttgcgaaatttctaaataattgcgagctgcataatccctccgactattaacttacaaagtacccttttagccaggctttttctgtcttatttttttgtcattaaactatataaccaaacacaaacatcatctttctccttcatttcacaaacttaaaattctctgtttttgtttcttcttctttcaaaatctcaagcaaaagaaaaaatggagctattcacaaaaggtaacaacgttaagttacgtagccacctagataagtttttagtcgccgacgatgaccaagaaaccatccgtcaaagccgtaaaggagatgcacggcgtgccgtttggacggtggagcccgtcgtcgataaacctaatctgataaggttaaagagcagccacggcacgtacttaacggcgagcaacaaaccgttattgttaggtatgaccggtgagaaagtgactcaaacggcgtcgtttaacaagctgatggattggcaaacgcagtgggaaccggagcgagatgggtttcaggtgaagctaaaatcttggtgcggtaagtggatgagggctaacggtggaacgccgccgtggagaaactctgttactcacgatgagcctcatacgtcaaagacaaagaactggttgatttgggatgttataactattgatggttctgatcttgaaaacatgtctgatggtgatgaaagctctgtttcttctccggtcgggtctgaattcggatcagaacccgggtcacctgtttctgccaggtctacgaagagtagtattagccggtttgcttctcttggtttatctacgtctccgagatggtcctcaaaaccgaagtcgacggcgagtagcttcaaccaaaaagaaacaccagtatctgtctcagcaatggaatttttccagaaagcaaaagctattcgaatgcgtaacagtcacaacaagtatctaacagcagacgacgatgaagaaaccgtaactcaaaaccgtaacggatctaccaaaaacgctcgatggaccgtcgaaccggttcgtgattctttccatgttattcgtcttaaaagctgttacggtaagtacttaaccgcttctaacgagcggttcttgctcggggctacggggaagaaagtgattcagttgaaactgagtcgggttgattcgtctgttgagtgggaaccgcttagagaagggtctaagattaagcttaggactagatctggtaactatttacgaggtaatggtggtcttcctccttggagaaactcggtcacacacgacgttcctcatttgtctgctactcaggattcgatttcttgggatgttgatgttgttgagatcttgactgattccgaattcaagacggagtctgcgaaagcgccgccaccgaagacgacgtctccaccgccgcatcggagaccgacgagttcgccgttgtcggctgagtctccaaggacttcgtcttctctttcagacagatccgattcagatttgtaccgttttccggttattgaaaattttgattttgattttgaccagtcggttgagtctccgcctaaatctgatggacgaaccatatattaccatgtcgctgacgaggaaggacacgtggaagatgaaacaaccgttggatatgctttcacgtttaaaggaaatagcgtggcggagctgactcagacattgcgagaagaaacgtgcatggaagacgctgtggtgtgtactcgtagtcctttaaacggcaagctgtttcctcttcgtttgcaacttcctcctaacaacggaacattgcatgtcattttactaccctccagcgcgagcctctag

SEQ ID NO: 9998 - protein, 535 aa, Arabidopsis thaliana
MELFTKGNNVKLRSHLDKFLVADDDQETIRQSRKGDARRAVWTVEPVVDKPNLIRLKSSHGTYLTASNKPLLLGMTGEKVTQTASFNKLMDWQTQWEPERDGFQVKLKSWCGKWMRANGGTPPWRNSVTHDEPHTSKTKNWLIWDVITIDGSDLENMSDGDESSVSSPVGSEFGSEPGSPVSARSTKSSISRFASLGLSTSPRWSSKPKSTASSFNQKETPVSVSAMEFFQKAKAIRMRNSHNKYLTADDDEETVTQNRNGSTKNARWTVEPVRDSFHVIRLKSCYGKYLTASNERFLLGATGKKVIQLKLSRVDSSVEWEPLREGSKIKLRTRSGNYLRGNGGLPPWRNSVTHDVPHLSATQDSISWDVDVVEILTDSEFKTESAKAPPPKTTSPPPHRRPTSSPLSAESPRTSSSLSDRSDSDLYRFPVIENFDFDFDQSVESPPKSDGRTIYYHVADEEGHVEDETTVGYAFTFKGNSVAELTQTLREETCMEDAVVCTRSPLNGKLFPLRLQLPPNNGTLHVILLPSSASL

SEQ ID NO: 9999 - protein, 461 aa, Arabidopsis thaliana
MTGEKVTQTASFNKLMDWQTQWEPERDGFQVKLKSWCGKWMRANGGTPPWRNSVTHDEPHTSKTKNWLIWDVITIDGSDLENMSDGDESSVSSPVGSEFGSEPGSPVSARSTKSSISRFASLGLSTSPRWSSKPKSTASSFNQKETPVSVSAMEFFQKAKAIRMRNSHNKYLTADDDEETVTQNRNGSTKNARWTVEPVRDSFHVIRLKSCYGKYLTASNERFLLGATGKKVIQLKLSRVDSSVEWEPLREGSKIKLRTRSGNYLRGNGGLPPWRNSVTHDVPHLSATQDSISWDVDVVEILTDSEFKTESAKAPPPKTTSPPPHRRPTSSPLSAESPRTSSSLSDRSDSDLYRFPVIENFDFDFDQSVESPPKSDGRTIYYHVADEEGHVEDETTVGYAFTFKGNSVAELTQTLREETCMEDAVVCTRSPLNGKLFPLRLQLPPNNGTLHVILLPSSASL

SEQ ID NO: 10000 - protein, 446 aa, Arabidopsis thaliana
MDWQTQWEPERDGFQVKLKSWCGKWMRANGGTPPWRNSVTHDEPHTSKTKNWLIWDVITIDGSDLENMSDGDESSVSSPVGSEFGSEPGSPVSARSTKSSISRFASLGLSTSPRWSSKPKSTASSFNQKETPVSVSAMEFFQKAKAIRMRNSHNKYLTADDDEETVTQNRNGSTKNARWTVEPVRDSFHVIRLKSCYGKYLTASNERFLLGATGKKVIQLKLSRVDSSVEWEPLREGSKIKLRTRSGNYLRGNGGLPPWRNSVTHDVPHLSATQDSISWDVDVVEILTDSEFKTESAKAPPPKTTSPPPHRRPTSSPLSAESPRTSSSLSDRSDSDLYRFPVIENFDFDFDQSVESPPKSDGRTIYYHVADEEGHVEDETTVGYAFTFKGNSVAELTQTLREETCMEDAVVCTRSPLNGKLFPLRLQLPPNNGTLHVILLPSSASL

SEQ ID NO: 10001 - DNA, 857 bp, Arabidopsis thaliana
gaaactctctttttgtctctattgttgaaaaaatggaagtgagaggcccagtgatatggatgttcttaatgtgttgcatatttggtcacttaattgtaagtcataagaatgacttagtggaagccaaaagcttttcaaaatctgaagatttggaaatcgagaagagactacagactatcaacaaacccgccgtcaagatcatcaagactattgatggagaaatatacggatgtgtggatttcttcaagcaaccagcatttgatcatccttctatgaagaatcacacataccattacaagatgcgtctaatctggaaagaaatgggagaaagagagacaaacaatactgcttttggttacttatgggagaatggtgtgggttgtcccattggtacagtccctatggaaagagtcaccaaagacgatattttaagattagactcatttggtgataatcataaaccctgtggttcctggaacactaccacttatgatcctaataatgttgttcattacaaccaacatcgttttgcggtagctcgaacgaagaacataggaaggaggttcaatggagcaacgatggaactttgtataaccgctcctaaggttaagccaacccaattcagtgcttcaagacttcacattcagatgggaagggatttcctccaagccggtttgactgtaaatccagtattgtacaaggacaagcaacctcgaacttttgtctatacagatgtgagtcagtcacattattctagtcaattctttttctaatattttttttgaatatatatatatatgaaagaattaacatggatggaaaaaaaaaaaaaaaaaaaactcgagggggggcccggt

SEQ ID NO: 10002 - protein, 256 aa, Arabidopsis thaliana
NSLFVSIVEKMEVRGPVIWMFLMCCIFGHLIVSHKNDLVEAKSFSKSEDLEIEKRLQTINKPAVKIIKTIDGEIYGCVDFFKQPAFDHPSMKNHTYHYKMRLIWKEMGERETNNTAFGYLWENGVGCPIGTVPMERVTKDDILRLDSFGDNHKPCGSWNTTTYDPNNVVHYNQHRFAVARTKNIGRRFNGATMELCITAPKVKPTQFSASRLHIQMGRDFLQAGLTVNPVLYKDKQPRTFVYTDVSQSHYSSQFFF

SEQ ID NO: 10003 - protein, 246 aa, Arabidopsis thaliana
MEVRGPVIWMFLMCCIFGHLIVSHKNDLVEAKSFSKSEDLEIEKRLQTINKPAVKIIKTIDGEIYGCVDFFKQPAFDHPSMKNHTYHYKMRLIWKEMGERETNNTAFGYLWENGVGCPIGTVPMERVTKDDILRLDSFGDNHKPCGSWNTTTYDPNNVVHYNQHRFAVARTKNIGRRFNGATMELCITAPKVKPTQFSASRLHIQMGRDFLQAGLTVNPVLYKDKQPRTFVYTDVSQSHYSSQFFF

SEQ ID NO: 10004 - protein, 237 aa, Arabidopsis thaliana
MFLMCCIFGHLIVSHKNDLVEAKSFSKSEDLEIEKRLQTINKPAVKIIKTIDGEIYGCVDFFKQPAFDHPSMKNHTYHYKMRLIWKEMGERETNNTAFGYLWENGVGCPIGTVPMERVTKDDILRLDSFGDNHKPCGSWNTTTYDPNNVVHYNQHRFAVARTKNIGRRFNGATMELCITAPKVKPTQFSASRLHIQMGRDFLQAGLTVNPVLYKDKQPRTFVYTDVSQSHYSSQFFF

SEQ ID NO: 10005 - DNA, 1049 bp, Arabidopsis thaliana
agaaaccttgagagcttaaaaattcttcacttgggtctcttctctctctcttctcttgcgaccattccgttgttcgatccatatatcaaagcttgatttagttggttttcaatgggggacagtcagtactcgttttctctcaccaccttcagcccatcagggaagctggttcagatagaacatgccctaacagctgttggatcaggccaaacatcacttggaattaaagcttcaaatggagttgtcattgcaactgaaaagaaacttccttctatattggttgatgaagcgtctgttcaaaagattcaacatttgactcccaacattggaactgtttacagtggtatgggtcctgatttccgagttcttgtgcgaaagagtaggaagcaggctgagcaatatctccgtctgtacaaggaacccatccccgttactcaacttgtaagggaaactgccacggtgatgcaagagttcactcaatcgggtggtgttaggccgtttggagtttctctactggtggctgggtatgatgacaagggtccacaactgtatcaagtggatccatctggctcttatttctcatggaaagcttctgcaatgggaaagaatgtttcgaatgcaaagacgtttcttgagaagaggtacacagaagatatggaacttgatgatgccattcacacggcaatattgacattgaaggaaggtttcgagggagaaatctcaagcaaaaacatcgagattggcaaaatcggtactgacaaagttttcagggtgctaacaccagcagaaatcgatgattacttggctgaagtcgagtaaaactttcacttaaccgtgcaaccaacctgatttgaatctcagtatactctcagagttgatggttcttgcttttgtaaaacttttggaatttgttaaggagactcgtgacccaataatttagaatatgttttttcactcatttaaacgtctgttgtgaaaattcagtttcatataaccaagtttcatgcacacaaaaaaaaaaaaaaaaaaaactcgagggggggcccggt

SEQ ID NO: 10006 - protein, 235 aa, Arabidopsis thaliana
MGDSQYSFSLTTFSPSGKLVQIEHALTAVGSGQTSLGIKASNGVVIATEKKLPSILVDEASVQKIQHLTPNIGTVYSGMGPDFRVLVRKSRKQAEQYLRLYKEPIPVTQLVRETATVMQEFTQSGGVRPFGVSLLVAGYDDKGPQLYQVDPSGSYFSWKASAMGKNVSNAKTFLEKRYTEDMELDDAIHTAILTLKEGFEGEISSKNIEIGKIGTDKVFRVLTPAEIDDYLAEVE

SEQ ID NO: 10007 - protein, 157 aa, Arabidopsis thaliana
MGPDFRVLVRKSRKQAEQYLRLYKEPIPVTQLVRETATVMQEFTQSGGVRPFGVSLLVAGYDDKGPQLYQVDPSGSYFSWKASAMGKNVSNAKTFLEKRYTEDMELDDAIHTAILTLKEGFEGEISSKNIEIGKIGTDKVFRVLTPAEIDDYLAEVE

SEQ ID NO: 10008 - protein, 118 aa, Arabidopsis thaliana
MQEFTQSGGVRPFGVSLLVAGYDDKGPQLYQVDPSGSYFSWKASAMGKNVSNAKTFLEKRYTEDMELDDAIHTAILTLKEGFEGEISSKNIEIGKIGTDKVFRVLTPAEIDDYLAEVE

SEQ ID NO: 10009 - DNA, 988 bp, Arabidopsis thaliana
agtccccccccccccggatctttagagagagagagaaagatgcagagggacgtgtcgagctgcaacacttacaactatggagacgctctctattgggacgctcgttacgtgcaagacgcgctttctttcgactggtaccaatgttactcttctctccgcccttttgtccgcagcttcgtctctacttcttcacgagtcctcatggttggctgtggcaactccctgatgtcagaggatatggtgaaggatgggtatgaggacatcatgaatgttgatatctcttcagtggctattgagatgatgcaaaccaaatatgcatctgttcctcagctcaaatatatgcaaatggatgttagagatatgagttactttgaagacgattcctttgacactattattgataaaggaacccttgattcattgatgtgtggcagtgatgctcttctaagtgcttcgagaatgttgggtgaagttagcaggctgattaaacctggagggacctactttttgataacctacggtgatccgaaagtgagaatgcctcatttgactcgttctgcgtacaactggaagatctccttatacattataccaagaccaggatttaaaaggccagaaagttgcagctcgtcagcaaagtcttgtatggaagctatacctataacaagtgagggaatgctgccacatgattatgttctggaggatcctgattcccattttatttacatatgcaagaagaaggatgaagatgaagaagctcaactaccctcatacccattaatggaggatgttttgtagtgatggcacgcagaggctcaaacaatgcaaaattgtgcatgtgtgtttgtctttttgatccccatttagaccagtcgatctattgttgtattttatgtgtcttgtgatcttatcccaattgataggtccgagtctcagaattgctctataaactcataatatacgaataaacatcaacctttattatctc

SEQ ID NO: 10010 - protein, 265 aa, Arabidopsis thaliana
SPPPPGSLERERKMQRDVSSCNTYNYGDALYWDARYVQDALSFDWYQCYSSLRPFVRSFVSTSSRVLMVGCGNSLMSEDMVKDGYEDIMNVDISSVAIEMMQTKYASVPQLKYMQMDVRDMSYFEDDSFDTIIDKGTLDSLMCGSDALLSASRMLGEVSRLIKPGGTYFLITYGDPKVRMPHLTRSAYNWKISLYIIPRPGFKRPESCSSSAKSCMEAIPITSEGMLPHDYVLEDPDSHFIYICKKKDEDEEAQLPSYPLMEDVL

SEQ ID NO: 10011 - protein, 252 aa, Arabidopsis thaliana
MQRDVSSCNTYNYGDALYWDARYVQDALSFDWYQCYSSLRPFVRSFVSTSSRVLMVGCGNSLMSEDMVKDGYEDIMNVDISSVAIEMMQTKYASVPQLKYMQMDVRDMSYFEDDSFDTIIDKGTLDSLMCGSDALLSASRMLGEVSRLIKPGGTYFLITYGDPKVRMPHLTRSAYNWKISLYIIPRPGFKRPESCSSSAKSCMEAIPITSEGMLPHDYVLEDPDSHFIYICKKKDEDEEAQLPSYPLMEDVL

SEQ ID NO: 10012 - protein, 198 aa, Arabidopsis thaliana
MVGCGNSLMSEDMVKDGYEDIMNVDISSVAIEMMQTKYASVPQLKYMQMDVRDMSYFEDDSFDTIIDKGTLDSLMCGSDALLSASRMLGEVSRLIKPGGTYFLITYGDPKVRMPHLTRSAYNWKISLYIIPRPGFKRPESCSSSAKSCMEAIPITSEGMLPHDYVLEDPDSHFIYICKKKDEDEEAQLPSYPLMEDVL

SEQ ID NO: 10013 - DNA, 2011 bp, Arabidopsis thaliana
cccccccaaaaaaaacagaacacgaattttcaaagttttccacacgatgtcttccataagatcgttaccacgtccctaactcttctccttcagacaaaagtactttagttattcttctttcttttgccatacttctctgaaaacagaataaatcttttgtattcggtcaaactgattcaaatactgtacagtcaagtcaaagctacaagatcgtgttccaggtttagagaaaatcttctgaactcaaaagattctcataactgagtttataaatggataattgaagttgtgtattttgttgataaaaccaaaaccatgggtggagatgatttgagcttcacaagattggtgattactgctttgtttggtctgttaatgttgttacaaatcaaggaaacttctgcatcaacatcctttgtaagctcgagtgtttgtaagtctgatcacttgacctacacaaagccttatcaacaagggagtttgttcacaattaacggtaatccggtggagaaactccggttttgcgaagctttacggtttcacaaagccaatggttgtatctttgaggattcttttagtgatgacttctgcacaattcactctctactagggagaaggtttttggaagaaaaaactgtaaaagattccaaaaatagtaagcctaaaactgaatatagccatgttaaagttagcatagcaggaagtgggtttcttctcttgtgttgcgctctttgttgtccttgctttcataaagagaggaaagcaaatagtcatgaagttctacctaaagaatctaactcagtgcaccaagtttcttcttttgaaatgagcccttcttctgagaagattccacaaagtccattccgagcaccaccaagtccatcccgcgtaccgcagagtccatctagatatgctatgtccccaaggcctagtagactgggacctttgaatctgaccatgagtcagattaatacagcaactggtaattttgcagacagtcaccaaattggtgaaggaggctttggtgtagtctttaaaggcgttctagatgatggccaggttgttgccataaaacgagccaaaaaggaacactttgagaatctgcgaacggagtttaaaagtgaagttgaccttttgtctaaaattggccaccggaacctagtgaagcttcttggttatgttgacaaaggagacgagcgacttatcataactgagtatgtcagaaatggtacactccgcgatcacttggacggtgctcgtggaactaaacttaatttcaatcaaaggttggagattgttattgatgtctgccatggcttaacctatctccattcttatgcagaaagacagataattcaccgtgacataaaatcgtcgaacattctactcacagatagcatgagagccaaagtagcagacttcggctttgcgagaggcggtcctactgactcgaaccagactcacattttaactcaagtgaaaggaaccgttggttatctcgatcctgagtacatgaaaacttatcatctcactgctaaaagcgatgtttactcgttcgggattttgcttgtggagatactcacaggccgtcgtccagtggaggccaagcgacttcctgatgagaggattacggtccgatgggcattcgacaagtacaatgaagggcgagtttttgaactagtggatcctaacgcgagggaacgagtagatgagaagatactaaggaagatgtttagtttggcatttcaatgtgctgctcctactaaaaaagagcggcctgacatggaagctgttgggaagcagctttgggctataagatcaagttatctcaggcggtcaatggaataagacaagtgttcacacgttacaaccaccaaaatgctatagtctctctgttgttagataatatcacctcttttacattttgctatccaaccacttcttcttcagatttgaaatgagatgtcttattcaaaaaaaaaaaaaaaaaaaactcgagggggggcccggt

SEQ ID NO: 10014 - protein, 510 aa, Arabidopsis thaliana
MGGDDLSFTRLVITALFGLLMLLQIKETSASTSFVSSSVCKSDHLTYTKPYQQGSLFTINGNPVEKLRFCEALRFHKANGCIFEDSFSDDFCTIHSLLGRRFLEEKTVKDSKNSKPKTEYSHVKVSIAGSGFLLLCCALCCPCFHKERKANSHEVLPKESNSVHQVSSFEMSPSSEKIPQSPFRAPPSPSRVPQSPSRYAMSPRPSRLGPLNLTMSQINTATGNFADSHQIGEGGFGVVFKGVLDDGQVVAIKRAKKEHFENLRTEFKSEVDLLSKIGHRNLVKLLGYVDKGDERLIITEYVRNGTLRDHLDGARGTKLNFNQRLEIVIDVCHGLTYLHSYAERQIIHRDIKSSNILLTDSMRAKVADFGFARGGPTDSNQTHILTQVKGTVGYLDPEYMKTYHLTAKSDVYSFGILLVEILTGRRPVEAKRLPDERITVRWAFDKYNEGRVFELVDPNARERVDEKILRKMFSLAFQCAAPTKKERPDMEAVGKQLWAIRSSYLRRSME

SEQ ID NO: 10015 - protein, 490 aa, Arabidopsis thaliana
MLLQIKETSASTSFVSSSVCKSDHLTYTKPYQQGSLFTINGNPVEKLRFCEALRFHKANGCIFEDSFSDDFCTIHSLLGRRFLEEKTVKDSKNSKPKTEYSHVKVSIAGSGFLLLCCALCCPCFHKERKANSHEVLPKESNSVHQVSSFEMSPSSEKIPQSPFRAPPSPSRVPQSPSRYAMSPRPSRLGPLNLTMSQINTATGNFADSHQIGEGGFGVVFKGVLDDGQVVAIKRAKKEHFENLRTEFKSEVDLLSKIGHRNLVKLLGYVDKGDERLIITEYVRNGTLRDHLDGARGTKLNFNQRLEIVIDVCHGLTYLHSYAERQIIHRDIKSSNILLTDSMRAKVADFGFARGGPTDSNQTHILTQVKGTVGYLDPEYMKTYHLTAKSDVYSFGILLVEILTGRRPVEAKRLPDERITVRWAFDKYNEGRVFELVDPNARERVDEKILRKMFSLAFQCAAPTKKERPDMEAVGKQLWAIRSSYLRRSME

SEQ ID NO: 10016 - protein, 340 aa, Arabidopsis thaliana
MSPSSEKIPQSPFRAPPSPSRVPQSPSRYAMSPRPSRLGPLNLTMSQINTATGNFADSHQIGEGGFGVVFKGVLDDGQVVAIKRAKKEHFENLRTEFKSEVDLLSKIGHRNLVKLLGYVDKGDERLIITEYVRNGTLRDHLDGARGTKLNFNQRLEIVIDVCHGLTYLHSYAERQIIHRDIKSSNILLTDSMRAKVADFGFARGGPTDSNQTHILTQVKGTVGYLDPEYMKTYHLTAKSDVYSFGILLVEILTGRRPVEAKRLPDERITVRWAFDKYNEGRVFELVDPNARERVDEKILRKMFSLAFQCAAPTKKERPDMEAVGKQLWAIRSSYLRRSME

SEQ ID NO: 10017 - DNA, 788 bp, Arabidopsis thaliana
gaaacgctctcttcttcttcttcaatcttttcttcgatctcttcttcgtttgtgagtaaagaccgcgaatttaatctgaaggttaaggtggtgtgaaatcagcgttaggggatggcgaagtactttgacattgatgacatacttatagaggaagagtttgtaccggttttattccataaaacagcaaacggagtgactattgatccaagtgcagaaacaaattgtgctgaacaaggctctaaagttgaacttcccttctggcttgctcatgagttgcatttgaggcaagctgttaccataaaccttcctccctgttttgaccaaaagacgaggcttgaagttcaggctgatgctgcatacgtcgatcttagatcgcgatgtccatacttttatgaatttggatgcaagatagagccactggtcacagatagaacactggggatcttgctatcgactgcgtttaagatcagatacaaagaggcactgacaaaagtatacacagcagctcacataacagcttccaagtacttgtcgtttttaacaaaagaagaaacaaacttgtatgaagcagctcacttgtcgatgacagccttcaagaagtggagaactggtggtcctagattccagagagcttcaatactcggaagaaaacgcaaggattctaattaagttccctataactctttcttatcataattatccaatagggtgattgtagcatataacaatctcaaaatgatgtaactgggtaacatacatttgattatggttgagtcaaattgcaaacc

SEQ ID NO: 10018 - protein, 185 aa, Arabidopsis thaliana
MAKYFDIDDILIEEEFVPVLFHKTANGVTIDPSAETNCAEQGSKVELPFWLAHELHLRQAVTINLPPCFDQKTRLEVQADAAYVDLRSRCPYFYEFGCKIEPLVTDRTLGILLSTAFKIRYKEALTKVYTAAHITASKYLSFLTKEETNLYEAAHLSMTAFKKWRTGGPRFQRASILGRKRKDSN

SEQ ID NO: 10019 - DNA, 561 bp, Arabidopsis thaliana
gaatttctctcacccgaagttaataattcagtcagaaacacacacacacacacacactcaaaactgaattgacttgtcagaaatggaatctctgttgtgtcggaggaggataaagagagtcatggtgctaataatagcgttgacatggctccgtagcacgtgcggagagctcgaggaccaactattcgaagtaggaaagcttaagatgttcgtcgacgacctcccagatatgcccagactctatggctttaactctgttcatggtatcatcaaaccagcttctcttcaaatcggcatgttctccactaaatggaaattccacagagatttgcctgcgacgccagtgtttgcatacggtacatcacggagcaaggcaacagttcctggtccgacgattgaaaccgtatatggagtagacacatacgttacgtggcgaaatcaccttcctaaatctcacatccttccttgggaccccacaatctccccagcaactccgaaacacggtggaattcctacggttgttcacttacatggaggaatccacgaaccaacaagcgacgg

SEQ ID NO: 10020 - protein, 159 aa, Arabidopsis thaliana
MESLLCRRRIKRVMVLIIALTWLRSTCGELEDQLFEVGKLKMFVDDLPDMPRLYGFNSVHGIIKPASLQIGMFSTKWKFHRDLPATPVFAYGTSRSKATVPGPTIETVYGVDTYVTWRNHLPKSHILPWDPTISPATPKHGGIPTVVHLHGGIHEPTSD

SEQ ID NO: 10021 - protein, 146 aa, Arabidopsis thaliana
MVLIIALTWLRSTCGELEDQLFEVGKLKMFVDDLPDMPRLYGFNSVHGIIKPASLQIGMFSTKWKFHRDLPATPVFAYGTSRSKATVPGPTIETVYGVDTYVTWRNHLPKSHILPWDPTISPATPKHGGIPTVVHLHGGIHEPTSD

SEQ ID NO: 10022 - protein, 118 aa, Arabidopsis thaliana
MFVDDLPDMPRLYGFNSVHGIIKPASLQIGMFSTKWKFHRDLPATPVFAYGTSRSKATVPGPTIETVYGVDTYVTWRNHLPKSHILPWDPTISPATPKHGGIPTVVHLHGGIHEPTSD

SEQ ID NO: 10023 - DNA, 1112 bp, Arabidopsis thaliana
gattcgcatcaacgaagtcaaaaccatttataaacccaaaatcttcttcgatctctccataattctcgtttgcgtcattcattcatcacatatcaaccaccacagagacagaggaatagtctcaaaactttctcagaaatggcaggcagtaatattctccataagattaagttgaaggctgggttctgtggatctgctcctgacatgggaagaggcaaaagcaagatgtggaagaacatcacccacggttttcactgtgtgaagggcaagtccagccatccgatggaggactatgtagtgtctgaattcaagaaacttgaaggtcatgaattgggtttgtttgctatctttgatggtcacttggggcatgatgtggctaaatacttgcagactaatctctttgacaacattcttaaagagaaggatttttggactgacacagagaatgctataaggaatgcctacagatcaacagatgccgtgatattgcagcagtcccttaagcttggtaaaggcggatcaacagctgtaacgggaattctaattgatggtaaaaagctagttgttgctaatgttggagactccagagcagtgatgtctaagaatggtgttgcgcatcagctatctgtcgatcatgaaccaagcaaggagaaaaaagaaatagagagccgaggtggctttgtgtcaaatattccaggggatgttccacgagtggatggacagttagcggttgcaagagcatttggagataagagcttaaagttacatctgagctcagaaccggacataacacaccagacaattgatgatcacactgaattcatccttttcgcaagcgatggtatttggaaagtattatcaaaccaagaagcggttgatgctatcaagagtatcaaagatcctcatgcagctgcaaagcacttgatagaggaagctatatctaggaagagcaaagatgacatctcatgtatcgttgtaaagttccactaatcttctcttcttcttatcaaaagctattttgtctataagttaccatcaagttgcaagatagagaaatatatgctcaagctgtgtctgtaaaaacccagtaatgatgtttaaacacaataaag

SEQ ID NO: 10024 - protein, 283 aa, Arabidopsis thaliana
MAGSNILHKIKLKAGFCGSAPDMGRGKSKMWKNITHGFHCVKGKSSHPMEDYVVSEFKKLEGHELGLFAIFDGHLGHDVAKYLQTNLFDNILKEKDFWTDTENAIRNAYRSTDAVILQQSLKLGKGGSTAVTGILIDGKKLVVANVGDSRAVMSKNGVAHQLSVDHEPSKEKKEIESRGGFVSNIPGDVPRVDGQLAVARAFGDKSLKLHLSSEPDITHQTIDDHTEFILFASDGIWKVLSNQEAVDAIKSIKDPHAAAKHLIEEAISRKSKDDISCIVVKFH

SEQ ID NO: 10025 - protein, 261 aa, Arabidopsis thaliana
MGRGKSKMWKNITHGFHCVKGKSSHPMEDYVVSEFKKLEGHELGLFAIFDGHLGHDVAKYLQTNLFDNILKEKDFWTDTENAIRNAYRSTDAVILQQSLKLGKGGSTAVTGILIDGKKLVVANVGDSRAVMSKNGVAHQLSVDHEPSKEKKEIESRGGFVSNIPGDVPRVDGQLAVARAFGDKSLKLHLSSEPDITHQTIDDHTEFILFASDGIWKVLSNQEAVDAIKSIKDPHAAAKHLIEEAISRKSKDDISCIVVKFH

SEQ ID NO: 10026 - protein, 254 aa, Arabidopsis thaliana
MWKNITHGFHCVKGKSSHPMEDYVVSEFKKLEGHELGLFAIFDGHLGHDVAKYLQTNLFDNILKEKDFWTDTENAIRNAYRSTDAVILQQSLKLGKGGSTAVTGILIDGKKLVVANVGDSRAVMSKNGVAHQLSVDHEPSKEKKEIESRGGFVSNIPGDVPRVDGQLAVARAFGDKSLKLHLSSEPDITHQTIDDHTEFILFASDGIWKVLSNQEAVDAIKSIKDPHAAAKHLIEEAISRKSKDDISCIVVKFH

SEQ ID NO: 10027 - DNA, 1626 bp, Arabidopsis thaliana
aaaaatccctcttcacccgatccctctttctttgtctctgtctcgagattgctagtaaactcaaaaagctatggcggtttctaatgcctctgttgttcttagcccgaatctggagacatcgtcgtcatggtatcaccataatccgtcttcttctctagacctgattaggattcatactcttccgatgaataagatgacaaggagaggtttgatacagagagtgcgttgcgagacttctccgtccagcgactcatcgcctctggacaagcttaagaattctcctgcaattgacagatacacaagggagagaagcagcattgtggtgattgggcttagctttcacacatctcctctagagatgcgtgagaggcttgctattcctgaagctgaatggccactagctatcactcagttgtgcgctttgaatcacatcgaagaagctgctgttctcagtacctgcaaccgtatcgagatttatgtatccgctctttctcgttaccgtggtgtcaaagaagtcactgaatggatgtctaagagaagtgggattccagtttcggatatctgtcagcatcggtttctgttgtacaacaaagacgccacgcaacatctgtttcaagtctcagctggtctggaatctcttgtcataggagaaaatcagatacaatcacaggttagaaaagctgaacaagtagttaaacaagaagggtttgggaggattatcagtactctatttgaaaaggcaaacaaggctggaaagcgtgtcagagcacagacgaatatcgcgtctggggctgtttccgttagctctgctgcagtcgaacttgctctcactaagcttccaggatctgtatcatctgctatgatgttggtaattggtgcaggagagatggggaagcgtataatcgagcacctggttgctaaaggttgcactaaaatggtggttatgaaccggagcgaagataaagttgcagctatccgcaaggagatgcagtctggcgttgagattatttataaaccccttgatgagattctagcttgtgctgcagaagccaacgtgatttttactagcacatcatctgagacaccattgttcttgaaggagcacgtagagatcctccctccttgtcctgcagattatgcgaggctctttgttgatatctctgttcctagaaatgttgggtcttgtgttgctgaattagacagtgcacgggtttacaacgttgatgacctcaaggaagttgttgctgccaataaagaagacagggcgaggaaatcaatggaagctctccctataataagagaggagacaatagagtttgaagggtggagggattcgctgcagacgtttccaacaatcaggaaattaagaagcaaaacagagagaatcagagctgaatgtgttgaaaaattaatctcgaaacatgggaatggcatggacaaaaagacgagggaagcagtagagaaacaaaccagaattatagtgaacaatatcctggattacccaatgaaacatttgagatacgatgggactggtagcagcaagctgcgggagacgctagagaatatgcaggctgtgaacagaatttatgaactcgacggagagttactcgagggggggcccggtac

SEQ ID NO: 10028 - protein, 518 aa, Arabidopsis thaliana
MAVSNASVVLSPNLETSSSWYHHNPSSSLDLIRIHTLPMNKMTRRGLIQRVRCETSPSSDSSPLDKLKNSPAIDRYTRERSSIVVIGLSFHTSPLEMRERLAIPEAEWPLAITQLCALNHIEEAAVLSTCNRIEIYVSALSRYRGVKEVTEWMSKRSGIPVSDICQHRFLLYNKDATQHLFQVSAGLESLVIGENQIQSQVRKAEQVVKQEGFGRIISTLFEKANKAGKRVRAQTNIASGAVSVSSAAVELALTKLPGSVSSAMMLVIGAGEMGKRIIEHLVAKGCTKMVVMNRSEDKVAAIRKEMQSGVEIIYKPLDEILACAAEANVIFTSTSSETPLFLKEHVEILPPCPADYARLFVDISVPRNVGSCVAELDSARVYNVDDLKEVVAANKEDRARKSMEALPIIREETIEFEGWRDSLQTFPTIRKLRSKTERIRAECVEKLISKHGNGMDKKTREAVEKQTRIIVNNILDYPMKHLRYDGTGSSKLRETLENMQAVNRIYELDGELLEGGPG

SEQ ID NO: 10029 - protein, 480 aa, Arabidopsis thaliana
MNKMTRRGLIQRVRCETSPSSDSSPLDKLKNSPAIDRYTRERSSIVVIGLSFHTSPLEMRERLAIPEAEWPLAITQLCALNHIEEAAVLSTCNRIEIYVSALSRYRGVKEVTEWMSKRSGIPVSDICQHRFLLYNKDATQHLFQVSAGLESLVIGENQIQSQVRKAEQVVKQEGFGRIISTLFEKANKAGKRVRAQTNIASGAVSVSSAAVELALTKLPGSVSSAMMLVIGAGEMGKRIIEHLVAKGCTKMVVMNRSEDKVAAIRKEMQSGVEIIYKPLDEILACAAEANVIFTSTSSETPLFLKEHVEILPPCPADYARLFVDISVPRNVGSCVAELDSARVYNVDDLKEVVAANKEDRARKSMEALPIIREETIEFEGWRDSLQTFPTIRKLRSKTERIRAECVEKLISKHGNGMDKKTREAVEKQTRIIVNNILDYPMKHLRYDGTGSSKLRETLENMQAVNRIYELDGELLEGGPG

SEQ ID NO: 10030 - protein, 477 aa, Arabidopsis thaliana
MTRRGLIQRVRCETSPSSDSSPLDKLKNSPAIDRYTRERSSIVVIGLSFHTSPLEMRERLAIPEAEWPLAITQLCALNHIEEAAVLSTCNRIEIYVSALSRYRGVKEVTEWMSKRSGIPVSDICQHRFLLYNKDATQHLFQVSAGLESLVIGENQIQSQVRKAEQVVKQEGFGRIISTLFEKANKAGKRVRAQTNIASGAVSVSSAAVELALTKLPGSVSSAMMLVIGAGEMGKRIIEHLVAKGCTKMVVMNRSEDKVAAIRKEMQSGVEIIYKPLDEILACAAEANVIFTSTSSETPLFLKEHVEILPPCPADYARLFVDISVPRNVGSCVAELDSARVYNVDDLKEVVAANKEDRARKSMEALPIIREETIEFEGWRDSLQTFPTIRKLRSKTERIRAECVEKLISKHGNGMDKKTREAVEKQTRIIVNNILDYPMKHLRYDGTGSSKLRETLENMQAVNRIYELDGELLEGGPG

SEQ ID NO: 10031 - DNA, 781 bp, Arabidopsis thaliana
atcatcacttgcagattctttctctctttcgtaaaaatggcgagttttgaggaaagctctgatttggaagctatacagagccatctcttagaagacttgttggtttgtgatggtttcatgggagattttgacttcgatgcttcttttgtctcaggactttggtgtatagaaccacacgttcctaaacaagaacctgattctccagttcttgatccggattctttcgtcaacgagttcttgcaagtggaaggggaatcatcatcatcatcatcaccagagctgaattcatcgtcatcaacatatgagactgatcagagtgtgaaaaaggcagagaggttcgaagaagaagtagatgctagacattaccgaggagtgaggcgaaggccgtgggggaaatttgcagcagagattcgagatccagcaaagaaaggatcaagaatctggctaggaacatttgagagtgatgttgatgctgcaagagcctatgactgtgcagctttcaagctccggggaagaaaagccgtgctcaacttccctcttgacgccgggaaatatgaagctccagcgaattcaggaaggaaaaggaagagaagtgatgtgcatgaagagcttcaaagaactcagagcaattcatcttcatcttcctgtgatgcattttagcatattaagagtgtgagcagtttccttaagttgtataaagtaattgtacagaggaaacgaattgtgtaggtttagtgtgcttgcaagttgcaacaaatgtgtatggatgttctgtttcttc

SEQ ID NO: 10032 - protein, 219 aa, Arabidopsis thaliana
IITCRFFLSFVKMASFEESSDLEAIQSHLLEDLLVCDGFMGDFDFDASFVSGLWCIEPHVPKQEPDSPVLDPDSFVNEFLQVEGESSSSSSPELNSSSSTYETDQSVKKAERFEEEVDARHYRGVRRRPWGKFAAEIRDPAKKGSRIWLGTFESDVDAARAYDCAAFKLRGRKAVLNFPLDAGKYEAPANSGRKRKRSDVHEELQRTQSNSSSSSCDAF

SEQ ID NO: 10033 - protein, 207 aa, Arabidopsis thaliana
MASFEESSDLEAIQSHLLEDLLVCDGFMGDFDFDASFVSGLWCIEPHVPKQEPDSPVLDPDSFVNEFLQVEGESSSSSSPELNSSSSTYETDQSVKKAERFEEEVDARHYRGVRRRPWGKFAAEIRDPAKKGSRIWLGTFESDVDAARAYDCAAFKLRGRKAVLNFPLDAGKYEAPANSGRKRKRSDVHEELQRTQSNSSSSSCDAF

SEQ ID NO: 10034 - protein, 180 aa, Arabidopsis thaliana
MGDFDFDASFVSGLWCIEPHVPKQEPDSPVLDPDSFVNEFLQVEGESSSSSSPELNSSSSTYETDQSVKKAERFEEEVDARHYRGVRRRPWGKFAAEIRDPAKKGSRIWLGTFESDVDAARAYDCAAFKLRGRKAVLNFPLDAGKYEAPANSGRKRKRSDVHEELQRTQSNSSSSSCDAF

SEQ ID NO: 10035 - DNA, 1050 bp, Arabidopsis thaliana
gaatactttgtctgtttcttcttcctgtggcttctgggtctttgtcaacatcaaagctctttactttttcaacttactttatcgtgcgtctgtacggaccacaaaaggctctctctttatttctctgtgagatttttttaggatctgagagagccaaagatcatggaggaaagccaagaacttgccttgacccagttgagaaaatcggtcgagaaactctcttcttctactgagggatatgacaaaccaacattgatgaggttcctggtggcaagatcaatggacccagtcaaggcagcaaagatgtttgtagattggcaaaaatggagagcctccatggttcctccaactggattcatccctgagtcagaagtgcaggatgaattggaattcagaaaggtctgtcttcagggtccgaccaaatccggacacccattggtgcttgtcataacctctaagcattttgcttctaaggatccagctaacttcaagaagtttgttgtttatgcgctagacaaaacaatcgcaagtggcaacaatggcaaagaagttggaggtgagaaattagtagccgttattgatctggcaaacattacatacaagaaccttgatgctcgtggattgatcactggctttcaattcttacaatcttactacccggaacgccttgcaaaatgctacattttgcatatgcccggattcttcgtgaccgtttggaaattcgtctgccgttttctagagaaagcaactcaggaaaagattgtgatagttacggatggagaagaacagagaaaattcgaggaagagatcggagcagatgctttaccggaagagtacggtggccgagctaagctcacagcaatccaagatgttcttcttcctcaggctgctccagtaactctaacaaacaataatgtttagctctttatttttggaagcattaacctgaatatttgtaatggtcagaacataactagtggtacatctctaaatttccgaaaaaaaaaaaaaaaaaaactcgaggggggggcccggtacccaattcgccct

SEQ ID NO: 10036 - protein, 252 aa, Arabidopsis thaliana
MEESQELALTQLRKSVEKLSSSTEGYDKPTLMRFLVARSMDPVKAAKMFVDWQKWRASMVPPTGFIPESEVQDELEFRKVCLQGPTKSGHPLVLVITSKHFASKDPANFKKFVVYALDKTIASGNNGKEVGGEKLVAVIDLANITYKNLDARGLITGFQFLQSYYPERLAKCYILHMPGFFVTVWKFVCRFLEKATQEKIVIVTDGEEQRKFEEEIGADALPEEYGGRAKLTAIQDVLLPQAAPVTLTNNNV

SEQ ID NO: 10037 - protein, 221 aa, Arabidopsis thaliana
MRFLVARSMDPVKAAKMFVDWQKWRASMVPPTGFIPESEVQDELEFRKVCLQGPTKSGHPLVLVITSKHFASKDPANFKKFVVYALDKTIASGNNGKEVGGEKLVAVIDLANITYKNLDARGLITGFQFLQSYYPERLAKCYILHMPGFFVTVWKFVCRFLEKATQEKIVIVTDGEEQRKFEEEIGADALPEEYGGRAKLTAIQDVLLPQAAPVTLTNNNV

SEQ ID NO: 10038 - protein, 213 aa, Arabidopsis thaliana
MDPVKAAKMFVDWQKWRASMVPPTGFIPESEVQDELEFRKVCLQGPTKSGHPLVLVITSKHFASKDPANFKKFVVYALDKTIASGNNGKEVGGEKLVAVIDLANITYKNLDARGLITGFQFLQSYYPERLAKCYILHMPGFFVTVWKFVCRFLEKATQEKIVIVTDGEEQRKFEEEIGADALPEEYGGRAKLTAIQDVLLPQAAPVTLTNNNV

SEQ ID NO: 10039 - DNA, 1245 bp, Arabidopsis thaliana
gatttagctccggcgaagagtctctccgtgagagcgagcttgtccgatttgtaagcacgagacggaaccatgttgtgcggaggctcacgtgtcttgcagcatttgtccgaccacaatcatcataattcgattggtttaggattagggttttgtggtgctaagattgtgcagctctcttcattctttctcaggccttctcaggctatggcgaagagtcatcatttcagccgtaaattgcgtcagcggatgatttcttcatttgggtctcattgcagaacatccggagaagtcccaattcttcacaattgtttcagccaacgagaagatgatcctgagcttccagttgaagggttatctccagtgtcaggaggcattgttgctctagggaagtttgatgccttacatatcggccatcgagagcttacaattcaagcttcaagaattggagctccatatctattatcttttgttggaatggccgaggtacttggttgggagcccagggcacctatagtggccaaatgtgatcgacaaagggtgcttacctcttgggcctcatattgtggagacagagcgcctgaagagtatgagatagaatttgccagcgtgcgacatcttaccccacgacagtttgtggagaagctgtcaaaggagctcagagtctgcggagttgtggcaggtgaaaattacagatttggatataaagcgtctggtgatgcctctgagctagtgagactgtgcgaggaatgtggtatcactgcttgcatcataaactctgtgatggacatgaagcaaggctcagcaaagagagactcaggggactcaaaagatagagggcaagtctcttctacacgtgtacgccaagctcttgcggcgggagatatgaggtacgtatcagagctccttggcagggcacatcgtcttatcttgagagtcagaacccaagatatgccaagtgaaaggatgatctcagtcccgagatcatcaatacttaatttgccaccagggatcggaatttataaggcatgtttgcttctagttggtgatgagtcttcagttccgtgtaccgtagttgttgatacatcaaatatccatgtagaaacagaggaggtacgactctgtaatttagattggtctcaagaatttcgactcgtgagtgttgagttcggttgagtcaatcttagttcgtataaattcatatttccaaaaaaaaaaaaaaaaaaaactcgagggggggcccggtac

SEQ ID NO: 10040 - protein, 367 aa, Arabidopsis thaliana
MLCGGSRVLQHLSDHNHHNSIGLGLGFCGAKIVQLSSFFLRPSQAMAKSHHFSRKLRQRMISSFGSHCRTSGEVPILHNCFSQREDDPELPVEGLSPVSGGIVALGKFDALHIGHRELTIQASRIGAPYLLSFVGMAEVLGWEPRAPIVAKCDRQRVLTSWASYCGDRAPEEYEIEFASVRHLTPRQFVEKLSKELRVCGVVAGENYRFGYKASGDASELVRLCEECGITACIINSVMDMKQGSAKRDSGDSKDRGQVSSTRVRQALAAGDMRYVSELLGRAHRLILRVRTQDMPSERMISVPRSSILNLPPGIGIYKACLLLVGDESSVPCTVVVDTSNIHVETEEVRLCNLDWSQEFRLVSVEFG

SEQ ID NO: 10041 - protein, 322 aa, Arabidopsis thaliana
MAKSHHFSRKLRQRMISSFGSHCRTSGEVPILHNCFSQREDDPELPVEGLSPVSGGIVALGKFDALHIGHRELTIQASRIGAPYLLSFVGMAEVLGWEPRAPIVAKCDRQRVLTSWASYCGDRAPEEYEIEFASVRHLTPRQFVEKLSKELRVCGVVAGENYRFGYKASGDASELVRLCEECGITACIINSVMDMKQGSAKRDSGDSKDRGQVSSTRVRQALAAGDMRYVSELLGRAHRLILRVRTQDMPSERMISVPRSSILNLPPGIGIYKACLLLVGDESSVPCTVVVDTSNIHVETEEVRLCNLDWSQEFRLVSVEFG

SEQ ID NO: 10042 - protein, 308 aa, Arabidopsis thaliana
MISSFGSHCRTSGEVPILHNCFSQREDDPELPVEGLSPVSGGIVALGKFDALHIGHRELTIQASRIGAPYLLSFVGMAEVLGWEPRAPIVAKCDRQRVLTSWASYCGDRAPEEYEIEFASVRHLTPRQFVEKLSKELRVCGVVAGENYRFGYKASGDASELVRLCEECGITACIINSVMDMKQGSAKRDSGDSKDRGQVSSTRVRQALAAGDMRYVSELLGRAHRLILRVRTQDMPSERMISVPRSSILNLPPGIGIYKACLLLVGDESSVPCTVVVDTSNIHVETEEVRLCNLDWSQEFRLVSVEFG

SEQ ID NO: 10043 - DNA, 1220 bp, Arabidopsis thaliana
aatcacagttcgggaaagacttaacatttaagatttacgggtttgtttgatcgattagtctcatctgggtttttctccaagttaaattctttgtttctgagatggatcaagcttcgtcttcttcgactatggaggaagacaagaagtcttccactgatcctgtgaatgtcgatgataacgaggagagagaagctatagagattgctctgttccaagtgcctgaatgctatgtttatttgatacctccaaggaaaaccgcagcttcgtacagagcagatgagtgggacgtgaacaaatgggcatgggaaggagctttgaaagtggtgagcaaaggagaagaatgcattataaaactagtagataaaaccacaggggaactttacgctcaggcatttctaagagagggggaacttcatcctgtagaagcagtaatcgacagtagcagatattttgttctccgtgttgaagaaaagatagatggtcgtgttcgacatgcttttatcggactcggattccgggaaagaacagaagcatatgatttccaagcagcactacatgaccatatgaagtatttgaacaagaagaaaacagcagaagaaatggaacaacactatcagaacacttcatccgttgattacagcttaaaggaaggagaaaccattgttctccaactcaaaaatagaagcgataaagacagcaagtcaaaaacggtagagaagagtctgggcaatctctcgttggaggataaaggcaagtcaatagaaaccaccattccttcaatcatcctgccacctccacctccgggaccgctttcccctgtcacaactgctcagaagtccccgtcaagtctgccgccaagcctcagcctccaaagatcgtctgaacaacaagatttagatacaaagcgagaagaagaagaagaagagaagaaagaagacctaaaagccaaagatggaggggttgaagatgcaccagatgatgactttggagatttccaagctgcgggttgatttaaacttataatcttttttaccatacacaaagatcgttttataagtaatgtgactgatcaaagtttggattgtttgctactgagagcttatcttctgtacaattccaaaatacaagcctatttctctgaacttgtgattagatagacaaaactccaaaaaaaaaaaaaaaaaaactcgagggggggcccggtacccaattcgccctat

SEQ ID NO: 10044 - protein, 302 aa, Arabidopsis thaliana
MDQASSSSTMEEDKKSSTDPVNVDDNEEREAIEIALFQVPECYVYLIPPRKTAASYRADEWDVNKWAWEGALKVVSKGEECIIKLVDKTTGELYAQAFLREGELHPVEAVIDSSRYFVLRVEEKIDGRVRHAFIGLGFRERTEAYDFQAALHDHMKYLNKKKTAEEMEQHYQNTSSVDYSLKEGETIVLQLKNRSDKDSKSKTVEKSLGNLSLEDKGKSIETTIPSIILPPPPPGPLSPVTTAQKSPSSLPPSLSLQRSSEQQDLDTKREEEEEEKKEDLKAKDGGVEDAPDDDFGDFQAAG

SEQ ID NO: 10045 - protein, 293 aa, Arabidopsis thaliana
MEEDKKSSTDPVNVDDNEEREAIEIALFQVPECYVYLIPPRKTAASYRADEWDVNKWAWEGALKVVSKGEECIIKLVDKTTGELYAQAFLREGELHPVEAVIDSSRYFVLRVEEKIDGRVRHAFIGLGFRERTEAYDFQAALHDHMKYLNKKKTAEEMEQHYQNTSSVDYSLKEGETIVLQLKNRSDKDSKSKTVEKSLGNLSLEDKGKSIETTIPSIILPPPPPGPLSPVTTAQKSPSSLPPSLSLQRSSEQQDLDTKREEEEEEKKEDLKAKDGGVEDAPDDDFGDFQAAG

SEQ ID NO: 10046 - DNA, 1365 bp, Arabidopsis thaliana
gactcaatcccaagaaaaaggccgttctttgcattttctatcgtttcatgtctgtctgagtgacagaggaaaccccaaaaacctccgtaaaacctcacaaaagaatgcagctttcttcttcgtttccaatttcacctcccaaaatcttcccttccaccaaacaccataaacctccagtgattactcaccagctcgccgcacagatacagagcaaccgtagacatttcgtgagtccggtcaaagtctctggctatttctcatcgattagccgagctattgaggaagaagaagagtatcggaaagcacgcgctgcagtgaaccgtaaaggtgtcgaattggagagttatgcaattgaagggatctctgtaggtgggcacgagacttgtgttatcgtccctgagctcaaatgtgtctttgatattgggaggtgcccttctcgtgctattcagcagaagtttctttttatcactcatgcccatcttgaccatatcggagggcttccaatgtatgtagcgagccgtggtttatacaatcttgagccaccgaaaatatttgtgccaccatctattaaagaagatgttgagaaacttcttgagattcacaggactatgggtcaagtagagttgaatgtagaattgataccacttgctgtaggtgaaacatatgagttgcgcaatgacattgttgttagaccatttgcaactcaccatgttataccaagtcagggttatgtcatctattcggtcaggaagaagttgcagaagcagtatgctcacctcaaaggaaaacagatagaaaagattaaaaagtctggcgtcgagattacggacacgatattatcccccgagatagccttcactggagatacaacttcagagtatatgcttgaccctcgtaatgctgatgcgttgagggcaaaagttcttataactgaggcaactttcttggatgaaagttttagcactgagcatgcgcaagcactcggtcatactcatatatctcagattattgagaatgcaaagtggatccggagcaaaactgtattattgacgcatttctcatcacgttaccatgtagaggaaatccgtgaagctgtgcttaagttgcaatcgaaagtatccgcaaaagtcattcctcttacagaaggtttcaggtcaagatattcttaaaagagcttaaaggatattgcaagcaaaagtaggcatttgaaacatctttgtctgtaatttcatagggaactcgctaatgtaagttaaatgaaaaaaagttatcaagattataaaaaaaatacttgttaaacaagcaatagcagtatcataaaagatcaaaaaaaaaaaaaaaaaaactcgagggggggcccggtac

SEQ ID NO: 10047 - protein, 354 aa, Arabidopsis thaliana
MQLSSSFPISPPKIFPSTKHHKPPVITHQLAAQIQSNRRHFVSPVKVSGYFSSISRAIEEEEEYRKARAAVNRKGVELESYAIEGISVGGHETCVIVPELKCVFDIGRCPSRAIQQKFLFITHAHLDHIGGLPMYVASRGLYNLEPPKIFVPPSIKEDVEKLLEIHRTMGQVELNVELIPLAVGETYELRNDIVVRPFATHHVIPSQGYVIYSVRKKLQKQYAHLKGKQIEKIKKSGVEITDTILSPEIAFTGDTTSEYMLDPRNADALRAKVLITEATFLDESFSTEHAQALGHTHISQIIENAKWIRSKTVLLTHFSSRYHVEEIREAVLKLQSKVSAKVIPLTEGFRSRYS

SEQ ID NO: 10048 - protein, 221 aa, Arabidopsis thaliana
MYVASRGLYNLEPPKIFVPPSIKEDVEKLLEIHRTMGQVELNVELIPLAVGETYELRNDIVVRPFATHHVIPSQGYVIYSVRKKLQKQYAHLKGKQIEKIKKSGVEITDTILSPEIAFTGDTTSEYMLDPRNADALRAKVLITEATFLDESFSTEHAQALGHTHISQIIENAKWIRSKTVLLTHFSSRYHVEEIREAVLKLQSKVSAKVIPLTEGFRSRYS

SEQ ID NO: 10049 - protein, 186 aa, Arabidopsis thaliana
MGQVELNVELIPLAVGETYELRNDIVVRPFATHHVIPSQGYVIYSVRKKLQKQYAHLKGKQIEKIKKSGVEITDTILSPEIAFTGDTTSEYMLDPRNADALRAKVLITEATFLDESFSTEHAQALGHTHISQIIENAKWIRSKTVLLTHFSSRYHVEEIREAVLKLQSKVSAKVIPLTEGFRSRYS

SEQ ID NO: 10050 - DNA, 1699 bp, Arabidopsis thaliana
gaggtgaagtagatctctcttttctctttctctttctcctctctctctctttccttactcagcttttgtggtgaatattgaagaaagtttctctggtgaataagagtttgttcttatttttatgaatttgttctgttttcttgttgatagtttttgggtttgataaagttgtttcctttttacttcttttagtatctatctttccaattctagtaacttcactggttcttgagctctttcaactttttgtttcagatctctctgtgtttttttctgatctttctccagtgggagcttctgagttagtgattgtactttacttccatacttcttgttcttgctcatagattttagctgtggttttgtggagttttagctctcagtgattgttttagttttagttccttaaacatgttttgttcatatgggtttgttagatctttgagttttcttcatttctttattatctctcttggatcttgatacaaaagtatgaatctttagattgcttcaagaaaaaaagttttaaagactttaagagattcttagatacatagaatttgaagatcttgtattggtttttgtgaaacagatatttgttagatggaagaagattgcgagtttcgacattgggatgagttgattccagatgctcttggtttaatctttagccacttacctcttcaagaagtactaacagtggtgcctagagtttgcaaagcatggaacagagctgttactggaccttattgttggcaagagattgacattgagctgtggagtaaccgttttcaccagtctgatcatcttgaccggatgcttgagatgttgatccctagaagcgctggctctttgcgaaaactctccgttactggccttcgaaatgactctatcttctccttcattgcacaacatgctggttcacttaagaccttgaaggtgccaagaagtggtctgactaattcgggtgtggtaaacgtagctgaaaagctctcgtctctcactttcttggatttgagctactgctgcaaaataggcccagaggcgatacaagccataggaaaacactgtaaatcactgagagagttttgcagaaacatgcatccattggatgtagcaagtgttgtctctcacgacgatgaagcttatgctatcgccaatacaatgccgaagctgaagcggttagagatagcttaccaccgagtcagcacagaaggagtactcaagatcttatcgtgctgtgtttttcttgagttcttggaacttagaggctgttgggacgtgcaacttgataacaagtttttcaaagagaagtttccggatatgaaagtgttaggtccacgcgtgatcggattctatgatatgataaatgattgggaggattgctgctcagattacttctcagatgggtctgattacttggcttgggagttttttgaagatggtgtaatgggagagttctatgaggatgagtttgagcatggttgggacgataatttttatgcggaaaacgcagttttagacatggaaccgcatatttggccaccatctccatgaaccaggccttgttatgttcgaagtctctacctaaaagttgcaactaggaatggttttagcctctcttaagtgtcttaatctatgtatggtgcttgaacttgtgtggcttctttgtgttattctaatctaaaaggctttaatc

SEQ ID NO: 10051 - protein, 317 aa, Arabidopsis thaliana
MEEDCEFRHWDELIPDALGLIFSHLPLQEVLTVVPRVCKAWNRAVTGPYCWQEIDIELWSNRFHQSDHLDRMLEMLIPRSAGSLRKLSVTGLRNDSIFSFIAQHAGSLKTLKVPRSGLTNSGVVNVAEKLSSLTFLDLSYCCKIGPEAIQAIGKHCKSLREFCRNMHPLDVASVVSHDDEAYAIANTMPKLKRLEIAYHRVSTEGVLKILSCCVFLEFLELRGCWDVQLDNKFFKEKFPDMKVLGPRVIGFYDMINDWEDCCSDYFSDGSDYLAWEFFEDGVMGEFYEDEFEHGWDDNFYAENAVLDMEPHIWPPSP

SEQ ID NO: 10052 - protein, 246 aa, Arabidopsis thaliana
MLEMLIPRSAGSLRKLSVTGLRNDSIFSFIAQHAGSLKTLKVPRSGLTNSGVVNVAEKLSSLTFLDLSYCCKIGPEAIQAIGKHCKSLREFCRNMHPLDVASVVSHDDEAYAIANTMPKLKRLEIAYHRVSTEGVLKILSCCVFLEFLELRGCWDVQLDNKFFKEKFPDMKVLGPRVIGFYDMINDWEDCCSDYFSDGSDYLAWEFFEDGVMGEFYEDEFEHGWDDNFYAENAVLDMEPHIWPPSP

SEQ ID NO: 10053 - protein, 243 aa, Arabidopsis thaliana
MLIPRSAGSLRKLSVTGLRNDSIFSFIAQHAGSLKTLKVPRSGLTNSGVVNVAEKLSSLTFLDLSYCCKIGPEAIQAIGKHCKSLREFCRNMHPLDVASVVSHDDEAYAIANTMPKLKRLEIAYHRVSTEGVLKILSCCVFLEFLELRGCWDVQLDNKFFKEKFPDMKVLGPRVIGFYDMINDWEDCCSDYFSDGSDYLAWEFFEDGVMGEFYEDEFEHGWDDNFYAENAVLDMEPHIWPPSP

SEQ ID NO: 10054 - DNA, 1750 bp, Arabidopsis thaliana
attttgatttcttcctctcttctctctagaaacatctttcatgcgttatcttctccaaaagctctgattctgattctgaatcatcctgaaaaaaaacctagaaaaatttatatcccacaaaatcttctaagatccatggccgtaattatccctcgttcagatccaccttcacgaatccatccggaaccaccacaaaccctagaaatcgaccatttcgatcatcttcctgactcaatcctcctcctcgttttcaacaaaatcggcgacgtcaaagctctcggaagatgctgtgtcgtttccagaagattccattctctcgttcctcaagtcgataacgtcgttgttcgtgtcgattgcgtaatctccgacgacgattcgtcatctttgtcatctatcaaatctcgctccggttcttccgctggttcgttctcggctatatttcgtcttgttgttggtggcattgttaagccgttacaagctttaggtcaattccttggtacgaagagatcatcatcatcatgtggtggttctggatcttcttcttcttcgttgtctattagtggagatgatgatggtggagagatcgaacaaggcggtgttacgcatcattcacctactcaggttttgaaaaacttcgatgagattcgttacttaagaattgagcttcctagtggtgaattagggattgatgatggagttttgttgaaatggagagctgaatttggttctactcttgataattgtgtgattctcggtgcttcttcagtgattccaccaaatccaatgagagtttctcaagcttgtgatactactacagtcgttgaagctcccggttctggctccgatgataatgggagtataccggaatcgttttacacaaacggaggtttgaaattgcgtgttgtatggacgattagctctttgattgctgcatcagcacgacattacttgttacaaccgataatcgcggagcataagacgcttgatagtttagtgctcactgattcagatgggcaaggtgtgctctgtatgaacagagatcagctagaagagcttagggtgaaaccattagcagcttcatcggcttcgaagaggacacttgtgcctgctctgaatatgagactatggtatgctccaaccttggaattgcctgatggaactgtgttaaaaggtgcgactttggttgcgataagaccgagtgaatcgaaaaaggaagtgtctgatatctcttgggtgtcttcggcttttgaggagccttatgagacggctgctaagatgctggttaaaagaaggacttactgtcttgaaatgaactcgttctagcttgaatggtttcagtcggaatctgagagaactggcaaccctgtggcgaattcaggaaattacaattaaaagcatataatggggagaagcagagaatgaaataaaatcgaagttttgatgaatcaagaaacaagttttgctgcctactactactgcatctgctagctagttttttcattgaagcatatgcctttgcaggatctcgcaatcatatataatatatatcaacaaattacagatatcatgtaagagtttttcttttcttttttctgtctttttcttctcctttgcttgctcttctctatttatgtgaatattgtaggtattgcttattcccctgtcattatacaagttatttaagattgtagttaaaaaaaaaaaaaaaaaaaaaaaaaactcgagggggggcccggtacccaattcgctg

SEQ ID NO: 10055 - protein, 440 aa, Arabidopsis thaliana
ILISSSLLSRNIFHALSSPKALILILNHPEKKPRKIYIPQNLLRSMAVIIPRSDPPSRIHPEPPQTLEIDHFDHLPDSILLLVFNKIGDVKALGRCCVVSRRFHSLVPQVDNVVVRVDCVISDDDSSSLSSIKSRSGSSAGSFSAIFRLVVGGIVKPLQALGQFLGTKRSSSSCGGSGSSSSSLSISGDDDGGEIEQGGVTHHSPTQVLKNFDEIRYLRIELPSGELGIDDGVLLKWRAEFGSTLDNCVILGASSVIPPNPMRVSQACDTTTVVEAPGSGSDDNGSIPESFYTNGGLKLRVVWTISSLIAASARHYLLQPIIAEHKTLDSLVLTDSDGQGVLCMNRDQLEELRVKPLAASSASKRTLVPALNMRLWYAPTLELPDGTVLKGATLVAIRPSESKKEVSDISWVSSAFEEPYETAAKMLVKRRTYCLEMNSF

SEQ ID NO: 10056 - protein, 395 aa, Arabidopsis thaliana
MAVIIPRSDPPSRIHPEPPQTLEIDHFDHLPDSILLLVFNKIGDVKALGRCCVVSRRFHSLVPQVDNVVVRVDCVISDDDSSSLSSIKSRSGSSAGSFSAIFRLVVGGIVKPLQALGQFLGTKRSSSSCGGSGSSSSSLSISGDDDGGEIEQGGVTHHSPTQVLKNFDEIRYLRIELPSGELGIDDGVLLKWRAEFGSTLDNCVILGASSVIPPNPMRVSQACDTTTVVEAPGSGSDDNGSIPESFYTNGGLKLRVVWTISSLIAASARHYLLQPIIAEHKTLDSLVLTDSDGQGVLCMNRDQLEELRVKPLAASSASKRTLVPALNMRLWYAPTLELPDGTVLKGATLVAIRPSESKKEVSDISWVSSAFEEPYETAAKMLVKRRTYCLEMNSF

SEQ ID NO: 10057 - DNA, 1296 bp, Arabidopsis thaliana
gaaattctaaagtttcgatttttttggagtatcaagttcgattgattcttctcaatgtcgggtcccctagatcgattcacaagcccatgtttctccaacaatggtgagaaaagagaaaagaagtcagatttcgaagtttcggaggatgagaagaaaactagaattggtggaatttttaagaagaaatcatccaaaagcaaattcagacattccctgaagaggagagggagcagaagcattgaccggactctttcgcttacctttgaagacatacatgatgctgaagaattaagatatgtctctgaattccgacaatcacttatctctgatcatttactgcctccaaaccttgatgattatcacatcatgttgagattcctcttcgctaggaaatttgatctaggaaaagcaaagttaatgtggactaacatgatccaatggagaagggattttggcacagacacaatcttggaggactttgagtttcctgagttggatgaggttctcaggtactaccctcagggatatcatggtgttgataaggaaggaagacctgtttacaccgaaagattaggaaaagtcgacgcaagcaaactcatgcaagtcactacattggaaaggtacctgaggtatcatgttaaagagtttgagaagactatcactgtcaagtttcctgcttgctgcattgctgctaagagacacattgactccagtacaacaatcctagatgtccaaggcctgggcttgaaaaatttcactaaaactgctcgggatcttataatccagttgcaaaagattgatagtgataactaccctgagacacttcaccgtatgtttatcatcaatgccggttctggttttaagctactttggggcacggtgaaatcgtttcttgatccaaagactgtctccaaaatacatgtccttgggaacaagtaccagaacaaattacttgagatgattgatgcaagccagctgccagattttttcggtggtacttgcacttgtgcagatcagggaggttgtatgagatctgataaagggccctggaaagactctgagatactaaagatgggccgcagtggtgggacgttctgtaggcatgctggtgctttcctaagcagtgattcccaaatatcttcatcggataagccaacttattcgttgaaagttagtgacacctcaacagcagagtcagggtctgaattggaagagatggcttcaccgaaaacaaatacgaacaatcatgtacccaagttaactcctgtttctgaatatatcaaggccaatggtagt

SEQ ID NO: 10058 - protein, 414 aa, Arabidopsis thaliana
MSGPLDRFTSPCFSNNGEKREKKSDFEVSEDEKKTRIGGIFKKKSSKSKFRHSLKRRGSRSIDRTLSLTFEDIHDAEELRYVSEFRQSLISDHLLPPNLDDYHIMLRFLFARKFDLGKAKLMWTNMIQWRRDFGTDTILEDFEFPELDEVLRYYPQGYHGVDKEGRPVYTERLGKVDASKLMQVTTLERYLRYHVKEFEKTITVKFPACCIAAKRHIDSSTTILDVQGLGLKNFTKTARDLIIQLQKIDSDNYPETLHRMFIINAGSGFKLLWGTVKSFLDPKTVSKIHVLGNKYQNKLLEMIDASQLPDFFGGTCTCADQGGCMRSDKGPWKDSEILKMGRSGGTFCRHAGAFLSSDSQISSSDKPTYSLKVSDTSTAESGSELEEMASPKTNTNNHVPKLTPVSEYIKANGS

SEQ ID NO: 10059 - protein, 310 aa, Arabidopsis thaliana
MLRFLFARKFDLGKAKLMWTNMIQWRRDFGTDTILEDFEFPELDEVLRYYPQGYHGVDKEGRPVYTERLGKVDASKLMQVTTLERYLRYHVKEFEKTITVKFPACCIAAKRHIDSSTTILDVQGLGLKNFTKTARDLIIQLQKIDSDNYPETLHRMFIINAGSGFKLLWGTVKSFLDPKTVSKIHVLGNKYQNKLLEMIDASQLPDFFGGTCTCADQGGCMRSDKGPWKDSEILKMGRSGGTFCRHAGAFLSSDSQISSSDKPTYSLKVSDTSTAESGSELEEMASPKTNTNNHVPKLTPVSEYIKANGS

SEQ ID NO: 10060 - protein, 293 aa, Arabidopsis thaliana
MWTNMIQWRRDFGTDTILEDFEFPELDEVLRYYPQGYHGVDKEGRPVYTERLGKVDASKLMQVTTLERYLRYHVKEFEKTITVKFPACCIAAKRHIDSSTTILDVQGLGLKNFTKTARDLIIQLQKIDSDNYPETLHRMFIINAGSGFKLLWGTVKSFLDPKTVSKIHVLGNKYQNKLLEMIDASQLPDFFGGTCTCADQGGCMRSDKGPWKDSEILKMGRSGGTFCRHAGAFLSSDSQISSSDKPTYSLKVSDTSTAESGSELEEMASPKTNTNNHVPKLTPVSEYIKANGS

SEQ ID NO: 10061 - DNA, 1844 bp, Arabidopsis thaliana
aaaaaaaaccctagactgagtctggttacttgagggggatcatgtgaatacgtcgactggtaaagaaagaaagattgctgctttttagatttagattcgagaatgtatggaagatctggtcttgacaggtttaagaagtcccaaacttcggaacccttctctgtatcagcaaatcctcctccggtggtacaacaacatctgtctccggaggcattgtcggggcaaaaaactcagattggagctgggcaatcaaactggcatccccctgattgggcgattgagcctcgtgccggtgtctactctctggaagttgtgaaagacggccagatccttgatcggattcatctagatagacgaaggcacatcttcgggagacaacatcagacttgtgattttgtgcttgatcatcagtctgtttcccgccagcatgccgccgttgttcctcacaagaatggcagcatctttgtgattgacttgggatcagctcatggtacgtttgttgcaaatgagaggttgactaaagatactcctgtagagcttgaagtgggtcaatccttacgatttgctgcctccacaagaatctaccttctgagaaagaacagtgaggctctcttttctcgccctccacctccagctgagattaagcttcctccacctcctgatgcttctgatgaggaagctgttgttgcttacaataccttgctgaatcgatatggtttaagcaatggagaatctggtggtatgttagggaaaaggaaagagaagaccggatcagaagcgggagtggctaagaggatgaagaaagtgagagtgagcttcagggatcaactaggaggagagctggctgagattgttggcatgtctgatggagcagacgtggaaacagagcctggtcctataaatgtcaaagaaggaagcctcgttgggaaatatgaatcactggtgcaagtgacactcatacccaaaggcaaagtgaaggaagagaaagcctttacaggaggaacaagaggaggtgtgacagatcgactccaggaagctatgaatatgttgaaacggggtccaaaaacagggatttacgatgacctttacggtggtgactcacttgccaaggctgttggtacgtcatgggcttctgtgagtcaaccagcagctgaaactgaatgcggaggggttggtgaagaagatgataacgacgatctgtttggtgactagctgattttgaacactgagattcctttaagtaactcttcttcttctctagtgcctacattccattccaaggcatgggtgtgttgtttcctctttgtctatccaatggctgcagcaagaaaagagagcagctctaagcccaggcccattgtcttgtgtaataagtaagaaccctgaaatttgatatgagcctgagcctggtcagtggtcattctagttgtgggtcttaacaggagatacatcacatagatagtcattacaaattagtgtggagagtagagagtagggccaatgcaaatggagtgcatttgattagaccactactgacttacagattctctcctcaaggcagaccaattccatcagaagaggacatttgtactcaaatacctctcctctcattctttttcacttttgcctttttgcattattaaaacagcacactaatgatgtgggttgacttccctctcccccacaaaaacagagattccatggggggaaatggacaacaagtaaaacacttgtaaaaatggtaatctgcctctgatgctttaagatatgatttggggatcaaaaaaaaaaaaaaagaaaaaaaaaaaaaaaaaactcgagggggggcccggtacccaattcgc

SEQ ID NO: 10062 - protein, 369 aa, Arabidopsis thaliana
MYGRSGLDRFKKSQTSEPFSVSANPPPVVQQHLSPEALSGQKTQIGAGQSNWHPPDWAIEPRAGVYSLEVVKDGQILDRIHLDRRRHIFGRQHQTCDFVLDHQSVSRQHAAVVPHKNGSIFVIDLGSAHGTFVANERLTKDTPVELEVGQSLRFAASTRIYLLRKNSEALFSRPPPPAEIKLPPPPDASDEEAVVAYNTLLNRYGLSNGESGGMLGKRKEKTGSEAGVAKRMKKVRVSFRDQLGGELAEIVGMSDGADVETEPGPINVKEGSLVGKYESLVQVTLIPKGKVKEEKAFTGGTRGGVTDRLQEAMNMLKRGPKTGIYDDLYGGDSLAKAVGTSWASVSQPAAETECGGVGEEDDNDDLFGD

SEQ ID NO: 10063 - DNA, 674 bp, Arabidopsis thaliana
gatccaaaaaaaacaaaacaaaaaattatattcaagagaaaaaggaaaaaatgaatttcatctccgatcaggtaaagaaactctcaagctcaacaccagaggagccagaccacaacaagccagtcgaaggaaccgaaacagctacaagaccagctaccaacgccgagctcatggcaagtgccaaggttgtagctgaagctgctcaagccgcagctcgtaacgaatcagacaaactcgacaagggtaaagtcgccggagcctctgctgatatcttagacgctgccgagaaatacggtaagttcgatgaaaagagtagcactggtcagtacctcgacaaggctgagaagtatctcaacgactacgagtcgtcacactccaccggtgctggtggtcctcctcctccgacgagtcaggctgagccagcaagtcagcctgagccggcggctaagaaagacgatgaagagtctggtggtgggcttggaggttatgccaagatggctcaaggtttcttgaagtgatttgatctttaattgttgttcatcattttcgtaataataaattaaataactagtatcgtttgtgactagtttatgttgcttcgtttatgtttatggggagtgacgagtgagtgtaataacttctggtgatcatgaatctaatccatctttgttgtg

SEQ ID NO: 10064 - protein, 171 aa, Arabidopsis thaliana
SKKNKTKNYIQEKKEKMNFISDQVKKLSSSTPEEPDHNKPVEGTETATRPATNAELMASAKVVAEAAQAAARNESDKLDKGKVAGASADILDAAEKYGKFDEKSSTGQYLDKAEKYLNDYESSHSTGAGGPPPPTSQAEPASQPEPAAKKDDEESGGGLGGYAKMAQGFLK

SEQ ID NO: 10065 - protein, 155 aa, Arabidopsis thaliana; identical to SEQ ID NO: 4669

SEQ ID NO: 10066 - protein, 115 aa, Arabidopsis thaliana; identical to SEQ ID NO: 4670

SEQ ID NO: 10067 - DNA, 923 bp, Arabidopsis thaliana
agctcactagtcccccccccccccccgtccttcactctcatcattctttcttctttcaaaacatttccacaaacacaccaaactcacctgaaaccctatttccatttaccattcacactaatggcacgaccacaacaacgctttcgaggcgttagacagaggcattggggctcttgggtctccgaaattcgtcaccctctcttgaaaacaagaatctggctagggacgtttgagacagcggaggatgcagcaagggcctacgacgaggcggctaggctaatgtgtggcccgagagctcgtactaatttcccatacaaccctaatgccattcctacttcctcttccaagcttctatcagcaactcttaccgctaaactccacaaatgctacatggcttctcttcaaatgaccaagcaaacgcaaacacaaacgcaaacgcagaccgcaagatcacaatccgcggacagtgacggtgtgacggctaacgaaagtcatttgaacagaggagtaacggagacgacagagatcaagtgggaagatggaaatgcgaatatgcaacagaattttaggccattggaggaagatcatatcgagcaaatgattgaggagctgcttcactacggttccattgagctttgctctgttttaccaactcagacgctgtgagaaatggccttgtcgttttagcgtattcttttcatttttatttttgtttccacaaaaacggcgtcgtaagtgatgagagtagtagtgagagaaggctaatttcaagacattttgatctgaattggcctcttttgaaacactgattctagtttctataagagcaatcgatcatatgctatgttatgtatagtattataaaaaaatgttattttctgattaaaaaaaaaaaaaaaaaaactcgagggggggcccggttg

SEQ ID NO: 10068 - protein, 221 aa, Arabidopsis thaliana
SSLVPPPPPSFTLIILSSFKTFPQTHQTHLKPYFHLPFTLMARPQQRFRGVRQRHWGSWVSEIRHPLLKTRIWLGTFETAEDAARAYDEAARLMCGPRARTNFPYNPNAIPTSSSKLLSATLTAKLHKCYMASLQMTKQTQTQTQTQTARSQSADSDGVTANESHLNRGVTETTEIKWEDGNANMQQNFRPLEEDHIEQMIEELLHYGSIELCSVLPTQTL

SEQ ID NO: 10069 - protein, 181 aa, Arabidopsis thaliana
MARPQQRFRGVRQRHWGSWVSEIRHPLLKTRIWLGTFETAEDAARAYDEAARLMCGPRARTNFPYNPNAIPTSSSKLLSATLTAKLHKCYMASLQMTKQTQTQTQTQTARSQSADSDGVTANESHLNRGVTETTEIKWEDGNANMQQNFRPLEEDHIEQMIEELLHYGSIELCSVLPTQTL

SEQ ID NO: 10070 - protein, 128 aa, Arabidopsis thaliana
MCGPRARTNFPYNPNAIPTSSSKLLSATLTAKLHKCYMASLQMTKQTQTQTQTQTARSQSADSDGVTANESHLNRGVTETTEIKWEDGNANMQQNFRPLEEDHIEQMIEELLHYGSIELCSVLPTQTL

SEQ ID NO: 10071 - DNA, 1114 bp, Arabidopsis thaliana
aaaacaaacgcaggaggcctggaaaaaagaaagataacgggactcgagagattgagattacggagccacccactttcatggagtctacactctcagctttctcaaccgtcaaggcaacagcgatggctcgaagtagtggtggtccttcattacctctcctcactatttctaaagcacttaaccgccactttaccggcgccagacacctccatcctttattgctcgctcgctgttctccctccgtgcgacgtcttggtgggtttcatggcagtcgatttacttcgtcgaattcagctttgagaagcttgggagctgctgttttgccggtaatccgacaccgtttagagtgtttgtcgagctcatcgccgtctttcaggagtatctcaagtggcggcggttctggatttggggggtataatggtggaagcggcggtggtggtggcggaggatcggagagtggtgattccaagtcaaaactgggtgctaatgcaagtgatggtgtctctgttccgtcgtcagatatcattattctcgatgttggagggatgacatgtggagggtgttcagcaagtgtgaagaagatactggaaagccaacctcaagttgcttcagctagtgttaatctcaccaccgagacggcaattgtgtggcctgtaccggaagctaaaagtgtacctgattggcaaaagagtttaggcgagacgcttgcaaaccatctgaccaattgcgggtttcagtctactcctcgaggggaagttcctgaagatattgcaggagagtttgcaccttgatagtacaaaagatttttccagcagcaatcattattgatatgatgattaagagcagctgctcatggcgaatggattgtaaacctaaatttctggtgctagtagttccatttatgttgattttgttgtcagtccttgtgatctaagggcgtgtatttatcttctgttgtcgattgctgacataccttctccgaaccagacagcataactctgtagtgatgatcttgttctattatggtcgattttccaaaagaatacattgaaagctataaaattccatattaaagaaaaaaaaaaaaaaaaaaactcgagggggggcccggtac

SEQ ID NO: 10072 - protein, 262 aa, Arabidopsis thaliana
NKRRRPGKKKDNGTREIEITEPPTFMESTLSAFSTVKATAMARSSGGPSLPLLTISKALNRHFTGARHLHPLLLARCSPSVRRLGGFHGSRFTSSNSALRSLGAAVLPVIRHRLECLSSSSPSFRSISSGGGSGFGGYNGGSGGGGGGGSESGDSKSKLGANASDGVSVPSSDIIILDVGGMTCGGCSASVKKILESQPQVASASVNLTTETAIVWPVPEAKSVPDWQKSLGETLANHLTNCGFQSTPRGEVPEDIAGEFAP

SEQ ID NO: 10073 - protein, 237 aa, Arabidopsis thaliana
MESTLSAFSTVKATAMARSSGGPSLPLLTISKALNRHFTGARHLHPLLLARCSPSVRRLGGFHGSRFTSSNSALRSLGAAVLPVIRHRLECLSSSSPSFRSISSGGGSGFGGYNGGSGGGGGGGSESGDSKSKLGANASDGVSVPSSDIIILDVGGMTCGGCSASVKKILESQPQVASASVNLTTETAIVWPVPEAKSVPDWQKSLGETLANHLTNCGFQSTPRGEVPEDIAGEFAP

SEQ ID NO: 10074 - protein, 222 aa, Arabidopsis thaliana
MARSSGGPSLPLLTISKALNRHFTGARHLHPLLLARCSPSVRRLGGFHGSRFTSSNSALRSLGAAVLPVIRHRLECLSSSSPSFRSISSGGGSGFGGYNGGSGGGGGGGSESGDSKSKLGANASDGVSVPSSDIIILDVGGMTCGGCSASVKKILESQPQVASASVNLTTETAIVWPVPEAKSVPDWQKSLGETLANHLTNCGFQSTPRGEVPEDIAGEFAP

SEQ ID NO: 10075 - DNA, 1712 bp, Arabidopsis thaliana
ttttttttgactctcttcttcttcatcttcttcttcttcttcttcttcttcttcttcttcttcttcttcttcttcttcttcttcttcatattttccctatgatttggatctctaaaatcttcaatccccatgttctaatttaaaaaatcacaacactctctttatcatataccctattataaaccaaactttgatcctcgaatatattttattaaaaagataatattcgtgtttctcatgttggagtcataataaagaaacctttgtgttttaatttaatcccctccaagaaacctgaagattctaagaagctgccattaaaactaataaaggaagagagtccaaagaagaagaagaagaagagaaaatgtcacgtcttgacgacataccttcaagcccaggcaaattcaagatggagaaatcttcctacttgcatcgtctcagattccaatcttctctcacaaagtttgcatttttctccttcttcctcctctgtctcatctctctactcttcctccgatctccaccgtccattaacccttcttcaccgtccgatccatctcgccgttcactccgaaccaacacctacggaggaccagcttgggaaaaacgtctcagatcctcagctcgaatccgaacctcaacaaacaacggaatcacagttttagtaaccggagcagctggtttcgtcggaacacacgtctccgccgcattaaaacgccgcggagacggcgtaatcggcctcgacaacttcaacgattactacgatccatctctgaaacgagcaagacgagctttactcgagagaagtgggatcttcatcgtagaaggagacataaacgacgtcgaattactccgtaagctattcaagatcgtctccttcacacacgttatgcatttagcagctcaagctggtgtacggtacgcaatggaaaaccctagctcgtacgttcatagcaacatcgccggattcgtcaatctcctcgagatctgcaaatctgtgaatccacaacctgctatagtctgggcttcgtctagctccgtctacggactcaacaccaaagttccgttctcggagaaagataaaacagatcaaccggcgagtttatacgccgccactaaaaaagccggcgaagagatcgcacatacctacaaccacatctatggattatctctaaccggattaagatttttcaccgtgtatggaccttggggaagaccagacatggcgtatttcttcttcactaaagatattctaaaaggcaaatcgatttcgatattcgaatcggcgaatcacggaacggtggctagggatttcacttacatagacgatatagtgaagggatgtttagcggcgctagatacggcggagaagagtacagggagtggagggaagaagagaggtccggcgcaattgagagtgtttaacctcggaaacacgtcgccggtgccggtttcagatctggtgaggatattggagagacaattgaaagtgaaggcgaagaagaatttgattaagatgccacgaaacggtgacgttccgtttactcatgctaatattagtttagctcaacgtgagcttggttataaaccgactacggatttgcaaaccggtttgaagaagtttgtcagatggtatttgagttattactccggcgacaaaaaagccgccgctagatgatctttttttctggttgatgatgatcttttga

SEQ ID NO: 10076 - protein, 437 aa, Arabidopsis thaliana
MSRLDDIPSSPGKFKMEKSSYLHRLRFQSSLTKFAFFSFFLLCLISLLFLRSPPSINPSSPSDPSRRSLRTNTYGGPAWEKRLRSSARIRTSTNNGITVLVTGAAGFVGTHVSAALKRRGDGVIGLDNFNDYYDPSLKRARRALLERSGIFIVEGDINDVELLRKLFKIVSFTHVMHLAAQAGVRYAMENPSSYVHSNIAGFVNLLEICKSVNPQPAIVWASSSSVYGLNTKVPFSEKDKTDQPASLYAATKKAGEEIAHTYNHIYGLSLTGLRFFTVYGPWGRPDMAYFFFTKDILKGKSISIFESANHGTVARDFTYIDDIVKGCLAALDTAEKSTGSGGKKRGPAQLRVFNLGNTSPVPVSDLVRILERQLKVKAKKNLIKMPRNGDVPFTHANISLAQRELGYKPTTDLQTGLKKFVRWYLSYYSGDKKAAAR

SEQ ID NO: 10077 - protein, 422 aa, Arabidopsis thaliana
MEKSSYLHRLRFQSSLTKFAFFSFFLLCLISLLFLRSPPSINPSSPSDPSRRSLRTNTYGGPAWEKRLRSSARIRTSTNNGITVLVTGAAGFVGTHVSAALKRRGDGVIGLDNFNDYYDPSLKRARRALLERSGIFIVEGDINDVELLRKLFKIVSFTHVMHLAAQAGVRYAMENPSSYVHSNIAGFVNLLEICKSVNPQPAIVWASSSSVYGLNTKVPFSEKDKTDQPASLYAATKKAGEEIAHTYNHIYGLSLTGLRFFTVYGPWGRPDMAYFFFTKDILKGKSISIFESANHGTVARDFTYIDDIVKGCLAALDTAEKSTGSGGKKRGPAQLRVFNLGNTSPVPVSDLVRILERQLKVKAKKNLIKMPRNGDVPFTHANISLAQRELGYKPTTDLQTGLKKFVRWYLSYYSGDKKAAAR

SEQ ID NO: 10078 - protein, 262 aa, Arabidopsis thaliana
MHLAAQAGVRYAMENPSSYVHSNIAGFVNLLEICKSVNPQPAIVWASSSSVYGLNTKVPFSEKDKTDQPASLYAATKKAGEEIAHTYNHIYGLSLTGLRFFTVYGPWGRPDMAYFFFTKDILKGKSISIFESANHGTVARDFTYIDDIVKGCLAALDTAEKSTGSGGKKRGPAQLRVFNLGNTSPVPVSDLVRILERQLKVKAKKNLIKMPRNGDVPFTHANISLAQRELGYKPTTDLQTGLKKFVRWYLSYYSGDKKAAAR

SEQ ID NO: 10079 - DNA, 752 bp, Arabidopsis thaliana
aaatctaaaagtcgtcaaaaatggctctccgatctgtcaaaacgccgaccttgataactccggtcgccgtcgtctcctcctccgttaccaacaagcctcactctatcagattctctcttaaaccaacgtcggcactcgtcgtccataaccatcagctatcgttctacggttcgaatctcaagctgaaaccaactaaattccgatgctcagcgtcggctcttacgccgcaacttaaagacacgctggagaaactggtgaattcggagaaagtggttctgtttatgaaaggaacgagagacttcccgatgtgtggattctccaacactgtggttcagattttgaagaatctgaatgttcctttcgaagatgtgaatattctggagaatgagatgttgaggcaaggacttaaagagtattcgaattggccgacgtttcctcagctttatatcggcggtgagtttttcggtggttgtgatattactcttgaggcgtttaagactggagaattgcaggaagaggtggagaaagctatgtgctcttgatcctgatttcaatacttggtttttgtgatgatggaatttgatcttatctatctatctatcacctgggaaaaaaaatgtgattttgatgtttcagagtttgtggttgtaacattaagagacatatattgtatgatggatttaggtatacaacagttggagttgcttggaaaaaaaaaaaaaaaaaaaaaaaaactcgagggggggcccggt

SEQ ID NO: 10080 - protein, 173 aa, Arabidopsis thaliana
MALRSVKTPTLITPVAVVSSSVTNKPHSIRFSLKPTSALVVHNHQLSFYGSNLKLKPTKFRCSASALTPQLKDTLEKLVNSEKVVLFMKGTRDFPMCGFSNTVVQILKNLNVPFEDVNILENEMLRQGLKEYSNWPTFPQLYIGGEFFGGCDITLEAFKTGELQEEVEKAMCS

SEQ ID NO: 10081 - protein, 86 aa, Arabidopsis thaliana
MKGTRDFPMCGFSNTVVQILKNLNVPFEDVNILENEMLRQGLKEYSNWPTFPQLYIGGEFFGGCDITLEAFKTGELQEEVEKAMCS

SEQ ID NO: 10082 - DNA, 1301 bp, Arabidopsis thaliana
aagtccctttgaagtgggaatgatactcgcgtgacgaccaaactccatcgagcctctctctctctctctctgtgatcagtttaatctactgaaagaaagaaagaaagaaagaaagatccgtattattaggcttcgaagctgtctcaagattgttgtttaattaaacatgttcagaagaaggaatgctcaccaactcgacaatgatgattctcaacaagataacaaggttagagaattgaaatccgcgataggaccattatcgggacatagtttagttttctgctctgatgcttccttgaggagatttctagatgctcgtaattgggatgtggagaaagccaagaaaatgatccaagagactcttaaatggagatcaacttataaacctcaagagatccgttggaatcaagtagcacatgaaggtgagaccggaaaagcttcaagagctagttttcatgatcgacaaggtagagtagtgcttataatgagaccagccatgcagaactcaacatctcaagaaggtaatatcaggcatttggtgtatcttcttgaaaatgcaatcataaatcttcccaagggacaaaaacaaatgtcttggctcattgatttcactggttggtctatggctgttaatcctcctatgaaaacaacacgcgaaatcattcacattctacagaactattaccctgagagactcggtatcgcctttctctacaatccaccaagactcttccaagcagtctacagggctgctaagtacttcttggacccacgtacagctgaaaaggtgaaatttgtgtacccaaaagacaaagcaagtgatgaactgatgacgacacattttgacgttgagaatctccccaaggaattcggaggtgaagcaacactagagtatgatcatgaagatttctcacgacaaatgtatgaagacgatctcaaaaccgcaaaatactggggactagaggggaagcactatccgaaaacaaacggtttctctccatccgatgttgttcctgagccggcgatagaaatcgcatcagcagctagctgagagttgaacgatatatacacacaagagcaagaagagaagaagaataaaagggttattctcattcatagaagaaagccaatagaatgtgctggttaacttgatgatcaataaagtttcaaatagtctttgcctctttttcttattagtgagccaaacactttgtaacgttttaaattagcagagactatcctgtatgtgtgagagaatattgttaccatgtgtaatactactagttttgtgttattagtcg

SEQ ID NO: 10083 - protein, 294 aa, Arabidopsis thaliana
MFRRRNAHQLDNDDSQQDNKVRELKSAIGPLSGHSLVFCSDASLRRFLDARNWDVEKAKKMIQETLKWRSTYKPQEIRWNQVAHEGETGKASRASFHDRQGRVVLIMRPAMQNSTSQEGNIRHLVYLLENAIINLPKGQKQMSWLIDFTGWSMAVNPPMKTTREIIHILQNYYPERLGIAFLYNPPRLFQAVYRAAKYFLDPRTAEKVKFVYPKDKASDELMTTHFDVENLPKEFGGEATLEYDHEDFSRQMYEDDLKTAKYWGLEGKHYPKTNGFSPSDVVPEPAIEIASAAS

SEQ ID NO: 10084 - protein, 234 aa, Arabidopsis thaliana
MIQETLKWRSTYKPQEIRWNQVAHEGETGKASRASFHDRQGRVVLIMRPAMQNSTSQEGNIRHLVYLLENAIINLPKGQKQMSWLIDFTGWSMAVNPPMKTTREIIHILQNYYPERLGIAFLYNPPRLFQAVYRAAKYFLDPRTAEKVKFVYPKDKASDELMTTHFDVENLPKEFGGEATLEYDHEDFSRQMYEDDLKTAKYWGLEGKHYPKTNGFSPSDVVPEPAIEIASAAS

SEQ ID NO: 10085 - protein, 188 aa, Arabidopsis thaliana
MRPAMQNSTSQEGNIRHLVYLLENAIINLPKGQKQMSWLIDFTGWSMAVNPPMKTTREIIHILQNYYPERLGIAFLYNPPRLFQAVYRAAKYFLDPRTAEKVKFVYPKDKASDELMTTHFDVENLPKEFGGEATLEYDHEDFSRQMYEDDLKTAKYWGLEGKHYPKTNGFSPSDVVPEPAIEIASAAS

SEQ ID NO: 10086 - DNA, 909 bp, Arabidopsis thaliana
gtcaattattcgaattgggaaaacatctaaagctgaggagaagataaatccgatctaggtctcttcttccccaatctctctgtgtctctctcgatcgaagaaagaagacaatggacaaaggcaaagcagtgatgggtactggtcggagatgggccgtcgaattctccgatcaatctactgttccatcttcccgtgacatcctcgatccacctggcttctctcgtgcctctcaggaacaggatgattcagcaaacagccgccaaaagaaagacgctgaagctacttggaaacttcagaaagcgtgggaagtagcgcaatctccatttaagaatttgatgatgatgggtttcatgatgtggatggctggaaacacagttcatctttttagtattggtattactttctctgctctttggcagcctatcagtgctcttcagagtgttggaaagatttttgagccattcaaggataacaaagtggaactacttatgccgaaattagtgttccttgccctaaaccttggagggctagctttgggtgtctggaagcttaacactttggggcttcttccaacacatgcatcagattgggtttcatctctaccccctcctcaggaagttgaacactcgggcggaggatttgttttccactgatgaatcagcgtctcttgtattttaaaataatccgctaaaaccgcgcgacgacgacaacacttttgtgagataactgcaacagttacttaagtgatatgaacctccctcatcttatgatattcttgtagcattttcaaaactcagaaaccatagtttttacactttttagtatgatgctcattgttcatcataactatgaatgtattattggcactgaaaaaaaaaaaaaaaaaaaactcgagggggggcccggtac

SEQ ID NO: 10087 - protein, 180 aa, Arabidopsis thaliana
MDKGKAVMGTGRRWAVEFSDQSTVPSSRDILDPPGFSRASQEQDDSANSRQKKDAEATWKLQKAWEVAQSPFKNLMMMGFMMWMAGNTVHLFSIGITFSALWQPISALQSVGKIFEPFKDNKVELLMPKLVFLALNLGGLALGVWKLNTLGLLPTHASDWVSSLPPPQEVEHSGGGFVFH

SEQ ID NO: 10088 - protein, 173 aa, Arabidopsis thaliana
MGTGRRWAVEFSDQSTVPSSRDILDPPGFSRASQEQDDSANSRQKKDAEATWKLQKAWEVAQSPFKNLMMMGFMMWMAGNTVHLFSIGITFSALWQPISALQSVGKIFEPFKDNKVELLMPKLVFLALNLGGLALGVWKLNTLGLLPTHASDWVSSLPPPQEVEHSGGGFVFH

SEQ ID NO: 10089 - protein, 105 aa, Arabidopsis thaliana
MMMGFMMWMAGNTVHLFSIGITFSALWQPISALQSVGKIFEPFKDNKVELLMPKLVFLALNLGGLALGVWKLNTLGLLPTHASDWVSSLPPPQEVEHSGGGFVFH

SEQ ID NO: 10090 - DNA, 1836 bp, Arabidopsis thaliana
cagagagctcactagtccccccccccccccccgaaagaaaacttcgtcttcccaaggaagtcaagaataaaagaaccaaaaagttagttgagcaaagagagaagagagaagcaaagagaaacacctgggtttcggaaatcgatggataggcttgaaggaccaccacggctcatactagttgctgatctcgattgcacattggttgatcacgatgatcctgaaaacaatgatcttcttagattcaatgcgctatgggaagctcattatcgccatgattcattgcttgtttactgcaccgggaggtctttcagttcttacatgagtctaagaaagaagagaccgttgttgactcctgacatcgccgtaacttctgtgggttctgagattgtatacggcggcggtgaatcaacggtgtctgatgttgtttggactgctcgtttggattataagtggaatagagacattgttgttgaggaaactcttaaattccctaaacttgagcctcagccagacaagagccaagaagagcacaaagtgagttttttcgtgggaagagaagacgctgttgaaataatgaaggttcttccagggatattagaggagcgtggggtggatgtgaagctggtttatagcaacggatatgctttcgatgtattaccaagaggagctggcaaacaaggtgctttgacatatctacttgacaagttggatattgaaggcaagcagccttctaacacacttgtttgtggtgactctggaaatgatgctgagcttttcaacatttctgacgtatatggcgtaatggttagcaattcgcatgaagaattattgcaatggtatgaagaaaatgcaaaggacaacccaaaaatatttcatgcgtctgagaggtgtggagctggtatgatagaagctattcagaggtttaatttgggaccaaatgtctctcctagagatgttatggacactgaaaatttccatggggaaagtttgaatcctgctcatgaggttgttcagttttatttgttttatgagagatggcgttgtggagaggtggaaaagtctgacaagtacttgcagaatttgaaatcgctctctagtccacttggtatttttgttcatccgtctggagtggagaaacctatacatgaatggatagatgagatggaaaatttatacggtgatgggaaggaaaagaagtttcgcatttggttggataatgttacgtcttctcatatcagttcagatacatggcttgcaaaatttgtaaagcatgagttatctgagggaaaagtacggtcttgttcaacaaaagtcttactgagttataaggaggaaaagcaaaggctgacgtggatgcacatccaccaatcatggttagatgaatcttcttcagatgatcaagaaaaatggattttctaaaggattatcttaatctcgactgacatactaaagatgacatctgtttgggacagaagctaaccaaagagcatagtgtttgttttgtgttatgtttgtttggggatggtgtgagtttgataaagcatgaaggatactaaaagctgaagaaggtgttgccatgtcttggtttcgtttcattaatacttttttacatatttgggttaacttaaaactattaataaggaaggttgggtcctgaatttggtctgttcatgaccttttgagggcagggagagttttgggtctctacaacaaaacctacatttctttagtcttacaaaacctaccattgtgtttgatttgcaattcttttttctggtttatatggattgttttctactaaaaaaaaaaaaaaaaaaactcgagggggggcccggt

SEQ ID NO: 10091 - protein, 425 aa, Arabidopsis thaliana
MDRLEGPPRLILVADLDCTLVDHDDPENNDLLRFNALWEAHYRHDSLLVYCTGRSFSSYMSLRKKRPLLTPDIAVTSVGSEIVYGGGESTVSDVVWTARLDYKWNRDIVVEETLKFPKLEPQPDKSQEEHKVSFFVGREDAVEIMKVLPGILEERGVDVKLVYSNGYAFDVLPRGAGKQGALTYLLDKLDIEGKQPSNTLVCGDSGNDAELFNISDVYGVMVSNSHEELLQWYEENAKDNPKIFHASERCGAGMIEAIQRFNLGPNVSPRDVMDTENFHGESLNPAHEVVQFYLFYERWRCGEVEKSDKYLQNLKSLSSPLGIFVHPSGVEKPIHEWIDEMENLYGDGKEKKFRIWLDNVTSSHISSDTWLAKFVKHELSEGKVRSCSTKVLLSYKEEKQRLTWMHIHQSWLDESSSDDQEKWIF

SEQ ID NO: 10092 - protein, 366 aa, Arabidopsis thaliana
MSLRKKRPLLTPDIAVTSVGSEIVYGGGESTVSDVVWTARLDYKWNRDIVVEETLKFPKLEPQPDKSQEEHKVSFFVGREDAVEIMKVLPGILEERGVDVKLVYSNGYAFDVLPRGAGKQGALTYLLDKLDIEGKQPSNTLVCGDSGNDAELFNISDVYGVMVSNSHEELLQWYEENAKDNPKIFHASERCGAGMIEAIQRFNLGPNVSPRDVMDTENFHGESLNPAHEVVQFYLFYERWRCGEVEKSDKYLQNLKSLSSPLGIFVHPSGVEKPIHEWIDEMENLYGDGKEKKFRIWLDNVTSSHISSDTWLAKFVKHELSEGKVRSCSTKVLLSYKEEKQRLTWMHIHQSWLDESSSDDQEKWIF

SEQ ID NO: 10093 - protein, 281 aa, Arabidopsis thaliana
MKVLPGILEERGVDVKLVYSNGYAFDVLPRGAGKQGALTYLLDKLDIEGKQPSNTLVCGDSGNDAELFNISDVYGVMVSNSHEELLQWYEENAKDNPKIFHASERCGAGMIEAIQRFNLGPNVSPRDVMDTENFHGESLNPAHEVVQFYLFYERWRCGEVEKSDKYLQNLKSLSSPLGIFVHPSGVEKPIHEWIDEMENLYGDGKEKKFRIWLDNVTSSHISSDTWLAKFVKHELSEGKVRSCSTKVLLSYKEEKQRLTWMHIHQSWLDESSSDDQEKWIF

SEQ ID NO: 10094 - DNA, 814 bp, Arabidopsis thaliana
ggaagtaagctttgtctcgtcggaatctgatggagaagaagaagaagaaaggcgatgatgaattgaactcgaaaccgccgttaatggcgttgaaccatgtgtcaaggctttgtaaagacgtcaaaaagtctctcgagttctacacaaaggtattagggttcgtggagatagagcgtccagcttctttcgacttcgacggtgcgtggcttttcaactacggcgttgggatccacttggtgcaggccaaggaccaagataagttaccttctgacacggaccatttggacccaatggataaccacatctctttccagtgtgaagatatggaagctttggagaagaggctgaaggaggtgaaggtaaagtacatcaagaggacggtgggtgatgagaaagatgcagctatcgaccagctcttcttcaatgaccctgacggctttatggttgaaatctgtaactgcgagaatctcgaacttgtcccgcgccattcagccgacgccatacgcctcccagaagaccgacatgcacctcctgttgccctccctgactcctccaaccgtaggatgccccagcccaattcttaatactatttagactcgtttcgtctctagttagtactgtgttgtgctcagctcctactctattagttaatgtttgtttgggacaccaagtccttccaaccatgagtgctagtaggctggccattttggtttttgtttagattcggtttggttcagttttaataaatctctggctgaactctaaaaaaaaaaaagaaaaaaaaaaaaaaaaaaaactcgagggggggcccggt

SEQ ID NO: 10095 - protein, 184 aa, Arabidopsis thaliana
MEKKKKKGDDELNSKPPLMALNHVSRLCKDVKKSLEFYTKVLGFVEIERPASFDFDGAWLFNYGVGIHLVQAKDQDKLPSDTDHLDPMDNHISFQCEDMEALEKRLKEVKVKYIKRTVGDEKDAAIDQLFFNDPDGFMVEICNCENLELVPRHSADAIRLPEDRHAPPVALPDSSNRRMPQPNS

SEQ ID NO: 10096 - protein, 166 aa, Arabidopsis thaliana
MALNHVSRLCKDVKKSLEFYTKVLGFVEIERPASFDFDGAWLFNYGVGIHLVQAKDQDKLPSDTDHLDPMDNHISFQCEDMEALEKRLKEVKVKYIKRTVGDEKDAAIDQLFFNDPDGFMVEICNCENLELVPRHSADAIRLPEDRHAPPVALPDSSNRRMPQPNS

SEQ ID NO: 10097 - protein, 97 aa, Arabidopsis thaliana
MDNHISFQCEDMEALEKRLKEVKVKYIKRTVGDEKDAAIDQLFFNDPDGFMVEICNCENLELVPRHSADAIRLPEDRHAPPVALPDSSNRRMPQPNS

SEQ ID NO: 10098 - DNA, 2063 bp, Arabidopsis thaliana
aaaaaaaatataaattaaataaagaatcccataaatatctctctatcgaactctctctgcttttacaaatctcagaatctccttcagcgaattcacatctcagctgcttttgaatccgccgtaactaaaaacaatcctccttttctcgattcgttaaactatggccccgccggcaggacaaacggcggcggtggctgaagcggctggcgccgatggtgctccaccgcagcagcagcgtggatttggttccacgatttccggcatcgttagaatcgccgtcttttggtattttgcttctaagttcttttctcctaagcagaaacctatggatcccactgctccgtctcagctcatgactaatctcttccacaagggcgaatcattggatatgtggttttatctatcagagcaggagaagttcaatgactttggcaatgatcgtgcgctatattggcatgagacgaatataccttatgctgtatggacaccagagagtattaggaccaagtcacttacgtattatccatctgagacactacagaataatggaagtctgtatgctcatatcttttttgctcgatctggatttcccattgaccccactgatcctgaatatcaacctcttaatagttttagtaggacgcatgctgtggcgacttactttccaaagcagaaaaaaaataagaagaagagtctcttgggcagtcccaaagactctgatgaatccgaacctgaagttgagaaagttggagataagaaatcagatcccaaggaagaggtccctgtggaatggatatccctctggaaacctaatgtcacgattaacctggttgatgattttactcactattcacagaatggtgtaccaccaaacattgctcctcacttactggtagaaccgaccacaggaaattactatcctacaatttacttcaatgagttttggctgctaagggacaagttcattccagtcaatgagacagtctcagaactaccactaaatctggaaataagtcccataagcatgatgaagtggcaactgtttcagcaagttgatcaatctttccagatgcagcgtagctatggaagcatgcttgacggtgaatctgacgaactaaagaaggtgtttttggaaggaaatccctatcttttggggatcacgatgtttgtttcgatgcttcattcagtgttcgacttcctggcattcaaaaatgatatccaattctggaacaaaaataaatctatggaagggctgtctgcaaagtctgttgtactgaactttatctgtcagtttgtcatcttcctctacttgcttgacaacgacacttcatggatgatactggctagttccggagtcggtgtctgcattgagttctggaaaatagggaaagccatgcgcatagaggttgatcgaagtggaatgattccaaggttgaggttccatgatcgtgaatcgtatgcaagcaataaaaccaaggagtatgatgacattgccatcaaattcttatcctatgtgctcctcctccttgtcattggcttgtccatatattctctcgcttatgaacgccacaagagctggtattcttggatactatcttcactaacaagctgtgtctacatgttcggtttcatcatgatgtgtcctcagctattcatcaactacaagcttaaatcagtggcacatttaccatggagacagatgacttacaagttcctcaacaccattatcgacgatctctttgcctttgtcatcaaaatgccgattttacatcgactttctgtattcagagatgatgtgatattcttgatatacttataccaaaggtgggtttacccagtggataagacacgtgtgaacgagttcggttttggaggtgaggatgaaactgcagagaagaagttgatcactgagaaagaagaagaagacaagaaaacaaactaatctcttctcttcttcaaattttattacagttcagttatagtgtcttaatttatttttgttctcacttttggaaattgttttgttcaagtttaatgtcaaccctcaagacacattattaagc

SEQ ID NO: 10099 - protein, 593 aa, Arabidopsis thaliana
MAPPAGQTAAVAEAAGADGAPPQQQRGFGSTISGIVRIAVFWYFASKFFSPKQKPMDPTAPSQLMTNLFHKGESLDMWFYLSEQEKFNDFGNDRALYWHETNIPYAVWTPESIRTKSLTYYPSETLQNNGSLYAHIFFARSGFPIDPTDPEYQPLNSFSRTHAVATYFPKQKKNKKKSLLGSPKDSDESEPEVEKVGDKKSDPKEEVPVEWISLWKPNVTINLVDDFTHYSQNGVPPNIAPHLLVEPTTGNYYPTIYFNEFWLLRDKFIPVNETVSELPLNLEISPISMMKWQLFQQVDQSFQMQRSYGSMLDGESDELKKVFLEGNPYLLGITMFVSMLHSVFDFLAFKNDIQFWNKNKSMEGLSAKSVVLNFICQFVIFLYLLDNDTSWMILASSGVGVCIEFWKIGKAMRIEVDRSGMIPRLRFHDRESYASNKTKEYDDIAIKFLSYVLLLLVIGLSIYSLAYERHKSWYSWILSSLTSCVYMFGFIMMCPQLFINYKLKSVAHLPWRQMTYKFLNTIIDDLFAFVIKMPILHRLSVFRDDVIFLIYLYQRWVYPVDKTRVNEFGFGGEDETAEKKLITEKEEEDKKTN

SEQ ID NO: 10100 - protein, 538 aa, Arabidopsis thaliana
MDPTAPSQLMTNLFHKGESLDMWFYLSEQEKFNDFGNDRALYWHETNIPYAVWTPESIRTKSLTYYPSETLQNNGSLYAHIFFARSGFPIDPTDPEYQPLNSFSRTHAVATYFPKQKKNKKKSLLGSPKDSDESEPEVEKVGDKKSDPKEEVPVEWISLWKPNVTINLVDDFTHYSQNGVPPNIAPHLLVEPTTGNYYPTIYFNEFWLLRDKFIPVNETVSELPLNLEISPISMMKWQLFQQVDQSFQMQRSYGSMLDGESDELKKVFLEGNPYLLGITMFVSMLHSVFDFLAFKNDIQFWNKNKSMEGLSAKSVVLNFICQFVIFLYLLDNDTSWMILASSGVGVCIEFWKIGKAMRIEVDRSGMIPRLRFHDRESYASNKTKEYDDIAIKFLSYVLLLLVIGLSIYSLAYERHKSWYSWILSSLTSCVYMFGFIMMCPQLFINYKLKSVAHLPWRQMTYKFLNTIIDDLFAFVIKMPILHRLSVFRDDVIFLIYLYQRWVYPVDKTRVNEFGFGGEDETAEKKLITEKEEEDKKTN

SEQ ID NO: 10101 - protein, 529 aa, Arabidopsis thaliana
MTNLFHKGESLDMWFYLSEQEKFNDFGNDRALYWHETNIPYAVWTPESIRTKSLTYYPSETLQNNGSLYAHIFFARSGFPIDPTDPEYQPLNSFSRTHAVATYFPKQKKNKKKSLLGSPKDSDESEPEVEKVGDKKSDPKEEVPVEWISLWKPNVTINLVDDFTHYSQNGVPPNIAPHLLVEPTTGNYYPTIYFNEFWLLRDKFIPVNETVSELPLNLEISPISMMKWQLFQQVDQSFQMQRSYGSMLDGESDELKKVFLEGNPYLLGITMFVSMLHSVFDFLAFKNDIQFWNKNKSMEGLSAKSVVLNFICQFVIFLYLLDNDTSWMILASSGVGVCIEFWKIGKAMRIEVDRSGMIPRLRFHDRESYASNKTKEYDDIAIKFLSYVLLLLVIGLSIYSLAYERHKSWYSWILSSLTSCVYMFGFIMMCPQLFINYKLKSVAHLPWRQMTYKFLNTIIDDLFAFVIKMPILHRLSVFRDDVIFLIYLYQRWVYPVDKTRVNEFGFGGEDETAEKKLITEKEEEDKKTN

SEQ ID NO: 10102 - DNA, 1570 bp, Arabidopsis thaliana
  misc_feature (1521)..(1521): n is a, c, g, or t
aaacccagaccaaaaataatattctctcgattttttccagagcgtatattcaaattcttccaacaaaagtaaaaattaatctgattctctctactactactactactacgatgggtgagaaaaaggaagaaacggcgacgaaacctcaaggagagaagaaacctaccgatggtggaatcaccaccgtcgttatgaagcttgatatgcattgtgaaggttgcggcaaaaaaatcaaacgcatcttcaaacatttcaaaggtgtggaagatgtgaagattgattataagagtaacaaattgacggtgatcggaaacgtagatccagtggaagttcgtgataaagtggccgacaaaattaagagaccagtcgaacttgtctctacagtagcgccgccgaagaaagagacacctccttcatcaggcggtgcagagaagaagccttctccggcagcggaggagaaaccggctgagaagaaaccagccgccgttgagaaacccggtgagaaaaaagaagagaagaagaaagaggaaggagagaagaaagcttctcctccaccaccacctaaagagagtactgtggttttgaagaccaagttacattgtgaaggttgcgaacacaaaatcaaaagaatagtcaacaaaattaaaggggttaattcggttgctattgatagtgccaaggatttggttatagttaaggggatcattgacgtgaaacaactcactccttatcttaacgagaagcttaaacgcacggtggaagttgttccggccaaaaaggatgacggagcaccagtggcagctgcagcggcggctccagctggcggtgagaagaaggacaaagttgctggtgaaaagaaagagattaaagatgttggagaaaagaaagtcgacggtggtggtgagaagaagaaagaagttgctgttggcggcggtggaggaggagggggagggggaggagacggtggtgctatggatgtgaagaaatcggagtataacggttacggttatcctccacagccgatgtattactacccagaaggacaagtatacggtcaacaacattacatgatgcaaggtcaatcatcgcagtcgtatgtacaagaaccgtattcgaaccaaggatacgtgcaagaatcgtatatgaaccaaggttacggtcaagggtatggacaagaagcaccaccaccaccatatatgaaccaacaaggttacgcagatccttatggtcacatgcgtgcgcctgagttgtttagtgatgagaatccaaatgggtgttctgtgatgtgagtaaaacaaatggggaggaaaatgtaaataactaaaacaatatagggtgagaatgttagctatgacaaaaatggtatactacgaaagcacggaaacttccgagtccggtaatctaaaccggctggattggccggttagaaccggtttttgagaggcgtggattggttggttggtttatttcttttatataggtactataattttgtatcgtaatcatcttctgttttataanaaaaaaaaagaaaaaaaaaaaaaaaaaaaaactcgagggggggcccggt

SEQ ID NO: 10103 - protein, 428 aa, Arabidopsis thaliana
TQTKNNILSIFSRAYIQILPTKVKINLILSTTTTTTMGEKKEETATKPQGEKKPTDGGITTVVMKLDMHCEGCGKKIKRIFKHFKGVEDVKIDYKSNKLTVIGNVDPVEVRDKVADKIKRPVELVSTVAPPKKETPPSSGGAEKKPSPAAEEKPAEKKPAAVEKPGEKKEEKKKEEGEKKASPPPPPKESTVVLKTKLHCEGCEHKIKRIVNKIKGVNSVAIDSAKDLVIVKGIIDVKQLTPYLNEKLKRTVEVVPAKKDDGAPVAAAAAAPAGGEKKDKVAGEKKEIKDVGEKKVDGGGEKKKEVAVGGGGGGGGGGGDGGAMDVKKSEYNGYGYPPQPMYYYPEGQVYGQQHYMMQGQSSQSYVQEPYSNQGYVQESYMNQGYGQGYGQEAPPPPYMNQQGYADPYGHMRAPELFSDENPNGCSVM

SEQ ID NO: 10104 - protein, 392 aa, Arabidopsis thaliana
MGEKKEETATKPQGEKKPTDGGITTVVMKLDMHCEGCGKKIKRIFKHFKGVEDVKIDYKSNKLTVIGNVDPVEVRDKVADKIKRPVELVSTVAPPKKETPPSSGGAEKKPSPAAEEKPAEKKPAAVEKPGEKKEEKKKEEGEKKASPPPPPKESTVVLKTKLHCEGCEHKIKRIVNKIKGVNSVAIDSAKDLVIVKGIIDVKQLTPYLNEKLKRTVEVVPAKKDDGAPVAAAAAAPAGGEKKDKVAGEKKEIKDVGEKKVDGGGEKKKEVAVGGGGGGGGGGGDGGAMDVKKSEYNGYGYPPQPMYYYPEGQVYGQQHYMMQGQSSQSYVQEPYSNQGYVQESYMNQGYGQGYGQEAPPPPYMNQQGYADPYGHMRAPELFSDENPNGCSVM

SEQ ID NO: 10105 - protein, 365 aa, Arabidopsis thaliana
MKLDMHCEGCGKKIKRIFKHFKGVEDVKIDYKSNKLTVIGNVDPVEVRDKVADKIKRPVELVSTVAPPKKETPPSSGGAEKKPSPAAEEKPAEKKPAAVEKPGEKKEEKKKEEGEKKASPPPPPKESTVVLKTKLHCEGCEHKIKRIVNKIKGVNSVAIDSAKDLVIVKGIIDVKQLTPYLNEKLKRTVEVVPAKKDDGAPVAAAAAAPAGGEKKDKVAGEKKEIKDVGEKKVDGGGEKKKEVAVGGGGGGGGGGGDGGAMDVKKSEYNGYGYPPQPMYYYPEGQVYGQQHYMMQGQSSQSYVQEPYSNQGYVQESYMNQGYGQGYGQEAPPPPYMNQQGYADPYGHMRAPELFSDENPNGCSVM

SEQ ID NO: 10106 - DNA, 558 bp, Arabidopsis thaliana
accagagagagagagagagagagagagctcactagtccccccccccccccccccgaattatcctaaattcagatcataaaaaagctaacttttaatttctttctttctgagaaattggttctcatcgttggaatcgaaaaatgggacgaatcggtttagtagtgactgatctggtattgtcgttcatgtggatatgggcaggagttctggtcaacattttagtccatggagttcttggatttagccggaccgatccttccggtgagatcgttcgttatctcttctctatcatctccatgttcatcttcgcctaccttcaacaagccaccaaaggcgggctttataatcctttgaccgctttggctgctggagtctccggtggcttcagcagtttcatcttctccgtcttcgttcgaatccccgtcgaggtttgtttcgttgactttttttggtttaattgaaattgactcttcgttagagagaggtctcagggtttgtgtaatgttgtaaaatgtcaaattagagaaaaaaaaagagaatttagctgatgggttcttc

SEQ ID NO: 10107 - protein, 106 aa, Arabidopsis thaliana
MGRIGLVVTDLVLSFMWIWAGVLVNILVHGVLGFSRTDPSGEIVRYLFSIISMFIFAYLQQATKGGLYNPLTALAAGVSGGFSSFIFSVFVRIPVEVCFVDFFWFN

SEQ ID NO: 10108 - protein, 91 aa, Arabidopsis thaliana
MWIWAGVLVNILVHGVLGFSRTDPSGEIVRYLFSIISMFIFAYLQQATKGGLYNPLTALAAGVSGGFSSFIFSVFVRIPVEVCFVDFFWFN

SEQ ID NO: 10109 - protein, 54 aa, Arabidopsis thaliana
MFIFAYLQQATKGGLYNPLTALAAGVSGGFSSFIFSVFVRIPVEVCFVDFFWFN

SEQ ID NO: 10110 - DNA, 1461 bp, Arabidopsis thaliana
gaagctaacaacattcacaaggagagagaaacaataaagggcaaggaaaaagatcaaacctttttctttctttctttctcctgctctctgcaatttagaagaagatcgaagaatttgtttgttgtttatcttcttctataaaaacaaaccgtggggtctgttttcatttctggccttgcgattccgataaaactctcagcttctcattcaatccacaatccaaatccacttctcgaacatatatataattctatatttttgagagacagtttactttttctccttctctctccctctttctctttctctgtctctttggcttttctcctcctgttctcatggaagcttcacccaatgatcgacttcattttggcaaaatgggtttcgggtgtaagcattacaagaggagatgccaaatcagagctccatgttgcaacgaagtcttcgattgtcgccattgtcacaacgagagcactagcacattgcgcaatatctacgaccgtcacgatcttgttcgtcaagacgttaaacaagtgatttgttctgtttgcgatacagagcagccggcagctcaagtttgttcgaattgtggtgtcaacatgggagaatattttgcagcatctgcatattctatgatgatgatactgaaaaacaacagtttcattgcgatgactgtggaatttgcagagttggtgggcgtgagaatttcttccattgcaagaagtgtggatcttgttatgcggttggtctgcgcaacaaccatcgctgcgttgagaattcaatgcgtcatcactgtcccatttgttacgagtacctttttgactctctaaaggacacaaatgtgatgaaatgcgggcacacaatgcacgtagaatgctacaacgagatgatcaaacgtgacaagttttgttgtccaatttgctcgaggtcagtgattgatatgtctaaaacatggcagagactcgatgaagagatcgaagccactgctatgccttcagattaccgtgacaagaaggtttggatactttgcaacgattgtaacgacacaacagaagtgcacttccacataatcggacagaaatgtggacattgcagatcatacaacacacgagcgattgcgcctcctgttcttcctcaatgacaaaaccaagatcttcccatgtattgcctccagaaagcaagcaagaactttttgttgctaaaaaaactgaggcatagattgatgatcataacaaagaaagaaaaagaaaaagattgatgatcaatttgatcattggtcacaaaagcaaaacacacatttgtcttcttcatttgatttgttgttgttcttatactgttacatttttccatttgtgtttgggtgttggaaatgcgaggattatgtataatatactctatattcttgatccaggaaaagttacctggataataaaaaaaaaaaagaaaaaaaaaaaaaaaaaa

SEQ ID NO: 10111 - protein, 163 aa, Arabidopsis thaliana
MEASPNDRLHFGKMGFGCKHYKRRCQIRAPCCNEVFDCRHCHNESTSTLRNIYDRHDLVRQDVKQVICSVCDTEQPAAQVCSNCGVNMGEYFAASAYSMMMILKNNSFIAMTVEFAELVGVRISSIARSVDLVMRLVCATTIAALRIQCVITVPFVTSTFLTL

SEQ ID NO: 10112 - protein, 150 aa, Arabidopsis thaliana
MGFGCKHYKRRCQIRAPCCNEVFDCRHCHNESTSTLRNIYDRHDLVRQDVKQVICSVCDTEQPAAQVCSNCGVNMGEYFAASAYSMMMILKNNSFIAMTVEFAELVGVRISSIARSVDLVMRLVCATTIAALRIQCVITVPFVTSTFLTL

SEQ ID NO: 10113 - protein, 119 aa, Arabidopsis thaliana
MRHHCPICYEYLFDSLKDTNVMKCGHTMHVECYNEMIKRDKFCCPICSRSVIDMSKTWQRLDEEIEATAMPSDYRDKKVWILCNDCNDTTEVHFHIIGQKCGHCRSYNTRAIAPPVLPQ

SEQ ID NO: 10114 - DNA, 1092 bp, Arabidopsis thaliana
cccccggtatatatgagacattagttatagaagagagactaacatgaagatggatttttcatgtttccaagaatacccttttgagtttcattgcagaggaacaacatttaatgggtttagagaaaacaatgcagtgtctgaaacagtagaagagttctgtaataaaagaaggatgcagaagaagagtgatgatttgaagactaagaagaagaagaaacagagtgtttctagggtttgtagtagaggacattggaggatctctgaagatactcagcttatggagcttgtttcggtttacggtcctcaaaactggaaccacattgcagagagtatgcaaggaagaacaggaaagagctgcagattgaggtggtttaaccagttagatccgaggattaacaagagagctttcagtgatgaagaagaagagagactacttgctgctcatagagcttttggtaacaaatgggctatgattgctaagcttttcaatggaagaacagataatgccttgaagaatcattggcatgttctcatggcaaggaagatgagacagcaatcaagttcttacgtccaaagattcaatggttctgctcatgaatctaacacagatcacaaaatcttcaatctttctcctggtaatgtagatgatgatgaagatgtgaatctgaaaaagtgcagctgggaaatgctaaaagagggaactactaacctgaaagctcagtatctccaagaagaatatagttcttcacgcatgccgatgcagggtccacatcatcactactcaaccttccctgcagattccttggcactgacactgcatgtctccatccaggaaccatcatcatcatcgtcattatcactgccatcatcatcaacaactggagaacatacaatggtgaccagatattttgagaccattaaacctccagcatttatagattttctaggagttggtcactaaagctctaacatttagattgggaactaatcaagaagttgcttactcctgtcattattatcaaagtctctgacttttcttttgttagccattaacatgacaagctaaagacatcaagtatcttttcttttctg

SEQ ID NO: 10115 - protein, 305 aa, Arabidopsis thaliana
MKMDFSCFQEYPFEFHCRGTTFNGFRENNAVSETVEEFCNKRRMQKKSDDLKTKKKKKQSVSRVCSRGHWRISEDTQLMELVSVYGPQNWNHIAESMQGRTGKSCRLRWFNQLDPRINKRAFSDEEEERLLAAHRAFGNKWAMIAKLFNGRTDNALKNHWHVLMARKMRQQSSSYVQRFNGSAHESNTDHKIFNLSPGNVDDDEDVNLKKCSWEMLKEGTTNLKAQYLQEEYSSSRMPMQGPHHHYSTFPADSLALTLHVSIQEPSSSSSLSLPSSSTTGEHTMVTRYFETIKPPAFIDFLGVGH

SEQ ID NO: 10116 - protein, 303 aa, Arabidopsis thaliana
MDFSCFQEYPFEFHCRGTTFNGFRENNAVSETVEEFCNKRRMQKKSDDLKTKKKKKQSVSRVCSRGHWRISEDTQLMELVSVYGPQNWNHIAESMQGRTGKSCRLRWFNQLDPRINKRAFSDEEEERLLAAHRAFGNKWAMIAKLFNGRTDNALKNHWHVLMARKMRQQSSSYVQRFNGSAHESNTDHKIFNLSPGNVDDDEDVNLKKCSWEMLKEGTTNLKAQYLQEEYSSSRMPMQGPHHHYSTFPADSLALTLHVSIQEPSSSSSLSLPSSSTTGEHTMVTRYFETIKPPAFIDFLGVGH

SEQ ID NO: 10117 - protein, 262 aa, Arabidopsis thaliana
MQKKSDDLKTKKKKKQSVSRVCSRGHWRISEDTQLMELVSVYGPQNWNHIAESMQGRTGKSCRLRWFNQLDPRINKRAFSDEEEERLLAAHRAFGNKWAMIAKLFNGRTDNALKNHWHVLMARKMRQQSSSYVQRFNGSAHESNTDHKIFNLSPGNVDDDEDVNLKKCSWEMLKEGTTNLKAQYLQEEYSSSRMPMQGPHHHYSTFPADSLALTLHVSIQEPSSSSSLSLPSSSTTGEHTMVTRYFETIKPPAFIDFLGVGH

SEQ ID NO: 10118 - DNA, 619 bp, Arabidopsis thaliana
gaactatcttcttttatcaaaaactatattcacaggctgccgtgtaccttctccatccaaagatggcaactatagctactggtcttaacattgcaacccagcgtgtcttcgtcaccagcgagaatcggccagtttgtctcgccggtccggtccatttgaacaattcgtggaatcttgggtcaagaacaactaaccggatgatgaaacttcagccgattaaagcagcaccggaaggagggatatcggacgtagtggagaaaagcattaaggaagctcaggagacttgtgcgggcgatcctgtgagtggagagtgtgtagctgcgtgggacgaggttgaagaacttagcgcagcagctagccatgctagagacaagaagaaggctgatggttcggaccctttggaggaatactgcaaagacaatcctgagaccaacgagtgccgtacttacgacaactgaagcgatcaagatcctgttccggattcatacgtatacgacaaatctttgttccggtccatttggtaatgtcaggttatataaatcatgtctttgaatctgaattagctctaaaaacatttgtaatttgtagttccataaacgaatacaaaagccaaaatttc

SEQ ID NO: 10119 - protein, 151 aa, Arabidopsis thaliana
TIFFYQKLYSQAAVYLLHPKMATIATGLNIATQRVFVTSENRPVCLAGPVHLNNSWNLGSRTTNRMMKLQPIKAAPEGGISDVVEKSIKEAQETCAGDPVSGECVAAWDEVEELSAAASHARDKKKADGSDPLEEYCKDNPETNECRTYDN

SEQ ID NO: 10120 - protein, 131 aa, Arabidopsis thaliana
MATIATGLNIATQRVFVTSENRPVCLAGPVHLNNSWNLGSRTTNRMMKLQPIKAAPEGGISDVVEKSIKEAQETCAGDPVSGECVAAWDEVEELSAAASHARDKKKADGSDPLEEYCKDNPETNECRTYDN

SEQ ID NO: 10121 - protein, 86 aa, Arabidopsis thaliana
MMKLQPIKAAPEGGISDVVEKSIKEAQETCAGDPVSGECVAAWDEVEELSAAASHARDKKKADGSDPLEEYCKDNPETNECRTYDN

SEQ ID NO: 10122 - DNA, 2253 bp, Arabidopsis thaliana
gagagaaatccattgacgccctaacaaaagacgccggcgagtgtattcgtcactttctctagtttcctgtaacccaacccactcaaacgaaattttttcttaatctctctttcgttcttcttcttcttctttagattgttgtaattccaatcggaactctcgattcgctttcttctccgttcttctgtggcggaccggttttgtggtttttatttgaacattcccgatcttgccctgagttccacgatcagtttctttaaaccctaggttttacacaagcattctgtttctccagattatcgcagactctttcgttctattctttgtagttttgtaaaaggtatttcggtagatttagggtttgtctgtgtctagttttcgagatcgagagagatttgtgatgaatactaacagaggaagatatccaccgggtgttggaacgggtcgtggtgcgcctccgaatccagattatcatcagtcgtatcggcagcaacaaccacctcaagatcagcagtatgttcaacgcggttattctcagaaccctcagcagatgcaactccagcaacaacatcaacaacaacagcagcagcaacagtggtcaagacgccctcagcttcctggaaacgctagtaacgctaatgaggtggttcagcagacgacccagcccgaagctagcagcgatgctaatggtcaagactggaaggctacgttaaggctaccacctcctgatactcgttatcagacagcggatgtgacagctacaaagggaaatgaattcgaagattactttctgaaaagagatctgttaaagggaatatatgagaagggttttgagaagccatctccaattcaagaagagagcattccaattgctttaactggtagtgatattcttgctagagctaaaaacggtacaggaaagactggtgccttctgcattccagtcctcgagaaaattgacccaaataacaatgttattcaagccatgattctagttccaacgcgagagctggcccttcagacatcacaagtttgcaaggagctttccaaatatttgaatatccaggttatggtcaccactggcggtaccagtctgagagatgatattatgcgattacatcaacctgtgcatctgctggttggaactcctggaagaatattggatcttacaaaaaagggtgtctgtgttttgaaagactgtgcgatgcttgtaatggatgaggccgacaagcttttgtctgcagaattccaaccttctctagaggaattgatacagtttctaccccaaaatcgtcagtttttgatgttttccgccacattccctgtcactgttaaggcttttaaggatcgacatctccggaagccctatgttatcaatctcatggatcaactcacgcttatgggtgtcacgcaatattatgcttttgtcgaagaaagacagaaggttcactgcctcaacacacttttctctaagctgcaaataaatcaatcgataatcttttgcaactctgtcaatcgcgtggagctgttggctaagaaaatcacagaacttggttattcatgcttctacattcatgcaaagatggttcaagaccacaggaacagagtattccacgagttccgcaatggtgcttgcaggaatctcgtttgcactgatctgtttactcgaggaattgacattcaagctgtgaatgtcgtgatcaactttgattttcctaggacttctgagtcatatctacacagggtgggtcgatcaggacggtttggacaccttggattggctgtgaatttggtaacttatgaggaccgtttcaaaatgtatcagactgagcaagaacttgggaccgaaatcaaaccaattccttctaatatcgatcaagcaatctactgtcagtaaacttgtaactgtgcatgaaacgtgtctccacccaatgagaggtacaagatggttaaaatggtgtttctcaagctcgaggggaggagatgaggcaactagtacttggcggttcatgtaaagactcgttactcagtggtttggttcctaatctctcttaaagacacttgttatctggttctatggaaacctctttacgctgcacttattatgagactccctttgacttggttagtaataaagatagaacgtatgactctcctcttttttattttcgtgttgggctctgtttggaattatgggctttatcctatttaggatctatttatcatgaaagttgcacttcttaatttttgctt

SEQ ID NO: 10123 - protein, 498 aa, Arabidopsis thaliana
MNTNRGRYPPGVGTGRGAPPNPDYHQSYRQQQPPQDQQYVQRGYSQNPQQMQLQQQHQQQQQQQQWSRRPQLPGNASNANEVVQQTTQPEASSDANGQDWKATLRLPPPDTRYQTADVTATKGNEFEDYFLKRDLLKGIYEKGFEKPSPIQEESIPIALTGSDILARAKNGTGKTGAFCIPVLEKIDPNNNVIQAMILVPTRELALQTSQVCKELSKYLNIQVMVTTGGTSLRDDIMRLHQPVHLLVGTPGRILDLTKKGVCVLKDCAMLVMDEADKLLSAEFQPSLEELIQFLPQNRQFLMFSATFPVTVKAFKDRHLRKPYVINLMDQLTLMGVTQYYAFVEERQKVHCLNTLFSKLQINQSIIFCNSVNRVELLAKKITELGYSCFYIHAKMVQDHRNRVFHEFRNGACRNLVCTDLFTRGIDIQAVNVVINFDFPRTSESYLHRVGRSGRFGHLGLAVNLVTYEDRFKMYQTEQELGTEIKPIPSNIDQAIYCQ

SEQ ID NO: 10124 - protein, 448 aa, Arabidopsis thaliana
MQLQQQHQQQQQQQQWSRRPQLPGNASNANEVVQQTTQPEASSDANGQDWKATLRLPPPDTRYQTADVTATKGNEFEDYFLKRDLLKGIYEKGFEKPSPIQEESIPIALTGSDILARAKNGTGKTGAFCIPVLEKIDPNNNVIQAMILVPTRELALQTSQVCKELSKYLNIQVMVTTGGTSLRDDIMRLHQPVHLLVGTPGRILDLTKKGVCVLKDCAMLVMDEADKLLSAEFQPSLEELIQFLPQNRQFLMFSATFPVTVKAFKDRHLRKPYVINLMDQLTLMGVTQYYAFVEERQKVHCLNTLFSKLQINQSIIFCNSVNRVELLAKKITELGYSCFYIHAKMVQDHRNRVFHEFRNGACRNLVCTDLFTRGIDIQAVNVVINFDFPRTSESYLHRVGRSGRFGHLGLAVNLVTYEDRFKMYQTEQELGTEIKPIPSNIDQAIYCQ

SEQ ID NO: 10125 - protein, 303 aa, Arabidopsis thaliana
MILVPTRELALQTSQVCKELSKYLNIQVMVTTGGTSLRDDIMRLHQPVHLLVGTPGRILDLTKKGVCVLKDCAMLVMDEADKLLSAEFQPSLEELIQFLPQNRQFLMFSATFPVTVKAFKDRHLRKPYVINLMDQLTLMGVTQYYAFVEERQKVHCLNTLFSKLQINQSIIFCNSVNRVELLAKKITELGYSCFYIHAKMVQDHRNRVFHEFRNGACRNLVCTDLFTRGIDIQAVNVVINFDFPRTSESYLHRVGRSGRFGHLGLAVNLVTYEDRFKMYQTEQELGTEIKPIPSNIDQAIYCQ

SEQ ID NO: 10126 - DNA, 549 bp, Arabidopsis thaliana
gttgaaaaaccacaaaatccgctgtagctaagctcggtgagtaaaatggcgacggcgacgacggtgaatgtcaaactttctcgatcaaatcgtatctatcgctcttccgaaccagtggaaggaaaaattgtgataaaatctgcaacttcgatttcgcatcaagcaatacgtttatccgtcaatggatcagtcaacttgcaggttcgtggaggatcagctggagttatcgagtccttctatggtgtcatcaagcctattcaaatcgtcaagaagacgatcgaagttaagtcttctggcaaaatccctccgggaactacagagataccattctctttgaatctgagggagcctggggaaggcattgtagagaagttctatgagacatttcatggaacaaatatcaacatccaagtcagtagtttgatcagctttttttaataaggattttaggatttttgtctgtgaattgggaaaacattgatgcaaaaatctgtgacagtatctactaactgcagatataccgcgaggatacttgcacaaaactttgtc

SEQ ID NO: 10127 - protein, 130 aa, Arabidopsis thaliana
MATATTVNVKLSRSNRIYRSSEPVEGKIVIKSATSISHQAIRLSVNGSVNLQVRGGSAGVIESFYGVIKPIQIVKKTIEVKSSGKIPPGTTEIPFSLNLREPGEGIVEKFYETFHGTNINIQVSSLISFF

SEQ ID NO: 10128 - DNA, 1211 bp, Arabidopsis thaliana
agttaccagttcgtccagcctccattgtctttctccaccatttcctcaaaaccccatctctctctctcatctctctttctctctactcaatgtataataacaaccaatatagcttctccggtgacgaagactccgtcgtcctcagccttggacctcctggccaacaataccctagccataacaaacctaccagtgctaaaccttcttctgatcatgagtttaatcacccattaacaaaccctaatggtgttaccgttgctcttcatatcggtcctccgagttccgacaaagaaaccctcagcggcgggaacaaccaagagggtttaacggcgaggcagggacagtattggatcccttcactttcgcagatccttgtcggtcccactcagttctcttgttctgtctgtaacaaaactttcaaccgtttcaacaacatgcagatgcatatgtggggtcatggttcgcaataccgaaaaggcccagagtcgctcagagggacgaagtcgtcatcttcgatactaaggctaccatgttactgttgtgctgaaggttgtaagaacaacatagaccatccaagatcaaagcctctcaaagactttagaacgcttcaaacgcattacaagcggaagcacggagcaaaaccttttcgttgccgcaagaaatgtgaaaaaacgtttgcggtgagaggcgattggagaacgcatgagaaaaattgtgggaagttgtggttttgcgtttgcgggtcagattttaagcataagaggtcacttaaggatcacgttagggctttcggtgatggtcatgcggctcacactgtaagtgatcgggttgtaggcattggggacgcagatgaagatgatgaggaggaggaagaagaggaagaagatgatgtagaagaagaagatgctcatgaagaaaatgttcgtggagagaagaactatgggattagatatgatcactttcgtcgttatggtcagatttctgatgacaattactaaataaatgggacatttttatgatcgatgggtactattagggtttatctaagtgaggtatgtttgatatgtatttacctcttcgtcaagttagctagtgagtcttaaagtaaccttttccgaaaaatatatgtagtggtggctttggattatataagtgcctctaacgttgtctccaacaagcaatttctgcatttttggtaaatcttcagaccc

SEQ ID NO: 10129 - protein, 331 aa, Arabidopsis thaliana
LPVRPASIVFLHHFLKTPSLSLISLSLYSMYNNNQYSFSGDEDSVVLSLGPPGQQYPSHNKPTSAKPSSDHEFNHPLTNPNGVTVALHIGPPSSDKETLSGGNNQEGLTARQGQYWIPSLSQILVGPTQFSCSVCNKTFNRFNNMQMHMWGHGSQYRKGPESLRGTKSSSSILRLPCYCCAEGCKNNIDHPRSKPLKDFRTLQTHYKRKHGAKPFRCRKKCEKTFAVRGDWRTHEKNCGKLWFCVCGSDFKHKRSLKDHVRAFGDGHAAHTVSDRVVGIGDADEDDEEEEEEEEDDVEEEDAHEENVRGEKNYGIRYDHFRRYGQISDDNY

SEQ ID NO: 10130 - protein, 302 aa, Arabidopsis thaliana
MYNNNQYSFSGDEDSVVLSLGPPGQQYPSHNKPTSAKPSSDHEFNHPLTNPNGVTVALHIGPPSSDKETLSGGNNQEGLTARQGQYWIPSLSQILVGPTQFSCSVCNKTFNRFNNMQMHMWGHGSQYRKGPESLRGTKSSSSILRLPCYCCAEGCKNNIDHPRSKPLKDFRTLQTHYKRKHGAKPFRCRKKCEKTFAVRGDWRTHEKNCGKLWFCVCGSDFKHKRSLKDHVRAFGDGHAAHTVSDRVVGIGDADEDDEEEEEEEEDDVEEEDAHEENVRGEKNYGIRYDHFRRYGQISDDNY

SEQ ID NO: 10131 - protein, 187 aa, Arabidopsis thaliana
MQMHMWGHGSQYRKGPESLRGTKSSSSILRLPCYCCAEGCKNNIDHPRSKPLKDFRTLQTHYKRKHGAKPFRCRKKCEKTFAVRGDWRTHEKNCGKLWFCVCGSDFKHKRSLKDHVRAFGDGHAAHTVSDRVVGIGDADEDDEEEEEEEEDDVEEEDAHEENVRGEKNYGIRYDHFRRYGQISDDNY

SEQ ID NO: 10132 - DNA, 725 bp, Arabidopsis thaliana
gaagccttgctcattacaaaaaaacaacacttattgatcactaactttcttgaccatcgcaaatggagagaataagagatttgtcgtcgaagaaagcggcggtgatattcacaaagagctcatgttgtatgtgccatagcatcaagacgctattctacgaactaggcgctagtccggcgatccatgagctcgacaaagaccctgaaggccgtgaaatggaacgggccctacgtgccctcggctcatcgaacccggcggttccagctgttttcgttggaggaaggtacatcggatcagccaaagacatcatctcattccacgtggacgggtcactcaagcagatgcttaaagacgctaaggccatttggttatagcgtccgatcatcgtacatgtatgtgtatatatctatatatatatatatatatgtatgcacatgtaattgtgtcaataatcgatgtgctaagagcgcatagatgataaatataatcgggagggagcatagatgtattaaaatgctttgctttcttcggatggatcgtagttattggataataatttatatacatgtatagatgtatatatgtatgttgacttacgtacattgtacggatgaaaagacaagtgtacctttaagcactgttgtataacattactgttcgaattccacgtaaagagtaaactcaaaaaaaaaaaaaaaaaaaactcgagggggggcccggtaccc

SEQ ID NO: 10133 - protein, 103 aa, Arabidopsis thaliana
MERIRDLSSKKAAVIFTKSSCCMCHSIKTLFYELGASPAIHELDKDPEGREMERALRALGSSNPAVPAVFVGGRYIGSAKDIISFHVDGSLKQMLKDAKAIWL

SEQ ID NO: 10134 - protein, 96 aa, Arabidopsis thaliana
MSSTKTLKAVKWNGPYVPSAHRTRRFQLFSLEEGTSDQPKTSSHSTWTGHSSRCLKTLRPFGYSVRSSYMYVYISIYIYIYVCTCNCVNNRCAKSA

SEQ ID NO: 10135 - protein, 81 aa, Arabidopsis thaliana
MCHSIKTLFYELGASPAIHELDKDPEGREMERALRALGSSNPAVPAVFVGGRYIGSAKDIISFHVDGSLKQMLKDAKAIWL

SEQ ID NO: 10136 - DNA, 1081 bp, Arabidopsis thaliana
gagaaggaaaaaaaattctggaactttcgagcttctgttttgcggtgctctcaaagcttatatcggatctcgaatcttgaatcggactcagaacctcggatcttcgaaaatcgacgaacatgtcttctcctggcgaattctataactcacttccacctataaccaaggcttatggtacgttgtgctttttcactacagtagccacgcagcttggcttagttgctcccgttcacattgctttaattcctgaacttgtacttaagcagttccagatctggaggctgataacaaacttgtttttcctcggtggtttctctatcaattttggaatacgtcttttgatgatagcaagatatggagttcaactcgagaaagggccatttgaaaggcggacagcagactttttgtggatgatgatctttggatccttcactctattggtattatcagtcataccatttttctggacaccgtttcttggtgtttcacttgtgttcatgcttctttatctctggagccgagaatttccaaatgccaacatcagcctatacggtcttgtcactcttaaggctttctacctcccatgggcaatgctagcacttgatgttatcttcggttctccgatcatgccagatcttcttggcatcatagctggacatctatactacttcctaacagtccttcatcctcttgctaccggaaaaaactacctgaaaaccccaaaatgggttaataaaatcgtagcaagatggcgaattggagctccagttgcaagtgttcgacaagcaggtggtgtaggagcagcaggacccggagctggaggaggagtaggaggaggaggagcttattcaagcgctcgtgccccacccgagagttcaaacacagcattcagaggtcgatcatatcgtctcaccgactgaaatagaaatcttctcgagtttctttgttttcatcatatcaaatctttttcaaacaatgccactaactaatcccaggtagctttgtgttttcgaacagtacagtttttgaatatatgactctgtaggaagaatctttgaggttttaatacaatgttcttttc

SEQ ID NO: 10137 - protein, 266 aa, Arabidopsis thaliana
MSSPGEFYNSLPPITKAYGTLCFFTTVATQLGLVAPVHIALIPELVLKQFQIWRLITNLFFLGGFSINFGIRLLMIARYGVQLEKGPFERRTADFLWMMIFGSFTLLVLSVIPFFWTPFLGVSLVFMLLYLWSREFPNANISLYGLVTLKAFYLPWAMLALDVIFGSPIMPDLLGIIAGHLYYFLTVLHPLATGKNYLKTPKWVNKIVARWRIGAPVASVRQAGGVGAAGPGAGGGVGGGGAYSSARAPPESSNTAFRGRSYRLTD

SEQ ID NO: 10138 - protein, 192 aa, Arabidopsis thaliana
MIARYGVQLEKGPFERRTADFLWMMIFGSFTLLVLSVIPFFWTPFLGVSLVFMLLYLWSREFPNANISLYGLVTLKAFYLPWAMLALDVIFGSPIMPDLLGIIAGHLYYFLTVLHPLATGKNYLKTPKWVNKIVARWRIGAPVASVRQAGGVGAAGPGAGGGVGGGGAYSSARAPPESSNTAFRGRSYRLTD

SEQ ID NO: 10139 - protein, 169 aa, Arabidopsis thaliana
MMIFGSFTLLVLSVIPFFWTPFLGVSLVFMLLYLWSREFPNANISLYGLVTLKAFYLPWAMLALDVIFGSPIMPDLLGIIAGHLYYFLTVLHPLATGKNYLKTPKWVNKIVARWRIGAPVASVRQAGGVGAAGPGAGGGVGGGGAYSSARAPPESSNTAFRGRSYRLTD

SEQ ID NO: 10140 - DNA, 2047 bp, Arabidopsis thaliana
agtctcttccttttgaatctcacagatctatcgccattcttgcttcttcactcctccattgactagggtgttttttatgggtggtttgtgaaattgttttgaggatataaagatttcaattttgtttgaaaatggaaactgaggatgtgcttgacataccagcttcaagcaactttggctctgaagtaaagaaaaatagccttgaatctgggaatgggtcacctgaggctaattctttagttggtaatgatgagaatgtgaaaggaaatttagatttggatttaacagaagagaatttgagaattgtcggtggccaagagtctggggaaatactaacagagcaggttagtgatgtgttcaatgcgagtgtggaaagtgtggcggtagatgagaaattgggtatccaaaaggagacactagttcacagcaccactttggatgttagttctaaagcgggtgttaaaagaccccgaacatcgtatgacgaacagcagcctacagtccatgttacttataagcacttaacgagagctagtaagcagaagctggaaagtttattacagaaatggtcagaatgggaggctgaaaatacgtccttggctcaggatcaagaacaactattcgaatctggtgaagagacatgtttccccgccatacgtgttggattgcagaagacttcgtctgtgtcattctggatcgacaaccaaactggtcataagccgttggaagattttgttctagtggaaagtagcaccactcctctttatgaccgtaaatttgctataggtttaaattcagcagatggctcaagaaacgtggaagggggattggagattattgatgatgatcctccacgttgcttcaattgtggtggctatagtcattctctaagagaatgtccaaggccttttgatcgatcagcggttaatagtgctcggaagcttcagaaatctaaacgaaatcagaatagtagtgggccccgtctaccatcaagatattatcaaaaaaatcaaactggaaagtatgatggcttgaaacccggcacacttgatgcagagactcgtcagcttctgaatctgggggaactagaccctcctccgtggctaaacagaatgcgagaaattgggtacccaccaggatacttagctccagaagatgatcatttgtctggaataactatattcggagaagaggtggagactcgggaggcgatagagagtgaggatggggaaattttggaaaaagcaaaccctcctccagagccacaaatgaaaaagaccgtcgagtttccgggaattaacgctcccttcccagaaaacgcagatgagtggctttgggaagctgcaccttcacataggaacagcagcagaagcggccgatggcaacaacaaaaaacaagcagaggacatgattacagagacgatggtccgctcggcgttgaaccatcaaattatcctccaaggtatggcagtagatatgattacgggtatggttcaaacgaatatggttctaggtcaagaagtccaggcatagatagatctttatccgaaagaagtaagagggattattcttcttacgatgctgatttccgggagagagatagagatagagacaggaacagggatagggacagagacagagactgggatagggacagggacagagactgggatagagacagggacagggacgatcgtgattggtcttatagattaagcagcaggagataaattgtgagacttttagctgtgtatgtgtgtatgtggaggttagggttcaatttttttctacattctctctttccctctatgttgttgtatcatgtccatgaaagtggaagctttcttctagttatcagactttagatgttttagatttaatttcctcttccaagtttctttcgaagctttaaggttttactattttgggtatgtcttcacttcttaaaatggaaagttagttactcatgtttcttattagttgatgttttggaaatgtttacacaaaaaaaaaaaaaaaaaaaaaaaaactcgagggggggcccggt

SEQ ID NO: 10141 - protein, 532 aa, Arabidopsis thaliana
METEDVLDIPASSNFGSEVKKNSLESGNGSPEANSLVGNDENVKGNLDLDLTEENLRIVGGQESGEILTEQVSDVFNASVESVAVDEKLGIQKETLVHSTTLDVSSKAGVKRPRTSYDEQQPTVHVTYKHLTRASKQKLESLLQKWSEWEAENTSLAQDQEQLFESGEETCFPAIRVGLQKTSSVSFWIDNQTGHKPLEDFVLVESSTTPLYDRKFAIGLNSADGSRNVEGGLEIIDDDPPRCFNCGGYSHSLRECPRPFDRSAVNSARKLQKSKRNQNSSGPRLPSRYYQKNQTGKYDGLKPGTLDAETRQLLNLGELDPPPWLNRMREIGYPPGYLAPEDDHLSGITIFGEEVETREAIESEDGEILEKANPPPEPQMKKTVEFPGINAPFPENADEWLWEAAPSHRNSSRSGRWQQQKTSRGHDYRDDGPLGVEPSNYPPRYGSRYDYGYGSNEYGSRSRSPGIDRSLSERSKRDYSSYDADFRERDRDRDRNRDRDRDRDWDRDRDRDWDRDRDRDDRDWSYRLSSRR

SEQ ID NO: 10142 - DNA, 1477 bp, Arabidopsis thaliana
gagcgtcggtcgtcttcttcgtcttctctctgtcgctgatctgggttttgcttcaacgtgaaacatctttgaggttgatgatgaggtttctgtttacttaatatcctgtgagagaaaattcttcttgacttgagtgttgctgacaaaaacgtataggtatatgtacatttgttttcgctgaggctaaagatggataagcttcttgagaatcatcagtttgcgacacatgcgatcgctgcctcggcctctgtctcgttaggaactgctctcgcttatcctttagataccatcaaaaccattatccaggttggttcaggacccaataagaaattaagctcctttcaagtttttaatagagttcttcgattctctggctattcaggtctgtacagtggtcttggatcgttaactttaggaagaatttctggttttggtgcaaggtttggtgtctatgagattctaacagctttctacaaagatggtcgacatgataactatgtgagtgttggtgaagcttttctggctggtctggtgggaggtgcagcagaaacagtgatgacttctccatttgagctaatcaaagtccgaaaacaagtgactgctgcatcacgggctccaaatgcttccgctgttgcagagaccgcaccggtctcacccatgatcacaaaactgctaagaagatacactcttgatgtaaagtcattgacacaaacagtcagtctcttatccgtcttaaatcacaaacacccaaacatgacagctgctttgcaagagtacccttggatgatgactggaacaggaaacccaccatcagccatggatgttaagagaccgctcgatgttgcatcacttgaaggatatagagctttatggaggaatctacgttcaggtcttataagagattgtatttacggtggagtattcttttcaacatggcagtttcttcacgaggcaatggtcggttggaaagctgttgggatgaatcctctgcccagttctgaagaagaagttggacctttatctccggtagccagtagccttgctgctgggatatctggtgccgttgcagctgcagcatcacatagctttgacacagcaagaacacgtgcacagtgtgtaatattgccaaagtatacagcaaaggagaggaagtttctaaaatggaataaaccagggaagagattagagagatggacaggaatccatcctacagacagaaatctcttgttccgaggtattgggatgaggatggctcgaagctctgttgcatcgactgtgatcgtaggaagctattacttagctgtcgatttattggttcccaagtgagaaaacaaacaatcacataagcctacgaatctgtctttagatcagattaacgataccgcattgttttttagtaacagttaaaagagaattcatttgtgagattttctcaatactctttaggatttgtatctctgaaataaataattaacag

SEQ ID NO: 10143 - protein, 378 aa, Arabidopsis thaliana
MDKLLENHQFATHAIAASASVSLGTALAYPLDTIKTIIQVGSGPNKKLSSFQVFNRVLRFSGYSGLYSGLGSLTLGRISGFGARFGVYEILTAFYKDGRHDNYVSVGEAFLAGLVGGAAETVMTSPFELIKVRKQVTAASRAPNASAVAETAPVSPMITKLLRRYTLDVKSLTQTVSLLSVLNHKHPNMTAALQEYPWMMTGTGNPPSAMDVKRPLDVASLEGYRALWRNLRSGLIRDCIYGGVFFSTWQFLHEAMVGWKAVGMNPLPSSEEEVGPLSPVASSLAAGISGAVAAAASHSFDTARTRAQCVILPKYTAKERKFLKWNKPGKRLERWTGIHPTDRNLLFRGIGMRMARSSVASTVIVGSYYLAVDLLVPK

SEQ ID NO: 10144 - protein, 256 aa, Arabidopsis thaliana
MTSPFELIKVRKQVTAASRAPNASAVAETAPVSPMITKLLRRYTLDVKSLTQTVSLLSVLNHKHPNMTAALQEYPWMMTGTGNPPSAMDVKRPLDVASLEGYRALWRNLRSGLIRDCIYGGVFFSTWQFLHEAMVGWKAVGMNPLPSSEEEVGPLSPVASSLAAGISGAVAAAASHSFDTARTRAQCVILPKYTAKERKFLKWNKPGKRLERWTGIHPTDRNLLFRGIGMRMARSSVASTVIVGSYYLAVDLLVPK

SEQ ID NO: 10145 - protein, 222 aa, Arabidopsis thaliana
MITKLLRRYTLDVKSLTQTVSLLSVLNHKHPNMTAALQEYPWMMTGTGNPPSAMDVKRPLDVASLEGYRALWRNLRSGLIRDCIYGGVFFSTWQFLHEAMVGWKAVGMNPLPSSEEEVGPLSPVASSLAAGISGAVAAAASHSFDTARTRAQCVILPKYTAKERKFLKWNKPGKRLERWTGIHPTDRNLLFRGIGMRMARSSVASTVIVGSYYLAVDLLVPK

SEQ ID NO: 10146 - DNA, 997 bp, Arabidopsis thaliana
agtttccatcgacgcaacgaccaatctccacgattcctctcttctctctaacttccagagacaagttgtatccctcgtttgctttctgcgaaactaaggtgcaatggcgaagataaaaccgcaggctcttctaaatcaaagcaagaagaagaagggtccaagtcgcataagtatttccactattattgtctgtaatcttgtagttgctgtagtcatattatcgttggtcacaacctatcgccattggtcccaaaggtcaagaaacacaattgaacatgaaactcggagtcagagatttgaggacactaatactgcgtcagggcaaaaaacttacgatcttcctggttttgctgatataaacacatcaaaaggacttataactgtcgaactcttcaaagaaggttcccctgaagttgtggacaagtttctagatctatgtcaaaaagatcacttcaagggaatgccgtttcagcgggttataaagaactacttggtacaagctggtcactcaccgagctctatacctgtagaagaatggacagctaaaggaaagctcagaggtcgccttcacattggcccaaaacatgaggcattcatgttgggaacaccaaaaaacaaagggaacaacaaggattttgagcttctgatcacaacggccccaatcccggatctgaatgatcaacttatagtgtttggaagagtccttaagggagaggatgtagtacaggagatcgaagaagtggatacggatgagcatttccaaccgaaatcgccaatagggatcactggtgttgtactgaaactagagacatgaaatgaaaatttctcttccttgcttcctctgtaaatgaggctcacgccaaatccttcttcatactcgctcttttgtataaatcctcttttgaggttttttctttctttctattttacagtttcttgttgttttgtaattttatttgatttttctcgagggggggcccggtacccaattcgccct

SEQ ID NO: 10147 - protein, 236 aa, Arabidopsis thaliana
MAKIKPQALLNQSKKKKGPSRISISTIIVCNLVVAVVILSLVTTYRHWSQRSRNTIEHETRSQRFEDTNTASGQKTYDLPGFADINTSKGLITVELFKEGSPEVVDKFLDLCQKDHFKGMPFQRVIKNYLVQAGHSPSSIPVEEWTAKGKLRGRLHIGPKHEAFMLGTPKNKGNNKDFELLITTAPIPDLNDQLIVFGRVLKGEDVVQEIEEVDTDEHFQPKSPIGITGVVLKLET

SEQ ID NO: 10148 - DNA, 634 bp, Arabidopsis thaliana
gagagttgtttttggcgcaaaaattcagaaaatttcttagttggtgaattcctaaattctctgaatctgtcatctttctctactgtgctcatgaattttgatatagattgtttgatttcttcaacgcagctacagtttccttcatccagcagacgattccggtgatctccggtcagaatattacaaactattgattccgtgaaatgaagttcaaggcgtttctgactgaaaatggtgtgaatctcttagagaagaggtttcttccagcgtttgacaaaatggggaagaattgtcatcttcttctcactaaagaacacttgttcttcctccataaccttctcaatggtgatggagttcaatgcattgctcagtttcgcaaagatgttctctttgatgattaccgtatctcgagccagaacgaggaccgtatcgctttctccttagatgttgctcttctgtatcgagcggtgaagagcagtgttagtatttgtactgagttcagtggtggattagcttcaaacagactgcagatcaagcttgtcaaaaagctccctcctaactgtacacaaccgatgcctttcctcacgtttgaaacgaaaggatacaagtctgcagttattcaagatgttccgat

SEQ ID NO: 10149 - protein, 143 aa, Arabidopsis thaliana
MKFKAFLTENGVNLLEKRFLPAFDKMGKNCHLLLTKEHLFFLHNLLNGDGVQCIAQFRKDVLFDDYRISSQNEDRIAFSLDVALLYRAVKSSVSICTEFSGGLASNRLQIKLVKKLPPNCTQPMPFLTFETKGYKSAVIQDVP

SEQ ID NO: 10150 - protein, 118 aa, Arabidopsis thaliana
MGKNCHLLLTKEHLFFLHNLLNGDGVQCIAQFRKDVLFDDYRISSQNEDRIAFSLDVALLYRAVKSSVSICTEFSGGLASNRLQIKLVKKLPPNCTQPMPFLTFETKGYKSAVIQDVP

SEQ ID NO: 10151 - DNA, 1552 bp, Arabidopsis thaliana
acaaatcttttgatctgactttcgtctctccaaatctctctcgtctcgtttcttcagaggctatggggatctccttaagcaagcgtcgacgagacaacaacaaccaccaccaccatccacaccacaatccgccgtactattactccgatcctccaccacaacagccgccgcctcaaaacgagtatagctactctcacaattaccccgtttcaactccacagctctctcttcctccaccaccggctcagccaccgtctttttctcagcctcctccgtcgcagattagttacctaccgtacggtcaaaactaccatcaaaaccaatactacccgcaacaagctcctccgtatttcaccggttatcatcacaatgggtttaatccgatgatgaggccggtttatttcggtcctcctccggttgctgttatggaaccgcctgcaccttatgtggagcatcagaccgctaagaaggttaagaacgatgtcaatgtgaataaagctacggtgaggctcgtagctgacgatcttaaccctggtcattatcttgtttccttcgtcttcgatgccttattcgatggcagtttcactatcatattttttggagaagaggaatcaaagtgcataatcgtccctcatttaccagaagctttcccaccaatcaaagtccctttccaaaaaggtgccgggcagaagtttctacaagctccagggacaggaatcgacctaggcttcttttcactggatgatttatcgaaaccatcaccagaagaggtgtacccacttgtaatatcagccgagacagtaatatcaccaagctcggtttcagaggaaccattagttcataagcagatcactcaagcggttttggagaagacgaatgatggatctttcaaagtgaaagtcatgaaacagatcctatggattgaaggagaacgatatgaactacaagagttgtatggaatcgataattcaacaacacaaggtactgctgcatcggggttagaggatactgatggcaaagaatgtgtcatttgcttgactgaacctaaggacacagccgtcatgccttgtagacatttgtgtttgtgcagtgattgcgcagaagaactgaggtttcagacaaacaaatgtcccatttgtagacaacctatccatgagcttgtaaagattaaagtggaaagtagtgatgaacaacactgaaaaagaggtttcttcccttcacttaaacaccatgtttgattctttcttcttcttctttttgaaaaccgtcaaatcgaattctttttcccttttttcttatacaaatgtgttttctcatgtcatactcttgcacatatttgttggtcttagttttgggaaactcaaagaaaaaaaagtcagtaatgtatatatagctccaatggttcttgagaaactttctcttcgtatctttctacttgaaacactcattctgtaactgaatactttttggtttgggcattgctcaaatataacttgcaatcatatgttgtttatcgtaaaaaaaaaaaaaaaaactcgagggggggcccggt

SEQ ID NO: 10152 - protein, 398 aa, Arabidopsis thaliana
KSFDLTFVSPNLSRLVSSEAMGISLSKRRRDNNNHHHHPHHNPPYYYSDPPPQQPPPQNEYSYSHNYPVSTPQLSLPPPPAQPPSFSQPPPSQISYLPYGQNYHQNQYYPQQAPPYFTGYHHNGFNPMMRPVYFGPPPVAVMEPPAPYVEHQTAKKVKNDVNVNKATVRLVADDLNPGHYLVSFVFDALFDGSFTIIFFGEEESKCIIVPHLPEAFPPIKVPFQKGAGQKFLQAPGTGIDLGFFSLDDLSKPSPEEVYPLVISAETVISPSSVSEEPLVHKQITQAVLEKTNDGSFKVKVMKQILWIEGERYELQELYGIDNSTTQGTAASGLEDTDGKECVICLTEPKDTAVMPCRHLCLCSDCAEELRFQTNKCPICRQPIHELVKIKVESSDEQH

SEQ ID NO: 10153 - protein, 378 aa, Arabidopsis thaliana
MGISLSKRRRDNNNHHHHPHHNPPYYYSDPPPQQPPPQNEYSYSHNYPVSTPQLSLPPPPAQPPSFSQPPPSQISYLPYGQNYHQNQYYPQQAPPYFTGYHHNGFNPMMRPVYFGPPPVAVMEPPAPYVEHQTAKKVKNDVNVNKATVRLVADDLNPGHYLVSFVFDALFDGSFTIIFFGEEESKCIIVPHLPEAFPPIKVPFQKGAGQKFLQAPGTGIDLGFFSLDDLSKPSPEEVYPLVISAETVISPSSVSEEPLVHKQITQAVLEKTNDGSFKVKVMKQILWIEGERYELQELYGIDNSTTQGTAASGLEDTDGKECVICLTEPKDTAVMPCRHLCLCSDCAEELRFQTNKCPICRQPIHELVKIKVESSDEQH

SEQ ID NO: 10154 - protein, 271 aa, Arabidopsis thaliana
MMRPVYFGPPPVAVMEPPAPYVEHQTAKKVKNDVNVNKATVRLVADDLNPGHYLVSFVFDALFDGSFTIIFFGEEESKCIIVPHLPEAFPPIKVPFQKGAGQKFLQAPGTGIDLGFFSLDDLSKPSPEEVYPLVISAETVISPSSVSEEPLVHKQITQAVLEKTNDGSFKVKVMKQILWIEGERYELQELYGIDNSTTQGTAASGLEDTDGKECVICLTEPKDTAVMPCRHLCLCSDCAEELRFQTNKCPICRQPIHELVKIKVESSDEQH

SEQ ID NO: 10155 - DNA, 1281 bp, Arabidopsis thaliana
gatctctgcgattattattattcactctctcctcttctctccgccgaagtagtcacagttccggccaccaggcaaagaagagagaaaacgaccctgactccaataatggctcctagttctaggtctccttcaccacgtacgaagagactgagaagagctcgaggagagaaggaaattgggagaagtagagagagagaagatgatggtagagaaagggagaagagaaacagtagggaaagggatagagatataggaagagatagggatagggagagaaaaggagaaggagaaagagatagggaagttggggataagagaagacgatcagggagagaggatactgaaaaaaggagaaggacaagagcagatgatgagagatactctagaggaagacatgagaggtctacttcaccgtcagataggagtcacaggagtagtaggcgttcacctgaaagagctattgcctcaaggcatgatgaggggtctaatgcaagagggggcagcgaggagccaaatgtcgaggaagattcagtcgcgagaatgagagcagttgaagaggctctggcagcgaagaaaaaggaagaaccatcatttgagctatcagggaaacttgctgaagaaactaacagatacagaggtatcacactcctcttcaatgagcccccagaggctagaaaacccagcgaacgatggagactgtatgtttttaaggatggtgaaccactgaatgagccactctgccttcaccgccaaagctgctacctctttggacgtgaaagaaggattgccgacattcctacggatcacccatcttgcagcaagcagcatgctgtcattcagtaccgggaaatggaaaaggagaaaccagatggtatgatggggaagcaagtgaagccttacataatggatcttggtagtaccaacaaaacttatatcaatgaaagtcccattgagccacaaagatattatgagctttttgagaaagacaccataaagtttggcaacagcagccgagagtacgtactgttgcacgagaattctgccgagtgaatgaaatcagagtcaagcagaaacgagtaaatcacaagattagatagttgcgtttctcagggtttttagagatgtttgagctgcttcatgtatgctttctaccgtgctggtgataatctcagacatcatttagaaatcttttgcttgcttgttttataataaatgatgatgaacgattggtaagagaaaaaggttaacttttggtataactgtataagatcaatctctact

SEQ ID NO: 10156 - protein, 349 aa, Arabidopsis thaliana
DLCDYYYSLSPLLSAEVVTVPATRQRREKTTLTPIMAPSSRSPSPRTKRLRRARGEKEIGRSREREDDGREREKRNSRERDRDIGRDRDRERKGEGERDREVGDKRRRSGREDTEKRRRTRADDERYSRGRHERSTSPSDRSHRSSRRSPERAIASRHDEGSNARGGSEEPNVEEDSVARMRAVEEALAAKKKEEPSFELSGKLAEETNRYRGITLLFNEPPEARKPSERWRLYVFKDGEPLNEPLCLHRQSCYLFGRERRIADIPTDHPSCSKQHAVIQYREMEKEKPDGMMGKQVKPYIMDLGSTNKTYINESPIEPQRYYELFEKDTIKFGNSSREYVLLHENSAE

SEQ ID NO: 10157 - protein, 314 aa, Arabidopsis thaliana
MAPSSRSPSPRTKRLRRARGEKEIGRSREREDDGREREKRNSRERDRDIGRDRDRERKGEGERDREVGDKRRRSGREDTEKRRRTRADDERYSRGRHERSTSPSDRSHRSSRRSPERAIASRHDEGSNARGGSEEPNVEEDSVARMRAVEEALAAKKKEEPSFELSGKLAEETNRYRGITLLFNEPPEARKPSERWRLYVFKDGEPLNEPLCLHRQSCYLFGRERRIADIPTDHPSCSKQHAVIQYREMEKEKPDGMMGKQVKPYIMDLGSTNKTYINESPIEPQRYYELFEKDTIKFGNSSREYVLLHENSAE

SEQ ID NO: 10158 - DNA, 1947 bp, Arabidopsis thaliana
ccccccccggagactcgtttcatcttttttactcggcgagcttgtgaagaagaaactggtgatttcatctccttcgatcactcccaagattcgcattacctttcttataatcgccgagattgttcgagcctgaataatcaaaatggttgtgcttgctgctgccattgtggtcaagtctgggaaagtgattgtttccagacactatgtggatatgtcccgtatcagaatcgaaggtctacttgcagcttttcctaagctggttggaatgggaaagcagcatacctatatcgagacggagaatgtgcgatatgtttatcagcctattgaagctctcttcctgcttcttgttacaactaagcagagtaacattctagaagacctggccacccttactttgctctccaaacttgtacctgagtattccatgtctttagatgaagaagggatttccagggcatcttttgagctcatatttgcatttgatgaagtcatatctcttgggcacaaggaaagtgtgacagttgcccaggtgaagcagtattgtgaaatggaaagtcatgaggagaagttgcataaactggttatgcagagcaagatcaatgacactaaggacgtgatgaagcgtaaggctaatgagattgacaaaagcaagattgaaaagaataagccaggaggattttcgtccatgggttcaatgggatctggaagacttgaaagtggtttcaatgaattgagcatatccagtggtggcggcggtggttatggaagtggttctgggtttggcatgatttcagatgtcgaccctatcaataccaaaccaaaagatcgatcacggtcttctgttactgctcctcctaagagttctggcatgaaacttggcaagtcgggaaagaaccagttaatggagtcccttaaagcagaaggtgaagacgtcattgaagatgttaagcctactggccaatccaaagcagctgccccacctccaactgatcctttcacattaactgttgaagagaagctcaatgttgcattgagacgagatggtggacttagtagctttgatatgcagggaaccctgtcacttcaaattcttaaccaagaagatggatttgtccaagtccagattgcaaccggtgaaaatcccgaaattcttttcaagacccatcccaacatcaaccgagatatgttcaataatgagaatattctagggctgaagagacctgatcagccatttcccactggtcaaggtggagatggtgttggtcttctcaggtggagaatgcaaagagcagacgagtctatggtgccactaacaataaactgctggccttcagtctctggaaacgagacatatgtcagcctcgagtacgaagcctcgtccatgtttgatctgactaatgtcatcatctccgtaccacttcctgctctgagagaggcaccaagcgttagacaatgcgatggggagtggaggtacgacccaagaaattctgttctggaatggtctatactacttattgacaactccaaccgcagtggctcaatggagtttgttgtgcctccagtggattcatcggtgttcttccccatctctgttcagtttgcagcgacaagtacctacagtggcttgaaggtgactggaatgattcctctgagaggaggtggtggtgcgactcctaggtttgtgcagaggacgcagctgattgcccagaactatcaagtcatatgaaacactcctttgggggcatcggttgtttttaatttcttctatactatctggtgttggatttcgctcttttttttggatgccaaaagtacaatcttaattttctcggattttgctaggatatttctttctcaacttaattctaagacattatacatattcatatcttctttttttaccaacttctttttcaatgttttaaggatacaagtacgatttacaat

SEQ ID NO: 10159 - protein, 527 aa, Arabidopsis thaliana
MVVLAAAIVVKSGKVIVSRHYVDMSRIRIEGLLAAFPKLVGMGKQHTYIETENVRYVYQPIEALFLLLVTTKQSNILEDLATLTLLSKLVPEYSMSLDEEGISRASFELIFAFDEVISLGHKESVTVAQVKQYCEMESHEEKLHKLVMQSKINDTKDVMKRKANEIDKSKIEKNKPGGFSSMGSMGSGRLESGFNELSISSGGGGGYGSGSGFGMISDVDPINTKPKDRSRSSVTAPPKSSGMKLGKSGKNQLMESLKAEGEDVIEDVKPTGQSKAAAPPPTDPFTLTVEEKLNVALRRDGGLSSFDMQGTLSLQILNQEDGFVQVQIATGENPEILFKTHPNINRDMFNNENILGLKRPDQPFPTGQGGDGVGLLRWRMQRADESMVPLTINCWPSVSGNETYVSLEYEASSMFDLTNVIISVPLPALREAPSVRQCDGEWRYDPRNSVLEWSILLIDNSNRSGSMEFVVPPVDSSVFFPISVQFAATSTYSGLKVTGMIPLRGGGGATPRFVQRTQLIAQNYQVI

SEQ ID NO: 10160 - protein, 504 aa, Arabidopsis thaliana
MSRIRIEGLLAAFPKLVGMGKQHTYIETENVRYVYQPIEALFLLLVTTKQSNILEDLATLTLLSKLVPEYSMSLDEEGISRASFELIFAFDEVISLGHKESVTVAQVKQYCEMESHEEKLHKLVMQSKINDTKDVMKRKANEIDKSKIEKNKPGGFSSMGSMGSGRLESGFNELSISSGGGGGYGSGSGFGMISDVDPINTKPKDRSRSSVTAPPKSSGMKLGKSGKNQLMESLKAEGEDVIEDVKPTGQSKAAAPPPTDPFTLTVEEKLNVALRRDGGLSSFDMQGTLSLQILNQEDGFVQVQIATGENPEILFKTHPNINRDMFNNENILGLKRPDQPFPTGQGGDGVGLLRWRMQRADESMVPLTINCWPSVSGNETYVSLEYEASSMFDLTNVIISVPLPALREAPSVRQCDGEWRYDPRNSVLEWSILLIDNSNRSGSMEFVVPPVDSSVFFPISVQFAATSTYSGLKVTGMIPLRGGGGATPRFVQRTQLIAQNYQVI

SEQ ID NO: 10161 - protein, 486 aa, Arabidopsis thaliana
MGKQHTYIETENVRYVYQPIEALFLLLVTTKQSNILEDLATLTLLSKLVPEYSMSLDEEGISRASFELIFAFDEVISLGHKESVTVAQVKQYCEMESHEEKLHKLVMQSKINDTKDVMKRKANEIDKSKIEKNKPGGFSSMGSMGSGRLESGFNELSISSGGGGGYGSGSGFGMISDVDPINTKPKDRSRSSVTAPPKSSGMKLGKSGKNQLMESLKAEGEDVIEDVKPTGQSKAAAPPPTDPFTLTVEEKLNVALRRDGGLSSFDMQGTLSLQILNQEDGFVQVQIATGENPEILFKTHPNINRDMFNNENILGLKRPDQPFPTGQGGDGVGLLRWRMQRADESMVPLTINCWPSVSGNETYVSLEYEASSMFDLTNVIISVPLPALREAPSVRQCDGEWRYDPRNSVLEWSILLIDNSNRSGSMEFVVPPVDSSVFFPISVQFAATSTYSGLKVTGMIPLRGGGGATPRFVQRTQLIAQNYQVI

SEQ ID NO: 10162 - DNA, 1176 bp, Arabidopsis thaliana
gagagagtaatcgccatttttctttattgggggagtgaagaaggataggattcagatgatgaagtacagatgaatgctccataaaccctactcttcttcttttacctccagcttcgattataccattccttgtttgtgaaggcattttagttggtaaggatgataactggatacagcacgccaagtgcacatgttctaatgagctctcgggcattcaagtcatcatcatatagagctgcagcaggacagactcaacattatcttgctcgaagttcattgcctgtcgtaaagaactcgtggggatcaccaccttcacctttcaatgagcttccgagagtgtcaagaggtgtgcctctgtcatatctctcagcctcgtcttctctgcttctgaatggagaacaaggtagtctatctggtacattacctgtgttacctgtccgcagaaaaactcttttgactccacgagcgtcaaaagatgtaccttctagcttccgatttcccccgatgaccaagaagccacaatggtggtggagaactttggcttgcctgccttacctaatgccactgcatgaaacttggatgtatgcagaaaccgcttaccatctccacccattcctagaagattttgaattcttaacctacccatttctaggcgccataggaagattaccaagctggttcctcatggcttacttttttgtagcttatctagggatagtgcgaagaaaagaatggcctcacttcttcaggttccatgtagtgatgggtatgctgcttgaaatcgcactccaggttatagggaccgttagcaagtggatgcctcttggagtctattggggtaagtttgggatgcatttctggactgctgttgcgtttgcttatctgtttaccgtccttgaaagcatacggtgtgcacttgcgggtatgtacgcagacatcccgtttgtctgtgatgctgcctatatccagattccgtacgactaagaagaaacaacattggatcgttatgactcctctttttttttttttttgttaattaggtccttgttttgttgttacaaagactcttcttgaatgacaattatgtttgtaatcaacgtttcatgaacgcagccgtcaaagttacaaacttttgaacaaaaaaaaaaaaaaaaaaaactcgagggggggcccggt

SEQ ID NO: 10163 - protein, 274 aa, Arabidopsis thaliana
MITGYSTPSAHVLMSSRAFKSSSYRAAAGQTQHYLARSSLPVVKNSWGSPPSPFNELPRVSRGVPLSYLSASSSLLLNGEQGSLSGTLPVLPVRRKTLLTPRASKDVPSSFRFPPMTKKPQWWWRTLACLPYLMPLHETWMYAETAYHLHPFLEDFEFLTYPFLGAIGRLPSWFLMAYFFVAYLGIVRRKEWPHFFRFHVVMGMLLEIALQVIGTVSKWMPLGVYWGKFGMHFWTAVAFAYLFTVLESIRCALAGMYADIPFVCDAAYIQIPYD

SEQ ID NO: 10164 - protein, 261 aa, Arabidopsis thaliana
MSSRAFKSSSYRAAAGQTQHYLARSSLPVVKNSWGSPPSPFNELPRVSRGVPLSYLSASSSLLLNGEQGSLSGTLPVLPVRRKTLLTPRASKDVPSSFRFPPMTKKPQWWWRTLACLPYLMPLHETWMYAETAYHLHPFLEDFEFLTYPFLGAIGRLPSWFLMAYFFVAYLGIVRRKEWPHFFRFHVVMGMLLEIALQVIGTVSKWMPLGVYWGKFGMHFWTAVAFAYLFTVLESIRCALAGMYADIPFVCDAAYIQIPYD

SEQ ID NO: 10165 - protein, 159 aa, Arabidopsis thaliana
MTKKPQWWWRTLACLPYLMPLHETWMYAETAYHLHPFLEDFEFLTYPFLGAIGRLPSWFLMAYFFVAYLGIVRRKEWPHFFRFHVVMGMLLEIALQVIGTVSKWMPLGVYWGKFGMHFWTAVAFAYLFTVLESIRCALAGMYADIPFVCDAAYIQIPYD

SEQ ID NO: 10166 - DNA, 1658 bp, Arabidopsis thaliana
gaattctacagttctcatgctaaaccatattttttgctctctgttccttcaaaatcatttctttctcttctttgattcccaaagatcacttctttgtctttgatttttgattttttttctctctggcgtgaaggaagaagctttatttcatggagtctctgctctctagttcttctcttgtttccgctgctggtgggttttgttggaagaagcagaatctaaagctccactctttatcagaaatccgagttctgcgttgtgattcgagtaaagttgtcgcaaaaccgaagtttaggaacaatcttgttaggcctgatggtcaaggatcttcattgttgttgtatccaaaacataagtcgagatttcgggttaatgccactgcgggtcagcccgaggctttcgactcgaatagcaaacagaagtcttttagagactcgttagatgcgttttacaggttttctaggcctcatacagttattggcacagtgcttagcattttatctgtatctttcttagcagtagagaaggtttctgatatatctcctttacttttcactggcatcttggaggctgttgttgcagctctcatgatgaacatttacatagttgggctaaatcagttgtctgatgttgaaatagataaggttaacaagccctatcttccattggcatcaggagaatattctgttaacaccggcattgcaatagtagcttccttctccatcatgagtttctggcttgggtggattgttggttcatggccattgttctgggctctttttgtgagtttcatgctcggtactgcatactctatcaatttgccacttttacggtggaaaagatttgcattggttgcagcaatgtgtatcctcgctgtccgagctattattgttcaaatcgccttttatctacatattcagacacatgtgtttggaagaccaatcttgttcactaggcctcttattttcgccactgcgtttatgagctttttctctgtcgttattgcattgtttaaggatatacctgatatcgaaggggataagatattcggaatccgatcattctctgtaactctgggtcagaaacgggtgttttggacatgtgttacactacttcaaatggcttacgctgttgcaattctagttggagccacatctccattcatatggagcaaagtcatctcggttgtgggtcatgttatactcgcaacaactttgtgggctcgagctaagtccgttgatctgagtagcaaaaccgaaataacttcatgttatatgttcatatggaagctcttttatgcagagtacttgctgttaccttttttgaagtgactgacattagaagagaagaagatggagataaaagaataagtcatcactatgcttctgtttttattacaagttcatgaaattaggtagtgaactagtgaattagagttttattctgaaacatggcagactgcaaaaatatgtcaaagatatgaatttctgttgggtaaagaagtctctgcttgggcaaaatcttaaggttcggtgtgttgatataatgctaagcgaagaaatcgattctatgtagaaatttccgaaactatgtgtaaacatgtcagaacatctccattctatatcttcttctgcaagaaagctctgtttttatcaccg

SEQ ID NO: 10167 - protein, 393 aa, Arabidopsis thaliana
MESLLSSSSLVSAAGGFCWKKQNLKLHSLSEIRVLRCDSSKVVAKPKFRNNLVRPDGQGSSLLLYPKHKSRFRVNATAGQPEAFDSNSKQKSFRDSLDAFYRFSRPHTVIGTVLSILSVSFLAVEKVSDISPLLFTGILEAVVAALMMNIYIVGLNQLSDVEIDKVNKPYLPLASGEYSVNTGIAIVASFSIMSFWLGWIVGSWPLFWALFVSFMLGTAYSINLPLLRWKRFALVAAMCILAVRAIIVQIAFYLHIQTHVFGRPILFTRPLIFATAFMSFFSVVIALFKDIPDIEGDKIFGIRSFSVTLGQKRVFWTCVTLLQMAYAVAILVGATSPFIWSKVISVVGHVILATTLWARAKSVDLSSKTEITSCYMFIWKLFYAEYLLLPFLK

SEQ ID NO: 10168 - protein, 247 aa, Arabidopsis thaliana
MMNIYIVGLNQLSDVEIDKVNKPYLPLASGEYSVNTGIAIVASFSIMSFWLGWIVGSWPLFWALFVSFMLGTAYSINLPLLRWKRFALVAAMCILAVRAIIVQIAFYLHIQTHVFGRPILFTRPLIFATAFMSFFSVVIALFKDIPDIEGDKIFGIRSFSVTLGQKRVFWTCVTLLQMAYAVAILVGATSPFIWSKVISVVGHVILATTLWARAKSVDLSSKTEITSCYMFIWKLFYAEYLLLPFLK

SEQ ID NO: 10169 - protein, 246 aa, Arabidopsis thaliana
MNIYIVGLNQLSDVEIDKVNKPYLPLASGEYSVNTGIAIVASFSIMSFWLGWIVGSWPLFWALFVSFMLGTAYSINLPLLRWKRFALVAAMCILAVRAIIVQIAFYLHIQTHVFGRPILFTRPLIFATAFMSFFSVVIALFKDIPDIEGDKIFGIRSFSVTLGQKRVFWTCVTLLQMAYAVAILVGATSPFIWSKVISVVGHVILATTLWARAKSVDLSSKTEITSCYMFIWKLFYAEYLLLPFLK

SEQ ID NO: 10170 - DNA, 1504 bp, Arabidopsis thaliana
ggctaacttaaaaaacaaggctcgaggcggttctcttatctgcaaaactaaagactgttgtagagctcactagtcccccccccccccccccgaaaagcttaagtgagaagcagaaaaaaatggcgaaatctcagatctggtttggttttgcgttactcgcgttgcttctggtttcagccgtagctgacgatgtggttgttttgactgacgatagcttcgaaaaggaagttggtaaagataaaggagctctcgtcgagttttacgctccctggtgtggtcactgcaagaaacttgctccagagtatgaaaagctaggggcaagcttcaagaaggctaagtctgtgttgattgcaaaggttgattgtgatgagcaaaagagtgtctgtactaaatatggtgttagtggatacccaaccattcagtggtttcctaaaggatctcttgaacctcaaaagtatgagggtccacgcaatgctgaagctttggctgaatacgtgaacaaggaaggaggcaccaacgtaaaattagctgcagttccacaaaacgtggttgttttgacacctgacaatttcgatgagattgttctggatcaaaacaaagatgtcctagtcgaattttatgcaccatggtgtggccactgcaaatcactcgctcccacatacgaaaaggtagccacagtgtttaaacaggaagaaggtgtagtcatcgccaatttggatgctgatgcacacaaagcccttggcgagaaatatggagtgagtggattcccaacattgaaattcttcccaaaggacaacaaagctggtcacgattatgacggtggcagggatttagatgactttgtaagcttcatcaacgagaaatctgggaccagcagggacagtaaagggcagcttacttcaaaggctggtatagtcgaaagcttagatgctttggtaaaagagttagttgcagctagtgaagatgagaagaaggcagtgttgtctcgcatagaaaaggaagcaagtacccttaagggctccaccacgaggtatggaaagctttacttgaaactcgcaaagagctacatagaaaaaggttcagactatgctagcaaagaaacggagaggcttggacgggtgcttgggaagtcgataagtccagtgaaagctgatgaactcactctcaagagaaatatcctaaccacgttcgttgcttcttcttagaagtcatatagcttgaagctaagagaataggagtcgagagagtttataactgatactgttttgagattttatgtttgtcaagatcaagaacgtctgtggttatttctggttagttctgaaactcttttgaacccaagtttatctgtctctggtgaacaagcgaccccgataatcataaacttcattcgcgttaaaaaaaaaggttcagtaatgggccaggctcgtattcattattaatgggctaggctcgtgttcataaaaagtctgtaatgggtcattgaggtatacaaaggacatcc

SEQ ID NO: 10171 - protein, 361 aa, Arabidopsis thaliana
MAKSQIWFGFALLALLLVSAVADDVVVLTDDSFEKEVGKDKGALVEFYAPWCGHCKKLAPEYEKLGASFKKAKSVLIAKVDCDEQKSVCTKYGVSGYPTIQWFPKGSLEPQKYEGPRNAEALAEYVNKEGGTNVKLAAVPQNVVVLTPDNFDEIVLDQNKDVLVEFYAPWCGHCKSLAPTYEKVATVFKQEEGVVIANLDADAHKALGEKYGVSGFPTLKFFPKDNKAGHDYDGGRDLDDFVSFINEKSGTSRDSKGQLTSKAGIVESLDALVKELVAASEDEKKAVLSRIEKEASTLKGSTTRYGKLYLKLAKSYIEKGSDYASKETERLGRVLGKSISPVKADELTLKRNILTTFVASS

SEQ ID NO: 10172 - DNA, 573 bp, Arabidopsis thaliana
aaacagaatttaggaaaatattatatatttccttcttccacatcgccgatttatatcaaaatcatataatcaaggaacctctctaaaaccctattaaatcttctctctttcgttcttcttcttcttctcctcctccatcctccaaatctcgatttcccaaaaaaaaaacctaatctcgccgtactctcctcggttccatctttctctgcggccagtacgtgtgcagatatggctaccgagggagttgttccttcagcgcaggatattgctgctgaatttgtgagacagtactatcatgttttaggacagcttcctcatgaagctcgtaggttatatgttgatgctagtgttgtcagcagacctgatgttactggtactatgatgtcttttacttccgttgaggctatcaacaagcatatcctgtcctgtgactttgagaatactaaatttgaggttctgagtgttgactctcagaattctttggaagatgggatttttattatgggtgatcggtttcatgactggaaaagacaaccagaggaggaagttttctcagatgttctatcttgctcg

SEQ ID NO: 10173 - protein, 115 aa, Arabidopsis thaliana
MATEGVVPSAQDIAAEFVRQYYHVLGQLPHEARRLYVDASVVSRPDVTGTMMSFTSVEAINKHILSCDFENTKFEVLSVDSQNSLEDGIFIMGDRFHDWKRQPEEEVFSDVLSCS

SEQ ID NO: 10174 - protein, 65 aa, Arabidopsis thaliana
MMSFTSVEAINKHILSCDFENTKFEVLSVDSQNSLEDGIFIMGDRFHDWKRQPEEEVFSDVLSCS

SEQ ID NO: 10175 - protein, 64 aa, Arabidopsis thaliana
MSFTSVEAINKHILSCDFENTKFEVLSVDSQNSLEDGIFIMGDRFHDWKRQPEEEVFSDVLSCS

SEQ ID NO: 10176 - DNA, 1450 bp, Arabidopsis thaliana
agagagagagagagctcactagtcccccccccccccgttgttggtcttttcgactttctgcttaaacccagaaaaatggattcacagctagtcttgtctctgaagctgaatccttgcttcactcctctttctcctctcttccctttcactccatgttcttcttattcgccgtcgcttcgattttcttcttgctactcccgccgcctctattctccggttaccgtctacgccgcgaagaaactctcccacaagatcagttctgaattcgatgacagaatcaacggcgctctctctcccgacgctgattcccgcttcctcgaccgccaaaaggctctagaggcagctatgaatgacataaacagttcatttggtaaaggaagtgtaacaagattggggagtgctggtggagcactagtggagaccttttcgagtggtattttgactcttgatcttgctttaggtggaggcctaccaaagggtcgggtagtcgaaatatatggaccagaaagtagtggcaagaccacgctagcactccatgctattgctgaagtgcagaagcttggaggcaatgcaatgcttgttgatgcagagcatgcctttgatccagcgtattctaaagcattaggtgttgatgtagaaaatttgatagtgtgccagccagataatggcgagatggctttagaaactgcagaccgtatgtgtcgctcaggtgcggttgaccttatatgtgttgattctgtttcagcacttactccacgagctgagattgaaggtgagattggaatgcagcaaatgggtttgcaagctcgtcttatgagtcaagctcttcgtaaaatgtcaggaaacgcctctaaagctgggtgtactcttattttcctaaaccaaataagatacaagattggtgtgtactatgggaatccagaggtgactagcggaggaattgcgttaaagttcttcgcgtcggtccgtctagaaattcgttctgctgggaagatcaaatctagcaaaggggatgaagatattggtcttcgggctcgtgtaagagtgcagaagagcaaggtttcaagaccgtataagcaaggaagagagaaagcactgcagcacttaagggaaaaccctgctcttcaagacgaaattgagaagaaagtgagattgttgatgttagatggagaagttcatcgatcaactcctttgatgagcagcagctcttcctcggcttcacatcgcgaagaagaagaagaagactcgcttgacgatttccaatgacataacacttaagcttgagactttcggatctatggatgtacaacacttgattttctctcatcatgttcacctcttgtttcaagtttcatcaattaaaaaaacacactcatatggttcagtcttaaatccgaaaccattcttgtgcaaaaaaaaaaaaaaaaaaactcgagggggggcccggtac

SEQ ID NO: 10177 - protein, 421 aa, Arabidopsis thaliana
RERESSLVPPPPVVGLFDFLLKPRKMDSQLVLSLKLNPCFTPLSPLFPFTPCSSYSPSLRFSSCYSRRLYSPVTVYAAKKLSHKISSEFDDRINGALSPDADSRFLDRQKALEAAMNDINSSFGKGSVTRLGSAGGALVETFSSGILTLDLALGGGLPKGRVVEIYGPESSGKTTLALHAIAEVQKLGGNAMLVDAEHAFDPAYSKALGVDVENLIVCQPDNGEMALETADRMCRSGAVDLICVDSVSALTPRAEIEGEIGMQQMGLQARLMSQALRKMSGNASKAGCTLIFLNQIRYKIGVYYGNPEVTSGGIALKFFASVRLEIRSAGKIKSSKGDEDIGLRARVRVQKSKVSRPYKQGREKALQHLRENPALQDEIEKKVRLLMLDGEVHRSTPLMSSSSSSASHREEEEEDSLDDFQ

SEQ ID NO: 10178 - protein, 396 aa, Arabidopsis thaliana
MDSQLVLSLKLNPCFTPLSPLFPFTPCSSYSPSLRFSSCYSRRLYSPVTVYAAKKLSHKISSEFDDRINGALSPDADSRFLDRQKALEAAMNDINSSFGKGSVTRLGSAGGALVETFSSGILTLDLALGGGLPKGRVVEIYGPESSGKTTLALHAIAEVQKLGGNAMLVDAEHAFDPAYSKALGVDVENLIVCQPDNGEMALETADRMCRSGAVDLICVDSVSALTPRAEIEGEIGMQQMGLQARLMSQALRKMSGNASKAGCTLIFLNQIRYKIGVYYGNPEVTSGGIALKFFASVRLEIRSAGKIKSSKGDEDIGLRARVRVQKSKVSRPYKQGREKALQHLRENPALQDEIEKKVRLLMLDGEVHRSTPLMSSSSSSASHREEEEEDSLDDFQ

SEQ ID NO: 10179 - protein, 306 aa, Arabidopsis thaliana
MNDINSSFGKGSVTRLGSAGGALVETFSSGILTLDLALGGGLPKGRVVEIYGPESSGKTTLALHAIAEVQKLGGNAMLVDAEHAFDPAYSKALGVDVENLIVCQPDNGEMALETADRMCRSGAVDLICVDSVSALTPRAEIEGEIGMQQMGLQARLMSQALRKMSGNASKAGCTLIFLNQIRYKIGVYYGNPEVTSGGIALKFFASVRLEIRSAGKIKSSKGDEDIGLRARVRVQKSKVSRPYKQGREKALQHLRENPALQDEIEKKVRLLMLDGEVHRSTPLMSSSSSSASHREEEEEDSLDDFQ

SEQ ID NO: 10180 - DNA, 1344 bp, Arabidopsis thaliana
atctgagtcccggagaaatcgatcgtagctctctgtgcccttcgcttaaaaaaatatcgcttctctcgagaggggaaggaaagttcatttctttttgtccaattctttcaacttctcgttccaatcccctcaattctccgtttcaccgaacgcacttcgaacccttaattgctttttgcgggtcaagtttcgattcgagcgttttagggtttcgtatctgaatcggtcgacaagataaacccttttgtgggggtttcctctagatttcgaaaaaagagggatagctttcgtttggatggaaattctctgaaactaaactacatagtgatatggagacacaaattcatcaacttgagcaggaagcatataccgctgttttaagggcttttaaagcgcagtctgatgcgatttcttgggaaaaagaaagcttgataaccgaattgcgtaaagaattgagagtatctgatgatgaacatcgagagcttctcagtagggtcaataaggatgatactatccagaggataagagattggagacagggaggcgcaagccaaattactagacatgcaactattcagccttttgatgttcttcctagtcccactttctcagctgcccgaaagaaacagaaaacatttccatcttataatccatcaattggtgcgactggaaataggtcattcaataatcgtctggtatccagtggcatatcaggaaatgaatctgctgaagctctgatcggaagaaaagtgtggacaaaatggcctgaagataaccacttctatgaagcaattataacccagtacaatgcagatgagggtcggcatgctttggtgtatgatatacacgcagctaatgaaacgtgggaatgggttgatctcaaggagataccaccggaagacataagatgggatggggaggagagtggggtagctttaaacattggacatggaagtgcatccttccgtggcaacagaagaggccaaatccatggtggtagagggagaggaccaagaattcatcaaccaagaagggaacttgtaccgccaccaacacaacagaatggtagtggtgggcggagaacttcctctgatgatattgagttgttcaacacagactcgcttgtgaaggaggtggagagagttttcgattctacgcatcctgatccactcgagctcgacaaggccaagaaaatgctcaaggaacatgaacaggcactcattgctgccattgcaaggcttgctgatacttcggatggcgaaatggatggagatccaccatattcgcatgatcatccaatgccacagggatgagagaaaagctgtatgttactcaggattctgt

SEQ ID NO: 10181 - protein, 327 aa, Arabidopsis thaliana
METQIHQLEQEAYTAVLRAFKAQSDAISWEKESLITELRKELRVSDDEHRELLSRVNKDDTIQRIRDWRQGGASQITRHATIQPFDVLPSPTFSAARKKQKTFPSYNPSIGATGNRSFNNRLVSSGISGNESAEALIGRKVWTKWPEDNHFYEAIITQYNADEGRHALVYDIHAANETWEWVDLKEIPPEDIRWDGEESGVALNIGHGSASFRGNRRGQIHGGRGRGPRIHQPRRELVPPPTQQNGSGGRRTSSDDIELFNTDSLVKEVERVFDSTHPDPLELDKAKKMLKEHEQALIAAIARLADTSDGEMDGDPPYSHDHPMPQG

SEQ ID NO: 10182 - DNA, 517 bp, Arabidopsis thaliana
agtcccccccccccccccgagcaagacaaatttagtcaaaccaaaaaaaaaaaaaaaacgaaagcgcaaagactaaggagaaaagaaattcttcgcttcttctccggtgtaatcatgacaacctcaaaaagactagcagacaggaagattgagaaattcgacaagaacatattgaaaagaggatttgttcctgagaccaccaccaagaagggtaaggattaccctgttggtcccatcctcctcggcttctttgtctttgttgtcattggatcatctctcttccagatcatcaggaccgcaactagtggaggaatggcttaaacccaatcacattcaagctggaagattgcaattctcaaattgatgaatcatcactttcttctcttctgacttgtctctttttttcccttatactgtagaatgtgactactttctgttgactacatgttattgaaagaatttttgagtctttttctaataaaaaaaaaaaaaaaaaaaactcgagggggggcccggt

SEQ ID NO: 10183 - protein, 106 aa, Arabidopsis thaliana
SPPPPPEQDKFSQTKKKKKTKAQRLRRKEILRFFSGVIMTTSKRLADRKIEKFDKNILKRGFVPETTTKKGKDYPVGPILLGFFVFVVIGSSLFQIIRTATSGGMA

SEQ ID NO: 10184 - protein, 68 aa, Arabidopsis thaliana; identical to SEQ ID NO: 5670

SEQ ID NO: 10185 - DNA, 662 bp, Arabidopsis thaliana
actacattctccactgttcacattctctctctctctctggatctctagacaccaatacgcatagtgagcagagatcgtgatggagataaggtattggcggaggttaagaggataccaaaggctagatggttctgccaagaaggcgagctcgggccggagaaatgtaaagcgggtcaaaatggatcccacacggaagagacggttttggaggatcaagatagtgccgaagctaaggatcttgaaaaaggcgtcgcctaagaagcttttaacgtggcttcgagatgcttacgtcaacatgatgctgcgcctagcgaattctcgggtcgtcggatcatcgtacgggtacggcgaatatgggtacgggtcgggtttggcgtcgaaggagtatgacgagaagaagctggtggagatttacaaatcgatattgatggctcaggggaatctcgtgcaccgtgacgtacctaaactgtcctcaaattcgattttactctcacccattaggtaatttaaatccatatacataaaaaataaatggttatcgatgtcaaagttgtgatatgtattaaacttatactcttattaaatactatcaaattaataaaagttgattccgaataaaaaaagaaaaaaaaaaaaaaaaaaaactcgagggggggcccggt

SEQ ID NO: 10186 - protein, 141 aa, Arabidopsis thaliana
MEIRYWRRLRGYQRLDGSAKKASSGRRNVKRVKMDPTRKRRFWRIKIVPKLRILKKASPKKLLTWLRDAYVNMMLRLANSRVVGSSYGYGEYGYGSGLASKEYDEKKLVEIYKSILMAQGNLVHRDVPKLSSNSILLSPIR

SEQ ID NO: 10187 - protein, 108 aa, Arabidopsis thaliana
MDPTRKRRFWRIKIVPKLRILKKASPKKLLTWLRDAYVNMMLRLANSRVVGSSYGYGEYGYGSGLASKEYDEKKLVEIYKSILMAQGNLVHRDVPKLSSNSILLSPIR

SEQ ID NO: 10188 - DNA, 1878 bp, Arabidopsis thaliana
cggaagctctcacgtgacaaaaacacgcacaaaattattcaagttaccagctttattaagcaaaacgattgagccaaaaaaaacgcatcagaatctggaacctggatcagatctagtcaggggtcagatcggagagccggcaatataatggcagcggcgagacgattacggacgctccaatctcagccggagaacaaggtctgtgtcgattgctcccagaagaatccacaatgggcatcgatttcatatggaatcttcatgtgcttggaatgctccggtaagcaccgtggtttaggtgttcacatctcattcgtcagatccgtcaccatggattcatggtccgagatccagatcaagaaaatggacgctggaggcaacgagcgtctcaacaattttctcgctcagtacgggatctcgaaagagactgatatcatctccaagtacaattccaacgccgcgtctgtgtatcgagatcggatccaagctttagctgagggaagacaatggagagatccgccgattgttaaggaatcggttggtggtggattgatgaataagaagcctccgttgtctcaaggcggtggtagagattctggtaatggtggatgggataattgggataacgatgattcgtttagatctacggatatgaggaggaatcaatcggcgggtgattttaggtcatcgggaggtcgtggtgctccggcgaagtcgaaatcgtctgaggatatatattcacggtctcagctggaggcgtcggcggcgaataaggagagtttctttgcgaaaaggatggctgagaatgagtctaagcctgagggacttcctccttcacaaggtggtaagtatgttgggtttggatctagtccaggtccagctccgagaagcaatcaacagagtggtggtggtgatgttttctctgttatgtctgagggttttggaagattgtctcttgttgctgcatcagctgcaaatgttgttcagactggaaccatggagtttacttccaaggtcaaagaaggtggcttagatcagacggtcagtgagactgttaatgttgttgcgagtaagacaacagagataggacagaggacatgggggatcatgaaaggagtgatggcaattgcctcacaaaaggttgaagagttcactaaagaagaagcatcaacttggaatcaacagaataaaactgagggcaacggttactaccagaactctgggattggaaacaaaacagcaaattcatcttttggaggatcacaatcatcatcaagtggtcacaacaacagttatcgtaactcgaattcttgggatgactggggagaagagaacaatagcaaaaaggaagcagcaccaaaggtgtcgacttctaatgatgatgacgacggcggttgggctggttgggatgataatgatgctaaagatgatgatttctattatcagcctgcaagcgataagaaatctgtaggtcacaatgggaaatcagacactgcttggaccggtggaggttttctctaacggtgttacaggataatggtgaatgaagtttgtacaattaaggaatagcagagcctgtggtcttctcgtgctctgtcacaagagagagcagagtggtcatctcaaccattaagccaccactggtctttcttttcacatatcaattgcttggcgttcaatcaaatcgatcgtcactatttgttcttctacaatatatatagtttttttttttatttgtacaagtttcacagtcacagaggattgcttgctaaactattcgggttagtcttcagctctttttttgagattcaaacttttatttttcttgaaatttgtaatgatcacaaaagacaaattttccgttttattgtcttctttctc

SEQ ID NO: 10189 - protein, 456 aa, Arabidopsis thaliana
MAAARRLRTLQSQPENKVCVDCSQKNPQWASISYGIFMCLECSGKHRGLGVHISFVRSVTMDSWSEIQIKKMDAGGNERLNNFLAQYGISKETDIISKYNSNAASVYRDRIQALAEGRQWRDPPIVKESVGGGLMNKKPPLSQGGGRDSGNGGWDNWDNDDSFRSTDMRRNQSAGDFRSSGGRGAPAKSKSSEDIYSRSQLEASAANKESFFAKRMAENESKPEGLPPSQGGKYVGFGSSPGPAPRSNQQSGGGDVFSVMSEGFGRLSLVAASAANVVQTGTMEFTSKVKEGGLDQTVSETVNVVASKTTEIGQRTWGIMKGVMAIASQKVEEFTKEEASTWNQQNKTEGNGYYQNSGIGNKTANSSFGGSQSSSSGHNNSYRNSNSWDDWGEENNSKKEAAPKVSTSNDDDDGGWAGWDDNDAKDDDFYYQPASDKKSVGHNGKSDTAWTGGGFL

SEQ ID NO: 10190 - protein, 419 aa, Arabidopsis thaliana
MCLECSGKHRGLGVHISFVRSVTMDSWSEIQIKKMDAGGNERLNNFLAQYGISKETDIISKYNSNAASVYRDRIQALAEGRQWRDPPIVKESVGGGLMNKKPPLSQGGGRDSGNGGWDNWDNDDSFRSTDMRRNQSAGDFRSSGGRGAPAKSKSSEDIYSRSQLEASAANKESFFAKRMAENESKPEGLPPSQGGKYVGFGSSPGPAPRSNQQSGGGDVFSVMSEGFGRLSLVAASAANVVQTGTMEFTSKVKEGGLDQTVSETVNVVASKTTEIGQRTWGIMKGVMAIASQKVEEFTKEEASTWNQQNKTEGNGYYQNSGIGNKTANSSFGGSQSSSSGHNNSYRNSNSWDDWGEENNSKKEAAPKVSTSNDDDDGGWAGWDDNDAKDDDFYYQPASDKKSVGHNGKSDTAWTGGGFL

SEQ ID NO: 10191 - protein, 396 aa, Arabidopsis thaliana
MDSWSEIQIKKMDAGGNERLNNFLAQYGISKETDIISKYNSNAASVYRDRIQALAEGRQWRDPPIVKESVGGGLMNKKPPLSQGGGRDSGNGGWDNWDNDDSFRSTDMRRNQSAGDFRSSGGRGAPAKSKSSEDIYSRSQLEASAANKESFFAKRMAENESKPEGLPPSQGGKYVGFGSSPGPAPRSNQQSGGGDVFSVMSEGFGRLSLVAASAANVVQTGTMEFTSKVKEGGLDQTVSETVNVVASKTTEIGQRTWGIMKGVMAIASQKVEEFTKEEASTWNQQNKTEGNGYYQNSGIGNKTANSSFGGSQSSSSGHNNSYRNSNSWDDWGEENNSKKEAAPKVSTSNDDDDGGWAGWDDNDAKDDDFYYQPASDKKSVGHNGKSDTAWTGGGFL

SEQ ID NO: 10192 - DNA, 1178 bp, Arabidopsis thaliana
ggggacggaccgtgattggtcggtctctctcgttacggtgaggctgaggctgaggcggagattgagagagaccaaccatgatacgacgaatcaccgagagagcttctggtttcgctaagaatattccgattctcaaatcgtctcgatttcacggcgagtccctcgattcctccgtctcccctgttctcattcccggcgtccatgtcttccattgtcaggatgctgttgggattgtagctaaactatcagattgcatagcagcaaaaggtggcaacattcttggctacgatgtttttgttcctgaaaacaacaacgtcttctactctcgcagcgagtttatctttgatccggttaaatggccgagaagccaagtggatgaagattttcaaactattgcacaaagatacggtgccttgaattcagttgtgcgtgtgccttctattgatcctaagtataagatagctcttcttctttcaaaacaggatcattgtcttgtcgaaatgttgcataaatggcaggacgggaaactccctgtggatattacctgtgtgataagcaatcatgaaagagcttcaaacactcacgttatgcggtttcttgagaggcatggcatcccttatcattatgtatctacaactaaagagaataaaagagaagatgatattttggaattggttaaggacactgatttcctagttcttgctagatatatgcagattttatcgggtaactttttgaaaggttatggaaaggatgtaatcaacatccaccatggtctcttaccatcatttaagggtggatatcccgcaaaacaggcattcgacgctggtgtgaaactaattggagccactagtcactttgttaccgaggaacttgattcagggccaattattgaacaaatggttgagagtgtttcccaccgagacaacttaaggagctttgtccagaaatccgaggacctagagaaaaaatgcctcacgagagctataaaatcttactgcgaactaagggtattaccttatggtacaaacaagactgttgtattctagttaagaaagcaataactacgattctcatctgattctttgtttgaacatctcaagaaaaggtgatacgaatttctataaaaaaaaaaaaaaaaaaaaaaaaaaaaaaaaaaaccaaaaaaaaaaaaaaaa

SEQ ID NO: 10193 - protein, 323 aa, Arabidopsis thaliana
MIRRITERASGFAKNIPILKSSRFHGESLDSSVSPVLIPGVHVFHCQDAVGIVAKLSDCIAAKGGNILGYDVFVPENNNVFYSRSEFIFDPVKWPRSQVDEDFQTIAQRYGALNSVVRVPSIDPKYKIALLLSKQDHCLVEMLHKWQDGKLPVDITCVISNHERASNTHVMRFLERHGIPYHYVSTTKENKREDDILELVKDTDFLVLARYMQILSGNFLKGYGKDVINIHHGLLPSFKGGYPAKQAFDAGVKLIGATSHFVTEELDSGPIIEQMVESVSHRDNLRSFVQKSEDLEKKCLTRAIKSYCELRVLPYGTNKTVVF

SEQ ID NO: 10194 - protein, 182 aa, Arabidopsis thaliana
MLHKWQDGKLPVDITCVISNHERASNTHVMRFLERHGIPYHYVSTTKENKREDDILELVKDTDFLVLARYMQILSGNFLKGYGKDVINIHHGLLPSFKGGYPAKQAFDAGVKLIGATSHFVTEELDSGPIIEQMVESVSHRDNLRSFVQKSEDLEKKCLTRAIKSYCELRVLPYGTNKTVVF

SEQ ID NO: 10195 - DNA, 1654 bp, Arabidopsis thaliana
cactagtcccccccccccccccaccgcttctccccggcttgacccttgtcgtactcgtcgatggctccggtgaagcagaagaagaagaataagaagaagcctctggataaggcgaagaagttggcgaagaataaagagaagaagagagtcaacgcagtgccattggatccggaggctatcgactgcgactggtgggatactttctggctccgaaactcttctccctcagctcctctagggttctttgaattgaaccgagagattgttgttgttttcagtcccctcagacgaagactatgcgttcaagcacttctttagggcttctaagacaacttttagctacatttgctcgctcgtcagggaggatcttatctctagacctccctctggtctcatcaacatcgagggaaggcttcttagtgttgagaaacaagtcgccattgctcttcgaaggttagcttccggtgattctcaggtctccgttggtgctgcctttggtgttggccagtccactgtttctcaggttacatggagattcatcgaggcactcgaagaacgtgccaagcatcatcttagatggccagattctgaccgaattgaagagatcaagtcaaagttcgaggagatgtacggtctccccaattgctgcggagccattgacactacgcacatcatcatgactctcccggctgtgcaagcatcagatgactggtgtgaccaggagaagaactacagcatgttcttacaaggagtctttgatcacgagatgagatttctcaacatggttaccggctggcctggcggcatgaccgtctccaagcttctcaagttctctggcttcttcaaactctgtgaaaacgctcagattttagacggcaatcctaaaactctatcccaaggagcccagattagagaatacgttgttggagggatcagttacccgcttcttccctggcttataactcctcacgacagcgatcatccctctgattccatggtggcgttcaacgaaaggcatgagaaggtgaggtcagtcgcagctactgcctttcaacagcttaaaggaagctggaggattctgagcaaagttatgtggagaccagacaggaggaagctacctagtataatactggtgtgttgtttgttgcataacatcattatcgactgtggggattatcttcaagaagatgttcctttgtctggtcatcacgactccggttatgcagaccggtactgcaagcagaccgagccgcttggtagtgagctcagaggatgtctgactgagcatttgcttaggtgaggatcttaaccttgggaattggacatcttcatctcttctctaaggccgtactaagcccgttagaccattcagcatcagtttagtggtagcccgagacatatcggacaaaagcaatgttatgaaacttttcttcaggtatcaacaccagattaacatcatgccagttggacctacaaaaatagattcatccttaagtgtgattaccatactttgtgaactactaatcttttgagaggagtggactatatccccaacggaactgtttgttttggcaatgtaaatgttatttttttaataataattggtgttttctttcaaaaaaaaaaaaaaaaaactcgagggggggcccggtac

SEQ ID NO: 10196 - protein, 224 aa, Arabidopsis thaliana
MYGLPNCCGAIDTTHIIMTLPAVQASDDWCDQEKNYSMFLQGVFDHEMRFLNMVTGWPGGMTVSKLLKFSGFFKLCENAQILDGNPKTLSQGAQIREYVVGGISYPLLPWLITPHDSDHPSDSMVAFNERHEKVRSVAATAFQQLKGSWRILSKVMWRPDRRKLPSIILVCCLLHNIIIDCGDYLQEDVPLSGHHDSGYADRYCKQTEPLGSELRGCLTEHLLR

SEQ ID NO: 10197 - protein, 207 aa, Arabidopsis thaliana
MTLPAVQASDDWCDQEKNYSMFLQGVFDHEMRFLNMVTGWPGGMTVSKLLKFSGFFKLCENAQILDGNPKTLSQGAQIREYVVGGISYPLLPWLITPHDSDHPSDSMVAFNERHEKVRSVAATAFQQLKGSWRILSKVMWRPDRRKLPSIILVCCLLHNIIIDCGDYLQEDVPLSGHHDSGYADRYCKQTEPLGSELRGCLTEHLLR

SEQ ID NO: 10198 - protein, 187 aa, Arabidopsis thaliana
MFLQGVFDHEMRFLNMVTGWPGGMTVSKLLKFSGFFKLCENAQILDGNPKTLSQGAQIREYVVGGISYPLLPWLITPHDSDHPSDSMVAFNERHEKVRSVAATAFQQLKGSWRILSKVMWRPDRRKLPSIILVCCLLHNIIIDCGDYLQEDVPLSGHHDSGYADRYCKQTEPLGSELRGCLTEHLLR

SEQ ID NO: 10199 - DNA, 813 bp, Arabidopsis thaliana
gagagaagataatgagctccttggggttttcagttggaacttgttctcctccaagtgagaaaagaaaatgcagatttcttgtgaataatagcttaaacaaagcagaggctattaacttgagaaacaagcaaaaagtttcttctgatcctgagttaagttttgcccaattatcctcatgtggtagaagagaagcaattattggttttggtttctctattggcttgcttgataatgtttctgcattagccgaaacaacttcttgtgaattctctgtgtctccttctggtcttgctttttgtgataaagttgttggttatggtcctgaagctgttaaagggcaactaatcaaggcacattatgtagggaagttggagaatgggaaagtctttgataatagctataatcgagggaaacctcttactttccgaattggtgttggtgaggtgataaaaggttgggatcaaggaatccttggctctgatggaattcctcctatgcttactggtgggaaacgaacattgaggattcctccagaactcgcgtatggtgatcgaggcgcaggttgcaaaggaggctcatgccttattcctccagcttcggttcttctctttgacattgagtacataggtaaagcttgagagagcttttttgcttttgctttgccttttctgagccatatcatactcttgtttgaatcatccttatagaagaaaaaaatatgtctattattttttctactatgtaatcaagtgaatatctcagctttttctatcaaaaaaaaaaaaaaaaaaaactcgagggggggcccggtac

SEQ ID NO: 10200 - protein, 211 aa, Arabidopsis thaliana
EKIMSSLGFSVGTCSPPSEKRKCRFLVNNSLNKAEAINLRNKQKVSSDPELSFAQLSSCGRREAIIGFGFSIGLLDNVSALAETTSCEFSVSPSGLAFCDKVVGYGPEAVKGQLIKAHYVGKLENGKVFDNSYNRGKPLTFRIGVGEVIKGWDQGILGSDGIPPMLTGGKRTLRIPPELAYGDRGAGCKGGSCLIPPASVLLFDIEYIGKA

SEQ ID NO: 10201 - protein, 208 aa, Arabidopsis thaliana
MSSLGFSVGTCSPPSEKRKCRFLVNNSLNKAEAINLRNKQKVSSDPELSFAQLSSCGRREAIIGFGFSIGLLDNVSALAETTSCEFSVSPSGLAFCDKVVGYGPEAVKGQLIKAHYVGKLENGKVFDNSYNRGKPLTFRIGVGEVIKGWDQGILGSDGIPPMLTGGKRTLRIPPELAYGDRGAGCKGGSCLIPPASVLLFDIEYIGKA

SEQ ID NO: 10202 - DNA, 1537 bp, Arabidopsis thaliana
gaactaaaccaaaataatccaacagtggtagaaacaaaacaaaagaaaactccatggacttcacaagaaacagcaacaccaagctccatccccaaactcagcttctgtttccccctaatatggagaaaaactcaaatgttagcgccaacccatttgcagaagactcacttacaagcagaatcaatctaaaggaaactacagatttcatcaagtcacttccaatttcatcaaaccaaagcagtagtagcagcaatgagatggtaaacgagagaagaccaagtttctcatcacaaaagagcattggagaaggaagaagcaatggacaaagaagattgatgttaatggagtctccttgtactccaggtagaggagtcttcagtttcagtagcaatgtctctggtagaagaagaaacttcccttctaaatggattgatgctgagaaatgggtcacttcctctggtcatgactctccagcacattttctcaaaaacaaccaatttgatgggtttaaacaccaggtggaagttgtatactcagagaaatctagggttacagaagaatgtttccatggatctgtctcattatctccacaagatcttatccttaaagataagttagcaaacgaagttcctcagattcttccatcaacggaagggtttatattcaaagattccgacaagtttctccggtacgaggaagctcaagttcaacacagagacatgggaacagagatgacaccaataggaagtgtaacgacttcaagatgtcacacgccgtttaaaagttcctctccagcgagacacaacacgccttctcaattgtctggtccgttaacggaaaccaaaaacgttatagatatatccgagttcgaagacaagcttagactcagtgggtcatcaacgagtcagtattgtaactcggtgacgagtcattggaactcgagagaagaagaagaagaagagatatcgaagagtttaagacatttcgatatggagagtgagttaaggagaagtgtgtctgaatctaaagctcctttatgggatgatgaagacgacaagatcaagttttgtcaaaggtatcaaagagaagaggccaaaattcaagcatgggttaatcttgaaaacgctaaagccgaagctcaatctagaaagcttgaggtgaaaatacagaagatgagatcaaatttagaggagaaattaatgaagagaatggatatggtgcaccggagagcagaagattggagagctacggcgaggcagcaacatgttgagcagatgcagaaagcggccgagacggcgaggaaattgacaaaccgccgaggctatttggttaccggccgtagctcatgtggttgtctaccttgcaataatacttgtcattaactcagtcaaagtaaaagagagtaaaatacacataaacaaacacaagaaattactgtttatgtgtttcgattatcaacatgtatgttcgtttattgtttatgcaagagagtaaaaagccaaaaaaaaaaaaaaaaaaactcgagggggggcccggt

SEQ ID NO: 10203 - protein, 442 aa, Arabidopsis thaliana
MDFTRNSNTKLHPQTQLLFPPNMEKNSNVSANPFAEDSLTSRINLKETTDFIKSLPISSNQSSSSSNEMVNERRPSFSSQKSIGEGRSNGQRRLMLMESPCTPGRGVFSFSSNVSGRRRNFPSKWIDAEKWVTSSGHDSPAHFLKNNQFDGFKHQVEVVYSEKSRVTEECFHGSVSLSPQDLILKDKLANEVPQILPSTEGFIFKDSDKFLRYEEAQVQHRDMGTEMTPIGSVTTSRCHTPFKSSSPARHNTPSQLSGPLTETKNVIDISEFEDKLRLSGSSTSQYCNSVTSHWNSREEEEEEISKSLRHFDMESELRRSVSESKAPLWDDEDDKIKFCQRYQREEAKIQAWVNLENAKAEAQSRKLEVKIQKMRSNLEEKLMKRMDMVHRRAEDWRATARQQHVEQMQKAAETARKLTNRRGYLVTGRSSCGCLPCNNTCH

SEQ ID NO: 10204 - protein, 420 aa, Arabidopsis thaliana
MEKNSNVSANPFAEDSLTSRINLKETTDFIKSLPISSNQSSSSSNEMVNERRPSFSSQKSIGEGRSNGQRRLMLMESPCTPGRGVFSFSSNVSGRRRNFPSKWIDAEKWVTSSGHDSPAHFLKNNQFDGFKHQVEVVYSEKSRVTEECFHGSVSLSPQDLILKDKLANEVPQILPSTEGFIFKDSDKFLRYEEAQVQHRDMGTEMTPIGSVTTSRCHTPFKSSSPARHNTPSQLSGPLTETKNVIDISEFEDKLRLSGSSTSQYCNSVTSHWNSREEEEEEISKSLRHFDMESELRRSVSESKAPLWDDEDDKIKFCQRYQREEAKIQAWVNLENAKAEAQSRKLEVKIQKMRSNLEEKLMKRMDMVHRRAEDWRATARQQHVEQMQKAAETARKLTNRRGYLVTGRSSCGCLPCNNTCH

SEQ ID NO: 10205 - protein, 374 aa, Arabidopsis thaliana
MVNERRPSFSSQKSIGEGRSNGQRRLMLMESPCTPGRGVFSFSSNVSGRRRNFPSKWIDAEKWVTSSGHDSPAHFLKNNQFDGFKHQVEVVYSEKSRVTEECFHGSVSLSPQDLILKDKLANEVPQILPSTEGFIFKDSDKFLRYEEAQVQHRDMGTEMTPIGSVTTSRCHTPFKSSSPARHNTPSQLSGPLTETKNVIDISEFEDKLRLSGSSTSQYCNSVTSHWNSREEEEEEISKSLRHFDMESELRRSVSESKAPLWDDEDDKIKFCQRYQREEAKIQAWVNLENAKAEAQSRKLEVKIQKMRSNLEEKLMKRMDMVHRRAEDWRATARQQHVEQMQKAAETARKLTNRRGYLVTGRSSCGCLPCNNTCH

SEQ ID NO: 10206 - DNA, 2057 bp, Arabidopsis thaliana
tccttcgtccgaatacttttcttcttcctccaccgatcatccgccattgttacccaattttgctctgaattctattaaatctcatcggaattattcaaattccttccataaatttcgaaatgacagagcgtggagctatggtggtatcgtcttctacctgttacgttccttttcgatgtcctcaagcaagaaaagattttgctttcgtcgagccgagtaagaagctaaaccctaatcgtgtattgataaagcctccggtttacacgtattctccggcactgacggcggcgaaatgtaacatttttgattacgcggaaactggtgagaatttggtcggcgataagcaatttgtgcggtggtttcgtgaagcttggccttatttgtgggctcatcgtagctgtaccttcgtcgttactatctccggcgatgtcttagacggcccttattgtgatctcgttttaaaggacatagcatttcttcatcatctgggcattaagtttgttctagttcctggaactcaagtgcaaatcgaccagcttctagctgagagaggacgcgagcctacatatgtaggtcgttacagagtcacagactcagcatctcttcaggctgctaaggaagctgcgggagcaatatctgtaatgattgaggccaaactatctcccggaccttctatttacaatatacgccgacatggtgatagtagtcgtttgcatgaaacaggcgttagggtcgatactggtaacttctttgcagcaaagagaagaggtgttgttgatggtgttgattttggagcaactggtttagtgaagaagatagatgtagatcgaatccgtgagaggcttgatagtggttctgtagttttattgaggaacttgggccattccagcaccggagaagtcttaaattgcaatacctatgaggttgctacagcatgtgctttagctataggagcagataagcttatttgcataatggatggtccagttcttgatgagaatggacatcttgttcggttcttgactcttcaggaagcagatacattagtcagaaaacgggcacagcaaagcgagatcgctgccaattacgtgaaggctgttggggatggaggcataagtagttttcctgaacctcttggttacaatggtatggtgacgactcccaacaatcatattgggagaccgatttgggaaaaactcagtccgacctttcagaatggtgttggatttgacaacggaaatgggttgtggtctggggagcaaggttttgctattggcggtgaggagagaattagccgtttgaatggatatctctctgaactggctgcagcagcgttcgtttgcagaggtggtgtcaaaagagttcacttattggatggtactataagtggagtgctattgttggagcttttcaaaagagatggaatggggactatggtggcaagtgatgtatatgaaggaaaccgggaggcgaaagtggaagatcttgctggaataagacaaataatcaaacccctggaagaatctggggctttagttcgtagaactgatgaggagcttctgcgagctttggattcgtttgtggttgtggaaagggaaggacatattatcgcttgcgcggctttgttccctttctttgaagaaaaatgtggagaagttgcagctatcgcagttgcatcagattgccgtggacaaggccagggagataaattgctcgattacattgagaagaaagcgtcagctcttggacttgagatgctatttctgctgacaacgagaaccgcggactggtttgtgagacgcgggtttcaggaatgtccaatcgagatgataccagaggcaagacgggaaagaatcaatctttcgaggagatcaaagtattacatgaagaagctgttgccagacaggagtggaatttctgttgttcgaacatttcagtatgattcttgagagtgtccagaagcagaaaattcaaacatagagcaaataaaatgtaattgacacagaaacatttagctgaatctctaagattctgctgagttttgaatcaatattttc

SEQ ID NO: 10207 - protein, 609 aa, Arabidopsis thaliana
MTERGAMVVSSSTCYVPFRCPQARKDFAFVEPSKKLNPNRVLIKPPVYTYSPALTAAKCNIFDYAETGENLVGDKQFVRWFREAWPYLWAHRSCTFVVTISGDVLDGPYCDLVLKDIAFLHHLGIKFVLVPGTQVQIDQLLAERGREPTYVGRYRVTDSASLQAAKEAAGAISVMIEAKLSPGPSIYNIRRHGDSSRLHETGVRVDTGNFFAAKRRGVVDGVDFGATGLVKKIDVDRIRERLDSGSVVLLRNLGHSSTGEVLNCNTYEVATACALAIGADKLICIMDGPVLDENGHLVRFLTLQEADTLVRKRAQQSEIAANYVKAVGDGGISSFPEPLGYNGMVTTPNNHIGRPIWEKLSPTFQNGVGFDNGNGLWSGEQGFAIGGEERISRLNGYLSELAAAAFVCRGGVKRVHLLDGTISGVLLLELFKRDGMGTMVASDVYEGNREAKVEDLAGIRQIIKPLEESGALVRRTDEELLRALDSFVVVEREGHIIACAALFPFFEEKCGEVAAIAVASDCRGQGQGDKLLDYIEKKASALGLEMLFLLTTRTADWFVRRGFQECPIEMIPEARRERINLSRRSKYYMKKLLPDRSGISVVRTFQYDS

SEQ ID NO: 10208 - protein, 603 aa, Arabidopsis thaliana
MVVSSSTCYVPFRCPQARKDFAFVEPSKKLNPNRVLIKPPVYTYSPALTAAKCNIFDYAETGENLVGDKQFVRWFREAWPYLWAHRSCTFVVTISGDVLDGPYCDLVLKDIAFLHHLGIKFVLVPGTQVQIDQLLAERGREPTYVGRYRVTDSASLQAAKEAAGAISVMIEAKLSPGPSIYNIRRHGDSSRLHETGVRVDTGNFFAAKRRGVVDGVDFGATGLVKKIDVDRIRERLDSGSVVLLRNLGHSSTGEVLNCNTYEVATACALAIGADKLICIMDGPVLDENGHLVRFLTLQEADTLVRKRAQQSEIAANYVKAVGDGGISSFPEPLGYNGMVTTPNNHIGRPIWEKLSPTFQNGVGFDNGNGLWSGEQGFAIGGEERISRLNGYLSELAAAAFVCRGGVKRVHLLDGTISGVLLLELFKRDGMGTMVASDVYEGNREAKVEDLAGIRQIIKPLEESGALVRRTDEELLRALDSFVVVEREGHIIACAALFPFFEEKCGEVAAIAVASDCRGQGQGDKLLDYIEKKASALGLEMLFLLTTRTADWFVRRGFQECPIEMIPEARRERINLSRRSKYYMKKLLPDRSGISVVRTFQYDS

SEQ ID NO: 10209 - protein, 435 aa, Arabidopsis thaliana
MIEAKLSPGPSIYNIRRHGDSSRLHETGVRVDTGNFFAAKRRGVVDGVDFGATGLVKKIDVDRIRERLDSGSVVLLRNLGHSSTGEVLNCNTYEVATACALAIGADKLICIMDGPVLDENGHLVRFLTLQEADTLVRKRAQQSEIAANYVKAVGDGGISSFPEPLGYNGMVTTPNNHIGRPIWEKLSPTFQNGVGFDNGNGLWSGEQGFAIGGEERISRLNGYLSELAAAAFVCRGGVKRVHLLDGTISGVLLLELFKRDGMGTMVASDVYEGNREAKVEDLAGIRQIIKPLEESGALVRRTDEELLRALDSFVVVEREGHIIACAALFPFFEEKCGEVAAIAVASDCRGQGQGDKLLDYIEKKASALGLEMLFLLTTRTADWFVRRGFQECPIEMIPEARRERINLSRRSKYYMKKLLPDRSGISVVRTFQYDS

SEQ ID NO: 10210 - DNA, 1941 bp, Arabidopsis thaliana
aaaaaaaaaaacagacaacaaaaagaaaagaaaatccaaacaagaagaagaagacgaaaatcttctgatatttctgacaatggaggttcttttgaaattaccctcttcagagtctcctcttaaggataaatttggatctgttcaaatccatgaagctaataagggtgatggtgatcatcaagaacttgaatctgccaaggcagagatgagcgaggtgaaggaagagaacgagaagcttaaaggaatgctcgaacgaattgaaagtgattacaaatctctcaagctcagattcttcgacataattcaacaagaaccttcaaacaccgcaactaaaaatcaaaacatggttgatcatcccaagccaacgacgacggatttgagttcttttgaccaagaacgcgagcttgtatcgctttcactagggagaagaagttcttccccaagtgatagcgtccccaaaaaggaagagaaaacggacgcaatcagcgcagaagtcaacgctgacgaagagttgactaaggccggcttgaccttagggatcaataatggcaacggaggtgaaccgaaagagggtttatctatggagaatcgtgcaaattctggctcggaagaagcttgggcgccaggtaaagttacggggaagagaagctctccagcaccagcctccggtggcgatgctgacggtgaggccggtcaacaaaaccatgttaagagagctagagtttgtgttagagcaagatgtgacacaccaacgatgaatgatggttgtcaatggagaaaatatggacaaaagattgcgaaaggaaatccatgtccacgagcatattatcgctgcacggttgcacctggatgtcccgttagaaaacaggtccaaagatgtgcagatgacatgtctatactaatcacaacctatgaaggaacacacagccactctcttccactctcagccaccaccatggcttccaccacatcagccgctgcctccatgctcctctctggctcctcctcctcaccagccgctgaaatgatcggaaataacctctacgacaattcaagattcaacaacaacaacaaatccttctattcacccacccttcactccccattacatcccaccgtcactctagacctcactgctccacaacactcttcctcgtcttcttcttcattgctttctttaaatttcaacaaattctcgaactctttccaaagattcccatctacaagcctaaatttctcttctacttcatcaacatcatcaaacccgtctactctcaacctacccgcgatttggggtaatgggtattcttcttatactccatatccttacaacaacgtccaatttgggacgtccaacctaggaaaaacagtccaaaatagccagtccttaaccgaaaccctaacaaaagcgcttacttccgacccaagtttccactcggtgatcgctgctgccatctcaactatggtcggatcaaatggagaacaacagattgtcggtccacggcattcgattagcaataacattcaacaaaccaacacgacgaataataacaaaggatgtggaggctattttagcagcttattgatgtctaacattatggcgagtaatcaaacgggtgcttctttggatcaaccatcgtcgcaacttcctcccttctctatgttcaagaattcttcttcttcgtcttctacgactaatttcgtgaacaaggaagagaaaagctagtcattgttcttgttttttgttttttgggtgattttttattaggtgttttaattagtcttgtatcaagatatgttgattcttgttcgtccgtttctcaaaagtgtttattttttcttcttagttaggagactatggaaccaaattcaaataaaccaaaccaaatgtacaatttttttatgttcttgtgtggcaaatattatgttctaatttgattt

SEQ ID NO: 10211 - protein, 574 aa, Arabidopsis thaliana
KKKTDNKKKRKSKQEEEDENLLIFLTMEVLLKLPSSESPLKDKFGSVQIHEANKGDGDHQELESAKAEMSEVKEENEKLKGMLERIESDYKSLKLRFFDIIQQEPSNTATKNQNMVDHPKPTTTDLSSFDQERELVSLSLGRRSSSPSDSVPKKEEKTDAISAEVNADEELTKAGLTLGINNGNGGEPKEGLSMENRANSGSEEAWAPGKVTGKRSSPAPASGGDADGEAGQQNHVKRARVCVRARCDTPTMNDGCQWRKYGQKIAKGNPCPRAYYRCTVAPGCPVRKQVQRCADDMSILITTYEGTHSHSLPLSATTMASTTSAAASMLLSGSSSSPAAEMIGNNLYDNSRFNNNNKSFYSPTLHSPLHPTVTLDLTAPQHSSSSSSSLLSLNFNKFSNSFQRFPSTSLNFSSTSSTSSNPSTLNLPAIWGNGYSSYTPYPYNNVQFGTSNLGKTVQNSQSLTETLTKALTSDPSFHSVIAAAISTMVGSNGEQQIVGPRHSISNNIQQTNTTNNNKGCGGYFSSLLMSNIMASNQTGASLDQPSSQLPPFSMFKNSSSSSSTTNFVNKEEKS

SEQ ID NO: 10212 - protein, 548 aa, Arabidopsis thaliana [sequence omitted]

SEQ ID NO: 10213 - protein, 506 aa, Arabidopsis thaliana
MSEVKEENEKLKGMLERIESDYKSLKLRFFDIIQQEPSNTATKNQNMVDHPKPTTTDLSSFDQERELVSLSLGRRSSSPSDSVPKKEEKTDAISAEVNADEELTKAGLTLGINNGNGGEPKEGLSMENRANSGSEEAWAPGKVTGKRSSPAPASGGDADGEAGQQNHVKRARVCVRARCDTPTMNDGCQWRKYGQKIAKGNPCPRAYYRCTVAPGCPVRKQVQRCADDMSILITTYEGTHSHSLPLSATTMASTTSAAASMLLSGSSSSPAAEMIGNNLYDNSRFNNNNKSFYSPTLHSPLHPTVTLDLTAPQHSSSSSSSLLSLNFNKFSNSFQRFPSTSLNFSSTSSTSSNPSTLNLPAIWGNGYSSYTPYPYNNVQFGTSNLGKTVQNSQSLTETLTKALTSDPSFHSVIAAAISTMVGSNGEQQIVGPRHSISNNIQQTNTTNNNKGCGGYFSSLLMSNIMASNQTGASLDQPSSQLPPFSMFKNSSSSSSTTNFVNKEEKS

SEQ ID NO: 10214 - DNA, 1393 bp, Arabidopsis thaliana
gactaactcactctctcactcaagggtccaaaagtgttttctctttttcagtttctctttctctttttgacagaagagaccgagaagcaatgggaagggctccgtgttgtgagaaaatcgggttgaagagagggagatggacagccgaggaagatgagatcctcaccaagtatattcagaccaatggtgaaggttcttggcgatctttgcctaagaaagctggattgttgagatgtggaaagagctgtagactaaggtggataaactacttaagaagagacttaaaaagaggaaatattacttccgacgaagaagaaataatcgtcaagttgcattcccttctcggcaacagatggtcacttattgcaacacatctaccaggaagaacagacaacgaaattaaaaactattggaactcacatctcagccgcaaaatctatgccttcactgccgtttccggagatggacacaatctactcgtcaacgatgtagtcttgaagaaatcttgttcatcgtcttctggagccaagaacaataacaagaccaagaagaagaagaagggaaggactagtaggtcatccatgaagaaacacaagcaaatggtgacggcctcacaatgtttctcacaacctaaggagctagagagtgatttcagtgagggagggcaaaatggtaattttgaaggagagtctttggggccttatgagtggttggatggtgagttagaacggctcttgagtagttgtgtctgggaatgcactagtgaagaggctgtgattggagtaaatgatgaaaaggtgtgtgagagtggggacaatagtagttgttgtgttaatttgtttgaagaagaacaaggaagcgagacaaagattggtcacgtaggaatcacagaggttgatcatgatatgacggtggaaagagaaagagagggaagttttttaagttcgaattcaaatgaaaataatgataaagattggtgggttggtctatgtaattcttcagaagttgggtttggggttgatgaggagttgcttgattgggagtttcaaggtaatgtcacttgtcaaagtgatgatctatgggatctctcagatattggagagataacattggagtgatactaccgagcaagtggattgtacattagaaggcgcgcgtagaaatccaataaaacatcgatgttttgattgtaaagtctagtgttttgtttggttatagtggatcttgtggttttgtagtagcttgttggagtgttttaagaaagttaagataaatgtagtttctagtttagactagtttgaagcatgttatgccttttcttctttgtgactctttcgttctctttttgttgctagttataatgtttgtttgttctttttttacgtttccttgt

SEQ ID NO: 10215 - protein, 371 aa, Arabidopsis thaliana
LTHSLTQGSKSVFSFSVSLSLFDRRDREAMGRAPCCEKIGLKRGRWTAEEDEILTKYIQTNGEGSWRSLPKKAGLLRCGKSCRLRWINYLRRDLKRGNITSDEEEIIVKLHSLLGNRWSLIATHLPGRTDNEIKNYWNSHLSRKIYAFTAVSGDGHNLLVNDVVLKKSCSSSSGAKNNNKTKKKKKGRTSRSSMKKHKQMVTASQCFSQPKELESDFSEGGQNGNFEGESLGPYEWLDGELERLLSSCVWECTSEEAVIGVNDEKVCESGDNSSCCVNLFEEEQGSETKIGHVGITEVDHDMTVEREREGSFLSSNSNENNDKDWWVGLCNSSEVGFGVDEELLDWEFQGNVTCQSDDLWDLSDIGEITLE

SEQ ID NO: 10216 - protein, 342 aa, Arabidopsis thaliana
MGRAPCCEKIGLKRGRWTAEEDEILTKYIQTNGEGSWRSLPKKAGLLRCGKSCRLRWINYLRRDLKRGNITSDEEEIIVKLHSLLGNRWSLIATHLPGRTDNEIKNYWNSHLSRKIYAFTAVSGDGHNLLVNDVVLKKSCSSSSGAKNNNKTKKKKKGRTSRSSMKKHKQMVTASQCFSQPKELESDFSEGGQNGNFEGESLGPYEWLDGELERLLSSCVWECTSEEAVIGVNDEKVCESGDNSSCCVNLFEEEQGSETKIGHVGITEVDHDMTVEREREGSFLSSNSNENNDKDWWVGLCNSSEVGFGVDEELLDWEFQGNVTCQSDDLWDLSDIGEITLE

SEQ ID NO: 10217 - DNA, 884 bp, Arabidopsis thaliana
gaccaaataattcttcgtctccctcaccgtcgtggcgtcgccactcgccgtcacaaccaccgtcgttcaacatcactgtcaccaaaagaatcaccgtcgttcggtcgtgacgtgtctggacctatttcatctctttgctcgtgactctaatggaggagggacgtcaaaaagacttgcaattgttggaggagattatcgacaaaggtttgaaacagaagcttgtacatgcaactgcttcacgggacaagatctttgaagaacaaaaaacactctctgacttgcggaaaaacctagaaactctggagaagaatggtgtaaatagtctcaaaacaagggtcaaccttggttcagaagtttacatgcaagctgaagtgccagatactcggcacatattcatggatgtaggcctcggcttttatgtggagttcacacggcaagaagctcttgactatatagcacaaagggaggaaagaactcaaaaacaactagaagagtatactggtgttattacgcagatcaaagggcgcatcaaactggctcattaccagattcagcaaatactcaatcttcctgaagagaatccgtcatcccggcaacgtgcgttttagtacactacctagtggaaagttgaggattttctcttgcagtcttatcttctcgatttgttctgcttactgttttgagtttttaaagcagagaattaacttagtttgttcaatactaactctttctccggaatggaccaaactgttggtgttagataaacatatcgattaagcaatcaaaactttatagaatgactattgttgtgggggtgaatagtgaatcgcactctgttaaatctgccaaaaaaaaaaaaaaaaaaactcgagggggggcccggt

SEQ ID NO: 10218 - protein, 152 aa, Arabidopsis thaliana
MEEGRQKDLQLLEEIIDKGLKQKLVHATASRDKIFEEQKTLSDLRKNLETLEKNGVNSLKTRVNLGSEVYMQAEVPDTRHIFMDVGLGFYVEFTRQEALDYIAQREERTQKQLEEYTGVITQIKGRIKLAHYQIQQILNLPEENPSSRQRAF

SEQ ID NO: 10219 - protein, 82 aa, Arabidopsis thaliana
MQAEVPDTRHIFMDVGLGFYVEFTRQEALDYIAQREERTQKQLEEYTGVITQIKGRIKLAHYQIQQILNLPEENPSSRQRAF

SEQ ID NO: 10220 - DNA, 1218 bp, Arabidopsis thaliana
gaagggggaaaagaaagactgattttacgctttattgctctcactaaaaccctaattctctccgtctcgatcgcgacctctgtttcttcggcaatggcggattctcctcaaagaagaagggattcacgatctccttcaccccgaaaagaacgagctagatccagatccaggtctaggtccaggtctagatccaggcccaggcttaggtccaggtcaagatctttgccaaggcctgtttctccatcacgaagccgtggaaggtcaaggtcaagaagccgtggaagaagtgaagttgaaaaccctggtaccactctctatgtgactggcctatctacaagagtcactgacaaggatcttgaagcacatttcgccaaggaaggaaaggttgcgtcttgttttcttgtgatggagccgcgcacccgtgtgtctcgtggttttgcctttgttacaatgagcagccttaaagatgctgagcggtgcattaaatatctcaaccagtctgtactagaaggccgatacataactgtggaaaggaaaatattgcatcaagcaacaatcagagatgataagagtactcatccttgctcaacatcattaagtgaaacacagcttgatcaatcgaatcgccagcttaaacataatcataagcaactatattgcctcaactctcaactctcaactagtcaaaggacattatcaatccaggagaaagcgcccgagaactcccaccccaggccactatcttggcttgaaaagctccagagacagcgatcgagaaggccgtagcagtcgagggaggcactatgatcgtgatgattacagagaccgtaggtcaccaagacgcgactattcacctcgtgatgaaagaaggtctagaagagatcggtcttactctcctcatggaagaagcccagagagaagatcagagagaaggtctgagaggtcagagagaaggtatgaaccccgtggctcgagatgacctgttttcatccttttgacaaaggattcaaaaacttctctgttgatttaggttgtgtaattgatcatccttaaaatagcacaaagattctgtcaggcaacgctttgggtttcatttattttctgttgttaacgtgttattctgtcggaactctctgaagtgaaaactaaaaactgtaatagcttctctgttatgtctctactctacttgtttttgaatgaatcagaatatcttatgtg

SEQ ID NO: 10221 - protein, 261 aa, Arabidopsis thaliana
EGGKERLILRFIALTKTLILSVSIATSVSSAMADSPQRRRDSRSPSPRKERARSRSRSRSRSRSRPRLRSRSRSLPRPVSPSRSRGRSRSRSRGRSEVENPGTTLYVTGLSTRVTDKDLEAHFAKEGKVASCFLVMEPRTRVSRGFAFVTMSSLKDAERCIKYLNQSVLEGRYITVERKILHQATIRDDKSTHPCSTSLSETQLDQSNRQLKHNHKQLYCLNSQLSTSQRTLSIQEKAPENSHPRPLSWLEKLQRQRSRRP

SEQ ID NO: 10222 - protein, 230 aa, Arabidopsis thaliana
MADSPQRRRDSRSPSPRKERARSRSRSRSRSRSRPRLRSRSRSLPRPVSPSRSRGRSRSRSRGRSEVENPGTTLYVTGLSTRVTDKDLEAHFAKEGKVASCFLVMEPRTRVSRGFAFVTMSSLKDAERCIKYLNQSVLEGRYITVERKILHQATIRDDKSTHPCSTSLSETQLDQSNRQLKHNHKQLYCLNSQLSTSQRTLSIQEKAPENSHPRPLSWLEKLQRQRSRRP

SEQ ID NO: 10223 - DNA, 643 bp, Arabidopsis thaliana
ggtcaacacgaaaaagatctaaacatctaccaaacacaatccaaatatatatgtaaaaatgcaaaacctctcaatactacttgtgtgtagcttttgcatacttggccatgtatctagcgctggaatcaggattggtaacgaactcaaaaacaaaaaactcttatggatgagatgttattccaaagatgacgttataggtccattaataataccgatcggagggcataggttcaattattttggtaccaacatatttgctacgactcgtttcatgtgtaccttgagacaagtgcctaattatagacaccatcaaaactttacagcatttaaactttacagtgcttcagatgatggaggcgtatgggattggagagaaagagaagatgggatctatctaaagataaaagctgagagaggtgttaatagaccggtttttatgcataaaaaatatgattggatatattaaaaacgttaacaagctatttgaatgtaagaagatttaaatttttaatattcaatgagagtgtaaaatgataataacattatttgtattgtgttgagtatatcatttatgtataaaatctaaaatttgtatgttatacatttcattatttgtaaatctataataaaacaaatgttattc

SEQ ID NO: 10224 - protein, 135 aa, Arabidopsis thaliana
MQNLSILLVCSFCILGHVSSAGIRIGNELKNKKLLWMRCYSKDDVIGPLIIPIGGHRFNYFGTNIFATTRFMCTLRQVPNYRHHQNFTAFKLYSASDDGGVWDWREREDGIYLKIKAERGVNRPVFMHKKYDWIY

SEQ ID NO: 10225 - protein, 99 aa, Arabidopsis thaliana
MRCYSKDDVIGPLIIPIGGHRFNYFGTNIFATTRFMCTLRQVPNYRHHQNFTAFKLYSASDDGGVWDWREREDGIYLKIKAERGVNRPVFMHKKYDWIY

SEQ ID NO: 10226 - DNA, 1146 bp, Arabidopsis thaliana
gaattcttactaaaaaaacacaacgaactcaaatcttcaatcttcatcttactctctaattgctttcctattccgatctctgtttcttcataaagtctcaatctttttttctctatggccggaactaaagattctcatgtagtggagattccagtagatgaagagcataaagagagacaacaacaacaacagttggttgcggtctcaaatccgggaatgggaatactcaaagtgattcagcagcatccgttgtctgaaatctcagagagtccaggacatttgttgcttttgaagttatggcaaagagaagaagatttgttctgtcgtcgtgttcttcttaaagaatcaagactagagtcaatcaaaagagagatctttcagctttgttgtttcttcctagtcttccatgggttcttcttcacacttgtctactcttcttcttgttctgatgatgctgacgtggtgaaaagtaatgcggtttgcaagaaatggtggataccttctgcagtgtcattagctacttcattggttctggtgtttcttgttcaagctaagctgtttgtgttctggaaagtttacagaggtgttaatagggagaggaatgataatagaacgcttacacggtgtgttttggagttgaggatgaaagggtcgagctttgatttgtcgaaagagccgatgagtgggaagaggatgaagagttcaagcgttgagatcaagtggaaacctgttacttggttctctcagtatttgataactattgttcttctttgctctgcagggttgttcttcccggtctcaaagttcatcctctgcggattttgacaaactcttcctattcactgtttgttcggactctgcattctttcttcaaccttcattgtggggatgatgcttttggtccgatcttaccattggcctctgttctagctttgagagagtagctgtcaaatctcccagactgaagattcgccggagggaataagaacaacctgtaacttttagcagtactcacacatagtagaaaattgatgtaattcgggattagaattctgatcttgatcttattaatttcattcttcgttaataataaacaacattgcttgtatagtaacaaatttttgcaataaataaaatgccagattc

SEQ ID NO: 10227 - protein, 236 aa, Arabidopsis thaliana
MAGTKDSHVVEIPVDEEHKERQQQQQLVAVSNPGMGILKVIQQHPLSEISESPGHLLLLKLWQREEDLFCRRVLLKESRLESIKREIFQLCCFFLVFHGFFFTLVYSSSCSDDADVVKSNAVCKKWWIPSAVSLATSLVLVFLVQAKLFVFWKVYRGVNRERNDNRTLTRCVLELRMKGSSFDLSKEPMSGKRMKSSSVEIKWKPVTWFSQYLITIVLLCSAGLFFPVSKFILCGF

SEQ ID NO: 10228 - protein, 202 aa, Arabidopsis thaliana
MGILKVIQQHPLSEISESPGHLLLLKLWQREEDLFCRRVLLKESRLESIKREIFQLCCFFLVFHGFFFTLVYSSSCSDDADVVKSNAVCKKWWIPSAVSLATSLVLVFLVQAKLFVFWKVYRGVNRERNDNRTLTRCVLELRMKGSSFDLSKEPMSGKRMKSSSVEIKWKPVTWFSQYLITIVLLCSAGLFFPVSKFILCGF

SEQ ID NO: 10229 - DNA, 950 bp, Arabidopsis thaliana
ggaagaaagataaagcaaagaaaaaaaaagaaagatgaagaatgtgaatcgagtcttcttctgcaaatcactatctctcgtcttcctcgttccttctttcactcgttctcatctccgattcacttactccgccgccggtgcttcttctcctaatcgagctattcactgcatggcttccgattcccctcaatccggagatggttccgtctcttctcctcctaatgtcgcggctgttccctcttcttcttcttcttcttcgtccgcttcttccgccattgatttcctctctctctgtactcgtctcaagacaactccaagagctggatggattaagagagatgtgaaagatccagaatctatagcggatcacatgtatcggatgggtcttatggctctaatttcttcagatatccccggtgttaacagagacaaatgcatgaaaatggcgattgttcatgatattgcagaagccattgtaggagacattacaccttcttgtgggatatctaaagaagagaaaaaccgaagagaaagcgaagcacttgagcacatgtgcaaactcttgggtggaggcgaaagagcaaaagaaatcgctgagctttggagagaatacgaagagaactcttcacctgaagccaaagttgttaaagatttcgataaagttgagctgatactacaagctttggaatatgaacaagagcaagggaaagatctagaagagtttttccaatcaacagcaggtaagttccagactgatataggcaaggcttgggcgtcagagattgtttcaagaagacgaaagcaacattagttctcacttgactctttctttttgtttcttaacgtctagctcagtggagttcaaatactcgtacgtttcaaatttaatcatctaagttttttttaataatcaaaaaaaaaaaaaaaaaaaactcgagggggggcccggt

SEQ ID NO: 10230 - protein, 258 aa, Arabidopsis thaliana
MKNVNRVFFCKSLSLVFLVPSFTRSHLRFTYSAAGASSPNRAIHCMASDSPQSGDGSVSSPPNVAAVPSSSSSSSSASSAIDFLSLCTRLKTTPRAGWIKRDVKDPESIADHMYRMGLMALISSDIPGVNRDKCMKMAIVHDIAEAIVGDITPSCGISKEEKNRRESEALEHMCKLLGGGERAKEIAELWREYEENSSPEAKVVKDFDKVELILQALEYEQEQGKDLEEFFQSTAGKFQTDIGKAWASEIVSRRRKQH

SEQ ID NO: 10231 - protein, 213 aa, Arabidopsis thaliana
MASDSPQSGDGSVSSPPNVAAVPSSSSSSSSASSAIDFLSLCTRLKTTPRAGWIKRDVKDPESIADHMYRMGLMALISSDIPGVNRDKCMKMAIVHDIAEAIVGDITPSCGISKEEKNRRESEALEHMCKLLGGGERAKEIAELWREYEENSSPEAKVVKDFDKVELILQALEYEQEQGKDLEEFFQSTAGKFQTDIGKAWASEIVSRRRKQH

SEQ ID NO: 10232 - protein, 146 aa, Arabidopsis thaliana
MYRMGLMALISSDIPGVNRDKCMKMAIVHDIAEAIVGDITPSCGISKEEKNRRESEALEHMCKLLGGGERAKEIAELWREYEENSSPEAKVVKDFDKVELILQALEYEQEQGKDLEEFFQSTAGKFQTDIGKAWASEIVSRRRKQH

SEQ ID NO: 10233 - DNA, 919 bp, Arabidopsis thaliana
gagggaatatcaaacaacaaaaaagtaagaaagagcggtaagacagagacggagaagaaggagaagaagattgttaagacgaaaccctgttgctgtccgtacaatgccgccgaagaagagtaaggcagatggagaagaaaaggcgaaacctttaacgacgttggcgtcgtctagagtgactcggagcatggacagtcgaactcgaagtcagactcaacaaaacggtgctaaagcggctggatccgccactaagccggtgacgaagaaggctaagaggaagaattcagcgattgagactgggagagccaagaagggaaagaaggaagaggaagttgaagagccagaggaagccgttgaggaggaggttgagaaggaagagccagaggttgaggaccctacgagaaccaagattgttatagaacactgtaaacaatgcaatgctttcaagacaagagctattcaggtgaaggaagctttggagggagctgttcctggcgtcacggtgtctcttaatcctgaaaagccaaggcggggttgctttgagatccgggaggaaggtggccaaacattcatcagtcttttggagatgaaacgtccatttgcaccaatgaaggcacttgatatggaagaagtcatcgaggacatcataaataaagtcaaatgaatctgttctttgtttctgcctcggtctcagtttaatcaattaggtttctgaagaagactttctagagtaatgtcagatttgttaggttcacttttattgtttcggtatgagcactgtaagtgcagtctcgtcgtttggcaatgcatgattagttgatagagaaggatctctgtagtttttgggattaactcgtatttgtaaggctagtttcttattcaaaaaaaaaaaaaaaaaaaactcgagggggggcccggt

SEQ ID NO: 10234 - protein, 186 aa, Arabidopsis thaliana
MPPKKSKADGEEKAKPLTTLASSRVTRSMDSRTRSQTQQNGAKAAGSATKPVTKKAKRKNSAIETGRAKKGKKEEEVEEPEEAVEEEVEKEEPEVEDPTRTKIVIEHCKQCNAFKTRAIQVKEALEGAVPGVTVSLNPEKPRRGCFEIREEGGQTFISLLEMKRPFAPMKALDMEEVIEDIINKVK

SEQ ID NO: 10235 - protein, 158 aa, Arabidopsis thaliana
MDSRTRSQTQQNGAKAAGSATKPVTKKAKRKNSAIETGRAKKGKKEEEVEEPEEAVEEEVEKEEPEVEDPTRTKIVIEHCKQCNAFKTRAIQVKEALEGAVPGVTVSLNPEKPRRGCFEIREEGGQTFISLLEMKRPFAPMKALDMEEVIEDIINKVK

SEQ ID NO: 10236 - DNA, 1372 bp, Arabidopsis thaliana
gaagcacactacacagagattctggatgaagaacaaatccacatgaaattcgattctcacatttcttctatttaattcgaatttcaaattgccatttctcagattccggggaaagaaaaaaaaacctagaaaagtgttttctccgttttccaatcatccatgagtccggacaataaactgcttccgaagcggatcatccttgtacggcacggtgaatcggaagggaatctcgacacggcggcgtatacaacgacgccggatcataagatccagttaacggattccggtttgcttcaggcgcaggaagccggagctcgtctccacgctttgatctcttctaatccttcttcaccggagtggcgtgtgtacttctacgtttcgccgtacgatcggactcgatctacgctccgggagatcggacggtcgttctcgcgtcgccgtgtgattggtgttcgcgaagaatgtcggattagggaacaggattttgggaattttcaggttaaagagcgaatgagagcaacgaaaaaggtcagagagagatttggccgctttttttaccggttcccggagggagaatccgccgccgatgtcttcgatcgcgtctccagttttctcgagtctctatggagagacattgacatgaacagactgcacatcaacccgtctcatgagctaaattttgtgattgtctcacatggcttaacatcgcgtgtgtttctgatgaaatggtttaagtggtcagtggaacagttcgagggactaaacaatccagggaacagtgagatcagagtgatggaattaggacaaggcggtgattacagcttggcgattcatcacacagaggaagagttagccacatggggactgtcaccagagatgattgcagatcaaaagtggcgggctaacgcgcataaaggcgaatggaaagaagattgtaagtggtattttggtgatttcttcgaccatatggcagattccgataaagagtgcgagactgaggccactgaagaaagagaagaagaagaagaagaagaagaagaagaggggaaaagggtaaatctgctaacgagttcagaatatagcaatgagccagagttatacaatggacaatgctgctgatactattttacagaacaaaagcatacatgagaagaaacgtttaactaaagaattcagaagatttgattttgataaaaacttgtaccaatttactgattaagctttctggtgtcttagtttgtagcttttggtttgtggaaaagtgttgtacacatcgttataacaccaggaaacattacaggaaatttgaaagattcattttattgtgacaaagcaaaaaaaaaaaaaaaaaaaactcgagggggggcccggt

SEQ ID NO: 10237 - protein, 319 aa, Arabidopsis thaliana
MSPDNKLLPKRIILVRHGESEGNLDTAAYTTTPDHKIQLTDSGLLQAQEAGARLHALISSNPSSPEWRVYFYVSPYDRTRSTLREIGRSFSRRRVIGVREECRIREQDFGNFQVKERMRATKKVRERFGRFFYRFPEGESAADVFDRVSSFLESLWRDIDMNRLHINPSHELNFVIVSHGLTSRVFLMKWFKWSVEQFEGLNNPGNSEIRVMELGQGGDYSLAIHHTEEELATWGLSPEMIADQKWRANAHKGEWKEDCKWYFGDFFDHMADSDKECETEATEEREEEEEEEEEEGKRVNLLTSSEYSNEPELYNGQCC

SEQ ID NO: 10238 - protein, 202 aa, Arabidopsis thaliana
MRATKKVRERFGRFFYRFPEGESAADVFDRVSSFLESLWRDIDMNRLHINPSHELNFVIVSHGLTSRVFLMKWFKWSVEQFEGLNNPGNSEIRVMELGQGGDYSLAIHHTEEELATWGLSPEMIADQKWRANAHKGEWKEDCKWYFGDFFDHMADSDKECETEATEEREEEEEEEEEEGKRVNLLTSSEYSNEPELYNGQCC

SEQ ID NO: 10239 - protein, 159 aa, Arabidopsis thaliana
MNRLHINPSHELNFVIVSHGLTSRVFLMKWFKWSVEQFEGLNNPGNSEIRVMELGQGGDYSLAIHHTEEELATWGLSPEMIADQKWRANAHKGEWKEDCKWYFGDFFDHMADSDKECETEATEEREEEEEEEEEEGKRVNLLTSSEYSNEPELYNGQCC

SEQ ID NO: 10240 - DNA, 728 bp, Arabidopsis thaliana
cgcggtggcggccgctctagaactagtggatcccccgggctgcaggaattggcaccaggagagagagagagagagagagagctcactagtcccccccccccccccccaaactttacttttggaaatttagatgtgactttgtactaaaaaaaaaaaaaaaaaaaaaaaaaaagaaatatgaggaatatgagtttcaaaaagatgaggaagaacagattgcacgtttgctgaggatggtgacatatacaataagctgtcgcgatccctggcccctgagatttatggacatgaagatattaagaaagctttgcttctccttcttgggggtgctcctcacaggcaattaaaggatggaatgaagattagaggagatgtgcatatctgtctgatgggtgatcctggagttgccaagagtcagcttctcaagcacattataaatgttgctccaaggggagtctacacaacaggcaaaggtagcagtggagttggtctaactgccgctgttatgagagatcaagtaacaaatgagatggttttagaaggaggagcactggtgctggctgacatgggaatctgtgcaattgatgagtttgataagatggatgaatcagatcgtactgctattcatgaggtcatggagcagcaaactgtaagcattgcaaaagctgggattaccacgtctttgaatgctcgaacagctgttcttgctgcagccaatccagcctggg

SEQ ID NO: 10241 - protein, 124 aa, Arabidopsis thaliana
MKIRGDVHICLMGDPGVAKSQLLKHIINVAPRGVYTTGKGSSGVGLTAAVMRDQVTNEMVLEGGALVLADMGICAIDEFDKMDESDRTAIHEVMEQQTVSIAKAGITTSLNARTAVLAAANPAW

SEQ ID NO: 10242 - protein, 113 aa, Arabidopsis thaliana
MGDPGVAKSQLLKHIINVAPRGVYTTGKGSSGVGLTAAVMRDQVTNEMVLEGGALVLADMGICAIDEFDKMDESDRTAIHEVMEQQTVSIAKAGITTSLNARTAVLAAANPAW

SEQ ID NO: 10243 - protein, 74 aa, Arabidopsis thaliana
MRDQVTNEMVLEGGALVLADMGICAIDEFDKMDESDRTAIHEVMEQQTVSIAKAGITTSLNARTAVLAAANPAW

SEQ ID NO: 10244 - DNA, 1794 bp, Arabidopsis thaliana
gtggccactcaatcgctgtcgcgtttccatcagattcccggtaacgttttcccttcttcagcttcccaattcccgccggcgaaatcctaaccactatcgtagtttttcagtctcccgattaatcgagttagggtttcgtgcaattttccccattttcgtgttcggttactactgggattttgaagtaggcgaagtctcaggtcgcaaaatcatatttttccctgaaacacgtttcaagagttttggagaacagaagttaaaaaagaaatgaggccaaaagcagtgtgggagcctgagtatcacagagtgtttgttgatttatgtgtggagcaaacgatgctagggaataaaccagggacacatttttcgaaagaaggttggaggaacatattgatatcgtttcaggagcaaacaggcgccatgtacgatagaatgcagcttaagaaccattgggatacaatgagcagacagtggaaaatatggcgtagactcgttgaaactagttttatgaattggaaccctgagagcaacaggtttcgtgcaactgatgatgactgggctaactatttacaggagaatcctgatgctgggcagtatcggttgagtgttccgcatgatctcaagaagctagagattctctttgcgggttgtaatgtagaggtgaaaaatgatgaagtctcgggtgtaaggaagaggcgaagaagttgttacgaggaagaagatgaagataaccaaagcatgtgtagttcatctaaccctcaaacaaaagggtattggtctccgtctacacataagctgtttcttgatctgttggttcaagagactttaaagggaaatagacccgacactcattttaacaaggaagggtggaagacgattctggggactattaatgaaaataccggccttggttatacgagaccgcagctgaaaaaccactgggattgcactaggaaagcttggaagatctggtgtcaactcgttggagcaagtagcatgaaatgggattctgaatctcgtagctttggtgcaacagaagaggaatggcgaatctatattcgggaaaacccaagagcaggacaattccgccacaaggaagttcctcatgctgatcaacttgcaatcattttcaacggagtgatagaacctggagagacatacactcctccttcgcgttcgtgcaagaagctcctccacaatcgttctgaatcaccacaatggcgtgacacaactccattatcaaagatgcacgtagatgaagcagaaacctccaggcaaaatggttgttatgcagagtctcaagaagatcggatagacagtgaaaacgctcaaccattggatgatatgaagttaatgaatgacgttatgttgcaggaaagtccggtattcgttgagattgaatcggcaaagccgatgtacagcattggagaatgcattaaaagcctcaacgcaattgaagaggtcgaacaaggtagtgagctctacatgtttgcgttggacctgtttctgaagagagagtatagagagatcttcttagagctgaagaagcccagtttgagaatcgcatggttgcaaagacttcaatctacttcatttcctattcctactacaacataggttcaagtgtattttacaagccatcctttttgtactctgacctctgtctctgtctgatgttatacccaaaagaatcgttctttgttagttctatgaatatggattatataaaaacagacaggtagagaatcatgttgatgaacctttgaattgcctaattcttaagtggtttgtgtt

SEQ ID NO: 10245 - protein, 449 aa, Arabidopsis thaliana
MRPKAVWEPEYHRVFVDLCVEQTMLGNKPGTHFSKEGWRNILISFQEQTGAMYDRMQLKNHWDTMSRQWKIWRRLVETSFMNWNPESNRFRATDDDWANYLQENPDAGQYRLSVPHDLKKLEILFAGCNVEVKNDEVSGVRKRRRSCYEEEDEDNQSMCSSSNPQTKGYWSPSTHKLFLDLLVQETLKGNRPDTHFNKEGWKTILGTINENTGLGYTRPQLKNHWDCTRKAWKIWCQLVGASSMKWDSESRSFGATEEEWRIYIRENPRAGQFRHKEVPHADQLAIIFNGVIEPGETYTPPSRSCKKLLHNRSESPQWRDTTPLSKMHVDEAETSRQNGCYAESQEDRIDSENAQPLDDMKLMNDVMLQESPVFVEIESAKPMYSIGECIKSLNAIEEVEQGSELYMFALDLFLKREYREIFLELKKPSLRIAWLQRLQSTSFPIPTTT

SEQ ID NO: 10246 - protein, 426 aa, Arabidopsis thaliana
MLGNKPGTHFSKEGWRNILISFQEQTGAMYDRMQLKNHWDTMSRQWKIWRRLVETSFMNWNPESNRFRATDDDWANYLQENPDAGQYRLSVPHDLKKLEILFAGCNVEVKNDEVSGVRKRRRSCYEEEDEDNQSMCSSSNPQTKGYWSPSTHKLFLDLLVQETLKGNRPDTHFNKEGWKTILGTINENTGLGYTRPQLKNHWDCTRKAWKIWCQLVGASSMKWDSESRSFGATEEEWRIYIRENPRAGQFRHKEVPHADQLAIIFNGVIEPGETYTPPSRSCKKLLHNRSESPQWRDTTPLSKMHVDEAETSRQNGCYAESQEDRIDSENAQPLDDMKLMNDVMLQESPVFVEIESAKPMYSIGECIKSLNAIEEVEQGSELYMFALDLFLKREYREIFLELKKPSLRIAWLQRLQSTSFPIPTTT

SEQ ID NO: 10247 - protein, 398 aa, Arabidopsis thaliana
MYDRMQLKNHWDTMSRQWKIWRRLVETSFMNWNPESNRFRATDDDWANYLQENPDAGQYRLSVPHDLKKLEILFAGCNVEVKNDEVSGVRKRRRSCYEEEDEDNQSMCSSSNPQTKGYWSPSTHKLFLDLLVQETLKGNRPDTHFNKEGWKTILGTINENTGLGYTRPQLKNHWDCTRKAWKIWCQLVGASSMKWDSESRSFGATEEEWRIYIRENPRAGQFRHKEVPHADQLAIIFNGVIEPGETYTPPSRSCKKLLHNRSESPQWRDTTPLSKMHVDEAETSRQNGCYAESQEDRIDSENAQPLDDMKLMNDVMLQESPVFVEIESAKPMYSIGECIKSLNAIEEVEQGSELYMFALDLFLKREYREIFLELKKPSLRIAWLQRLQSTSFPIPTTT

SEQ ID NO: 10248 - DNA, 1335 bp, Arabidopsis thaliana
agtccccccccccccccccgaaaaaccaaaaacgccgagagagatagagaaaagagaacagaggaagaagacgaagcgacgaaccgtataacggagaaatctacgaatacgtatcagaatacgtctacgctcgtatatttctactcattcctctcaccgtaacgttagagaaagtgattcccctccgaaataaaatataaaaacccttcgatttttggaagcaaacatttctctccgtcgcgaacctaatcgacgactattgttgatcaagaagaaggttttaaagttgaaagatcatggacatcccagagaagatggagatggatcaactgaatcaagggtcgagctcatctcttaccaataagcgaaaaagaggtcgtcctcgcagagacgaaagccagactcagcaaccagtgaacccacctattgatgagaatctgataggtcgagttgtttctggtgtggttgaaggttcttttgaggcaggctattttctcaatgtaaaggttgctgacacggaaaagcaattgaaaggcgttgttttcttacctcagaaagtcactccacttaccccagcaactgatttgtttccccaagctaagatgtatgcaagaaatgatatcccaattccctcttcataccaacaaactccacttcaggaaaagaaaaacgctgggaatcaaactgatgacatcggttctgagcctcaaacagatgccttgatcgctgataagaaccagtctgctacttgcaccacatcgctgcctgatgatcatccaatgagggatgcgggtgttggttctgtggctatgggtgagaggaatgatcctattgatacactgatgaaagatgttgctggctcttctgcagagggtaaagtcattgaacctgcaggccaaaccctctctctcatgccacagtttggtagtgatggcgtacccaaagaagatcatactgttctgagatccgaagcttgtgcagcaacacctgaaacgtcgcgaacgcaggccactggatccagctctacactgaaccttgaactctttcagaatcaaactaaacgatcaggaacagaggatgagaaaactcctgcagatgctgaacctcgtggaatggaggaaaaaccggcttctactgttgaagatgtgccagaggagcttcagctagagcttggcaacaagaacatgagtgcatcaggcattgctactgaagcaaatcctgatcagtctgtttcatcaaagagcgggttcttggcaaatgcttttgaaggaaaagaagaaatcgcaaaagaaccagaagattctagtgcagcagcaccaggggggggcccggtac

SEQ ID NO: 10249 - protein, 346 aa, Arabidopsis thaliana
MDIPEKMEMDQLNQGSSSSLTNKRKRGRPRRDESQTQQPVNPPIDENLIGRVVSGVVEGSFEAGYFLNVKVADTEKQLKGVVFLPQKVTPLTPATDLFPQAKMYARNDIPIPSSYQQTPLQEKKNAGNQTDDIGSEPQTDALIADKNQSATCTTSLPDDHPMRDAGVGSVAMGERNDPIDTLMKDVAGSSAEGKVIEPAGQTLSLMPQFGSDGVPKEDHTVLRSEACAATPETSRTQATGSSSTLNLELFQNQTKRSGTEDEKTPADAEPRGMEEKPASTVEDVPEELQLELGNKNMSASGIATEANPDQSVSSKSGFLANAFEGKEEIAKEPEDSSAAAPGGGPV

SEQ ID NO: 10250 - protein, 340 aa, Arabidopsis thaliana
MEMDQLNQGSSSSLTNKRKRGRPRRDESQTQQPVNPPIDENLIGRVVSGVVEGSFEAGYFLNVKVADTEKQLKGVVFLPQKVTPLTPATDLFPQAKMYARNDIPIPSSYQQTPLQEKKNAGNQTDDIGSEPQTDALIADKNQSATCTTSLPDDHPMRDAGVGSVAMGERNDPIDTLMKDVAGSSAEGKVIEPAGQTLSLMPQFGSDGVPKEDHTVLRSEACAATPETSRTQATGSSSTLNLELFQNQTKRSGTEDEKTPADAEPRGMEEKPASTVEDVPEELQLELGNKNMSASGIATEANPDQSVSSKSGFLANAFEGKEEIAKEPEDSSAAAPGGGPV

SEQ ID NO: 10251 - protein, 338 aa, Arabidopsis thaliana
MDQLNQGSSSSLTNKRKRGRPRRDESQTQQPVNPPIDENLIGRVVSGVVEGSFEAGYFLNVKVADTEKQLKGVVFLPQKVTPLTPATDLFPQAKMYARNDIPIPSSYQQTPLQEKKNAGNQTDDIGSEPQTDALIADKNQSATCTTSLPDDHPMRDAGVGSVAMGERNDPIDTLMKDVAGSSAEGKVIEPAGQTLSLMPQFGSDGVPKEDHTVLRSEACAATPETSRTQATGSSSTLNLELFQNQTKRSGTEDEKTPADAEPRGMEEKPASTVEDVPEELQLELGNKNMSASGIATEANPDQSVSSKSGFLANAFEGKEEIAKEPEDSSAAAPGGGPV

SEQ ID NO: 10252 - DNA, 1194 bp, Arabidopsis thaliana
aagccatgtggtaattctaattttgtgtatttattattttctgttaagacgaatcggacagagagaactccggcggcggattgcatttccggcaagatctcgtggggataaataagatggcggatgagaggtataatcggaagaatccggcggtgaagaggattttgcaggaggttaaggagatgcaagctaatccgtctgatgattttatgtctcttcctcttgaggagaatatctttgagtggcaattcgccatccgaggtcctggtgatactgaattcgagggcgggatttatcatgggagaattcagttgcctgcagattatccattcaaacctccttcattcatgttattgacccctaacgggcgctttgaaactaacaccaagatttgcttgagcatttcaaactaccaccctgagcattggcaaccttcatggagtgttcggactgctttggtggctctcattgcatttatgcccacaagtcccaatggagcactgggctcagtagattatccaaaggatgagagacgtacactagccattaaatcacgtgagacaccacctaagtatggctctcctgaacggcaaaaaattattgatgagattcatcagtacatccttagcaaagcaaccgtggttccaaaacctcttcctctggaatgtagccaagcaccttccatcgtatcagaagctcactcccaagttgagccacaggaagcgataactgtagtagaagagcggtccatcgctacaacagacaccatagttgatgatcaaatcatagaagagacagctgaagcagtcaatacagcagctagtgtggttcccgctgcagcacctttaccagcggttgaagttgtggtcaaagcttctgtaagtggtgagcaaaggatggccagaagagcggctcagaagccagtcgatgacagactcttcacgtgggcggcggttgggctcacaatcgctatcatggttcttcttctgaagaagttcataaaatcaaatggttacagtactgggtttatggatgatcagtcttgaactctgatgaaagtcaatgctgcgtttaagaaatggggttgtgttgtttaatattttataaatataattaaagtgcataatggcgtaaataatttctgtgtgacattgtcttgcaacttagttgatagattggattatagcttgtgat

SEQ ID NO: 10253 - protein, 309 aa, Arabidopsis thaliana
MADERYNRKNPAVKRILQEVKEMQANPSDDFMSLPLEENIFEWQFAIRGPGDTEFEGGIYHGRIQLPADYPFKPPSFMLLTPNGRFETNTKICLSISNYHPEHWQPSWSVRTALVALIAFMPTSPNGALGSVDYPKDERRTLAIKSRETPPKYGSPERQKIIDEIHQYILSKATVVPKPLPLECSQAPSIVSEAHSQVEPQEAITVVEERSIATTDTIVDDQIIEETAEAVNTAASVVPAAAPLPAVEVVVKASVSGEQRMARRAAQKPVDDRLFTWAAVGLTIAIMVLLLKKFIKSNGYSTGFMDDQS

SEQ ID NO: 10254 - protein, 287 aa, Arabidopsis thaliana
MQANPSDDFMSLPLEENIFEWQFAIRGPGDTEFEGGIYHGRIQLPADYPFKPPSFMLLTPNGRFETNTKICLSISNYHPEHWQPSWSVRTALVALIAFMPTSPNGALGSVDYPKDERRTLAIKSRETPPKYGSPERQKIIDEIHQYILSKATVVPKPLPLECSQAPSIVSEAHSQVEPQEAITVVEERSIATTDTIVDDQIIEETAEAVNTAASVVPAAAPLPAVEVVVKASVSGEQRMARRAAQKPVDDRLFTWAAVGLTIAIMVLLLKKFIKSNGYSTGFMDDQS

SEQ ID NO: 10255 - protein, 278 aa, Arabidopsis thaliana
MSLPLEENIFEWQFAIRGPGDTEFEGGIYHGRIQLPADYPFKPPSFMLLTPNGRFETNTKICLSISNYHPEHWQPSWSVRTALVALIAFMPTSPNGALGSVDYPKDERRTLAIKSRETPPKYGSPERQKIIDEIHQYILSKATVVPKPLPLECSQAPSIVSEAHSQVEPQEAITVVEERSIATTDTIVDDQIIEETAEAVNTAASVVPAAAPLPAVEVVVKASVSGEQRMARRAAQKPVDDRLFTWAAVGLTIAIMVLLLKKFIKSNGYSTGFMDDQS

SEQ ID NO: 10256 - DNA, 573 bp, Arabidopsis thaliana
aactactgtcgacaccaatttgggattgtattcaattttttgtgatcagcaatgtctgggaataacgagttgaacgcactaaaagggcctcaaagctctctgccttggccatttggaatggcctctgcatcgtttgctccctcccacatggcccctcctaactttcaacctcagtttcagctctctcaaggccaagggattagtgctcctggaagaaggttcccacataaacctcccattggaggacctcctgctgttcctcctagtatggagttgactccagcttccaggaaaaagaaacataagcttccagacaagtcctccttgcaggagcgcgttgctgccgtcttgcccgagtctgctctctacacacagcttcttgagtttgagtctcgggttgatgccgctctcttcagaaagaaagttgacatccaagactcccttaagaaccctccttccattcagaagacccttaggatctacgttttcaacaccttttccaaccagatccctggtcctgaccctcccacatggactcttaggattttcggcagggtcctggatcctgaccac

SEQ ID NO: 10257 - protein, 174 aa, Arabidopsis thaliana
MSGNNELNALKGPQSSLPWPFGMASASFAPSHMAPPNFQPQFQLSQGQGISAPGRRFPHKPPIGGPPAVPPSMELTPASRKKKHKLPDKSSLQERVAAVLPESALYTQLLEFESRVDAALFRKKVDIQDSLKNPPSIQKTLRIYVFNTFSNQIPGPDPPTWTLRIFGRVLDPDH

SEQ ID NO: 10258 - protein, 152 aa, Arabidopsis thaliana
MASASFAPSHMAPPNFQPQFQLSQGQGISAPGRRFPHKPPIGGPPAVPPSMELTPASRKKKHKLPDKSSLQERVAAVLPESALYTQLLEFESRVDAALFRKKVDIQDSLKNPPSIQKTLRIYVFNTFSNQIPGPDPPTWTLRIFGRVLDPDH

SEQ ID NO: 10259 - protein, 142 aa, Arabidopsis thaliana
MAPPNFQPQFQLSQGQGISAPGRRFPHKPPIGGPPAVPPSMELTPASRKKKHKLPDKSSLQERVAAVLPESALYTQLLEFESRVDAALFRKKVDIQDSLKNPPSIQKTLRIYVFNTFSNQIPGPDPPTWTLRIFGRVLDPDH

SEQ ID NO: 10260 - DNA, 1611 bp, Arabidopsis thaliana
ctgtgagaagaagcaaaatcacgaacttccattaatcaccgactcgcagaacctttctctcattaaatcttgtggaaacctcggaaattgaatctgcgtgagtttcaatcgcttgatcgatccatcaaaccctagagatggtgaggaaaaaggtaccggaatggcttaatagcaccatgtggtctactcctcctccgccatcttcttacgacgatggtctcctccgtcattcccccgtcactaagatgaaggaagaggcagaatcgatttccgttgctcccaggcttaattctgctcctccgccttcttccaacacttcggttccatcgccgtcgcatagaccgaggaacggtaacagtatctctggcggtagtggcgaatatggacattccgttggtccttccgccgaagacttttcccgccaggctcatgtctcagcggagttgtcgaagaaggtgatcaatatgaaggaattgaggagtctagctttacaaagtttgccggattctcccgggatccgttctactgtctggaagcttttgcttggttacttgccacctgaacgttcactctggtcaactgagttgaaacaaaagagatcccaatacaagcactacaaggatgagcttctgacgagtccttcagaaatcacatggaaaatggtgaggtcaaaggggttcgacaactatgacttgaagagtgaaagccgatgcatgcttgcccgatccagaattactgacgaggaccatcctttaagcctagggaaggcgagtatctggaatacatacttccaggatacggagaccatagaacaaatagacagagatgtcaagcgtacacatccagacataccctttttctccggtgaatcatcgtttgcgcgttctaatcaggaatctatgaagaatatattacttgtatttgcgaagttaaaccaaggcatcagatatgttcaagggatgaacgaaattttagcacctatcttttatgtattccgtaacgaccctgatgaagatagttcatcccatgctgaagcagatgcattcttttgctttgttgaattgttgagtggatttcgagacttctactgtcaacaactcgacaatagtgtggtgggaatccgatctgcaattacgaggctctcacaacttgtgaggaagcatgatgaggaactgtggcgtcatctagagatcaccacgaaagtaaatccacagttctatgcatttaggtggatcactctcctcctaacacaagagtttagtttctttgacagtcttcacatatgggatgcactcttaagcgaccctgaaggtccgctggaaagcttactggggatatgttgtgcgatgctggtactggtgaggaggaggctaatcgctggggatttcacgtcgaatatgaagttacttcaacactatccaactacaaacatcagtcatctcttgtatgtagccaataaacttcgttccaaaatgttagtataaatccttttgttggttttttctagcttttgattaaaccaacttttagttgcccccattacaatatacaaagcgtttttgttttgtttttatattttactgtttaaatggcaagacatgtttgtttgtt

SEQ ID NO: 10261 - protein, 448 aa, Arabidopsis thaliana
MVRKKVPEWLNSTMWSTPPPPSSYDDGLLRHSPVTKMKEEAESISVAPRLNSAPPPSSNTSVPSPSHRPRNGNSISGGSGEYGHSVGPSAEDFSRQAHVSAELSKKVINMKELRSLALQSLPDSPGIRSTVWKLLLGYLPPERSLWSTELKQKRSQYKHYKDELLTSPSEITWKMVRSKGFDNYDLKSESRCMLARSRITDEDHPLSLGKASIWNTYFQDTETIEQIDRDVKRTHPDIPFFSGESSFARSNQESMKNILLVFAKLNQGIRYVQGMNEILAPIFYVFRNDPDEDSSSHAEADAFFCFVELLSGFRDFYCQQLDNSVVGIRSAITRLSQLVRKHDEELWRHLEITTKVNPQFYAFRWITLLLTQEFSFFDSLHIWDALLSDPEGPLESLLGICCAMLVLVRRRLIAGDFTSNMKLLQHYPTTNISHLLYVANKLRSKMLV

SEQ ID NO: 10262 - protein, 435 aa, Arabidopsis thaliana
MWSTPPPPSSYDDGLLRHSPVTKMKEEAESISVAPRLNSAPPPSSNTSVPSPSHRPRNGNSISGGSGEYGHSVGPSAEDFSRQAHVSAELSKKVINMKELRSLALQSLPDSPGIRSTVWKLLLGYLPPERSLWSTELKQKRSQYKHYKDELLTSPSEITWKMVRSKGFDNYDLKSESRCMLARSRITDEDHPLSLGKASIWNTYFQDTETIEQIDRDVKRTHPDIPFFSGESSFARSNQESMKNILLVFAKLNQGIRYVQGMNEILAPIFYVFRNDPDEDSSSHAEADAFFCFVELLSGFRDFYCQQLDNSVVGIRSAITRLSQLVRKHDEELWRHLEITTKVNPQFYAFRWITLLLTQEFSFFDSLHIWDALLSDPEGPLESLLGICCAMLVLVRRRLIAGDFTSNMKLLQHYPTTNISHLLYVANKLRSKMLV

SEQ ID NO: 10263 - protein, 412 aa, Arabidopsis thaliana
MKEEAESISVAPRLNSAPPPSSNTSVPSPSHRPRNGNSISGGSGEYGHSVGPSAEDFSRQAHVSAELSKKVINMKELRSLALQSLPDSPGIRSTVWKLLLGYLPPERSLWSTELKQKRSQYKHYKDELLTSPSEITWKMVRSKGFDNYDLKSESRCMLARSRITDEDHPLSLGKASIWNTYFQDTETIEQIDRDVKRTHPDIPFFSGESSFARSNQESMKNILLVFAKLNQGIRYVQGMNEILAPIFYVFRNDPDEDSSSHAEADAFFCFVELLSGFRDFYCQQLDNSVVGIRSAITRLSQLVRKHDEELWRHLEITTKVNPQFYAFRWITLLLTQEFSFFDSLHIWDALLSDPEGPLESLLGICCAMLVLVRRRLIAGDFTSNMKLLQHYPTTNISHLLYVANKLRSKMLV

SEQ ID NO: 10264 - DNA, 1310 bp, Arabidopsis thaliana
gatacagaaacagcgtcgttttgaaagctgagttttttttgtgaagcgagcgagcgtgagaaggtgtgacggggaagagaatggcgaaggaagcggtcaagtatgtatgggaaggagcaattcctctgcagattcatctccacaaatccgacgtcgcttctcaccctgctcctcctcctgctcttgtgttagcaccaagaataggatatttgcctctgttgattcctcttataaagccttatttcaaggattcacttcctcctggtgaagattcaatttggtttgattacaaaggatttcctctaaaatggtatataccaacaggtgttcttttcgatctcctttgtgcagaacccgaaagaccatggaatctcacgatacactttagaggatatcctagcaacatactgataccatgtgaaggagaagattctgtaaaatggaactttgttaattctttgaaagaggcacaatatatcatcaatggaaattgcaagaatgttatgaacatgtctcagagtgatcaagaggatctatggacctctgtcatgaacggtgatcttgatgcctatacaagattatcacccaagcttaaaatgggaacagtcgaagatgagttttcaaggaaaacaagtttgtcatctccacaatctcaacaagttgtgcctgagacggaggtggctggacaagttaagacagcaagaattcctgttcggttgtatgttcgaagtctaaataaagatttcgagaatcttgaagatgtaccggagatcgatacctgggatgacatctcgtaccttaatcgccctgttgagttcctcaaagaagaagggaaatgctttacgttacgtgacgccattaaaagtctcctccctgagtttatgggagacagagcgcaaaggagtggtgaagaaagaagcatagatgatacagaagaagcagatgggtcgagggagatgggtgaaatcaaattggtaaggatacaagggatagaaatgaagctagagataccgttttcgtgggtggtaaataacttgatgaacccagaattctatctccatatctctgtccttgtgaaagctcctcaaaggtgaagtgtaaggttctctgcagttacaatccatctgtgaattgaatcaaattgctttctcgttccatcttacaaatccgaaagaatcaatgatttgttgtatacagctacttcttctatttctgatagaagcaagaacacagaatacagaaaagaaagtagaaatattttgattgaaaaaaaaaaaaaaaaaaactcgagggggggcccggtacccaat

SEQ ID NO: 10265 - protein, 337 aa, Arabidopsis thaliana
MAKEAVKYVWEGAIPLQIHLHKSDVASHPAPPPALVLAPRIGYLPLLIPLIKPYFKDSLPPGEDSIWFDYKGFPLKWYIPTGVLFDLLCAEPERPWNLTIHFRGYPSNILIPCEGEDSVKWNFVNSLKEAQYIINGNCKNVMNMSQSDQEDLWTSVMNGDLDAYTRLSPKLKMGTVEDEFSRKTSLSSPQSQQVVPETEVAGQVKTARIPVRLYVRSLNKDFENLEDVPEIDTWDDISYLNRPVEFLKEEGKCFTLRDAIKSLLPEFMGDRAQRSGEERSIDDTEEADGSREMGEIKLVRIQGIEMKLEIPFSWVVNNLMNPEFYLHISVLVKAPQR

SEQ ID NO: 10266 - protein, 196 aa, Arabidopsis thaliana
MNMSQSDQEDLWTSVMNGDLDAYTRLSPKLKMGTVEDEFSRKTSLSSPQSQQVVPETEVAGQVKTARIPVRLYVRSLNKDFENLEDVPEIDTWDDISYLNRPVEFLKEEGKCFTLRDAIKSLLPEFMGDRAQRSGEERSIDDTEEADGSREMGEIKLVRIQGIEMKLEIPFSWVVNNLMNPEFYLHISVLVKAPQR

SEQ ID NO: 10267 - protein, 194 aa, Arabidopsis thaliana
MSQSDQEDLWTSVMNGDLDAYTRLSPKLKMGTVEDEFSRKTSLSSPQSQQVVPETEVAGQVKTARIPVRLYVRSLNKDFENLEDVPEIDTWDDISYLNRPVEFLKEEGKCFTLRDAIKSLLPEFMGDRAQRSGEERSIDDTEEADGSREMGEIKLVRIQGIEMKLEIPFSWVVNNLMNPEFYLHISVLVKAPQR

SEQ ID NO: 10268 - DNA, 582 bp, Arabidopsis thaliana
gaaaataatcttcatagtctctcatccaatcttacaaactttctgatttcctttctacattcatcgaccaatggcagcaaacaaaactcttcctacgtatttttgcagaaactgcgagaatccactagctctcggtgaagatctcatctccaaaaaatttgtgggagcttcagggccagcgtttatgttttcacacgcgatgaacgtggtggttggaccgaagattgggaggaaactgataaccggatcgtatgtagtggcagatgtgatgtgcagtaagtgtggtgagacgttgggttggaaatatgttgagacattcgatcttaaacagaggtataaagaaggcatgtttgtcatcgagaagctcaagttgaccaaaagatattgaaacctagtcaagaagaataatactcttggagggttaagctaataaataaatgaaggaaacttgaggattgtatatgtatatataacctttgttgtataaatgtcatcactatattggttgttctctataaagggatttgaaaacaaagtaaaaaaaaaaaaaaaaaaaactcgagggggggcccggtacccaat

SEQ ID NO: 10269 - protein, 105 aa, Arabidopsis thaliana
MAANKTLPTYFCRNCENPLALGEDLISKKFVGASGPAFMFSHAMNVVVGPKIGRKLITGSYVVADVMCSKCGETLGWKYVETFDLKQRYKEGMFVIEKLKLTKRY

SEQ ID NO: 10270 - protein, 67 aa, Arabidopsis thaliana
MFSHAMNVVVGPKIGRKLITGSYVVADVMCSKCGETLGWKYVETFDLKQRYKEGMFVIEKLKLTKRY

SEQ ID NO: 10271 - protein, 62 aa, Arabidopsis thaliana
MNVVVGPKIGRKLITGSYVVADVMCSKCGETLGWKYVETFDLKQRYKEGMFVIEKLKLTKRY

SEQ ID NO: 10272 - DNA, 1180 bp, Arabidopsis thaliana
aacaaggtgatgacgtggtttttacatttttcaaaaatctcttttgcccagagagagaagaagagacagatcggaaggagttgagtaagaatggcgaagctggtgctcttcaccgccgtaattatcgctattttctcccatggatcctccgtcgatgacaaatgcgccgcttgcaacgccgtcgctgaggaattagagttacagcttttaaaggaaaagccacgaaaccatcttgatatgagaaaccggctcaattctaaaggccagcgtgaaggaaaggtcattgattacagaataagcgacctgagggtggttgatttgttggacggtctgtgtgatagaatgcaggactatactctacaaaaggtggaacctaagaatagacaatgggtgaaagtaggaaattttgacaatctaacaagtaatgtgttctttcctttccttttaaaatttgcgctccgtgacatatttgcaattgttcatcacatagctgcttcaatacttacgttatttgataagtacgcttaggtgcatcgtttaatgagtcaatggaagctgtctacttgatcacactgtcaccgtgtctgctgtccgctttatctgtttataacttctgttgagcaaatgagtaactgttagagagctttcatgatgctgaaaattctagaacaagtgcagtgacggttttaaagttctagaataagctgtgaaattctcatctctagttatattagtggtttagagacttgtttgggatttaatgtttcatctgtgtgtgtgttgtcatatagataaacaggaagcgaaagcgcatgcaaatgacatttcaacttattgtggaagattgctggaggaaactgaagatgagctaggtgaggtgataaagaatggctccctaaaagcaggagaagtccgaaaggttctgtgtcaaactttgagtaaccactgccgacaatcaagtgaaacagactcagaggatgaggaggacgacgatgcagatgaattataactcaatccaatgaaaagttcacgtcaaattaagatcccatcttagtagctatgttatagatacatccatccacaactcatatgtaacttaagacacctttcactttttaagttatgtcgaaactcgggtctagattcttatttatattgtggcaattgttcgttttccctc

SEQ ID NO: 10273 - protein, 145 aa, Arabidopsis thaliana
MAKLVLFTAVIIAIFSHGSSVDDKCAACNAVAEELELQLLKEKPRNHLDMRNRLNSKGQREGKVIDYRISDLRVVDLLDGLCDRMQDYTLQKVEPKNRQWVKVGNFDNLTSNVFFPFLLKFALRDIFAIVHHIAASILTLFDKYA

SEQ ID NO: 10274 - protein, 96 aa, Arabidopsis thaliana
MRNRLNSKGQREGKVIDYRISDLRVVDLLDGLCDRMQDYTLQKVEPKNRQWVKVGNFDNLTSNVFFPFLLKFALRDIFAIVHHIAASILTLFDKYA

SEQ ID NO: 10275 - protein, 82 aa, Arabidopsis thaliana
MFHLCVCCHIDKQEAKAHANDISTYCGRLLEETEDELGEVIKNGSLKAGEVRKVLCQTLSNHCRQSSETDSEDEEDDDADEL

SEQ ID NO: 10276 - DNA, 2141 bp, Arabidopsis thaliana
ctcactagtccccccccccccccccaatagaactacgagtaaaacacggattaagtacctcacagatggagttctacttcgtgagagtctgtccaatccaatgcttgatgattattctgttatcatattggatgaggctcacgagaggagtttaaacacggatattctgttgggtctagtgaaacggttggttagaatccgtgcatccaactttaaagttcttataacctctgcaacacttgacggcgaaaaggtttctgaattcttttcgggctgccctgtgctgaatgtacctggaaaattataccccgtggaaatattatacagcaaagagcgtcctgtcagctatattgagtcatctctgaaagtagctattgatatacatgttcgtgagccagaaggtgatattttaatcttcatgaccggacaggatgatattgaaaaattagtatcaaggctagaggaaaaagtacgaagcttagcagaaggatcctgtatggatgctattatttatcctcttcacggttctttgccccctgaaatgcaggttcgtgtctttagtcctcctcctccaaactgccgcagatttattgtttctaccaatattgctgaaacttcccttactgtggacggggttgtgtatgtaattgattccgggtatgtgaagcaaagacaatataacccatcaagtggaatgttttctcttgatgttattcaaattagcaaagtgcaagctaaccaacgtgctggacgtgctggccgaacaagaccggggaaatgttatcgtttatacccattggcagtctaccgagatgacttccttgatgcaactattcctgaaatccaacgaacttctcttgccgggagtgttctatacttgaaatcattggatcttcctgatattgacattctcaagttcgattttcttgatgctccttcatctgagtcattagaagatgcgttgaagcaattgtatttcattgatgcaattgatgagaatggagcaataacaaggattggacggacaatgtctgatcttccactagaaccatcattgtcaagaacattgatagaagcgaatgaaaccggttgcttatctcaagctctaacagtcgttgctatgctgtcagcagagacaactcttcttcctgctaggagtaaacccagtgaaaagaagaggaaacatgatgatgattctaatcttcctaatggatccggatatggtgatcacattcaactgctacagattttcgaatcttgggaccgtactaattatgatcctgtatggtgcaaagagaacggcatgcaggtgcgagggatggtgtttgtcaaagatgttagaagacagttatgtcagattatgcagaaaatatccaaagatcgattggaagttcgggcagatggtaggaagagttcaagccgagacgactacaggaagttgaggaaagctctatgcgttggtaatgcaaaccaaattgctgagagaatgcttcgtcacaatggataccggactcttagtttccagtcccagctagtccaggtgcatccatcatctgtattgagtgccgacaatgacggaatgatgcctaactacgtagtgtaccatgagctgatttccaccacacgtccgttcatgcggaatgtttgtgcagtagatatggcatgggtggctcccatcaaaagaaagatcgagaaattaaatgtcagaaaattgagcggtggaccggctccctctttcaaaatacctgaggagaagacggagttgtctaaaaacaatgcagaaacacctgcagtttctgaaaatgttgagagtcggattgaagcagccagagaacgctttcttgctcgtaaaggacagaaataaatttgatgtctcaaacataaatacaagattcaactagccctataaagaatagaaaagagaagctttctgtagaagatttgttattagagacaattttcaaattttgtatgttctgttttttttttttcttttggctcaacttaaacttttctttattctcattcgacatgagttttaaatttttaacccaatttggtatgttcttagtattatgtttaaaagatgataatgtttacacgaaaaaaaaaaaaaaaaaactcgagggggggcccggtac

SEQ ID NO: 10277 - protein, 620 aa, Arabidopsis thaliana
SLVPPPPPNRTTSKTRIKYLTDGVLLRESLSNPMLDDYSVIILDEAHERSLNTDILLGLVKRLVRIRASNFKVLITSATLDGEKVSEFFSGCPVLNVPGKLYPVEILYSKERPVSYIESSLKVAIDIHVREPEGDILIFMTGQDDIEKLVSRLEEKVRSLAEGSCMDAIIYPLHGSLPPEMQVRVFSPPPPNCRRFIVSTNIAETSLTVDGVVYVIDSGYVKQRQYNPSSGMFSLDVIQISKVQANQRAGRAGRTRPGKCYRLYPLAVYRDDFLDATIPEIQRTSLAGSVLYLKSLDLPDIDILKFDFLDAPSSESLEDALKQLYFIDAIDENGAITRIGRTMSDLPLEPSLSRTLIEANETGCLSQALTVVAMLSAETTLLPARSKPSEKKRKHDDDSNLPNGSGYGDHIQLLQIFESWDRTNYDPVWCKENGMQVRGMVFVKDVRRQLCQIMQKISKDRLEVRADGRKSSSRDDYRKLRKALCVGNANQIAERMLRHNGYRTLSFQSQLVQVHPSSVLSADNDGMMPNYVVYHELISTTRPFMRNVCAVDMAWVAPIKRKIEKLNVRKLSGGPAPSFKIPEEKTELSKNNAETPAVSENVESRIEAARERFLARKGQK

SEQ ID NO: 10278 - protein, 587 aa, Arabidopsis thaliana
MLDDYSVIILDEAHERSLNTDILLGLVKRLVRIRASNFKVLITSATLDGEKVSEFFSGCPVLNVPGKLYPVEILYSKERPVSYIESSLKVAIDIHVREPEGDILIFMTGQDDIEKLVSRLEEKVRSLAEGSCMDAIIYPLHGSLPPEMQVRVFSPPPPNCRRFIVSTNIAETSLTVDGVVYVIDSGYVKQRQYNPSSGMFSLDVIQISKVQANQRAGRAGRTRPGKCYRLYPLAVYRDDFLDATIPEIQRTSLAGSVLYLKSLDLPDIDILKFDFLDAPSSESLEDALKQLYFIDAIDENGAITRIGRTMSDLPLEPSLSRTLIEANETGCLSQALTVVAMLSAETTLLPARSKPSEKKRKHDDDSNLPNGSGYGDHIQLLQIFESWDRTNYDPVWCKENGMQVRGMVFVKDVRRQLCQIMQKISKDRLEVRADGRKSSSRDDYRKLRKALCVGNANQIAERMLRHNGYRTLSFQSQLVQVHPSSVLSADNDGMMPNYVVYHELISTTRPFMRNVCAVDMAWVAPIKRKIEKLNVRKLSGGPAPSFKIPEEKTELSKNNAETPAVSENVESRIEAARERFLARKGQK

SEQ ID NO: 10279 - protein, 481 aa, Arabidopsis thaliana
MTGQDDIEKLVSRLEEKVRSLAEGSCMDAIIYPLHGSLPPEMQVRVFSPPPPNCRRFIVSTNIAETSLTVDGVVYVIDSGYVKQRQYNPSSGMFSLDVIQISKVQANQRAGRAGRTRPGKCYRLYPLAVYRDDFLDATIPEIQRTSLAGSVLYLKSLDLPDIDILKFDFLDAPSSESLEDALKQLYFIDAIDENGAITRIGRTMSDLPLEPSLSRTLIEANETGCLSQALTVVAMLSAETTLLPARSKPSEKKRKHDDDSNLPNGSGYGDHIQLLQIFESWDRTNYDPVWCKENGMQVRGMVFVKDVRRQLCQIMQKISKDRLEVRADGRKSSSRDDYRKLRKALCVGNANQIAERMLRHNGYRTLSFQSQLVQVHPSSVLSADNDGMMPNYVVYHELISTTRPFMRNVCAVDMAWVAPIKRKIEKLNVRKLSGGPAPSFKIPEEKTELSKNNAETPAVSENVESRIEAARERFLARKGQK

SEQ ID NO: 10280 - DNA, 661 bp, Arabidopsis thaliana
gacagccaaacatcgctccatgaagaagaaaaaacaacaacaacaagtcagccatggagaaagagagaagaagtagatagatggtttagatccaaagtagttgatcgttgaaatttatttctatttaacgttgaaaaaagagaattttgcaaaaacccaaacaaaaaacccgccatggatccgactcaaatctctcatttggctctcgacatcggagggactctgatcaagcttgtgtatttctctgcaaatggagattatagcgaagagtctcgtaatggttgctctgttgtgaaaggaaggctttgtttcgctaagtttgagactagaaagattgatgattgtttggagtttattcgattcaatatccttcatcattccggtgtacagcaaccgaatggcgaaggtcatgataaactttatgttaaggccacaggtggtggggcatttaagtttgctgatctctttaaggagaaacttggtattcttttcgataaggaagatgagatgtgttctcttgttggtggtgttaattttctactaaagactgtcccaagggaagcttttacctacttagatggccaaaagaagtttgtcgagatcgaccataatgatttgtatccatatctactagtcaacatcgggttctggcgttagcatg

SEQ ID NO: 10281 - protein, 160 aa, Arabidopsis thaliana
MDPTQISHLALDIGGTLIKLVYFSANGDYSEESRNGCSVVKGRLCFAKFETRKIDDCLEFIRFNILHHSGVQQPNGEGHDKLYVKATGGGAFKFADLFKEKLGILFDKEDEMCSLVGGVNFLLKTVPREAFTYLDGQKKFVEIDHNDLYPYLLVNIGFWR

SEQ ID NO: 10282 - DNA, 1201 bp, Arabidopsis thaliana
gacggtgaagagaagaggcaagagagagagagagagggaaaaggaagacgatgatgatttctcggagacccgtttcaagtccgggtcgggtagagaaatatccaccgccttttatggggtttttgagaagtaagagcaacggcggaagtacaagcaggagtagaagtcgaagcagaggaaggtcacgcgctagtcctcttttcgttcgccggaataaatccgcggcggcggtgactcaagaaccgtcgtctccgaaggttacttgcatgggtcaagtccgggtcaaccgatcgaagcccaaaattaaacccgaatctcgagataacccgacccgacgacgatgtgagtggctccgaaacgcgtcgttttataacaaattcgccgggaaaatcaaaacgatgacgttttggcctaaatggagactgtgttcgttttcgtgtgcttgtcggaatttgaaggagaaagattctccgagaagtcaattagatcatccgacaacggaatcagtcagagaaatcaaagaagaaatcgaaggagaagaaaatttcgaaatccctaaattatttgtgtctccggctactacgccgcctataaacgctctgttgttgacgagaagcagatctgcaccgtatagatcgtcgtcgttggctttcagattctgggaagaaaataaccaacgagaagttgaatcacagcaaaatgtgagatcggagaaaactgaatcggaagttcccatcgagaaaatcaatggttttcacgagccggagtatgttgacagagatgaagaagaattcacgaagttaagatttgtacggcagccggtgttgacaaggagcaaatcggagccggcgaggatcggcgagaagatgatggtgttgcttcccgatgaagaagaaggttaggtagggtttaggtctctcacgtgattagtcaataattgcactaatcttaattaattaatcgctggtatgactaatttaatttgcattgtttaggataatttgactgtgttttagatatagtagaggaaacaaatttgtataaagatttgtaaccatacatataacgtaaggtgtagatatgtttggcattcaaaaaaaaaatgtttaacaatacactatgtaatcattttcaatttgtaaatttacattatctgtttgattgaaaaaaaaaaaaaaaaaaactcgagggggggcccggt

SEQ ID NO: 10283 - protein, 283 aa, Arabidopsis thaliana
MMISRRPVSSPGRVEKYPPPFMGFLRSKSNGGSTSRSRSRSRGRSRASPLFVRRNKSAAAVTQEPSSPKVTCMGQVRVNRSKPKIKPESRDNPTRRRCEWLRNASFYNKFAGKIKTMTFWPKWRLCSFSCACRNLKEKDSPRSQLDHPTTESVREIKEEIEGEENFEIPKLFVSPATTPPINALLLTRSRSAPYRSSSLAFRFWEENNQREVESQQNVRSEKTESEVPIEKINGFHEPEYVDRDEEEFTKLRFVRQPVLTRSKSEPARIGEKMMVLLPDEEEG

SEQ ID NO: 10284 - protein, 282 aa, Arabidopsis thaliana
MISRRPVSSPGRVEKYPPPFMGFLRSKSNGGSTSRSRSRSRGRSRASPLFVRRNKSAAAVTQEPSSPKVTCMGQVRVNRSKPKIKPESRDNPTRRRCEWLRNASFYNKFAGKIKTMTFWPKWRLCSFSCACRNLKEKDSPRSQLDHPTTESVREIKEEIEGEENFEIPKLFVSPATTPPINALLLTRSRSAPYRSSSLAFRFWEENNQREVESQQNVRSEKTESEVPIEKINGFHEPEYVDRDEEEFTKLRFVRQPVLTRSKSEPARIGEKMMVLLPDEEEG

SEQ ID NO: 10285 - protein, 262 aa, Arabidopsis thaliana
MGFLRSKSNGGSTSRSRSRSRGRSRASPLFVRRNKSAAAVTQEPSSPKVTCMGQVRVNRSKPKIKPESRDNPTRRRCEWLRNASFYNKFAGKIKTMTFWPKWRLCSFSCACRNLKEKDSPRSQLDHPTTESVREIKEEIEGEENFEIPKLFVSPATTPPINALLLTRSRSAPYRSSSLAFRFWEENNQREVESQQNVRSEKTESEVPIEKINGFHEPEYVDRDEEEFTKLRFVRQPVLTRSKSEPARIGEKMMVLLPDEEEG

SEQ ID NO: 10286 - DNA, 1183 bp, Arabidopsis thaliana
aaatcgtggtaattggtgatggagaaagacgataacagtgacaaggtttgtctttcagtgaaggagaaatatacgtcagagcagcctgaggaaatggtgacaaatctgaaggcatctgtaagagaattgagtgtgaaagtgaaagaacagaatcagagaaaatgtgatgctaaggataagttgcagcagttgcgagaaagaataagcaaggaagttgttgatgtttcagtccaggagttgataccgcttcttagatcactcaaggaatttgtgaaggaggaatctgaagtcaggtctcgttgtaatgttaaacgttctgctttagaagatgcagttcatgatttggaggagagagctggtaaggggcttgatggtgagattcaagaggaagatttagatggtttgttggttgtatctttagataatctcacttcagcaaagaaggagcttggagcaacgctaagagagatagtctctctgaagcgacagattgacgatgtgccatgccaatctgaactcctccaatatgaaagaagattctcagagctgaatgtctgtattcaggagaaacttcaacaaactaggaagctctatgcaacatacaatgctcttttagaaatcaaagatttgatgcttaaggagacatcattattgaattccataggttcacagtttcaagacgtgattggtactcctgctggccgtgtgaagcttattgattcaatggaaggagtcatgaaaggaatccaacagaagattggaaaaatacaacttgggcttcaagaagagcagaggctccgtgatgcttcaaaagaaaagtatatagctgcagctgcagagcaaagaaaatgctacactgtactaagagcataccaggaggaatgtactaagaatgagaggctgagaagtcatatatctgccatgaacgaacacctctgactcgaagaagggtttgaataaggtgatatgaagtgactctcctttcgagttacagctaaccagagtagagccagagttgatttagatatgattctcttgtgatgtgatgtatccatatgctcagccttacatggaaatatacgaaaatcgataggcctagaaatagtaggtttggttgaccaatatgtttatatatgagctatgagaaaatattattctctaaatcattgaggagatgagtttg

SEQ ID NO: 10287 - protein, 306 aa, Arabidopsis thaliana
MEKDDNSDKVCLSVKEKYTSEQPEEMVTNLKASVRELSVKVKEQNQRKCDAKDKLQQLRERISKEVVDVSVQELIPLLRSLKEFVKEESEVRSRCNVKRSALEDAVHDLEERAGKGLDGEIQEEDLDGLLVVSLDNLTSAKKELGATLREIVSLKRQIDDVPCQSELLQYERRFSELNVCIQEKLQQTRKLYATYNALLEIKDLMLKETSLLNSIGSQFQDVIGTPAGRVKLIDSMEGVMKGIQQKIGKIQLGLQEEQRLRDASKEKYIAAAAEQRKCYTVLRAYQEECTKNERLRSHISAMNEHL

SEQ ID NO: 10288 - protein, 281 aa, Arabidopsis thaliana
MVTNLKASVRELSVKVKEQNQRKCDAKDKLQQLRERISKEVVDVSVQELIPLLRSLKEFVKEESEVRSRCNVKRSALEDAVHDLEERAGKGLDGEIQEEDLDGLLVVSLDNLTSAKKELGATLREIVSLKRQIDDVPCQSELLQYERRFSELNVCIQEKLQQTRKLYATYNALLEIKDLMLKETSLLNSIGSQFQDVIGTPAGRVKLIDSMEGVMKGIQQKIGKIQLGLQEEQRLRDASKEKYIAAAAEQRKCYTVLRAYQEECTKNERLRSHISAMNEHL

SEQ ID NO: 10289 - DNA, 1824 bp, Arabidopsis thaliana
gttttgtatagaaagctgagaaaggttatttttttacattacagaagtaagggatacaaagttgttagttcatcttctctccgctcagaagaagaaaaacttaaaaaaattcaacgtctgaatatggctaatccacttctctattctccgatcaacccacaattcttccaaccacttcttcccggtttcgccaaccacctggacattcctgtggcgttcttcttgaagtacttagtgggaactaacgtaggaaaaacggctgagctcagatcagatgcatcggagatgacatggaaagtgaagatagacggccggagactctctaatggttgggaagatttcacaatcgcacatgatctccgagttggtgacattgttgttttcagacaagaaggagagttagtgttccatgtcacagctttaggaccaagttgctgtgagattcaatacggagaagatacccttgaagaggataaaattgagaaactttgtgatacagagaatgtttcaagtaagaaaaagagtctaaagagagaagctgagtctgcaccagacaattcactagattcttgttttgtggccactgtcacgggttcgaatctaaagcgcgatacattgtatatcccgaaagagtttgcattgtcaaatggtctgatgaacaaatatcagattgtgttaatgaatgaagaaggagaatcatggaagatagacttgagacgcgaggcatataattacggccggttttacatgagaagaggctggagaagtttctgtattgctaatgggaagaaacctggagacgtttttgcattcagattggtcaaaaatgaagaaacacctgtgatacagttgttccctatgaccattgaagatttagacaaacttcagagccttccaagacacaagattcgaaaaacagaagcagctccttcttcaccagacctttcttcttttgtagccactgttacggcttcaaatctaagccgcgatagactgtatcttcccaagacgttcattatgtcaaatggtttgttgaagaaatttcagatgtgtctaatgaatgaagagggagaatcatggacgatagatgtgaaacatgaggcacatacaggccggtttttaacgataagaggttggagaagattctgtgtggctaatgggaagaaaccaggagacttgctcaaattcaaattagtccataacgaagaaacacctgtgctccagttgttacccttgaaaagtgaagatctacacaaacttgatcctagcaatgacacaaggcatggacagagtttagaagttaccaaaaaagagtttcttggcacagaagccacagaaaatgagtttcttggcgcagaagtttaccgcaatgactcctttaaagctagcgagaaagatactcttccttttgctgaacctatcaatgaagatgtaaggcaaggacaatgttcacaagctattaaacaagaatatgtttccacagaagagaaaaactcaacaagccaaaaccgatttgtgaccttaacacttacacattcaagtaaacttaatcttccgtttgaattcatgaaggggaatggaatcaaaaaggcggggaagataacgatggttgatagatacgatgcaaaatggcggacgtcactactgatggacaagatcggagcaatgagtttaggaagaggttcaaaaggtttctgtgaggttaatggtgttgagatgaatgagtcgtttgtcttggagttgatttgggaagacacagttcctcttcttaagttttgttccaaagtttgagaaccatattaacaatgtctaggatcatcgctc

SEQ ID NO: 10290 - protein, 596 aa, Arabidopsis thaliana
VLYRKLRKVIFLHYRSKGYKVVSSSSLRSEEEKLKKIQRLNMANPLLYSPINPQFFQPLLPGFANHLDIPVAFFLKYLVGTNVGKTAELRSDASEMTWKVKIDGRRLSNGWEDFTIAHDLRVGDIVVFRQEGELVFHVTALGPSCCEIQYGEDTLEEDKIEKLCDTENVSSKKKSLKREAESAPDNSLDSCFVATVTGSNLKRDTLYIPKEFALSNGLMNKYQIVLMNEEGESWKIDLRREAYNYGRFYMRRGWRSFCIANGKKPGDVFAFRLVKNEETPVIQLFPMTIEDLDKLQSLPRHKIRKTEAAPSSPDLSSFVATVTASNLSRDRLYLPKTFIMSNGLLKKFQMCLMNEEGESWTIDVKHEAHTGRFLTIRGWRRFCVANGKKPGDLLKFKLVHNEETPVLQLLPLKSEDLHKLDPSNDTRHGQSLEVTKKEFLGTEATENEFLGAEVYRNDSFKASEKDTLPFAEPINEDVRQGQCSQAIKQEYVSTEEKNSTSQNRFVTLTLTHSSKLNLPFEFMKGNGIKKAGKITMVDRYDAKWRTSLLMDKIGAMSLGRGSKGFCEVNGVEMNESFVLELIWEDTVPLLKFCSKV

SEQ ID NO: 10291 - protein, 555 aa, Arabidopsis thaliana
MANPLLYSPINPQFFQPLLPGFANHLDIPVAFFLKYLVGTNVGKTAELRSDASEMTWKVKIDGRRLSNGWEDFTIAHDLRVGDIVVFRQEGELVFHVTALGPSCCEIQYGEDTLEEDKIEKLCDTENVSSKKKSLKREAESAPDNSLDSCFVATVTGSNLKRDTLYIPKEFALSNGLMNKYQIVLMNEEGESWKIDLRREAYNYGRFYMRRGWRSFCIANGKKPGDVFAFRLVKNEETPVIQLFPMTIEDLDKLQSLPRHKIRKTEAAPSSPDLSSFVATVTASNLSRDRLYLPKTFIMSNGLLKKFQMCLMNEEGESWTIDVKHEAHTGRFLTIRGWRRFCVANGKKPGDLLKFKLVHNEETPVLQLLPLKSEDLHKLDPSNDTRHGQSLEVTKKEFLGTEATENEFLGAEVYRNDSFKASEKDTLPFAEPINEDVRQGQCSQAIKQEYVSTEEKNSTSQNRFVTLTLTHSSKLNLPFEFMKGNGIKKAGKITMVDRYDAKWRTSLLMDKIGAMSLGRGSKGFCEVNGVEMNESFVLELIWEDTVPLLKFCSKV

SEQ ID NO: 10292 - protein, 501 aa, Arabidopsis thaliana
MTWKVKIDGRRLSNGWEDFTIAHDLRVGDIVVFRQEGELVFHVTALGPSCCEIQYGEDTLEEDKIEKLCDTENVSSKKKSLKREAESAPDNSLDSCFVATVTGSNLKRDTLYIPKEFALSNGLMNKYQIVLMNEEGESWKIDLRREAYNYGRFYMRRGWRSFCIANGKKPGDVFAFRLVKNEETPVIQLFPMTIEDLDKLQSLPRHKIRKTEAAPSSPDLSSFVATVTASNLSRDRLYLPKTFIMSNGLLKKFQMCLMNEEGESWTIDVKHEAHTGRFLTIRGWRRFCVANGKKPGDLLKFKLVHNEETPVLQLLPLKSEDLHKLDPSNDTRHGQSLEVTKKEFLGTEATENEFLGAEVYRNDSFKASEKDTLPFAEPINEDVRQGQCSQAIKQEYVSTEEKNSTSQNRFVTLTLTHSSKLNLPFEFMKGNGIKKAGKITMVDRYDAKWRTSLLMDKIGAMSLGRGSKGFCEVNGVEMNESFVLELIWEDTVPLLKFCSKV

SEQ ID NO: 10293 - DNA, 1233 bp, Arabidopsis thaliana
atctttggcaattctgatcgtttgaggcctcctgccaacaaaatgataagtcggttgtcgagaaaaaatgtatgcttcattgtgttcgtggacaagattaccatgcaaacacttttctgcagaaggacatgccccagacagagcaggattcattggtctgtggaagttggttgtcgtgaagaatcttccttacgcagatatgcggagggtaggaaaaataccaaaaatgttgccacaccgacttttcccatcagcaaggtactcaatctggttggacagcaagttacgacttcagttggacccactactcattctggagtacttcctatggcgtaaaggtcacgagtatgctatatccaatcactatgaccgtcattgtttatgggaagaggttgcacaaaacaagaagctgaacaagtataaccatactgttattaatcaacagtttcagttttacaaggctgatgggctgaccagattcaatgcttcggatccgttcaagcttcttcctagcaatgttccagaggggtctttcatagtacgagctcatactcccatgtcgaacctattctcatgtctttggttcaatgaagtggaacgcttcactccccgggaccagctgagctttgcctatacttaccagaaactaagaaggatgaatcctgataaaccatttaatcttcacatgttcaaggactgtgagagaagaaaaattgcaaagttgttccgtcacagatcagacgagaagcgaaaccttatacaagcagcaatacaataaacaactctatgttgtaccaagctgtatccgtcgtgtatagtactttgagactctactgctatattcacatggagaaaagccactttttctttgctccagtgacttggaaactgctacaagaagatccagatgttgttgtacattgggaccgagtctgttgcttgtggcgacaaccagatgaggtatatacgaaaacaatgtgaggtgatttgtagatttaggcggcgttaagagttgaaactttgaaagaagaagaaaaggggcttgattagattcatgaaagggttcctccatttttattcaattcattgcttttgtttttgtctgtatccctatcatgcaacaatttactcttagaaaatatactcatcccctatatattatttataaatgatttctctaagttcgctgataaaaaaaaaaaaaaaaaaactcgagggggggcccggtaccca

SEQ ID NO: 10294 - protein, 236 aa, Arabidopsis thaliana
MYASLCSWTRLPCKHFSAEGHAPDRAGFIGLWKLVVVKNLPYADMRRVGKIPKMLPHRLFPSARYSIWLDSKLRLQLDPLLILEYFLWRKGHEYAISNHYDRHCLWEEVAQNKKLNKYNHTVINQQFQFYKADGLTRFNASDPFKLLPSNVPEGSFIVRAHTPMSNLFSCLWFNEVERFTPRDQLSFAYTYQKLRRMNPDKPFNLHMFKDCERRKIAKLFRHRSDEKRNLIQAAIQ

SEQ ID NO: 10295 - protein, 192 aa, Arabidopsis thaliana
MRRVGKIPKMLPHRLFPSARYSIWLDSKLRLQLDPLLILEYFLWRKGHEYAISNHYDRHCLWEEVAQNKKLNKYNHTVINQQFQFYKADGLTRFNASDPFKLLPSNVPEGSFIVRAHTPMSNLFSCLWFNEVERFTPRDQLSFAYTYQKLRRMNPDKPFNLHMFKDCERRKIAKLFRHRSDEKRNLIQAAIQ

SEQ ID NO: 10296 - protein, 183 aa, Arabidopsis thaliana
MLPHRLFPSARYSIWLDSKLRLQLDPLLILEYFLWRKGHEYAISNHYDRHCLWEEVAQNKKLNKYNHTVINQQFQFYKADGLTRFNASDPFKLLPSNVPEGSFIVRAHTPMSNLFSCLWFNEVERFTPRDQLSFAYTYQKLRRMNPDKPFNLHMFKDCERRKIAKLFRHRSDEKRNLIQAAIQ

SEQ ID NO: 10297 - DNA, 1648 bp, Arabidopsis thaliana
aaaaaaaaattcgtaccattgactataaacatcacaaacccaacaaaaatttcatcaactccgggaaagatagaataacaaaatggccggagcttacgatccaagcttgccggaggttcctgaatggctcaacaaaggagacaacgcgtggcagctcacggcagcgactctggttggtctacagagtatgccaggtcttgttatcctctatgcctccatcgtcaagaagaaatgggctgtgaattcagcttttatggctctttacgctttcgccgccgttcttctctgttgggttctcctctgttacaaaatggcttttggagaagagcttttgccgttttggggcaaaggtggtccagctttcgaccaaggataccttaagggacaagcaaagatcccaaatagtaatgtggcggcgccgtattttccgatggcgacgttggtgtattttcagttcacattcgcggcgataacgacgatacttgtggcgggatctgtgttggggaggatgaatattaaagcatggatggcttttgtgccattgtggttgatctttagctacacagttggagcttatagtatatggggaggtgggtttctgtatcagtggggagttattgattattccggcggttatgttattcatctctcctccggtgttgccggtttcgtcgctgcttactgggtaggaccaaggcctaaggctgacagagagagattcccaccgaacaatgttcttctaatgcttgctggagctggacttttatggatgggatggtccggttttaacggtggtgctccttacgcggccaacttaacctcctctatcgccgtgttaaacaccaacctctcggccgccacaagcctccttgtatggactacacttgatgtcatcttctttggcaaaccttctgtcatcggagcaattcaaggcatggttactggcttagccggcgtcactcccggagcaggtttgatccaaacatgggcagctataataattggagtagtctcaggaacagctccatgggcctctatgatgatcattcacaagaaatccgctctccttcaaaaggtggatgatacattagcggtgttttacacacacgccgtggctggtttacttggtggaataatgacagggttgtttgcacaccctgatctctgcgttttggtacttcctctcccagcgaccagaggagctttctacggtggcaatggcggcaaacagcttttgaaacagttggctggagctgccttcattgccgtctggaatgtggtgtcgactactatcattctactcgctattagggtgttcataccattgagaatggctgaggaagagctcgggattggagacgacgcagcacatggggaagaagcttatgctctttggggagatggagagaagtttgatgctacaaggcatgtgcaacagtttgagagagatcaagaagctgctcatccttcttatgttcatggtgctagaggtgtcaccattgttctatgatttttcttcttctttttcttatttattttttgtgtattgatttccttatgacattagagatgtgaatgagttatttgtgttctgtataggtggtaaaacttcacttttcatattttttggtgtgtatttggagttaac

SEQ ID NO: 10298 - protein, 475 aa, Arabidopsis thaliana
MAGAYDPSLPEVPEWLNKGDNAWQLTAATLVGLQSMPGLVILYASIVKKKWAVNSAFMALYAFAAVLLCWVLLCYKMAFGEELLPFWGKGGPAFDQGYLKGQAKIPNSNVAAPYFPMATLVYFQFTFAAITTILVAGSVLGRMNIKAWMAFVPLWLIFSYTVGAYSIWGGGFLYQWGVIDYSGGYVIHLSSGVAGFVAAYWVGPRPKADRERFPPNNVLLMLAGAGLLWMGWSGFNGGAPYAANLTSSIAVLNTNLSAATSLLVWTTLDVIFFGKPSVIGAIQGMVTGLAGVTPGAGLIQTWAAIIIGVVSGTAPWASMMIIHKKSALLQKVDDTLAVFYTHAVAGLLGGIMTGLFAHPDLCVLVLPLPATRGAFYGGNGGKQLLKQLAGAAFIAVWNVVSTTIILLAIRVFIPLRMAEEELGIGDDAAHGEEAYALWGDGEKFDATRHVQQFERDQEAAHPSYVHGARGVTIVL

SEQ ID NO: 10299 - protein, 440 aa, Arabidopsis thaliana
MPGLVILYASIVKKKWAVNSAFMALYAFAAVLLCWVLLCYKMAFGEELLPFWGKGGPAFDQGYLKGQAKIPNSNVAAPYFPMATLVYFQFTFAAITTILVAGSVLGRMNIKAWMAFVPLWLIFSYTVGAYSIWGGGFLYQWGVIDYSGGYVIHLSSGVAGFVAAYWVGPRPKADRERFPPNNVLLMLAGAGLLWMGWSGFNGGAPYAANLTSSIAVLNTNLSAATSLLVWTTLDVIFFGKPSVIGAIQGMVTGLAGVTPGAGLIQTWAAIIIGVVSGTAPWASMMIIHKKSALLQKVDDTLAVFYTHAVAGLLGGIMTGLFAHPDLCVLVLPLPATRGAFYGGNGGKQLLKQLAGAAFIAVWNVVSTTIILLAIRVFIPLRMAEEELGIGDDAAHGEEAYALWGDGEKFDATRHVQQFERDQEAAHPSYVHGARGVTIVL

SEQ ID NO: 10300 - protein, 418 aa, Arabidopsis thaliana
MALYAFAAVLLCWVLLCYKMAFGEELLPFWGKGGPAFDQGYLKGQAKIPNSNVAAPYFPMATLVYFQFTFAAITTILVAGSVLGRMNIKAWMAFVPLWLIFSYTVGAYSIWGGGFLYQWGVIDYSGGYVIHLSSGVAGFVAAYWVGPRPKADRERFPPNNVLLMLAGAGLLWMGWSGFNGGAPYAANLTSSIAVLNTNLSAATSLLVWTTLDVIFFGKPSVIGAIQGMVTGLAGVTPGAGLIQTWAAIIIGVVSGTAPWASMMIIHKKSALLQKVDDTLAVFYTHAVAGLLGGIMTGLFAHPDLCVLVLPLPATRGAFYGGNGGKQLLKQLAGAAFIAVWNVVSTTIILLAIRVFIPLRMAEEELGIGDDAAHGEEAYALWGDGEKFDATRHVQQFERDQEAAHPSYVHGARGVTIVL

SEQ ID NO: 10301 - DNA, 1796 bp, Arabidopsis thaliana
ggcttttttcttcttcctgagttcctttttttctccgatgaaattttaaccgtgatgatgatgatcataatgaaacagatatgagcaagaaaaatctagcgattctgttgcgtgctagaatgagatccaacaatccctccaaattttccctctctcaatttcctaaggaaattcaatctaatcctcaagagaatcattctagagatcacattgtgcaaaattctaatgattttggtaccactggaagggtttatgatgttgttcgagagacaatgcactcagctatctcagctagtaaaactggtgtattagacattactcttaatgattttcaagagggttactttagcctttcgcttgaagaccgcgagaagttactgcttgttttagccaaggagtatgatgttaaccgagagcaagtccgagaacttgttaagcaatatcttggacttgaaactccagctagtgatgatgataagggggctttatcttctgttttctatcgcattgagaggaatctgaggcatgctcttaggccaacatatgaagttttatttgagaggttgaatacacatcctggagggttgagatttttgtccatcctccgagctgatcttctgtcgatactctcaaaagagaacacgccgtctttgcgaacattagattcttttctgaaggagaaactcggtatgtggcttagtcctgccactttagagcttcatcaaattacttgggatgatcctgcttcattgcttgagaaaattgttgcatatgaggcggtgcatccaatcagcaacctcttggatcttaaaagaagattgggaataggccgtcgatgctttggatattttcatccatctgttcctggtgagccacttatttttatagaagttgctcttatggagactgttgctcagacaattcaggaagttttgtgggacaatcctcccataccagagaaccaagcaacatgcgctttattttactctatttcttcaactcagcctggcttagctgggataaacctcggaaaatttctgatcaaacgagtgattacgttggtgaaaaaagacatgccacatgtttctacatttgcaacacttagccccattcctggattcatgcaatggctcctctcgaagttatcatctcagtcaagatttgctgaagatgagcgtggtacacagagcaattcgccttcatctacgtttagtgagaaagtattactaccagaagaggaacatgccctcatgactctatcagatgaatcttcatccggtagcaacggtatggaagttctgttgaatttgctatcagtaaagaactgcgattgggctacttcgcctcgcctattaccagttttagaacctattcttatgcggttatgtgctaggtacctcttgcaagagaagaagagaggaaaagctttagactctgttgctaacttccacttgcaaaatggagcgatggttgaaagaataaattggatggcggatcgatcagagaaaggtattcgtcaaagtggaggcattatggtaaactatgtctataggttagagaatatcgaagactatgctcaatcgtattttgggtcgggcaaaatccatgcctctcccggtatccattcccgtctctaggtaactccgcaaagaaaatcgggttttgatcgatttgcaggtaaaaaaaactaaggtatcaaaacctgggagtaacatagcacaatggtatgtatatgtatgtacaaacggtttcaagtgtgtatactctcaagactctatatatatgaatgtgattcg

SEQ ID NO: 10302 - protein, 518 aa, Arabidopsis thaliana
MSKKNLAILLRARMRSNNPSKFSLSQFPKEIQSNPQENHSRDHIVQNSNDFGTTGRVYDVVRETMHSAISASKTGVLDITLNDFQEGYFSLSLEDREKLLLVLAKEYDVNREQVRELVKQYLGLETPASDDDKGALSSVFYRIERNLRHALRPTYEVLFERLNTHPGGLRFLSILRADLLSILSKENTPSLRTLDSFLKEKLGMWLSPATLELHQITWDDPASLLEKIVAYEAVHPISNLLDLKRRLGIGRRCFGYFHPSVPGEPLIFIEVALMETVAQTIQEVLWDNPPIPENQATCALFYSISSTQPGLAGINLGKFLIKRVITLVKKDMPHVSTFATLSPIPGFMQWLLSKLSSQSRFAEDERGTQSNSPSSTFSEKVLLPEEEHALMTLSDESSSGSNGMEVLLNLLSVKNCDWATSPRLLPVLEPILMRLCARYLLQEKKRGKALDSVANFHLQNGAMVERINWMADRSEKGIRQSGGIMVNYVYRLENIEDYAQSYFGSGKIHASPGIHSRL

SEQ ID NO: 10303 - protein, 505 aa, Arabidopsis thaliana
MRSNNPSKFSLSQFPKEIQSNPQENHSRDHIVQNSNDFGTTGRVYDVVRETMHSAISASKTGVLDITLNDFQEGYFSLSLEDREKLLLVLAKEYDVNREQVRELVKQYLGLETPASDDDKGALSSVFYRIERNLRHALRPTYEVLFERLNTHPGGLRFLSILRADLLSILSKENTPSLRTLDSFLKEKLGMWLSPATLELHQITWDDPASLLEKIVAYEAVHPISNLLDLKRRLGIGRRCFGYFHPSVPGEPLIFIEVALMETVAQTIQEVLWDNPPIPENQATCALFYSISSTQPGLAGINLGKFLIKRVITLVKKDMPHVSTFATLSPIPGFMQWLLSKLSSQSRFAEDERGTQSNSPSSTFSEKVLLPEEEHALMTLSDESSSGSNGMEVLLNLLSVKNCDWATSPRLLPVLEPILMRLCARYLLQEKKRGKALDSVANFHLQNGAMVERINWMADRSEKGIRQSGGIMVNYVYRLENIEDYAQSYFGSGKIHASPGIHSRL

SEQ ID NO: 10304 - protein, 454 aa, Arabidopsis thaliana
MHSAISASKTGVLDITLNDFQEGYFSLSLEDREKLLLVLAKEYDVNREQVRELVKQYLGLETPASDDDKGALSSVFYRIERNLRHALRPTYEVLFERLNTHPGGLRFLSILRADLLSILSKENTPSLRTLDSFLKEKLGMWLSPATLELHQITWDDPASLLEKIVAYEAVHPISNLLDLKRRLGIGRRCFGYFHPSVPGEPLIFIEVALMETVAQTIQEVLWDNPPIPENQATCALFYSISSTQPGLAGINLGKFLIKRVITLVKKDMPHVSTFATLSPIPGFMQWLLSKLSSQSRFAEDERGTQSNSPSSTFSEKVLLPEEEHALMTLSDESSSGSNGMEVLLNLLSVKNCDWATSPRLLPVLEPILMRLCARYLLQEKKRGKALDSVANFHLQNGAMVERINWMADRSEKGIRQSGGIMVNYVYRLENIEDYAQSYFGSGKIHASPGIHSRL

SEQ ID NO: 10305 - DNA, 1455 bp, Arabidopsis thaliana
atttatacgcagctgtgagaaagagtacgcagctgtgagaaagagagagagataaagcaagcaacagaataaattcttctccttttcttttttgttgcaactagtgaaagagaaagagacgatcgcttattttcttcttctcctacactctgcgtttttgctctctttttactccgcattgctcctccgttactatcttcgccggcgaaaatttgttttctttttccctggaggtaaattcgaatcatgtcaaggcctgctcagcttccacctcgttgcccgattccaaagaaactttctttgagtccagttgcagatacattctactcttcttcctcacccattgaatcatacattggtcaatacaagtcttctactcaagattccaggctcgaagatcaacctgcttggcttgatgagttgctctgtgacaaaactgatgggttgctcactagaggaggtcctctgcgccgctcagctagcgactcagttgtgcttttgggagacatttctgctactttttctggttttgatcaaagtgaggatgaagaaagtttgagttctgaagcttgtggggacttggagtctgcttgtgtatatggtcccaactcgccaagagcaaagaacaactctagcttctctaacaaccctattgcttctgccttttcggattatggttctcagacaccgcctcagaacttggatgatacggtgaaagggatcaaccgttcacctgttgctgaaaatgcgtgtggttcaatgggcataccaaatgcaaaaaggaacccgggacagcgttcaagggttcgtaagctccagtacattgctgaacttgagagaacagtaggcatgttgcagacggtggaagcagatttatcagtgagagtggcttcacttcttcagacacgagcaacactgtccctggagaatagccagttgaagcagcagatggcgatactaaagcaggacaagctcataagggaaggtgagtatcagttactgaagaaggaagctcagagattgaaatctggattgggatacttagggagcactaacaacagtaacaggctggtgaggtcatattctgctggttcaaatgtagctccaaggacagcttcgtcccacttggactggaatttgctagatctgaccaaactcaatctcaactaaagacaaaaccctccataagaataagtagcttaaggaattcaagagttaacagttctatgttcggaaaatgaacaaatctttgtcgatttgtataaatatgatttaggagtattaagtatcccactgtcttgggatgtagtcttttttagctaaaatgctctgatattggagacattttaagggttcctattttgtagctcattgagtaattgtggtggctttgactgagagtattcttctatttctggtgttctaaaaagctattaatttgatgaacgttgggat

SEQ ID NO: 10306 - protein, 307 aa, Arabidopsis thaliana
MSRPAQLPPRCPIPKKLSLSPVADTFYSSSSPIESYIGQYKSSTQDSRLEDQPAWLDELLCDKTDGLLTRGGPLRRSASDSVVLLGDISATFSGFDQSEDEESLSSEACGDLESACVYGPNSPRAKNNSSFSNNPIASAFSDYGSQTPPQNLDDTVKGINRSPVAENACGSMGIPNAKRNPGQRSRVRKLQYIAELERTVGMLQTVEADLSVRVASLLQTRATLSLENSQLKQQMAILKQDKLIREGEYQLLKKEAQRLKSGLGYLGSTNNSNRLVRSYSAGSNVAPRTASSHLDWNLLDLTKLNLN

SEQ ID NO: 10307 - DNA, 1292 bp, Arabidopsis thaliana
  misc_feature (874)..(875): n is a, c, g, or t
  misc_feature (877)..(877): n is a, c, g, or t
gagaaaggagtgctgattaaagatgaaggaaactgcaagtctggcagcgagaacatggggacagtgaaacaaagctgccatgagaagggctgcagcgatgaaaaacaaaccggggaaataaatcttgcttcggaggaagagacagatgatcaagattgctcctcgggatgttgtgtgaacgagggaacagtgaaacaaagcttcgatgagaagaagcattctgtgttggtggagaaggaaggtttggacatggaagctggtttctgttgtgatgccaagctggtttgttgtggaaacacagaaggtgaagtgaaggagcaatgtcgtctggagataaagaaagaagaacattgcaagtctggttgctgcggcgaggaaaaacaaaccggagaaatcactctggtttcagaggaagagacagagagcacgaattgttccacgggttgttgtgtggacaaagaagaagtgacacaaacctgtcatgagaagcctgctagcttggtggtatcaggcttggaagtgaagaaggatgagcattgtgagagctcacacagagccgtcaaggtagagacctgttgcaaagtgaagattccagaggcttgcgcatcaaaatgtagggacagagcgaagcgtcacagtggtaaaagctgttgcaggagttatgcaaaagagttatgcagccaccgccatcatcatcaccaccaccaccaccatcaccatgtgagtgcttgatggagattgattgaataacttaaactcttgatgcatccatctattcacattacgtttagtctcattccgtgaatgccgaaataaaaaacaaaatgttccagcaaaggcagtttattagattaagcaactgtgttattcatannanaaaaaaaaaaaaaaaaaaaaaaaaaaaaaaaaaaaaaaaaaaaaaaaaaaaaaaaaaaaaaaaaaaaaaaaaaaaaaaaaaaaaaaaaaaaaaaaaaaaaaaaaaaacccgggggggggcccggaaacaaaatcccccaaaaagggggggaaaaaaaaatcccggggccgcgtttaaaaaagggggaaagggaaaaaaccgggggtaaacaaaataaaaccccttgaaaaaaaacccccttttcccaagggggaaaaaaaaaaaaaagccccaaacaaacccccttcccaaaaattgccaaacctgaaggggaaaaggcaaatttaaacggtaaaaaatttgaaaaaaatccggaaaaaattttggaaaaacaacccatttttaaaaaaaaaaggcaaaaacggaaaaatccctt

SEQ ID NO: 10308 - protein, 243 aa, Arabidopsis thaliana
EKGVLIKDEGNCKSGSENMGTVKQSCHEKGCSDEKQTGEINLASEEETDDQDCSSGCCVNEGTVKQSFDEKKHSVLVEKEGLDMEAGFCCDAKLVCCGNTEGEVKEQCRLEIKKEEHCKSGCCGEEKQTGEITLVSEEETESTNCSTGCCVDKEEVTQTCHEKPASLVVSGLEVKKDEHCESSHRAVKVETCCKVKIPEACASKCRDRAKRHSGKSCCRSYAKELCSHRHHHHHHHHHHHVSA

SEQ ID NO: 10309 - protein, 225 aa, Arabidopsis thaliana
MGTVKQSCHEKGCSDEKQTGEINLASEEETDDQDCSSGCCVNEGTVKQSFDEKKHSVLVEKEGLDMEAGFCCDAKLVCCGNTEGEVKEQCRLEIKKEEHCKSGCCGEEKQTGEITLVSEEETESTNCSTGCCVDKEEVTQTCHEKPASLVVSGLEVKKDEHCESSHRAVKVETCCKVKIPEACASKCRDRAKRHSGKSCCRSYAKELCSHRHHHHHHHHHHHVSA

SEQ ID NO: 10310 - protein, 160 aa, Arabidopsis thaliana
MEAGFCCDAKLVCCGNTEGEVKEQCRLEIKKEEHCKSGCCGEEKQTGEITLVSEEETESTNCSTGCCVDKEEVTQTCHEKPASLVVSGLEVKKDEHCESSHRAVKVETCCKVKIPEACASKCRDRAKRHSGKSCCRSYAKELCSHRHHHHHHHHHHHVSA

SEQ ID NO: 10311 - DNA, 1852 bp, Arabidopsis thaliana
aactcttgaaattgtcataatcgaagaaatcgagttcatcgtcggagatatcattgttcgcgttaaaacaagtgcagcgatgagtattgcgaccattctctgcacgcttgtcgttgtcttcttacatatagttgtgaaccattttcgctaagcgaggctcgacctctgttacagcgacgagtccatctccagagatgagtaatttctttgagtgtgagattctcgtgaacggtcgatctaataaacgcgtgagacgagacttaagcactggtctggttgatgatttcactctattcaccggcaaatcgttgttaatcggctggatcttcatcatcggaagtggcaaaaaaatgagatctgtccaggaaacaaaaataatcgcagaatcgaaatctactaaaaacctctcaagttactactctcaaatcagagaagcagcatctacactagaaattctcatcaatagcaaaaaaaaaattactcttagattttcctcaaaaaccttaatcaatcgccgggaaaatgaatattccggtgactatttcctccattactgtttctaataacgctgtttccgacaatcgtcgtcatgtttcccgtgaaaatcgtcagcgttaagaaaaccgtcacttatatttttttttcttttcttcttcgtttttgtgaagatgatgatccactgatttgagagtagtagcttgagaggtttttagtagatttcgattttgcgattatttttgtttcctggagagatctcatttttttgccacttccgatgatgaagatccagccgattaacaacgatttgccggcgaatagagtggaatcatcaaccaaaccagtgcttaagtctcgtctcaagcgtttattagatcgaccgttcacgagaatctcaaactcagagaaattactcatctctggagatggagtcgtcgctggaacagagttcgagccaagcttagcgaaaatggttcaaaactatatggaagaaaacaacgacaagcaaacaaagaatggtcgcaatactcatcgttgcaattgttttaacgggaacaatgatatctccgacgatgaactcgatttcttcgattatgacaatttcaagagtttgattcaatgcggaagcttcgttgagaagagtcttttagtggaagctacgaagattatagagaagaacaaatcagttaaaagaaaagacgaattgagaaagattgttgttgatgaactctcatctcttggttacgactcttcaatttgtaaatcgaaatgggataaaactcgttctataccggccggtataatctccttaaccagtttttcttcttcttcttctacctttgatttttgtgagtatgagtatatagatgtgattgtgaacggagagaggttgataatcgacattgattttagatcggagtttgagatcgcaaggcagacgagtggttacaaggagttgcttcaatctctaccgttgattttcgtcggaaaatctgataggattcgtcagattgtttctatagtttcggaagcgtcaaaacagagcttgaagaagaaaggtatgcatttcccgccgtggagaaaagctgattacatgcgcgctaagtggctatcttcctacactcgaaactccggcgaaaaaaagccgacggttacttctgccgcgaaagtcgtagctgaaccggagctagattcttcggagattgagctgattttcgaggagaaggtcttgttgccgccattgaagtctccgattacgtctgttggtagagatgatgatgacgtggcagagtcagtgaagaaagaagcaaaggtcgtcacgggattagctttactgttcaaagaaaatcactaa

SEQ ID NO: 10312 - protein, 358 aa, Arabidopsis thaliana
MMKIQPINNDLPANRVESSTKPVLKSRLKRLLDRPFTRISNSEKLLISGDGVVAGTEFEPSLAKMVQNYMEENNDKQTKNGRNTHRCNCFNGNNDISDDELDFFDYDNFKSLIQCGSFVEKSLLVEATKIIEKNKSVKRKDELRKIVVDELSSLGYDSSICKSKWDKTRSIPAGIISLTSFSSSSSTFDFCEYEYIDVIVNGERLIIDIDFRSEFEIARQTSGYKELLQSLPLIFVGKSDRIRQIVSIVSEASKQSLKKKGMHFPPWRKADYMRAKWLSSYTRNSGEKKPTVTSAAKVVAEPELDSSEIELIFEEKVLLPPLKSPITSVGRDDDDVAESVKKEAKVVTGLALLFKENH

SEQ ID NO: 10313 - protein, 357 aa, Arabidopsis thaliana
MKIQPINNDLPANRVESSTKPVLKSRLKRLLDRPFTRISNSEKLLISGDGVVAGTEFEPSLAKMVQNYMEENNDKQTKNGRNTHRCNCFNGNNDISDDELDFFDYDNFKSLIQCGSFVEKSLLVEATKIIEKNKSVKRKDELRKIVVDELSSLGYDSSICKSKWDKTRSIPAGIISLTSFSSSSSTFDFCEYEYIDVIVNGERLIIDIDFRSEFEIARQTSGYKELLQSLPLIFVGKSDRIRQIVSIVSEASKQSLKKKGMHFPPWRKADYMRAKWLSSYTRNSGEKKPTVTSAAKVVAEPELDSSEIELIFEEKVLLPPLKSPITSVGRDDDDVAESVKKEAKVVTGLALLFKENH

SEQ ID NO: 10314 - protein, 294 aa, Arabidopsis thaliana
MVQNYMEENNDKQTKNGRNTHRCNCFNGNNDISDDELDFFDYDNFKSLIQCGSFVEKSLLVEATKIIEKNKSVKRKDELRKIVVDELSSLGYDSSICKSKWDKTRSIPAGIISLTSFSSSSSTFDFCEYEYIDVIVNGERLIIDIDFRSEFEIARQTSGYKELLQSLPLIFVGKSDRIRQIVSIVSEASKQSLKKKGMHFPPWRKADYMRAKWLSSYTRNSGEKKPTVTSAAKVVAEPELDSSEIELIFEEKVLLPPLKSPITSVGRDDDDVAESVKKEAKVVTGLALLFKENH

SEQ ID NO: 10315 - DNA, 381 bp, Arabidopsis thaliana
gggggttgaatattgtacaccaactgttcgatgaaatgtcttacagagatttcgtcctgattcatttacctcactaattgcgagccttcttgccgtcgtcacgaattctgaattcgtagaaatttaggtttgctaaagcttgaagatgagttctactgtttggtgggaaggagctgagaagacacgagttctcatagcccaagattcaggttgtggcggaaacaaacccggagaactgttaacactccgccatccaaaatcagaaaatggaacatgcttcctttttaataatgggatacttcaagaacttcagtggtttaagcaatcttatggttcttggttcttgggagattacatatctgaagatggaagcttatatat

SEQ ID NO: 10316 - protein, 78 aa, Arabidopsis thaliana
MSSTVWWEGAEKTRVLIAQDSGCGGNKPGELLTLRHPKSENGTCFLFNNGILQELQWFKQSYGSWFLGDYISEDGSLY

SEQ ID NO: 10317 - DNA, 1948 bp, Arabidopsis thaliana
gtgtgtgtttcttcttccccagacgcaaaacgcagacgcacccagaaactaaaaaaaactgcttcctctctctctctctcttcccatcatcatcgtcgtctctttctcagatcgattttcggttatgccgatcaacggttaatctccgccgtttgatttcatcgccggagaggatctttctccgtctacgtatgccctttcgtatacgcgtttcgtgttttgattttccccgaaacctttcgttgttctgggttactgtgtgaggaaggacgtgcaaatttgtttggaagttgtgttaagttaaagcagagtattggagatcgtctgatagagaagagaatagttcttgtgtaaggttatgggttcagtttgttgtgtagctgtgaaagacagaaaggttcctcctagtggtggacctgcgagttcatctattcatcggaattcagcatgttcgccacaatggagttttcgacgtgataataggaggcgagtggctgatgagattgagggttcaccttattacagtccttatgttgcgagtagaggtattagtatggataagatgtcattaggctctgagagaggaactttatctgaaggaggaacccctcctgatggacatttagggactcctgcttctcagaaatcagcaactccggaaatgagcaccaattccatggttccaccttcttcaggttcatccttggcaagcagtgatctcattgaggtgaagaacttagttgactcacctggaattgtcccttcagctcaatcgaagcctttgttctccacgccttctcttcccaatccagttagtgatctttcatcggctcacacgcgtttgcttcctcctaaatccacaccatcaagacgggctcggcgttcacctgggcatcagttgtttaggcaggtttctgatagtcaaattttaggactgaaatccccaattaataattactcaatctcagaaggaaggtcgtcctttgtgctttcgacctgtagcaatgacttcgccactggatcccagtacgcatcttctgaaggtggctggtctatgaacactttttctgagctcgtggcatattctcaaagggatagatggtcctttgatagcgaacacttgggttctggcagacggaaactaagtggtggtagcagcagattctcattctccccttccgttgttgatcagcaggtttgtggagcttgttcaaagttgctaaccgagaggtcttctatagccacttttgagctcccaatcgctgctgttcttgcctgtggtcatgtttaccacgcagagtgcttagagaccatgactactgatatagagaagtatgatcctgcttgtcccatatgcacaattggggagaaacgggttgcgaaaataacaaggaaagccctaaaagcggaggcggaagcaaaggcaaagcagtacaaaagatgtaaaaaccgtgtggtagatagttacggtgagagtgaatgcgatgagtttgtattccagaaaatggggaaacgagaaggcaaagctctcaagctggaagctagttgcagtagcaagagctcgtctaataagtcattcttgaaatggcactttgcttctatcagctccaagtggaataaaccctcgtccaaagactctgcattgaagaagggattctggtctagacatcgaaataaccggtcttcttcaagcatagagggacttaatcagacatctccgctatgatgaaacccctccatctggatcagaggcatgcgggttatttaggaaagctttgtataaaacagatattcaggttcagctatagcctttagagctgtgttttaactttctttttggatattttgtgtgtttcattgtaacctgtggggataattttcagtaatgaaacaaacttgtcattttagaaaagatttgagaatttgccaaccatttacagagaatgtt

SEQ ID NO: 10318 - protein, 455 aa, Arabidopsis thaliana
MGSVCCVAVKDRKVPPSGGPASSSIHRNSACSPQWSFRRDNRRRVADEIEGSPYYSPYVASRGISMDKMSLGSERGTLSEGGTPPDGHLGTPASQKSATPEMSTNSMVPPSSGSSLASSDLIEVKNLVDSPGIVPSAQSKPLFSTPSLPNPVSDLSSAHTRLLPPKSTPSRRARRSPGHQLFRQVSDSQILGLKSPINNYSISEGRSSFVLSTCSNDFATGSQYASSEGGWSMNTFSELVAYSQRDRWSFDSEHLGSGRRKLSGGSSRFSFSPSVVDQQVCGACSKLLTERSSIATFELPIAAVLACGHVYHAECLETMTTDIEKYDPACPICTIGEKRVAKITRKALKAEAEAKAKQYKRCKNRVVDSYGESECDEFVFQKMGKREGKALKLEASCSSKSSSNKSFLKWHFASISSKWNKPSSKDSALKKGFWSRHRNNRSSSSIEGLNQTSPL

SEQ ID NO: 10319 - protein, 390 aa, Arabidopsis thaliana
MDKMSLGSERGTLSEGGTPPDGHLGTPASQKSATPEMSTNSMVPPSSGSSLASSDLIEVKNLVDSPGIVPSAQSKPLFSTPSLPNPVSDLSSAHTRLLPPKSTPSRRARRSPGHQLFRQVSDSQILGLKSPINNYSISEGRSSFVLSTCSNDFATGSQYASSEGGWSMNTFSELVAYSQRDRWSFDSEHLGSGRRKLSGGSSRFSFSPSVVDQQVCGACSKLLTERSSIATFELPIAAVLACGHVYHAECLETMTTDIEKYDPACPICTIGEKRVAKITRKALKAEAEAKAKQYKRCKNRVVDSYGESECDEFVFQKMGKREGKALKLEASCSSKSSSNKSFLKWHFASISSKWNKPSSKDSALKKGFWSRHRNNRSSSSIEGLNQTSPL

SEQ ID NO: 10320 - protein, 387 aa, Arabidopsis thaliana
MSLGSERGTLSEGGTPPDGHLGTPASQKSATPEMSTNSMVPPSSGSSLASSDLIEVKNLVDSPGIVPSAQSKPLFSTPSLPNPVSDLSSAHTRLLPPKSTPSRRARRSPGHQLFRQVSDSQILGLKSPINNYSISEGRSSFVLSTCSNDFATGSQYASSEGGWSMNTFSELVAYSQRDRWSFDSEHLGSGRRKLSGGSSRFSFSPSVVDQQVCGACSKLLTERSSIATFELPIAAVLACGHVYHAECLETMTTDIEKYDPACPICTIGEKRVAKITRKALKAEAEAKAKQYKRCKNRVVDSYGESECDEFVFQKMGKREGKALKLEASCSSKSSSNKSFLKWHFASISSKWNKPSSKDSALKKGFWSRHRNNRSSSSIEGLNQTSPL

SEQ ID NO: 10321 - DNA, 1553 bp, Arabidopsis thaliana
gccacccagaaaaaaccctcaagtcttcttcttcttcctcaatctctccacctcttttcaaaccttcttcacactctctctcaatcaatcctttttcttctcaaatctttcagttttgatctctaaatttccagaaaatgagcaacgataaggacagtttcaatgtcagcgatctcacttctgctcttaaagatgaggatcgagctggtcttgtcaacgctcttaagaacaagctccagaatctagctggacaacattctgatgtgctcgagaatctgactcctaaaattagaaggcgtgttgaggttttgcgggagattcagggcaaacatgatgaaatagagacaaaattccgcgaggagagagctgctcttgaagccaagtatcaaaagttatatcagcctttgtataacaagcgttatgagattgtgaatggagctactgaagttgaaggggctccagaggatgctaagatggaccaaggagacgagaaaactgcagaagagaaaggagtccctagtttctggctgactgctctgaaaaataatgatgttatatctgaagagatcacagagcgtgatgaaggagcccttatatatcttaaagatatcaagtggtgcaagattgaagaaccaaagggattcaaacttgagtttttcttcgaccagaatccttacttcaaaaacaccctattaacaaaggcgtatcatatgattgatgaagatgagcctctgcttgagaaggctattgggacagagattgattggtatcctggaaaatgcttaactcagaagattcttaagaagaagcctaagaaaggtgcaaagaatgccaagccaattaccaaaactgaagattgtgaaagcttcttcaacttcttcaatcctccccaagttcctgatgatgatgaagacattgacgaagaaagagccgaggaacttcagaatctgatggaacaagattatgacattggttctacaatccgggagaagatcatacctcatgctgtctcatggtttactggtgaggctattgagggagaggagtttgaaatagacaatgacgatgaagatgatatcgatgaggatgaagatgaggatgaagaagatgaagacgaagatgaggaagaagacgacgaagatgaggaggaagaagtaagcaagaccaaaaagaagccatcagtcttacacaagaaaggagggagacctcaggttaccgatgatcaacaaggagagaggcctcctgaatgcaaacaacagtaaacaaaatcgaaaagtctaaacgaaaaccagtaaaagaaaaacaaatgttttgggttttgagtgaagtttcatggcctagttttttgcttccatgtaaggcaaaatgttttgaagactgctcataggaatgttgctgtaggcaaaagagtgagtttctccatgtggagatacttgataaattatttttggtgcatttgttttttttttctttaatcactaagttgaattttggtgtgttcgtcaaaattatatccttttaccacttgaattaaagtctcttttggtttcttt

SEQ ID NO: 10322 - protein, 374 aa, Arabidopsis thaliana
MSNDKDSFNVSDLTSALKDEDRAGLVNALKNKLQNLAGQHSDVLENLTPKIRRRVEVLREIQGKHDEIETKFREERAALEAKYQKLYQPLYNKRYEIVNGATEVEGAPEDAKMDQGDEKTAEEKGVPSFWLTALKNNDVISEEITERDEGALIYLKDIKWCKIEEPKGFKLEFFFDQNPYFKNTLLTKAYHMIDEDEPLLEKAIGTEIDWYPGKCLTQKILKKKPKKGAKNAKPITKTEDCESFFNFFNPPQVPDDDEDIDEERAEELQNLMEQDYDIGSTIREKIIPHAVSWFTGEAIEGEEFEIDNDDEDDIDEDEDEDEEDEDEDEEEDDEDEEEEVSKTKKKPSVLHKKGGRPQVTDDQQGERPPECKQQ

SEQ ID NO: 10323 - protein, 262 aa, Arabidopsis thaliana
MDQGDEKTAEEKGVPSFWLTALKNNDVISEEITERDEGALIYLKDIKWCKIEEPKGFKLEFFFDQNPYFKNTLLTKAYHMIDEDEPLLEKAIGTEIDWYPGKCLTQKILKKKPKKGAKNAKPITKTEDCESFFNFFNPPQVPDDDEDIDEERAEELQNLMEQDYDIGSTIREKIIPHAVSWFTGEAIEGEEFEIDNDDEDDIDEDEDEDEEDEDEDEEEDDEDEEEEVSKTKKKPSVLHKKGGRPQVTDDQQGERPPECKQQ

SEQ ID NO: 10324 - DNA, 551 bp, Arabidopsis thaliana
agctcactagtcccccccccccccccgccaaaattaaacctcaccgacggattcaattctctcgttctcaggccgtcttcatcgccggagcgttttcttacgaaaagaatgggcttctggacattgttaaaaggtctgctgctctttgcaaatgcactggcaatcctcaacgaagaccgtttccttgttccaagaggatggacactcggagaactccaccaaaccggtagaagaaactctcccaaaggccaaatcattggtctgatccatgcctgccagtacatgaggctacccctcatgctcattaacacagcagtcatcgtcttgaagcttatctccggttgaagattttgtgtagatgaagataaactacattgcgttcttcaaatgattgtgattagttacaaatctattttgtgtaggagttggaatttgtttttgtcatccctcgcactcaagtttggtgtgcattctacaacattcttctcatatttttacatgccaaatcaaaccaaaaaaaaaaaaaaaaaaaactcgagggggggcccggt

SEQ ID NO: 10325 - protein, 114 aa, Arabidopsis thaliana
SSLVPPPPPPKLNLTDGFNSLVLRPSSSPERFLTKRMGFWTLLKGLLLFANALAILNEDRFLVPRGWTLGELHQTGRRNSPKGQIIGLIHACQYMRLPLMLINTAVIVLKLISG

SEQ ID NO: 10326 - protein, 78 aa, Arabidopsis thaliana
MGFWTLLKGLLLFANALAILNEDRFLVPRGWTLGELHQTGRRNSPKGQIIGLIHACQYMRLPLMLINTAVIVLKLISG

SEQ ID NO: 10327 - protein, 75 aa, Arabidopsis thaliana
LTSPPPPPAKIKPHRRIQFSRSQAVFIAGAFSYEKNGLLDIVKRSAALCKCTGNPQRRPFPCSKRMDTRRTPPNR

SEQ ID NO: 10328 - DNA, 778 bp, Arabidopsis thaliana
agagctcactagtccccccccccccccccgaagataatgtatctaggtttgcttatgattatacatgtgatatttaatacatggcacaggttcgtcgagtttcacagccataggtacaatagaaggcaaattcgattgtggttatctggtaaaagttaagttgggctcagagattcttaacggcgttctttatcattcggcccagcccggcccatcatcatctccaaccgctgttctaaacaatgccgttgtaccttatgttgaaactgggaggagacggcgtcgtttaggtaaaagacgaagaagcagacgcagagaagatccgaattacccgaaaccgaaccggagcggttacaatttcttctttgctgagaaacattgcaagctcaaatcactttatcccaacaaggagagagagtttacgaaacttatcggagaatcgtggagcaatctctctaccgaagaacgaatggtttatcaagacattggattgaaggataaggaaaggtatcagagggagttgaatgagtacagagaaacgttgaggcttagggatggtgacatgacaaacggcaaggctttttaggtgatttatttaaaacggcaactcgttttgttgtaggtcgtttctctcttttaagattggacgcctcgccgtttcttttattttctagcttattgtagttgtccatgcttgcttaactaggctcagtgagaggctagacttgccaaacttgaagagtctttatttatttaagaattttagatgttctaatgt

SEQ ID NO: 10329 - protein, 40 aa, Arabidopsis thaliana
MYLGLLMIIHVIFNTWHRFVEFHSHRYNRRQIRLWLSGKS

SEQ ID NO: 10330 - protein, 38 aa, Arabidopsis thaliana
MVYQDIGLKDKERYQRELNEYRETLRLRDGDMTNGKAF

SEQ ID NO: 10331 - protein, 34 aa, Arabidopsis thaliana
MIIHVIFNTWHRFVEFHSHRYNRRQIRLWLSGKS

SEQ ID NO: 10332 - DNA, 613 bp, Arabidopsis thaliana
gagtttgttttttctactaatttgctgaagaaagggtaaatctttggttggtttaagattcttcaaagaagcaatcataacgcaattgattatatccccaaaagaaaaggtttttaaactccaaaaatgcagactccaaaatcaaggccaggatcattggagctgccacaaaagaagtctcctttaccagctcccaaagttgttaggagactcaaaccaagcggagcagaatccgatccaaaaaccaagacaatatcgaaaactcaaatcccgaaagtagtagctgatcgtcgctctgcaagaatccctctcaatgagattgaaaataagcggacgggaaggataccggaactggaatctacgatatctcagcttctggaagagcttaagaaggcaaaagaagagctacacagatcagaagctttgaaaagagaagctcaagaacaagctgaagatgccgagcatcagtgtaatggatatcaatgcctcggaagattcaagaattgaggagctgcgtaaactctcgcaggagcgagacaagacatggcagtctgaacttgaagctatgcagagacaacgcggaatggattctaccgctctgtcttctgccatt

SEQ ID NO: 10333 - protein, 126 aa, Arabidopsis thaliana
MQTPKSRPGSLELPQKKSPLPAPKVVRRLKPSGAESDPKTKTISKTQIPKVVADRRSARIPLNEIENKRTGRIPELESTISQLLEELKKAKEELHRSEALKREAQEQAEDAEHQCNGYQCLGRFKN

SEQ ID NO: 10334 - DNA, 1931 bp, Arabidopsis thaliana
ttggaacaaagaagtcgcagttgattttatggacggctaaggctgatgatgacctgacacaaaactccgatcgtgttcgattacaagtttagatttttctgagaacccttataattgtttcaacttttggatcttcacacgcataaatcttcgcttcgtctttcatcatctgttctcaagtttagagtctatagacaggaaacttggaactttaggatttgattgaaaaagcaatcttgcgatggcgaataatgcggctgcttgtgctgagagggctacaaacgatatgctgatcggtccagattgggctatcaacattgaactgtgtgacattatcaacatggaaccaagtcaagcaaaagaagcagtgaaggtgctcaagaaacggttaggaagtaaaaattctaaagtccagattcttgctctttatgctttggaaactttgagtaagaattgtggcgagagtgtgtaccagctcattgttgaccgagatattttacctgatatggtcaaaatagtgaagaagaagccagacctgactgtgagggagaagatacttagtttattagatacatggcaagaagcttttggtggaagcggcggaagattccctcagtactacaatgcctataatgaactcaggtctgctggaattgaattcccacctcgaaccgagagcagtgtaccgttctttactccacctcagactcagcctattgttgctcaggcaactgcatcagatgaagatgctgctattcaggcctctctgcaaagtgatgatgcttctgcactcagcatggaagagattcaaagcgctcagggatcagttgatgttttgacagacatgcttggggctcttgatccaagtcatccagagggtttgaaggaagaacttatagttgacttggtcgagcaatgtcgtacttatcaaagacgtgtaatggctcttgtgaatactacttcagatgaggaacttatgtgtcaagggttggcactgaatgacaatctgcagcgcgttcttcagcaccatgatgataaggcaaagggaaactctgttcctgcaacagctcccactccaataccgcttgttagcatcaatcatgatgacgatgatgatgagtcagatgatgattttttacagctagctcataggtcgaaaagagaaagtgcacgagggactggacaagggaatttcaaccctattcttcctcctccaccatcttcaatgaggccagtacatgttgattctggtgctatggacttcctcagtggtgatgtctacaaacctcaagaaaccttcgagaatgtaaagcctccgagtacatcccaatcatcaaaccatgactattctgctcctattttcgatgaaccagttcctcagagcaaatcccctgagcatgctttattcaccaaaccagtctatgaccaaactgaacaattgcctcctgctccatgggagactcaggagccccggaagtatccaccctcaatgtctgctagaaccaacaagaggccagaatacttccagcataatgttccacaacactcaagcagtgcctctgaatcttcatacgatgatcttttgggacaatcccggaatctctctcttaatccaacagcctctgctgctcctgttactccaccaaagaaagatgataaaccagaggatatcctttttaaagacctgatggattttgcaaaaaccaggacatcatcatcttcttcctccaaacccaacaatcagaacaacaaaccgttttgagacagagctggcagttgttacttcagtaaacaactactcttttactattcttttttctttcacttgtgtacttgtttcctttgactgaacatggatttttttaccaaataaaaaaaatagtgaatagagatctgttattggatagaaatgtcaaaattttattttacgt

SEQ ID NO: 10335 - protein, 506 aa, Arabidopsis thaliana
MANNAAACAERATNDMLIGPDWAINIELCDIINMEPSQAKEAVKVLKKRLGSKNSKVQILALYALETLSKNCGESVYQLIVDRDILPDMVKIVKKKPDLTVREKILSLLDTWQEAFGGSGGRFPQYYNAYNELRSAGIEFPPRTESSVPFFTPPQTQPIVAQATASDEDAAIQASLQSDDASALSMEEIQSAQGSVDVLTDMLGALDPSHPEGLKEELIVDLVEQCRTYQRRVMALVNTTSDEELMCQGLALNDNLQRVLQHHDDKAKGNSVPATAPTPIPLVSINHDDDDDESDDDFLQLAHRSKRESARGTGQGNFNPILPPPPSSMRPVHVDSGAMDFLSGDVYKPQETFENVKPPSTSQSSNHDYSAPIFDEPVPQSKSPEHALFTKPVYDQTEQLPPAPWETQEPRKYPPSMSARTNKRPEYFQHNVPQHSSSASESSYDDLLGQSRNLSLNPTASAAPVTPPKKDDKPEDILFKDLMDFAKTRTSSSSSSKPNNQNNKPF

SEQ ID NO: 10336 - protein, 491 aa, Arabidopsis thaliana
MLIGPDWAINIELCDIINMEPSQAKEAVKVLKKRLGSKNSKVQILALYALETLSKNCGESVYQLIVDRDILPDMVKIVKKKPDLTVREKILSLLDTWQEAFGGSGGRFPQYYNAYNELRSAGIEFPPRTESSVPFFTPPQTQPIVAQATASDEDAAIQASLQSDDASALSMEEIQSAQGSVDVLTDMLGALDPSHPEGLKEELIVDLVEQCRTYQRRVMALVNTTSDEELMCQGLALNDNLQRVLQHHDDKAKGNSVPATAPTPIPLVSINHDDDDDESDDDFLQLAHRSKRESARGTGQGNFNPILPPPPSSMRPVHVDSGAMDFLSGDVYKPQETFENVKPPSTSQSSNHDYSAPIFDEPVPQSKSPEHALFTKPVYDQTEQLPPAPWETQEPRKYPPSMSARTNKRPEYFQHNVPQHSSSASESSYDDLLGQSRNLSLNPTASAAPVTPPKKDDKPEDILFKDLMDFAKTRTSSSSSSKPNNQNNKPF

SEQ ID NO: 10337 - protein, 473 aa, Arabidopsis thaliana
MEPSQAKEAVKVLKKRLGSKNSKVQILALYALETLSKNCGESVYQLIVDRDILPDMVKIVKKKPDLTVREKILSLLDTWQEAFGGSGGRFPQYYNAYNELRSAGIEFPPRTESSVPFFTPPQTQPIVAQATASDEDAAIQASLQSDDASALSMEEIQSAQGSVDVLTDMLGALDPSHPEGLKEELIVDLVEQCRTYQRRVMALVNTTSDEELMCQGLALNDNLQRVLQHHDDKAKGNSVPATAPTPIPLVSINHDDDDDESDDDFLQLAHRSKRESARGTGQGNFNPILPPPPSSMRPVHVDSGAMDFLSGDVYKPQETFENVKPPSTSQSSNHDYSAPIFDEPVPQSKSPEHALFTKPVYDQTEQLPPAPWETQEPRKYPPSMSARTNKRPEYFQHNVPQHSSSASESSYDDLLGQSRNLSLNPTASAAPVTPPKKDDKPEDILFKDLMDFAKTRTSSSSSSKPNNQNNKPF

SEQ ID NO: 10338 - DNA, 582 bp, Arabidopsis thaliana
atcaaacgagtaaaacatttgctaatattaaacactttttcttttagaaaaaaaaacaaatatggccgttgattcacctcttcaatctcggatggtttcagcgacgacttctgagaaagatgtgaaagctctcaagttcattgaagaaatgactcggaaccctgactcggttcaagagaaggttcttggagaaatactgactcgtaactctaacaccgaatatctgaaacggttcgatcttaatggtgtcgttgatcggaaaacgttcaagagcaaagttccggtggttacgtacgaagatttgaagccggagattcaacgtatatccaacggcgattgttctccgatcttgtcttctcaccccatcaccgagtttctcacaagctcaggaacatctgctggtgagaggaaactaatgccgacaattgaagaagacttagaccgacgtcagcttttatacagtcttctcatgcctgtgatgaatctctacgtgccgggattagacaaaggcaaagggttatacttcttattcgtgaagtcggagtcaaagacgtcaggtgggttaccggctcgtccggttct

SEQ ID NO: 10339 - protein, 173 aa, Arabidopsis thaliana
MAVDSPLQSRMVSATTSEKDVKALKFIEEMTRNPDSVQEKVLGEILTRNSNTEYLKRFDLNGVVDRKTFKSKVPVVTYEDLKPEIQRISNGDCSPILSSHPITEFLTSSGTSAGERKLMPTIEEDLDRRQLLYSLLMPVMNLYVPGLDKGKGLYFLFVKSESKTSGGLPARPV

SEQ ID NO: 10340 - protein, 163 aa, Arabidopsis thaliana
MVSATTSEKDVKALKFIEEMTRNPDSVQEKVLGEILTRNSNTEYLKRFDLNGVVDRKTFKSKVPVVTYEDLKPEIQRISNGDCSPILSSHPITEFLTSSGTSAGERKLMPTIEEDLDRRQLLYSLLMPVMNLYVPGLDKGKGLYFLFVKSESKTSGGLPARPV

SEQ ID NO: 10341 - protein, 144 aa, Arabidopsis thaliana
MTRNPDSVQEKVLGEILTRNSNTEYLKRFDLNGVVDRKTFKSKVPVVTYEDLKPEIQRISNGDCSPILSSHPITEFLTSSGTSAGERKLMPTIEEDLDRRQLLYSLLMPVMNLYVPGLDKGKGLYFLFVKSESKTSGGLPARPV

SEQ ID NO: 10342 - DNA, 1222 bp, Arabidopsis thaliana
aaaactctcataaccagcgagagtgagtgagagagtagagagtgtgtggagagatactaggaagttgaaggaaaaagcgagaaagatggctagaaacagtgacaatgatatgtgcaaagaagaacggaagagagagagcttcttcaaggttctacagagagttgatatttcttctgagaacatgagagcacttccttacgactttgtgagaagcttctccaacaatgagctctctcgtaagatgaagataaaagctcgatggggaagttcttgggaagtagaaatctgcaaaaatccaagattctatttcatggagaaatccggatgggagaagtttgtgagtgacaatgccttgggagccagtgagtttcttaccttcactcacaaagggaatatgcgttttacagtgaacatcttcatgcaagatggcaaggagatgctacagcctccacaatccatgtccttcatggcttcttctaggccacctaaaagagaacaaggaataccttctcttgccacgacaatagcagctgaatctaatggaggagggaactacaaaaggaagctcaactttgagaagaagaaagctgaggaatctcacaattccaagaggaccgataaagtctttagtgtccagagagaatctgcaggtgcctcttcatcttctgttgcagaattctccatgtttatcaaaaaatcatacctcatctacatgtggttcccgaaatctgttcaaagtattcatatgccgaagcagagaacgattttcaagatacatcacccaaatatgaagaagtcatggaatgtggtttacgtggtgtcagggacgaaatcaagcttctctgctggatggaaaggtttggctcaagaatatcctctagcagttggagacacttgcaagttttcattcatcaaacaacacgagctgattctctttgtctcaaaaccctaagaggagactcactagtgaatagtgatgatgaatgtgaaggtgtctactgagtaaaagactgtttatcagtgttgtcttaagttttagttttatgttatgacttagttcggttttaagttcagaatgtctatcggatggatctatgtagcttgatatgattgggaccaattttaatatgttgtgtgtttgttgtttccgtttggctttactttgctttctctactgaggcagaggtattacaactgttcatcatcaaaagattcagatcgt

SEQ ID NO: 10343 - protein, 288 aa, Arabidopsis thaliana
MARNSDNDMCKEERKRESFFKVLQRVDISSENMRALPYDFVRSFSNNELSRKMKIKARWGSSWEVEICKNPRFYFMEKSGWEKFVSDNALGASEFLTFTHKGNMRFTVNIFMQDGKEMLQPPQSMSFMASSRPPKREQGIPSLATTIAAESNGGGNYKRKLNFEKKKAEESHNSKRTDKVFSVQRESAGASSSSVAEFSMFIKKSYLIYMWFPKSVQSIHMPKQRTIFKIHHPNMKKSWNVVYVVSGTKSSFSAGWKGLAQEYPLAVGDTCKFSFIKQHELILFVSKP

SEQ ID NO: 10344 - protein, 280 aa, Arabidopsis thaliana
MCKEERKRESFFKVLQRVDISSENMRALPYDFVRSFSNNELSRKMKIKARWGSSWEVEICKNPRFYFMEKSGWEKFVSDNALGASEFLTFTHKGNMRFTVNIFMQDGKEMLQPPQSMSFMASSRPPKREQGIPSLATTIAAESNGGGNYKRKLNFEKKKAEESHNSKRTDKVFSVQRESAGASSSSVAEFSMFIKKSYLIYMWFPKSVQSIHMPKQRTIFKIHHPNMKKSWNVVYVVSGTKSSFSAGWKGLAQEYPLAVGDTCKFSFIKQHELILFVSKP

SEQ ID NO: 10345 - protein, 256 aa, Arabidopsis thaliana
MRALPYDFVRSFSNNELSRKMKIKARWGSSWEVEICKNPRFYFMEKSGWEKFVSDNALGASEFLTFTHKGNMRFTVNIFMQDGKEMLQPPQSMSFMASSRPPKREQGIPSLATTIAAESNGGGNYKRKLNFEKKKAEESHNSKRTDKVFSVQRESAGASSSSVAEFSMFIKKSYLIYMWFPKSVQSIHMPKQRTIFKIHHPNMKKSWNVVYVVSGTKSSFSAGWKGLAQEYPLAVGDTCKFSFIKQHELILFVSKP

SEQ ID NO: 10346 - DNA, 1492 bp, Arabidopsis thaliana
  misc_feature (335)..(335): n is a, c, g, or t
gacaaagagaattctctcatttcttcttcttcgctcagctccgacaacgaagggtgaagaatctcgctccctcagtttcgcattgccatcgattttcttagaggctaccatggtcgaacagactcagcaccccacgattcttcagaaggcttctggccaactcttgagctcgagtgtttctcaggacattcggggttatgcttcggattccaaaaggcctgctacataccagaaacatgcagcttacggaaactactccaatgctgcatttcaatatcctcttgcggctgcatctcagattgcaactactacttctcctgtgtttgtccaagctncaggagagaagggatttactaactttgctattgatttcatgatgggtgggtgtttctgctgctgtgtcaaagactgctgctgctcccattgagcgtgtcaagcttttgattcaaaaccaggatgagatgcttaaggctggaaggcttactgagccatacaagggtattcgtgactgtttcggcaggacaattagggatgaaggtattggttcgttgtggagaggaaacaccgctaatgttatccgttacttccccactcaggccttgaactttgcattcaaagattacttcaagaggcttttcaacttcaagaaagacaaggatggctactggaagtggtttgctggtaacttggcatctggaggtgctgctggtgcctcttcccttctctttgtgtactctcttgactatgcacgtacccgtcttgccaatgactccaagtctgccaagaagggaggaggtgaaaggcagttcaatggtcttgttgatgtctacaagaagaccctcaagtcagatggtattgctggactttaccgtggtttcaacatctcgtgtgctggtatcattgtctaccgtggtctctactttggactgtacgactctatgaagcctgtcctcctcactggagacctgcaggacagtttcttcgctagttttgctcttggatggctcatcaccaatggtgcgggtcttgcatcgtacccgattgacacggttagaagaagaatgatgatgacatcaggtgaagcggtgaagtacaagagctcatttgatgcgttctcccagatcgtgaagaaggaaggagccaagtctctgttcaagggtgcgggtgccaacatccggagtgtcgttgcaggtgctggtgtgctttctgggtgcgacaagctgcagttaatcgtcttcggcaagaagtatggatctggaggtgcctaagtaccaccaaatcccgcagtcattaagcttcggcttttgtttttttctccaatttttttgcagtttcagatttcttttataaaaaagatgttgatgaaatcatttccccataaaattagagaggagcaaggggaaatattatctgttcgacgataaggtttttgttatatggaataaattttgtatgggagggaaaaaaaaaaaaaaaaaaaactcgagggggg

SEQ ID NO: 10347 - protein, 268 aa, Arabidopsis thaliana
MLKAGRLTEPYKGIRDCFGRTIRDEGIGSLWRGNTANVIRYFPTQALNFAFKDYFKRLFNFKKDKDGYWKWFAGNLASGGAAGASSLLFVYSLDYARTRLANDSKSAKKGGGERQFNGLVDVYKKTLKSDGIAGLYRGFNISCAGIIVYRGLYFGLYDSMKPVLLTGDLQDSFFASFALGWLITNGAGLASYPIDTVRRRMMMTSGEAVKYKSSFDAFSQIVKKEGAKSLFKGAGANIRSVVAGAGVLSGCDKLQLIVFGKKYGSGGA

SEQ ID NO: 10348 - protein, 141 aa, Arabidopsis thaliana
  misc_feature (112)..(112): Xaa can be any naturally occurring amino acid
TKRILSFLLLRSAPTTKGEESRSLSFALPSIFLEATMVEQTQHPTILQKASGQLLSSSVSQDIRGYASDSKRPATYQKHAAYGNYSNAAFQYPLAAASQIATTTSPVFVQAXGEKGFTNFAIDFMMGGCFCCCVKDCCCSH

SEQ ID NO: 10349 - DNA, 1290 bp, Arabidopsis thaliana
tctctctctctctctgctccatttctctcactttcttcacatctctgaagctcttcgtcacgcatctacaatggcatcgatgatgcaaccgcagatcatactgctgaaggaagggacggacacatctcagggcaaagcgcaactagtaagcaacatcaacgcttgcactgctgttggagatgtagttcgaaccacgctcgggccacgagggatggacaaactcattcacgacgataaaggatccgtcaccatttctaacgatggtgctaccatcatgaagctcctcgacattgttcatcctgctgctaagatcctcgtcgatatcgccaaatcccaagactccgaggtgggtgatgggacaactacagtggttcttcttgcagcagagtttttgaaggaagcgaagccatttattgaggatggtgttcacgctcagaatctaattaggagttaccgcactgcaagcactttggcaattgccaaggttaaagaactcgctgttagcattgaggggaagagtgtagaggaaaagaaaggtttattggctaaatgtgctgctacgactctctcatctaagcttatcggtggagaaaaggagttttttgctacaatggttgttgatgctgttatggccattgggaatgacgacaggctaaatctgattgggatcaagaaggttcctggtggcaatatgcgagactctttcctcgttgatggtgtagctttcaaaaaaacattctcgtatgctggttttgagcaacagccaaagaaatttcttaaccccaaaattctcttgcttaacatcgaattggagttgaaatctgagaaggaaaacgctgaaattaggctgtcagatccatcacagtaccagtcaatagttgatgcagaatggaatatcatttatgacaaactagacaaatgtgttgagagtggagcaaaagttgttctttctcgattggctattggtgatctagctactcagtattttgccgatcgtgatattttctgtgctggtcgtgttgctgaggaagatcttaaccgtgtggctgctgcagctggaggaacagttcagacaagtgttaacaacataatagatgaggttcttggaacttgtgagatttttgaggaaaaacaagttggtggggagagatttaatatattcagtggttgcccttcaggacgaacagcaactattgttctccgtggtggagctgatcagttcatcgaagaaactgagcggagttacatgatgcgattatgattgtgagaagagctgtgaagaactcaact

SEQ ID NO: 10350 - protein, 419 aa, Arabidopsis thaliana
LSLSLLHFSHFLHISEALRHASTMASMMQPQIILLKEGTDTSQGKAQLVSNINACTAVGDVVRTTLGPRGMDKLIHDDKGSVTISNDGATIMKLLDIVHPAAKILVDIAKSQDSEVGDGTTTVVLLAAEFLKEAKPFIEDGVHAQNLIRSYRTASTLAIAKVKELAVSIEGKSVEEKKGLLAKCAATTLSSKLIGGEKEFFATMVVDAVMAIGNDDRLNLIGIKKVPGGNMRDSFLVDGVAFKKTFSYAGFEQQPKKFLNPKILLLNIELELKSEKENAEIRLSDPSQYQSIVDAEWNIIYDKLDKCVESGAKVVLSRLAIGDLATQYFADRDIFCAGRVAEEDLNRVAAAAGGTVQTSVNNIIDEVLGTCEIFEEKQVGGERFNIFSGCPSGRTATIVLRGGADQFIEETERSYMMRL

SEQ ID NO: 10351 - protein, 396 aa, Arabidopsis thaliana
MASMMQPQIILLKEGTDTSQGKAQLVSNINACTAVGDVVRTTLGPRGMDKLIHDDKGSVTISNDGATIMKLLDIVHPAAKILVDIAKSQDSEVGDGTTTVVLLAAEFLKEAKPFIEDGVHAQNLIRSYRTASTLAIAKVKELAVSIEGKSVEEKKGLLAKCAATTLSSKLIGGEKEFFATMVVDAVMAIGNDDRLNLIGIKKVPGGNMRDSFLVDGVAFKKTFSYAGFEQQPKKFLNPKILLLNIELELKSEKENAEIRLSDPSQYQSIVDAEWNIIYDKLDKCVESGAKVVLSRLAIGDLATQYFADRDIFCAGRVAEEDLNRVAAAAGGTVQTSVNNIIDEVLGTCEIFEEKQVGGERFNIFSGCPSGRTATIVLRGGADQFIEETERSYMMRL

SEQ ID NO: 10352 - protein, 393 aa, Arabidopsis thaliana
MMQPQIILLKEGTDTSQGKAQLVSNINACTAVGDVVRTTLGPRGMDKLIHDDKGSVTISNDGATIMKLLDIVHPAAKILVDIAKSQDSEVGDGTTTVVLLAAEFLKEAKPFIEDGVHAQNLIRSYRTASTLAIAKVKELAVSIEGKSVEEKKGLLAKCAATTLSSKLIGGEKEFFATMVVDAVMAIGNDDRLNLIGIKKVPGGNMRDSFLVDGVAFKKTFSYAGFEQQPKKFLNPKILLLNIELELKSEKENAEIRLSDPSQYQSIVDAEWNIIYDKLDKCVESGAKVVLSRLAIGDLATQYFADRDIFCAGRVAEEDLNRVAAAAGGTVQTSVNNIIDEVLGTCEIFEEKQVGGERFNIFSGCPSGRTATIVLRGGADQFIEETERSYMMRL

SEQ ID NO: 10353 - DNA, 827 bp, Arabidopsis thaliana
ctagtccccccccccccccgaattccccgagagtaaccaacaacacaaagcgatcaaagaacttttcccgctagagagagagagaagaagaagaagaagaagaagaaaagttacgcagagagactgaaggaagagtgatcgatcggagaaagatggcgatggaagtagcaacaccggctccggcaccaatcccatcggagaggaacatcgttctcgcgcctgcaacaacaacaacaaccgccactgttgagactcacaagaagaacaggatccaagtttccaacaccaagaagccattgttcttctacgttaatctcgccaagaggtacattcagcaacacaacgaggtcgagctttctgcacttggaatggcaatcacaactgtggtaacaatctctgagatcttgaagaacaatggacttgcaacagagaagaaggtgctaacatcgactgtgggaatgaaagatgagacaaaagggaagatggtccagaaggcaaagattgagatagtgttgggcaagtcagacaagtttgactctttggtgccacctgtgaccaacggcaagactccggaggaggaagccagtgcagagacggaagcttccgtggaagcacaagaagaagttgccgctgccaccgaggtctaggttggagccggttgagagatttactgcagaaggactgatttctcttttactatgttttgttggcttttgtttcgtttgtgacatatcgaacataatactctagatatgatagtaattgtttgtttagcaaaaaaaaaaaagaaaaaaaaaaaaaaaaaaactcgagggggggcccggtac

SEQ ID NO: 10354 - protein, 164 aa, Arabidopsis thaliana
MAMEVATPAPAPIPSERNIVLAPATTTTTATVETHKKNRIQVSNTKKPLFFYVNLAKRYIQQHNEVELSALGMAITTVVTISEILKNNGLATEKKVLTSTVGMKDETKGKMVQKAKIEIVLGKSDKFDSLVPPVTNGKTPEEEASAETEASVEAQEEVAAATEV

SEQ ID NO: 10355 - protein, 162 aa, Arabidopsis thaliana
MEVATPAPAPIPSERNIVLAPATTTTTATVETHKKNRIQVSNTKKPLFFYVNLAKRYIQQHNEVELSALGMAITTVVTISEILKNNGLATEKKVLTSTVGMKDETKGKMVQKAKIEIVLGKSDKFDSLVPPVTNGKTPEEEASAETEASVEAQEEVAAATEV

SEQ ID NO: 10356 - protein, 92 aa, Arabidopsis thaliana
MAITTVVTISEILKNNGLATEKKVLTSTVGMKDETKGKMVQKAKIEIVLGKSDKFDSLVPPVTNGKTPEEEASAETEASVEAQEEVAAATEV

SEQ ID NO: 10357 - DNA, 1628 bp, Arabidopsis thaliana
gatcaatttatataaccctctcaaaacacacaattttaagattcaaataaaattccttcttcaacattcaccaccacaacatcatgggcattgcacggtggctcaaccgcaccgtgggcttctttgtcttctctctcctcgacattgctgatttcttgctttgttacacttacaagactttggattacttcttggaatccgagaggaaaccttgctactgctcttctccaccagaggctaaagccaagaccgagaagatcatagtgtcggaacgaggcgggtactcaaaggttgtgtctctaacaagaagtaagatccatttcgatgagatctcggacacgctttactcacgtggcccttcacttctaacgaggctctctaagctcgtgaggtccgtgaaatgttttaattataagggtttgatcatgagaggcaatgtggtggaatcttgtgatcatcatgagtctaaaaaaaagattagcaaaggtaaaaagagattaatgactttgaattctaccgtgattgagaaatcttcgacagctccaagatggtcggattgccattgcagtttctgcacttcttggcttacttctaccaacagagattctctgtttgttaaagttcaacaacccaaagataacaagaaggcccgagacaacgttgtgtttatacatggttttgtatcatcatccgcgttttggacggagactctcttcccaaacttttctgattcagccaaatcgaactataggttcatcgcagtcgatcttttgggctatggaagaagtcctaagccaaatgactcattatatactttaagagaacatttggagatgattgagaaatcggtgatctctaagttcaagctcaaaacgttccacatagtagctcattccctaggctgcattttggctcttgcactcgcagtaaaacatccgggagctatcaaatcccttactcttttggctcctccatattacaaggtgccaaagggagtccaaccagcgcaatacgtgatgagggaagtggctcggaaggaagtttggccaccgatgcagtttggtgcatcggtgcttagctggtatgagcacctaggccgcaccattggccttgtccttatcaagaaccatcaattgattgaatttgtcacccgcctccttaccctaaacaggatgcgaacgtatttgatagaaggattcttatgtcacacacataatggatcatttcacacattacacaacatcatcttcgggtcaggagccaagctcgactcgtatctcgaccatgtccgtgaccatgtggactgcgacgtcgccattttccacggtggcaaggacgagctcattcctgtggagtgtagttacagtgtgaagagcaaagtgccacgtgccactgtccacgtcatccctgacaaagaccacatcaccattgtcgtcggccgacaaaaagactttgcacgagagcttgagctcatttggcaaagaaccaaatcaacttaagtgaatatattttatagtgatgaaactctttttttcttttttctgtttctattaagtatatatttttcttattacaaaagttagatagatatcgttttctattcaatgaagattttgttttagtttccc

SEQ ID NO: 10358 - protein, 471 aa, Arabidopsis thaliana
MGIARWLNRTVGFFVFSLLDIADFLLCYTYKTLDYFLESERKPCYCSSPPEAKAKTEKIIVSERGGYSKVVSLTRSKIHFDEISDTLYSRGPSLLTRLSKLVRSVKCFNYKGLIMRGNVVESCDHHESKKKISKGKKRLMTLNSTVIEKSSTAPRWSDCHCSFCTSWLTSTNRDSLFVKVQQPKDNKKARDNVVFIHGFVSSSAFWTETLFPNFSDSAKSNYRFIAVDLLGYGRSPKPNDSLYTLREHLEMIEKSVISKFKLKTFHIVAHSLGCILALALAVKHPGAIKSLTLLAPPYYKVPKGVQPAQYVMREVARKEVWPPMQFGASVLSWYEHLGRTIGLVLIKNHQLIEFVTRLLTLNRMRTYLIEGFLCHTHNGSFHTLHNIIFGSGAKLDSYLDHVRDHVDCDVAIFHGGKDELIPVECSYSVKSKVPRATVHVIPDKDHITIVVGRQKDFARELELIWQRTKST

SEQ ID NO: 10359 - protein, 357 aa, Arabidopsis thaliana
MRGNVVESCDHHESKKKISKGKKRLMTLNSTVIEKSSTAPRWSDCHCSFCTSWLTSTNRDSLFVKVQQPKDNKKARDNVVFIHGFVSSSAFWTETLFPNFSDSAKSNYRFIAVDLLGYGRSPKPNDSLYTLREHLEMIEKSVISKFKLKTFHIVAHSLGCILALALAVKHPGAIKSLTLLAPPYYKVPKGVQPAQYVMREVARKEVWPPMQFGASVLSWYEHLGRTIGLVLIKNHQLIEFVTRLLTLNRMRTYLIEGFLCHTHNGSFHTLHNIIFGSGAKLDSYLDHVRDHVDCDVAIFHGGKDELIPVECSYSVKSKVPRATVHVIPDKDHITIVVGRQKDFARELELIWQRTKST

SEQ ID NO: 10360 - protein, 332 aa, Arabidopsis thaliana
MTLNSTVIEKSSTAPRWSDCHCSFCTSWLTSTNRDSLFVKVQQPKDNKKARDNVVFIHGFVSSSAFWTETLFPNFSDSAKSNYRFIAVDLLGYGRSPKPNDSLYTLREHLEMIEKSVISKFKLKTFHIVAHSLGCILALALAVKHPGAIKSLTLLAPPYYKVPKGVQPAQYVMREVARKEVWPPMQFGASVLSWYEHLGRTIGLVLIKNHQLIEFVTRLLTLNRMRTYLIEGFLCHTHNGSFHTLHNIIFGSGAKLDSYLDHVRDHVDCDVAIFHGGKDELIPVECSYSVKSKVPRATVHVIPDKDHITIVVGRQKDFARELELIWQRTKST

SEQ ID NO: 10361 - DNA, 839 bp, Arabidopsis thaliana
gagctcactagtcccccccccccgagaaacactctcttatcttcttcaacctctcgactagtaaaagccgcgaaaatcaaaatcctccaaaactatggctctgattttgccctgtacattttgtacttcgcttcagaagaagaattttccgattaatcggagatatattacgaatttccgtcgaggagctacgactgcgacgtgtgagttccggattcctgtagaagtttccactccatcagatagaggatcgttggttgttccttcgcacaaagtcactgttcacgatcgacaacgaggagtggttcacgaattcgaggttccagaggatcagtatatattgcattcagctgaatctcagaacattagtcttccgtttgcttgcaggcatggttgttgtactagttgtgctgtacgtgtaaaatctggagagctgaggcagcctcaagcattgggaatatcagcagaactgaagtcccaggggtatgcacttctttgtgtgggtttccccacatctgaccttgaagtagaaacacaagacgaggacgaggtctactggctacaatttggaagatactttgctcgtggaccaattgaaagagacgattacgctcttgaactcgccatgggagatgaatagaaaccaaaagaagcatgtaaactgtaaagtggcagactttctgtattagaggtgactagtgagttcaactttcttagtcctgaatatcgtggtgcatcatcgtaaatctcttactgaactcaacgatattccgattaaacttctcaacaattcaacatttcaaaaaaaaaaaaaaaaaaaactcgagggggggcccggt

SEQ ID NO: 10362 - protein, 181 aa, Arabidopsis thaliana
MALILPCTFCTSLQKKNFPINRRYITNFRRGATTATCEFRIPVEVSTPSDRGSLVVPSHKVTVHDRQRGVVHEFEVPEDQYILHSAESQNISLPFACRHGCCTSCAVRVKSGELRQPQALGISAELKSQGYALLCVGFPTSDLEVETQDEDEVYWLQFGRYFARGPIERDDYALELAMGDE

SEQ ID NO: 10363 - DNA, 683 bp, Arabidopsis thaliana
gttttcgatttcatccaaatttctgaatttcgtctctaacatccacaaaatcgaatgcgttgtgtgaatcgcgttgattgttcttggtcacggccaagcgaagcttaccgtatcttaccctccggtggtcacctttcatctggattccatcaatgtcctttatcgtctctatctttccgttcctctttcgtgtgttgctcctcctccacatctggaccgtccgattcaaatcccgaatcatcttcaaatcgctcttacagccgtagatggcagaatcctcttccccggcgtcaacatcccgatcaaataccgtcttctcagattgctcgtgattggatcgattcagatacaactccagtttctcaagctttagagagattcactgtagtgtcgtacaacatattgggagatggaaattcatcatatcacagagagttgtactccaatgtgtctgttccttacctcaagtggggctaccgcaaaaggttgatatgcgaagaactcattcgtctcaatccagacataatctctatgcaggaagtagataaatattttgatctattcagtatgatggagaaagctggatatgctggctcctataagcggcgaactggagataacgtcgatggttgcgcaatgttttggaaagctgacaggtttggagttttggagagggaaaacat

SEQ ID NO: 10364 - protein, 209 aa, Arabidopsis thaliana
MRCVNRVDCSWSRPSEAYRILPSGGHLSSGFHQCPLSSLSFRSSFVCCSSSTSGPSDSNPESSSNRSYSRRWQNPLPRRQHPDQIPSSQIARDWIDSDTTPVSQALERFTVVSYNILGDGNSSYHRELYSNVSVPYLKWGYRKRLICEELIRLNPDIISMQEVDKYFDLFSMMEKAGYAGSYKRRTGDNVDGCAMFWKADRFGVLEREN

SEQ ID NO: 10365 - DNA, 1966 bp, Arabidopsis thaliana
ggaagtgaactccattgacgacgagtgaacgaaaggagggaagaaaaaagttaggttcgaaacgaaagtaaactagttaggtgaaaagcgaaacaacacccacagagcaatggcccctgctctcgccgttacacgagatctcaccgccgtcggatctccagagaatgctcctgcgaaaggacgtgcttcggtttacagtgaagttcaatcaagccgtattaacaacactcttcctttgccttctgttctcaaaggagctttcaaaatcgtcgaaggtcccgctagttccgccgccgggaatccagatgagatagcgaagttgtttccgggtctatatggccagccatcagtagcagtggttccagatcaggatgcaccttcgtcggcaccgaaattgaagattggtgttgttttgtctggaggtcaggcacctggtgggcacaatgttatttctggactgtttgattacctgcaagagcgtgcgaaaggtagcacattttatgggttcaagggtggtccagctggtatcatgaaatgcaaatatgttgagttgaatgctgaatatattcagccttacagaaaccagggtggttttgacatgatctgcagtggaagagacaagattgaaacacctgaccagtttaaacaagctgaagaaacagcaaagaagcttgatttggatgggttggtggttatcggtggagatgattccaacaccaatgcttgccttcttgctgaaaacttcaggagtaagaacttgaaaacccgagtcattgggtgccccaagaccattgatggtgatttgaaatgcaaagaggttcctactagttttgggtttgatacagcttgcaagatttactctgaaatgatcggaaacgtcatgattgatgcaaggtcgactggaaagtactatcattttgtaagacttatgggtcgtgctgcttcccacattacgcttgagtgtgctttacaaactcacccaaacataaccattattggagaagaggtttctgcccagaagcagactttgaagaatgtcacagactacatggtggatgttatctgcaaacgtgctgaacttggttacaactacggtgtcatactgattccagaaggtctgatcgactttattcctgaggtccaagagctcattgctgaactgaatgaaattctggcaaatgaggttgtcgatgaaaatggtttgtggaagaagaagctcaccgagcaatccctgaagctgtttgatcttctgcctgaagcaattcaggaacagctgatgcttgagagagacccacacggaaatgtccaggttgctaagattgagactgagaagatgcttattcaaatggttgaaactgaattggagaaaagaaagcaagctggtgcatacaagggacaattcatgggacagtcacatttcttcgggtatgaaggaagatgcggcttgcccacaaattttgatgccacatactgttatgcacttggttatggcgctggagtactcctcaacagtgggaagaccggactaatttcttcggttgggaacttggctgctcctgtggaagaatggactgtaggtgggactgctctcacagccttgatggatgtcgagaggagacacggtaagttcaagcctgtgatcaagaaagcaatggtggaacttgaaggtgcaccatttaagaaattcgcatcactgcgtgaagaatgggcattgaagaaccgatacatcagcccaggtccgatccaattcactggacctggttcagactctctcagccacactctacttcttgaactcggggctcaatagtctctcgactaaccaccattcctttgcttttctgccttccttggaatttcgcatcagtcttgttttatcttgaatattacgtgtccgtaacatttcgattaagttgattcctctcgtgtttcttcaacatataagataattataatattatttctt

SEQ ID NO: 10366 - protein, 566 aa, Arabidopsis thaliana
MAPALAVTRDLTAVGSPENAPAKGRASVYSEVQSSRINNTLPLPSVLKGAFKIVEGPASSAAGNPDEIAKLFPGLYGQPSVAVVPDQDAPSSAPKLKIGVVLSGGQAPGGHNVISGLFDYLQERAKGSTFYGFKGGPAGIMKCKYVELNAEYIQPYRNQGGFDMICSGRDKIETPDQFKQAEETAKKLDLDGLVVIGGDDSNTNACLLAENFRSKNLKTRVIGCPKTIDGDLKCKEVPTSFGFDTACKIYSEMIGNVMIDARSTGKYYHFVRLMGRAASHITLECALQTHPNITIIGEEVSAQKQTLKNVTDYMVDVICKRAELGYNYGVILIPEGLIDFIPEVQELIAELNEILANEVVDENGLWKKKLTEQSLKLFDLLPEAIQEQLMLERDPHGNVQVAKIETEKMLIQMVETELEKRKQAGAYKGQFMGQSHFFGYEGRCGLPTNFDATYCYALGYGAGVLLNSGKTGLISSVGNLAAPVEEWTVGGTALTALMDVERRHGKFKPVIKKAMVELEGAPFKKFASLREEWALKNRYISPGPIQFTGPGSDSLSHTLLLELGAQ

SEQ ID NO: 10367 - protein, 426 aa, Arabidopsis thaliana
MKCKYVELNAEYIQPYRNQGGFDMICSGRDKIETPDQFKQAEETAKKLDLDGLVVIGGDDSNTNACLLAENFRSKNLKTRVIGCPKTIDGDLKCKEVPTSFGFDTACKIYSEMIGNVMIDARSTGKYYHFVRLMGRAASHITLECALQTHPNITIIGEEVSAQKQTLKNVTDYMVDVICKRAELGYNYGVILIPEGLIDFIPEVQELIAELNEILANEVVDENGLWKKKLTEQSLKLFDLLPEAIQEQLMLERDPHGNVQVAKIETEKMLIQMVETELEKRKQAGAYKGQFMGQSHFFGYEGRCGLPTNFDATYCYALGYGAGVLLNSGKTGLISSVGNLAAPVEEWTVGGTALTALMDVERRHGKFKPVIKKAMVELEGAPFKKFASLREEWALKNRYISPGPIQFTGPGSDSLSHTLLLELGAQ

SEQ ID NO: 10368 - protein, 403 aa, Arabidopsis thaliana
MICSGRDKIETPDQFKQAEETAKKLDLDGLVVIGGDDSNTNACLLAENFRSKNLKTRVIGCPKTIDGDLKCKEVPTSFGFDTACKIYSEMIGNVMIDARSTGKYYHFVRLMGRAASHITLECALQTHPNITIIGEEVSAQKQTLKNVTDYMVDVICKRAELGYNYGVILIPEGLIDFIPEVQELIAELNEILANEVVDENGLWKKKLTEQSLKLFDLLPEAIQEQLMLERDPHGNVQVAKIETEKMLIQMVETELEKRKQAGAYKGQFMGQSHFFGYEGRCGLPTNFDATYCYALGYGAGVLLNSGKTGLISSVGNLAAPVEEWTVGGTALTALMDVERRHGKFKPVIKKAMVELEGAPFKKFASLREEWALKNRYISPGPIQFTGPGSDSLSHTLLLELGAQ

SEQ ID NO: 10369 - DNA, 1722 bp, Arabidopsis thaliana
gaggcactctccaatttcattaaacaaggagagtagaacctaaagaaaaaagtggtcgtccaatggacctctcactaattcaaggcatgtctctgcctctctattttctcttaacaatattctttttcttctttgctaccgcaaaaacgcggagaagctctagcaccggcacgcttccaccgggtcctccgatactgccattggtcggaaacatattccaactcggattcaatcctcaccgttcacttgctgccttttcgaaaacgtacggacctataatgagtttgaagcttggaaggttaaccgcagtggttatatcttcaccagaagcagctaaagaggcacttagaacacacgaccatgtcatgtccgctcgaacctttaacgacgctcttcgagcctttgatcaccataaacattctattgtctggattcccccctctgctcgttggaggtttctgaagaaaacaataacaaaatatttgttatcaccgcaaaacttagatgctattcaatctttaagaatgagaaaggtggaggaactagtgagtttagtaaatgaatttcgcgagagaggagaagctattgacctggctcgtgcttccttcgtcacatctttcaatatcatctcaaatgctctgttttcagtagatttagcgacgtatgactctaactcctcgtcttacgaatttcacaacacggtggttcacctgacggagatcgccggtatacccaacgtaggagactatttccagtatatgaggtttcttgatttgcaaggtacccggaaaaaagcggtgctctgcatagagaaattgtttagggtttttcaagaattcattgatgctcgattagccaaaagattttctcggacagagaaagagcctaaagaggcttcaagcatcgatatgctagactcccttctggatctcacacagcaaaacgaagcagaattaacaatgaatgatctcaaacacttgcttctcgatgtgtttgttgctggcacagacacaaactctagtacaatggaatgggcaatgacggagttattccgtagcacggagaagatggtcaaagcacagagtgagatacggcaagtgattggtcaaaacggtttcgttcaagaatctgatatcccgagtctgccttacttacaagcaattgtgaaagagactcttcgtttgcatcctgcagctcctttgatccctagaaaatcagaatccgatgttcagattatgggtttccttgttcctataaacacccaggttgttgtgaacgtatgggcgataggacgagacgcgagcgtgtgggaaaatccaatgaagttcgagccagagaggttcttgttacgagaaaccgatgtaaaaggcagagatttcgagttgataccgtttggatcaggaagaaggatgtgtccgggaatctcgatggctcttaagacaatgcatatggtgcttgcctctcttctctattcctttgactggaagcttcaaaacggtgtcgtccccggaaacattgacatgagcgagactttcggtcttaccttacacaaggccaaatctctttgtgccgtacccgtcaagaaacctacaatatcgtcttcttattaataatcgtatcaatataaagttcgtgtacggatcaatattaataattgaagagaatgaaattataaaaaaaaaagaaaaaaaaaaaaaaaaaaaactcgagggggggcccggt

SEQ ID NO: 10370 - protein, 515 aa, Arabidopsis thaliana
MDLSLIQGMSLPLYFLLTIFFFFFATAKTRRSSSTGTLPPGPPILPLVGNIFQLGFNPHRSLAAFSKTYGPIMSLKLGRLTAVVISSPEAAKEALRTHDHVMSARTFNDALRAFDHHKHSIVWIPPSARWRFLKKTITKYLLSPQNLDAIQSLRMRKVEELVSLVNEFRERGEAIDLARASFVTSFNIISNALFSVDLATYDSNSSSYEFHNTVVHLTEIAGIPNVGDYFQYMRFLDLQGTRKKAVLCIEKLFRVFQEFIDARLAKRFSRTEKEPKEASSIDMLDSLLDLTQQNEAELTMNDLKHLLLDVFVAGTDTNSSTMEWAMTELFRSTEKMVKAQSEIRQVIGQNGFVQESDIPSLPYLQAIVKETLRLHPAAPLIPRKSESDVQIMGFLVPINTQVVVNVWAIGRDASVWENPMKFEPERFLLRETDVKGRDFELIPFGSGRRMCPGISMALKTMHMVLASLLYSFDWKLQNGVVPGNIDMSETFGLTLHKAKSLCAVPVKKPTISSSY

SEQ ID NO: 10371 - protein, 507 aa, Arabidopsis thaliana
MSLPLYFLLTIFFFFFATAKTRRSSSTGTLPPGPPILPLVGNIFQLGFNPHRSLAAFSKTYGPIMSLKLGRLTAVVISSPEAAKEALRTHDHVMSARTFNDALRAFDHHKHSIVWIPPSARWRFLKKTITKYLLSPQNLDAIQSLRMRKVEELVSLVNEFRERGEAIDLARASFVTSFNIISNALFSVDLATYDSNSSSYEFHNTVVHLTEIAGIPNVGDYFQYMRFLDLQGTRKKAVLCIEKLFRVFQEFIDARLAKRFSRTEKEPKEASSIDMLDSLLDLTQQNEAELTMNDLKHLLLDVFVAGTDTNSSTMEWAMTELFRSTEKMVKAQSEIRQVIGQNGFVQESDIPSLPYLQAIVKETLRLHPAAPLIPRKSESDVQIMGFLVPINTQVVVNVWAIGRDASVWENPMKFEPERFLLRETDVKGRDFELIPFGSGRRMCPGISMALKTMHMVLASLLYSFDWKLQNGVVPGNIDMSETFGLTLHKAKSLCAVPVKKPTISSSY

SEQ ID NO: 10372 - protein, 443 aa, Arabidopsis thaliana
MSLKLGRLTAVVISSPEAAKEALRTHDHVMSARTFNDALRAFDHHKHSIVWIPPSARWRFLKKTITKYLLSPQNLDAIQSLRMRKVEELVSLVNEFRERGEAIDLARASFVTSFNIISNALFSVDLATYDSNSSSYEFHNTVVHLTEIAGIPNVGDYFQYMRFLDLQGTRKKAVLCIEKLFRVFQEFIDARLAKRFSRTEKEPKEASSIDMLDSLLDLTQQNEAELTMNDLKHLLLDVFVAGTDTNSSTMEWAMTELFRSTEKMVKAQSEIRQVIGQNGFVQESDIPSLPYLQAIVKETLRLHPAAPLIPRKSESDVQIMGFLVPINTQVVVNVWAIGRDASVWENPMKFEPERFLLRETDVKGRDFELIPFGSGRRMCPGISMALKTMHMVLASLLYSFDWKLQNGVVPGNIDMSETFGLTLHKAKSLCAVPVKKPTISSSY

SEQ ID NO: 10373 - DNA, 585 bp, Arabidopsis thaliana
aatctcaatggctctgttttaaaaagggcaaattagagagatttctccttcaataacaaaaaatcgccagctttatctctctctttttcacatcccatggctagatggtgacgacgattcacgcataaactagggttcccccacaaatcatcttacacgtatcctctattccttccttcctttctccgtcatcatcatttttcccaccgacaacaatctctcggagtttggatcaataatggcgttgaagtctagttctgctgatggaaaaaccagaagctctgttcagatcttcattgtgtttagtttatgttgcttcttttacattttgggagcatggcaacgaagtggttttggtaaaggagacagtattgctcttgagatgaccaacaggggagctgattgcaacattgttcctagcttgaatttcgagactcatcacgctggcgaatcaagtcttgttggtgcttctgaagctgcaaaggtcaaggctttcgagccctgtgatggtcgttacacggattacactccttgtcaagatcagagacgtgccatgactttcccgagagatagtatgatttaccg

SEQ ID NO: 10374 - protein, 115 aa, Arabidopsis thaliana
MALKSSSADGKTRSSVQIFIVFSLCCFFYILGAWQRSGFGKGDSIALEMTNRGADCNIVPSLNFETHHAGESSLVGASEAAKVKAFEPCDGRYTDYTPCQDQRRAMTFPRDSMIY

SEQ ID NO: 10375 - protein, 67 aa, Arabidopsis thaliana
MTNRGADCNIVPSLNFETHHAGESSLVGASEAAKVKAFEPCDGRYTDYTPCQDQRRAMTFPRDSMIY

SEQ ID NO: 10376 - DNA, 1636 bp, Arabidopsis thaliana
gaaccattggttggttttgatcaaaaccaaaggatgtgtgtatgtatgtatatattctaacgctcaaaactgatcactagcattcctagatttttccttcttgtgatcacttgcagctatggccacacatgcagctctcgccgtctcaagaatcccggtcacacagcgactgcagtctaagagtgccattcactctttccctgctcaatgctcctccaagaggctagaagtcgctgaattctccggtctgcgtatgagtagtatcggtggggaagcatctttcttcgatgctgtagctgcacaaatcatccctaaggctgtgacaacatcaactcctgttagaggagagacagtggcgaaactgaaagttgcgattaacggttttggaaggattggtaggaactttcttaggtgttggcatggtcgtaaagactctcctctcgaagttgttgtacttaacgacagtggtggtgtcaagaatgcatcccacttgcttaagtatgactccatgcttggaaccttcaaggctgaagtgaaaattgtggacaatgaaactattagtgttgatggtaagctcatcaaagttgtctccaacagagaccctcttaagcttccatgggctgagctcggcattgacattgttatcgagggaacaggagtgtttgttgatgggccaggagcagggaagcatatccaagccggagcctcgaaagttatcatcactgcaccagccaaaggtgctgatatccctacctatgttatgggagtcaatgagcaagactatggtcacgatgtcgctaacattattagcaatgcatcttgcaccaccaactgtttggcaccttttgctaaagtcttggatgaagaatttggaattgtcaaggggacaatgacaaccacacactcctacaccggagaccaaaggcttctagatgcatcacacagggacctaaggcgtgcaagagccgcagcactgaacatagtgcctaccagcacaggagcagccaaggcggtgtcattagtgttgccgcagctgaagggtaaacttaacggcattgcactccgtgtgccaacaccaaacgtctcagtggttgaccttgttataaacgttgagaagaaaggtttgacagcagaggatgtgaacgaggcctttagaaaagccgctaatggaccgatgaaaggcattttagacgtttgcgatgcgcctcttgtctctgttgacttcaggtgctctgatgtctctaccaccattgactcgtccctcactatggttatgggtgatgatatggtcaaggtggttgcttggtatgataacgagtggggttacagccaaagagtggtggatttggctcacctagtggctagcaagtggccgggagcggaagctgttggaagtggagatcctttggaggatttctgcaagacaaacccggctgatgaggaatgcaaagtctatgactgaacaactttgatcatttctttctttatttttcaccaaaacaatactttgtatcatgagttacttattcgaaatcgtactatgcatacttgtttttctcataagattttcttgtctgatgaacaactatatgttaagactgagagaattgtatttgagaaataaccattttatgct

SEQ ID NO: 10377 - protein, 447 aa, Arabidopsis thaliana
MATHAALAVSRIPVTQRLQSKSAIHSFPAQCSSKRLEVAEFSGLRMSSIGGEASFFDAVAAQIIPKAVTTSTPVRGETVAKLKVAINGFGRIGRNFLRCWHGRKDSPLEVVVLNDSGGVKNASHLLKYDSMLGTFKAEVKIVDNETISVDGKLIKVVSNRDPLKLPWAELGIDIVIEGTGVFVDGPGAGKHIQAGASKVIITAPAKGADIPTYVMGVNEQDYGHDVANIISNASCTTNCLAPFAKVLDEEFGIVKGTMTTTHSYTGDQRLLDASHRDLRRARAAALNIVPTSTGAAKAVSLVLPQLKGKLNGIALRVPTPNVSVVDLVINVEKKGLTAEDVNEAFRKAANGPMKGILDVCDAPLVSVDFRCSDVSTTIDSSLTMVMGDDMVKVVAWYDNEWGYSQRVVDLAHLVASKWPGAEAVGSGDPLEDFCKTNPADEECKVYD

SEQ ID NO: 10378 - protein, 402 aa, Arabidopsis thaliana
MSSIGGEASFFDAVAAQIIPKAVTTSTPVRGETVAKLKVAINGFGRIGRNFLRCWHGRKDSPLEVVVLNDSGGVKNASHLLKYDSMLGTFKAEVKIVDNETISVDGKLIKVVSNRDPLKLPWAELGIDIVIEGTGVFVDGPGAGKHIQAGASKVIITAPAKGADIPTYVMGVNEQDYGHDVANIISNASCTTNCLAPFAKVLDEEFGIVKGTMTTTHSYTGDQRLLDASHRDLRRARAAALNIVPTSTGAAKAVSLVLPQLKGKLNGIALRVPTPNVSVVDLVINVEKKGLTAEDVNEAFRKAANGPMKGILDVCDAPLVSVDFRCSDVSTTIDSSLTMVMGDDMVKVVAWYDNEWGYSQRVVDLAHLVASKWPGAEAVGSGDPLEDFCKTNPADEECKVYD

SEQ ID NO: 10379 - protein, 317 aa, Arabidopsis thaliana
MLGTFKAEVKIVDNETISVDGKLIKVVSNRDPLKLPWAELGIDIVIEGTGVFVDGPGAGKHIQAGASKVIITAPAKGADIPTYVMGVNEQDYGHDVANIISNASCTTNCLAPFAKVLDEEFGIVKGTMTTTHSYTGDQRLLDASHRDLRRARAAALNIVPTSTGAAKAVSLVLPQLKGKLNGIALRVPTPNVSVVDLVINVEKKGLTAEDVNEAFRKAANGPMKGILDVCDAPLVSVDFRCSDVSTTIDSSLTMVMGDDMVKVVAWYDNEWGYSQRVVDLAHLVASKWPGAEAVGSGDPLEDFCKTNPADEECKVYD

SEQ ID NO: 10380 - DNA, 915 bp, Arabidopsis thaliana
gaaaacctcaagtcacacactcttcacctaaacagcatcaatggcgacttctctctccgtttctagattcatgtcctcctccgccaccgttatctccgtcgctaagccgttactttcccccaccgtatccttcaccgcgccgctctccttcacacgctctctcgctcctaatctctctctcaaattccgcaaccgccgcaccaattccgcctccgccaccaccagatccttcgctacgacacccgtcaccgcctccatttccgtcggagacaagctcccagactccactctctcctacctcgatccatccaccggagacgtcaaaacagtaaccgtctcatccctaaccgccgggaagaaaacaatcctattcgccgttcccggcgcattcacaccaacatgctcacaaaaacacgtccctggattcgtatccaaagccggagaactcagatctaaaggcatcgatgtaatcgcatgtatctccgtcaacgacgcgttcgtgatggaagcgtggaggaaagatcttggaattaacgatgaggtaatgttgctatccgatggaaatggcgaattcacagggaagcttggtgttgaattggatttgagggataagcctgtgggacttggagttaggtcaaggagatatgcgattttggctgatgatggtgttgtgaaagttctgaatcttgaagaaggaggtgcttttactaatagtagtgctgaggatatgcttaaagctctctgattcttatgattttctcatcaatttcgtcttcttctctgttttgaattttctttactctgttttgtgttgctgtttctttaaatctacgaatcattatcggatttgtaatggaataatgaagttagaggttctgttgtttgtgaacattttagaaaagcgttgtgtttagt

SEQ ID NO: 10381 - protein, 234 aa, Arabidopsis thaliana
MATSLSVSRFMSSSATVISVAKPLLSPTVSFTAPLSFTRSLAPNLSLKFRNRRTNSASATTRSFATTPVTASISVGDKLPDSTLSYLDPSTGDVKTVTVSSLTAGKKTILFAVPGAFTPTCSQKHVPGFVSKAGELRSKGIDVIACISVNDAFVMEAWRKDLGINDEVMLLSDGNGEFTGKLGVELDLRDKPVGLGVRSRRYAILADDGVVKVLNLEEGGAFTNSSAEDMLKAL

SEQ ID NO: 10382 - protein, 224 aa, Arabidopsis thaliana
MSSSATVISVAKPLLSPTVSFTAPLSFTRSLAPNLSLKFRNRRTNSASATTRSFATTPVTASISVGDKLPDSTLSYLDPSTGDVKTVTVSSLTAGKKTILFAVPGAFTPTCSQKHVPGFVSKAGELRSKGIDVIACISVNDAFVMEAWRKDLGINDEVMLLSDGNGEFTGKLGVELDLRDKPVGLGVRSRRYAILADDGVVKVLNLEEGGAFTNSSAEDMLKAL

SEQ ID NO: 10383 - DNA, 1462 bp, Arabidopsis thaliana
aggttaagctcggtagcgattaccgacgagaaccatggcgggtaagcagatcggcggagacggaggtttaccggcaaatctcgccggaatgactaaaagtcagctctacgatattatgtctcaaatggagacgttgattgatcaaaaccatcaacaagcgagggagattctgattcggaaccctcttttgacgaaggctcttttccaggcacaaatcatgctcggaatggttcagcctcctcaagtgactccgaaagttgagccacaagctgtacaacaacctcaacaatctcatcaatctatcccgccaaagccaaacgttcaagctcatatgtcttctttccaaggcggtggcagtgtacatgagccagccaatacgatgcagccacaagccccgattcgaaaacacccaacaccacaaccaatgcctatgcctccaccaccgccttctgtttctgcaaatagtgctcaatcacagcctcgtttttcgcatccccagcgtcagggacatctgaatcctgctgtcacttctatgtctcatccacagtcttctcaagttcaaaacgcgcctcctccggcttcccatcatccaacatcccagcaacctccttttcatcatcttgatataccagcttcctccactcagttgcaacaacaaccaatgcactctggtggaggtcctcatgtggcacagcaacagtctagaccatatcatcatcaatatggacaagcccaaactggtccaaacactggatttcagcaccatggcgcacctactcagcatctttctcaacccatgtatcattcaggcaacagaccccctgcttccggtggacctcaattcccgcagggacatccacatctgcctagtcagccaacatatcagggaggaggtcaatatcgtggagactacaacaataaccaattagcaggtctgatggctcaagacagaggtccttcttggatggctggccaatcagagagctcgaacattactcatctgccaggcttaggaccggtgcctccaccaagccaagttgggcctggaggtggcccaccacctcgccctgcaccgatatctgcagagatggagaaggcactacttcaacaagtgatgagccttacaccagagcagatcaatctgctgccaccagaacagagaaaccaagtccttcagcttcaacagattctccgacagtgaatctcatagataatcgcttggtctcctccatgttagaactttgaagagacaggttttggctttgaatgtaaggcctgagttaagtttgggataatttgtaaaaagaagaaaagtaattagattttttcaaagttcaaggtatcactaaatacctttggtcatatcccctggagaaaatttatgtgttctctttgatttaatgttcagtaacaattttcttcctgaaaaaaaaaaaaaaaaaaactcgagggggggcccggt

SEQ ID NO: 10384 - protein, 388 aa, Arabidopsis thaliana
MAGKQIGGDGGLPANLAGMTKSQLYDIMSQMETLIDQNHQQAREILIRNPLLTKALFQAQIMLGMVQPPQVTPKVEPQAVQQPQQSHQSIPPKPNVQAHMSSFQGGGSVHEPANTMQPQAPIRKHPTPQPMPMPPPPPSVSANSAQSQPRFSHPQRQGHLNPAVTSMSHPQSSQVQNAPPPASHHPTSQQPPFHHLDIPASSTQLQQQPMHSGGGPHVAQQQSRPYHHQYGQAQTGPNTGFQHHGAPTQHLSQPMYHSGNRPPASGGPQFPQGHPHLPSQPTYQGGGQYRGDYNNNQLAGLMAQDRGPSWMAGQSESSNITHLPGLGPVPPPSQVGPGGGPPPRPAPISAEMEKALLQQVMSLTPEQINLLPPEQRNQVLQLQQILRQ

SEQ ID NO: 10385 - protein, 370 aa, Arabidopsis thaliana
MTKSQLYDIMSQMETLIDQNHQQAREILIRNPLLTKALFQAQIMLGMVQPPQVTPKVEPQAVQQPQQSHQSIPPKPNVQAHMSSFQGGGSVHEPANTMQPQAPIRKHPTPQPMPMPPPPPSVSANSAQSQPRFSHPQRQGHLNPAVTSMSHPQSSQVQNAPPPASHHPTSQQPPFHHLDIPASSTQLQQQPMHSGGGPHVAQQQSRPYHHQYGQAQTGPNTGFQHHGAPTQHLSQPMYHSGNRPPASGGPQFPQGHPHLPSQPTYQGGGQYRGDYNNNQLAGLMAQDRGPSWMAGQSESSNITHLPGLGPVPPPSQVGPGGGPPPRPAPISAEMEKALLQQVMSLTPEQINLLPPEQRNQVLQLQQILRQ

SEQ ID NO: 10386 - protein, 361 aa, Arabidopsis thaliana
MSQMETLIDQNHQQAREILIRNPLLTKALFQAQIMLGMVQPPQVTPKVEPQAVQQPQQSHQSIPPKPNVQAHMSSFQGGGSVHEPANTMQPQAPIRKHPTPQPMPMPPPPPSVSANSAQSQPRFSHPQRQGHLNPAVTSMSHPQSSQVQNAPPPASHHPTSQQPPFHHLDIPASSTQLQQQPMHSGGGPHVAQQQSRPYHHQYGQAQTGPNTGFQHHGAPTQHLSQPMYHSGNRPPASGGPQFPQGHPHLPSQPTYQGGGQYRGDYNNNQLAGLMAQDRGPSWMAGQSESSNITHLPGLGPVPPPSQVGPGGGPPPRPAPISAEMEKALLQQVMSLTPEQINLLPPEQRNQVLQLQQILRQ

SEQ ID NO: 10387 - DNA, 2071 bp, Arabidopsis thaliana
gggtcgtagctggttttgatgtttccgatacttcatcgatccacagttgtagaaaattcttcgacatgaagttgaaattctgattagggtcttcctcgattcgcttttggtgaatcaaatttctttaatttcagtgaatacgcttttgacaggaggaccatactaagtcttgggaaaaccctcttcatagtgggtttgatctacaatgatgtatcagacaattcccacggcaccaaccattcgtggtggaactccaacagagagtggtgattacgttgtgactttggatcagattccacggtggagtgatgttgagcagagatcatctttggaggatgagacaggagatccagaacattcgaatccgcgctacgcaaaccctttggcttcgtcttccgaagcagggagcagcgggaatgggatggtatctaagtttcctgttgatcacgagataaactctagaatatacctttggagaggggaaccttggaaccttgaggttgatgctgttgtaaattcgacaaatgagaacttggatgaggcacatagcagtcctggtctacatgtggctgctggacctggccttgcagagcaatgtgctacattgggtggatgcaggacagggatggcgaaagtaacaaatgcctatgatctaccagcgaggagggttatccatacagtaggacccaagtatgcagtaaagtatcatacagctgctgagaatgctctaagtcactgctatagatcttgtctggaacttctcatagatagtgggctacaaagtatcgctctgggctgtatatacacagaagccaaaaactatccccgagaaccagctgctcatgttgccataagaactgttcgccgctttctagagaagcaaaaggataaaatcagtgccgttgttttctgtaccaccacatcctctgatacggagatatacaaacgattacttccactttactttcctcgagatgaacatgaggaagaggttgccatatcaaagctcccggctgatgttggagatgaaaatggtgagacggttatagacgaacgtaaaatcagaatacaggcgctgccaaataaacctccacccagatcttttccaactccactcgagcgcccttctactgatcttactttgttacgcaggaactcgaatcatcttgattcgtatttggatcctgccttcatgtccttgattaaggatccagatgaaaggcgcaaagaacaatgggagaagactgcacaagcacaaagtggattcaattttgttaaattgctaggatttggtgatctaggaggaccccctctctctgctgcagaggaatactcacttcattcgcgatacctagcgaaagctaattcaatcaacctttccgagattgcagagatgaaaattgtctatcgtggtggtgttgacaccgagggtcatcctgtaatggttgttgtaggagctcactttttgctgcgatgtcttgatctggagcgttttgtactttatgttattaaggaatttgaacctgtgatacaaaagccttattcgattgtctactttcattctgcagcatcgttacaagtccaaccagatttgggatggatgaaaagattagaacagatacttggtcgaaaacaccagcgtaaccttcaggcaatctatgttcttcatccaactttccacttgaaggctacaatcttaacgatgcaatttttcgtggataatgtggtatggaagaaagttgtatatgcagaccgacttctgcagctgttcaaatacgttcctcgtgagcagctgacaatcccagactttgttttccagcatgatcttgaagttaacggaggaaaaggtctaatcgttgacccaagaacaaaatacgtttatcaacggccatgaaccaaaatcaaagaccgttactttattcagtacttgtatgtttgcttgtgaaatatttcttcattctttcatgcttatcttctcaagatgatcctgggagcaaataaagtcttcttcttcttctaatgtaatctaaagtttgaatctttttgtttataaatccattttctcagcaca

SEQ ID NO: 10388 - protein, 562 aa, Arabidopsis thaliana
MMYQTIPTAPTIRGGTPTESGDYVVTLDQIPRWSDVEQRSSLEDETGDPEHSNPRYANPLASSSEAGSSGNGMVSKFPVDHEINSRIYLWRGEPWNLEVDAVVNSTNENLDEAHSSPGLHVAAGPGLAEQCATLGGCRTGMAKVTNAYDLPARRVIHTVGPKYAVKYHTAAENALSHCYRSCLELLIDSGLQSIALGCIYTEAKNYPREPAAHVAIRTVRRFLEKQKDKISAVVFCTTTSSDTEIYKRLLPLYFPRDEHEEEVAISKLPADVGDENGETVIDERKIRIQALPNKPPPRSFPTPLERPSTDLTLLRRNSNHLDSYLDPAFMSLIKDPDERRKEQWEKTAQAQSGFNFVKLLGFGDLGGPPLSAAEEYSLHSRYLAKANSINLSEIAEMKIVYRGGVDTEGHPVMVVVGAHFLLRCLDLERFVLYVIKEFEPVIQKPYSIVYFHSAASLQVQPDLGWMKRLEQILGRKHQRNLQAIYVLHPTFHLKATILTMQFFVDNVVWKKVVYADRLLQLFKYVPREQLTIPDFVFQHDLEVNGGKGLIVDPRTKYVYQRP

SEQ ID NO: 10389 - protein, 561 aa, Arabidopsis thaliana
MYQTIPTAPTIRGGTPTESGDYVVTLDQIPRWSDVEQRSSLEDETGDPEHSNPRYANPLASSSEAGSSGNGMVSKFPVDHEINSRIYLWRGEPWNLEVDAVVNSTNENLDEAHSSPGLHVAAGPGLAEQCATLGGCRTGMAKVTNAYDLPARRVIHTVGPKYAVKYHTAAENALSHCYRSCLELLIDSGLQSIALGCIYTEAKNYPREPAAHVAIRTVRRFLEKQKDKISAVVFCTTTSSDTEIYKRLLPLYFPRDEHEEEVAISKLPADVGDENGETVIDERKIRIQALPNKPPPRSFPTPLERPSTDLTLLRRNSNHLDSYLDPAFMSLIKDPDERRKEQWEKTAQAQSGFNFVKLLGFGDLGGPPLSAAEEYSLHSRYLAKANSINLSEIAEMKIVYRGGVDTEGHPVMVVVGAHFLLRCLDLERFVLYVIKEFEPVIQKPYSIVYFHSAASLQVQPDLGWMKRLEQILGRKHQRNLQAIYVLHPTFHLKATILTMQFFVDNVVWKKVVYADRLLQLFKYVPREQLTIPDFVFQHDLEVNGGKGLIVDPRTKYVYQRP

SEQ ID NO: 10390 - protein, 490 aa, Arabidopsis thaliana
MVSKFPVDHEINSRIYLWRGEPWNLEVDAVVNSTNENLDEAHSSPGLHVAAGPGLAEQCATLGGCRTGMAKVTNAYDLPARRVIHTVGPKYAVKYHTAAENALSHCYRSCLELLIDSGLQSIALGCIYTEAKNYPREPAAHVAIRTVRRFLEKQKDKISAVVFCTTTSSDTEIYKRLLPLYFPRDEHEEEVAISKLPADVGDENGETVIDERKIRIQALPNKPPPRSFPTPLERPSTDLTLLRRNSNHLDSYLDPAFMSLIKDPDERRKEQWEKTAQAQSGFNFVKLLGFGDLGGPPLSAAEEYSLHSRYLAKANSINLSEIAEMKIVYRGGVDTEGHPVMVVVGAHFLLRCLDLERFVLYVIKEFEPVIQKPYSIVYFHSAASLQVQPDLGWMKRLEQILGRKHQRNLQAIYVLHPTFHLKATILTMQFFVDNVVWKKVVYADRLLQLFKYVPREQLTIPDFVFQHDLEVNGGKGLIVDPRTKYVYQRP

SEQ ID NO: 10391 - DNA, 1154 bp, Arabidopsis thaliana
cactagtcccccccccccccccgatgtgatttctccacttcctctctctctctactgcaacttcctcctcctgcttcaacttcattcgggtaatgatgaactagcgtagagatttggatcttcttcttcgtcctctcaccaactcttcaccggttagatctctttttttcccgctaacgaatgaggagcgttgccgccgccgccgctgctgctgctgctgcttctaagccttctaatcctctcgtcgcctttgagcacaagagggatgcatacggatttcctgtcagacctcaacatgtgcagagatacagagaatatgctgatatttacaaggaagaagaagaagaaaggtcggacaggtggagcagtttcttggaagatcatgttgaatcgactgagttacctgcaaacggatcttctgaaaatagtcacacaccgtttagtgaaagtgagaaggaaaaagaaaaagaattaaacaaggggactggtgaagatctgcatactgacaagttaggttctgatgtaactcctgataatgccagtgaagaagaaggacaccccgatgcagagaagaatgttcacagagtgcaattatggactgagatcagaccgtctttaggatcaattgaagacttgatgagcatccgtgtcaagaagaagggggatttatcaaaaagcgagcaagatgctccgaaggtgaaggtttcaccttcatttgatgatgacaaatcttccaagggagcatctgatattgattctgaagacgagttctatgatgttgagaggtcggatgttcaggatggttcttcttcagatggtacaagtgtctctggtatccctgttgctgctgatgcaagtccactgtctacatgtccttggaaggaagaacttgaagtgcttattcgcggcggtgtacctatggctctgaggggagagttatggcaagcatttgtgggtgtgaggaaacgacgatgcaaggattattatcaaaaccttcttgcagcagatggttctgtaaacaccatagagcaagaggatatgcagcatgttgatgataaaggttcaagtacagaatctattgctgttgtggaaaaatggaaaggacagatagaaaaggacaaaaaaaaaaaaaaactcgagggggggcccggtac

SEQ ID NO: 10392 - protein, 324 aa, Arabidopsis thaliana
MRSVAAAAAAAAAASKPSNPLVAFEHKRDAYGFPVRPQHVQRYREYADIYKEEEEERSDRWSSFLEDHVESTELPANGSSENSHTPFSESEKEKEKELNKGTGEDLHTDKLGSDVTPDNASEEEGHPDAEKNVHRVQLWTEIRPSLGSIEDLMSIRVKKKGDLSKSEQDAPKVKVSPSFDDDKSSKGASDIDSEDEFYDVERSDVQDGSSSDGTSVSGIPVAADASPLSTCPWKEELEVLIRGGVPMALRGELWQAFVGVRKRRCKDYYQNLLAADGSVNTIEQEDMQHVDDKGSSTESIAVVEKWKGQIEKDKKKKKLEGGPG

SEQ ID NO: 10393 - protein, 172 aa, Arabidopsis thaliana
MSIRVKKKGDLSKSEQDAPKVKVSPSFDDDKSSKGASDIDSEDEFYDVERSDVQDGSSSDGTSVSGIPVAADASPLSTCPWKEELEVLIRGGVPMALRGELWQAFVGVRKRRCKDYYQNLLAADGSVNTIEQEDMQHVDDKGSSTESIAVVEKWKGQIEKDKKKKKLEGGPG

SEQ ID NO: 10394 - DNA, 638 bp, Arabidopsis thaliana
gatgaatccgacgatttcgtggaggttcgcgtcttcgacctctcttctctccattcctcgaacaccaaaaagtgcctttatcttcgccatgaccttctcttcttcttcttcttcttcttcttcttctgtggaaaaccctaacaaggacgattcctcctcttcgcttgaattggtcctcaagtaccacaaccagacgaagcactccttgaacggttacgcgagaggtcctcgtggtctcgactgggccaatcagcctaatcccttccgccggtacctctctgctcctcttcttcctctccaacaccccaatcacgacatcgacgacgactccgactctcctctctactctactctattcgactcgcttcctccgcccaaacccatctctcttcctacaatctctcaccttttctaccattctctcgctctctccgcctggaagaccaccggatcctccacgtggcccctccgcgtcaaccccagcagcggtaacttgcatcccaccgaggcctatctcattgctcctcccatcccttccctctcccaatccgctttcgtctcccactatgctcccaaagagcattctttggagcttggaagtacggagaacgagcgtttcgttactgtaaccacgacgt

SEQ ID NO: 10395 - protein, 212 aa, Arabidopsis thaliana
MNPTISWRFASSTSLLSIPRTPKSAFIFAMTFSSSSSSSSSSVENPNKDDSSSSLELVLKYHNQTKHSLNGYARGPRGLDWANQPNPFRRYLSAPLLPLQHPNHDIDDDSDSPLYSTLFDSLPPPKPISLPTISHLFYHSLALSAWKTTGSSTWPLRVNPSSGNLHPTEAYLIAPPIPSLSQSAFVSHYAPKEHSLELGSTENERFVTVTTT

SEQ ID NO: 10396 - protein, 183 aa, Arabidopsis thaliana
MTFSSSSSSSSSSVENPNKDDSSSSLELVLKYHNQTKHSLNGYARGPRGLDWANQPNPFRRYLSAPLLPLQHPNHDIDDDSDSPLYSTLFDSLPPPKPISLPTISHLFYHSLALSAWKTTGSSTWPLRVNPSSGNLHPTEAYLIAPPIPSLSQSAFVSHYAPKEHSLELGSTENERFVTVTTT

SEQ ID NO: 10397 - DNA, 1258 bp, Arabidopsis thaliana
aagcaaaacaatcggagaaagttgatggaggagatgttcgttttgtgaacgcttcaatggcataaatttccggccatcacatttcttctactttctctttctctctcccttgttgttgttctctagaattcgattcatcgttgttaacgtcgtccattcttcttctttgatcccttctttgatctctcacatttccgattccaatttagggtttcctctcttttcacatttctagggtttttcttgttccctttgtaccggagatggtgaattgaaaggaaaaataaaacgcttttgagagcttatatttgaggttgtttcctcaagttttgtagatctgaggttgctatttttgaattagagattctttttttttttcaaaattttgtttgttgtgatcatacatagacgtacgtagctccatttctggtggagaaggaagaagaagagaaatgagcgcttcgaggttcataaagtgtgtcaccgttggcgacggagctgttggtaaaacctgtttgctgatttcttacaccagcaacacttttcctacggattatgtaccgactgttttcgataactttagcgcaaatgtggttgttaatggagccactgtgaatcttgggctatgggataccgcagggcaggaggattataacagattaagacctttgagttaccgcggtgctgatgttttcatcttagcattctctcttatcagtaaggctagttatgagaatgtctccaagaagtggatcccagagctgaagcattatgcccctggtgtccctatagttcttgttggaaccaaactagatcttcgggatgacaaacagttcttcattgaccaccctggcgctgtaccaattactactgctcagggagaggaactgaagaaactaattggagctcccgcatacatcgagtgcagttcaaaaacacaagagaacgtgaaaggagtatttgatgcagcgatccgagtggttcttcaacctccaaagcagaagaaaaagaaaagcaaagcacaaaaagcctgctccattttgtaatttctctacgcttctcttacgtatctctctctgtctctctgtctcttccactcttctagtgaaggcttaagaagaaaacacattgggcttaaaaattgttccagagttcgttgtgataagctctcttaatccttaaaaaaacgattatttctgtttattgatgaatagtttccagctttagctgagacctaatattgcacttaccacttctc

SEQ ID NO: 10398 - protein, 197 aa, Arabidopsis thaliana
MSASRFIKCVTVGDGAVGKTCLLISYTSNTFPTDYVPTVFDNFSANVVVNGATVNLGLWDTAGQEDYNRLRPLSYRGADVFILAFSLISKASYENVSKKWIPELKHYAPGVPIVLVGTKLDLRDDKQFFIDHPGAVPITTAQGEELKKLIGAPAYIECSSKTQENVKGVFDAAIRVVLQPPKQKKKKSKAQKACSIL

SEQ ID NO: 10399 - DNA, 553 bp, Arabidopsis thaliana
attttttaaaagtaaataagatagtaatattaacacttagtttttcttttccttttcattattttcttttattttgtaacagaaataaaagaaaataaaagaatataaaaagatgggttacatttcaatgtccgtggttgcattccttgttgtttttgcttcgccggtggttctagccaccgatacagatccgattccagaaaacagagcccaaatcccgcaatggttcaaaacaaacgttaaaccatattcccagagaaagggcacgctagaccccgccctcgaagctgctgaaacagcgcgacaaattatcaccgtgaatcaaaaaggtggcgctaaattcaagacattaaacgaagctatcaagagcattccgacaggaaacaagaaccgtgtgatcatcaagttggctcctggtgtatacaatgagaaggtcacaatcgacatagctcgaccattcattacattgcttggtcaacctggtgcggaaacggtcttgacttaccacgggacagccgctcagtacggaaccgttgagagtgcaactcttatc

SEQ ID NO: 10400 - protein, 147 aa, Arabidopsis thaliana
MGYISMSVVAFLVVFASPVVLATDTDPIPENRAQIPQWFKTNVKPYSQRKGTLDPALEAAETARQIITVNQKGGAKFKTLNEAIKSIPTGNKNRVIIKLAPGVYNEKVTIDIARPFITLLGQPGAETVLTYHGTAAQYGTVESATLI

SEQ ID NO: 10401 - protein, 142 aa, Arabidopsis thaliana
MSVVAFLVVFASPVVLATDTDPIPENRAQIPQWFKTNVKPYSQRKGTLDPALEAAETARQIITVNQKGGAKFKTLNEAIKSIPTGNKNRVIIKLAPGVYNEKVTIDIARPFITLLGQPGAETVLTYHGTAAQYGTVESATLI

SEQ ID NO: 10402 - DNA, 1277 bp, Arabidopsis thaliana
gtaaagccccccttccttgtttctctaccgcaacaaagaaaaaacaaaagtttgagaaaaatggtgtgttcgttgtgtaaccaatgattgggttttagcttactacttcgagagattataagaaagaaagagtgaagatacattatagaaagaagagaagcagaaaccaaaaaaagaaaccatgaagtctttttgtgataatgatgataataatcatagcaacacgactaatttgttagggttctcattgtcttcaaatatgatgaaaatgggaggtagaggaggtagagaagctatttactcatcttcaacttcttcagctgcaacttcttcttcttctgttccacctcaacttgttgttggtgacaacactagcaactttggtgtttgctatggatctaacccaaatggaggaatctattctcacatgtctgtgatgccactcagatctgatggttctctttgcttaatggaagctctcaacagatcttctcactcgaatcaccatcaagattcatctccaaaggtggaggatttctttgggacccatcacaacaacacaagtcacaaagaagccatggatcttagcttagatagtttattctacaacaccactcatgagcccaacacgactacaaactttcaagagttctttagcttccctcaaaccagaaaccatgaggaagaaactagaaattacgggaatgaccctagtttgacacatggagggtcttttaatgtaggggtatatggggaatttcaacagtcactgagcttatccatgagccctgggtcacaatctagctgcatcactggctctcaccaccaccaacaaaaccaaaaccaaaaccaccaaagccaaaaccaccagcagatctctgaagctcttgtggagacaagcgttgggtttgagacgacgacaatggcggctgcgaagaagaagaggggacaagaggatgttgtagttgttggtcagaaacagattgttcatagaaaatctatcgatacttttggacaacgaacttctcaataccgaggcgttacaagacatagatggactggtagatatgaagctcatctatgggacaatagtttcaagaaggaaggtcacagtagaaaaggaagacaagtttatctgggaggttatgatatggaggagaaagctgctcgagcatatgatcttgctgcactcaagtactggggtccctctactcacaccaatttctctgcggagaattatcaaaaaaaaaaaaaaaaaactcgagggggggcccggt

SEQ ID NO: 10403 - protein, 365 aa, Arabidopsis thaliana
MKSFCDNDDNNHSNTTNLLGFSLSSNMMKMGGRGGREAIYSSSTSSAATSSSSVPPQLVVGDNTSNFGVCYGSNPNGGIYSHMSVMPLRSDGSLCLMEALNRSSHSNHHQDSSPKVEDFFGTHHNNTSHKEAMDLSLDSLFYNTTHEPNTTTNFQEFFSFPQTRNHEEETRNYGNDPSLTHGGSFNVGVYGEFQQSLSLSMSPGSQSSCITGSHHHQQNQNQNHQSQNHQQISEALVETSVGFETTTMAAAKKKRGQEDVVVVGQKQIVHRKSIDTFGQRTSQYRGVTRHRWTGRYEAHLWDNSFKKEGHSRKGRQVYLGGYDMEEKAARAYDLAALKYWGPSTHTNFSAENYQKKKKKTRGGAR

SEQ ID NO: 10404 - protein, 339 aa, Arabidopsis thaliana
MMKMGGRGGREAIYSSSTSSAATSSSSVPPQLVVGDNTSNFGVCYGSNPNGGIYSHMSVMPLRSDGSLCLMEALNRSSHSNHHQDSSPKVEDFFGTHHNNTSHKEAMDLSLDSLFYNTTHEPNTTTNFQEFFSFPQTRNHEEETRNYGNDPSLTHGGSFNVGVYGEFQQSLSLSMSPGSQSSCITGSHHHQQNQNQNHQSQNHQQISEALVETSVGFETTTMAAAKKKRGQEDVVVVGQKQIVHRKSIDTFGQRTSQYRGVTRHRWTGRYEAHLWDNSFKKEGHSRKGRQVYLGGYDMEEKAARAYDLAALKYWGPSTHTNFSAENYQKKKKKTRGGAR

SEQ ID NO: 10405 - protein, 338 aa, Arabidopsis thaliana
MKMGGRGGREAIYSSSTSSAATSSSSVPPQLVVGDNTSNFGVCYGSNPNGGIYSHMSVMPLRSDGSLCLMEALNRSSHSNHHQDSSPKVEDFFGTHHNNTSHKEAMDLSLDSLFYNTTHEPNTTTNFQEFFSFPQTRNHEEETRNYGNDPSLTHGGSFNVGVYGEFQQSLSLSMSPGSQSSCITGSHHHQQNQNQNHQSQNHQQISEALVETSVGFETTTMAAAKKKRGQEDVVVVGQKQIVHRKSIDTFGQRTSQYRGVTRHRWTGRYEAHLWDNSFKKEGHSRKGRQVYLGGYDMEEKAARAYDLAALKYWGPSTHTNFSAENYQKKKKKTRGGAR

SEQ ID NO: 10406 - DNA, 1538 bp, Arabidopsis thaliana
ctagtcccccccccccccgaagactcatatagtaaaaatgttttgacaatcaaaaaccaaataagcaaagagatctctgactctctatctgaaatctcaaaacggagaacgcgagggaacaagagattaaagcatagtgagaccctaagagagagagctttaggtctagaggggatcttcacaattcacacaacaactacgagataggatcgtgcgcgtcaaaagaagctggtactgctgattccagccgaagattagtctccgcttctggttgttccggtggagactcgtcggaaatgagaggtcttttcaaatccaaaccgcggactcccgctgatattgttcgtcagactcgcgatctcctcctctacgccgatcgatccaactccttccctgaccttcgagagtccaaacgcgaggaaaagatggtggaactaagtaagagcatacgagatttgaagttgattctatatggaaacagtgaggctgagcctgttgctgaagcttgtgctcagttgactcaggagttctttaaggctgatactcttcgccgtttgctcacttctcttcctaatttgaacttggaggcgaggaaagatgctacacaagttgttgcaaatcttcagaggcaacaagtcaattcacgtcttattgctgctgattatcttgaatccaacattgatcttatggattttctagttgatgggtttgaaaacaccgatatggcgttacactatggtactatgtttagagagtgcatccgtcatcagattgttgcaaaatatgttttggactcggagcacgtgaagaagtttttttactacatacagcttcccaatttcgacattgctgctgatgctgctgcaacttttaaggaacttctgacaaggcacaagtctacagttgctgagtttctcattaagaatgaagactggttttttgcagactacaactcaaagcttcttgaatcaactaattatattacccgacggcaagctattaagttgttgggcgatatattattggataggtcaaattcggctgtgatgacgaagtatgtgagctcgatggataacttgaggattctgatgaatcttctcagagaatcaagcaagactattcagatagaagctttccatgttttcaagctgtttgtagcgaaccaaaacaagccttcagacatcgccaacattctggtggcaaacagaaacaagcttctgagattgttggctgatatcaagccggacaaagaggacgagaggtttgacgcagacaaagctcaggttgtgagagagattgcaaaccttaagctgcgagagcttgcttgagcatgcacatatacacagaagctcatgatttctgttaatctttgaaagacatttttggaccatcaaagattgttgttatttattaggtactgtttctttttctctctctcagcatctacgctgttgactactctggatttttttagatcatatgaattcacatgtacactcctttagtgttgatcaaataaaaatggcattataaatccc

SEQ ID NO: 10407 - protein, 343 aa, Arabidopsis thaliana
MRGLFKSKPRTPADIVRQTRDLLLYADRSNSFPDLRESKREEKMVELSKSIRDLKLILYGNSEAEPVAEACAQLTQEFFKADTLRRLLTSLPNLNLEARKDATQVVANLQRQQVNSRLIAADYLESNIDLMDFLVDGFENTDMALHYGTMFRECIRHQIVAKYVLDSEHVKKFFYYIQLPNFDIAADAAATFKELLTRHKSTVAEFLIKNEDWFFADYNSKLLESTNYITRRQAIKLLGDILLDRSNSAVMTKYVSSMDNLRILMNLLRESSKTIQIEAFHVFKLFVANQNKPSDIANILVANRNKLLRLLADIKPDKEDERFDADKAQVVREIANLKLRELA

SEQ ID NO: 10408 - protein, 300 aa, Arabidopsis thaliana
MVELSKSIRDLKLILYGNSEAEPVAEACAQLTQEFFKADTLRRLLTSLPNLNLEARKDATQVVANLQRQQVNSRLIAADYLESNIDLMDFLVDGFENTDMALHYGTMFRECIRHQIVAKYVLDSEHVKKFFYYIQLPNFDIAADAAATFKELLTRHKSTVAEFLIKNEDWFFADYNSKLLESTNYITRRQAIKLLGDILLDRSNSAVMTKYVSSMDNLRILMNLLRESSKTIQIEAFHVFKLFVANQNKPSDIANILVANRNKLLRLLADIKPDKEDERFDADKAQVVREIANLKLRELA

SEQ ID NO: 10409 - protein, 213 aa, Arabidopsis thaliana
MDFLVDGFENTDMALHYGTMFRECIRHQIVAKYVLDSEHVKKFFYYIQLPNFDIAADAAATFKELLTRHKSTVAEFLIKNEDWFFADYNSKLLESTNYITRRQAIKLLGDILLDRSNSAVMTKYVSSMDNLRILMNLLRESSKTIQIEAFHVFKLFVANQNKPSDIANILVANRNKLLRLLADIKPDKEDERFDADKAQVVREIANLKLRELA

SEQ ID NO: 10410 - DNA, 876 bp, Arabidopsis thaliana
tctttagcgtttacacagccacaaattcctcaatactctatatttctcttcccgtttgaaactccaaagcttgtttgatgaaaacagagtaaacggttctgttcaaaacatttttcaagctctgttactttgttttttcaacgatgaggaagttaagaggaatcaaaattagaagaccgattaaacaaatctcaagatggatcctccggagaattaagattcgtcgttcaagatacacccggttaagcccaaaccgcccggtttgcaagccgagagccatcacaaaactcataagttggggtcgaagtctcacatcccacagcgccaggtttattgggtctaaatgctccaattcagggtacataccaattggtcaagaacccattcgagaaaaactcgacccggttccgaaaggtcactcggcggtttatatcggtaaaaaagacggcgactttcagagagttttggtgcctatcgtttactttaaccatcctctgtttggtgagcttcttagagaggctgaagaagaatttgggttttctcaagaaggtggaatcactatcccttgtccttactcagatttcaaacgggtccaaacccgaattgaatccgggtcgggtttctgtaaatttccctggagccggcggcggcaataacgacggtggaagaagatgatgatgatgaaaaagttctttaactcttttttactattttctaccttttcacttttgttactatttttacccttttgttagatatgtacatattctgtatgtgaaaagtgaggtttgaatttaggcgataatgtaaataatataaagattttttatttttcatgaaaaaaaaaaaaaaaaaaaactcgagggggggcccggt

SEQ ID NO: 10411 - protein, 170 aa, Arabidopsis thaliana
MRKLRGIKIRRPIKQISRWILRRIKIRRSRYTRLSPNRPVCKPRAITKLISWGRSLTSHSARFIGSKCSNSGYIPIGQEPIREKLDPVPKGHSAVYIGKKDGDFQRVLVPIVYFNHPLFGELLREAEEEFGFSQEGGITIPCPYSDFKRVQTRIESGSGFCKFPWSRRRQ

SEQ ID NO: 10412 - DNA, 1009 bp, Arabidopsis thaliana
gagaataatctcctctctctctaacaaactcgcaaactcacatttgtggtactctcagtgttagacaagtccgatcaagtttaagcagtcatggcggttttgcttcctctgtttcttctctctttcatgtttacctattcaaacgcggcggtttgtgtgtgcaaggacgctaacgagctggatcttcagaaggtgatagacttcgcatgtggaggaggtgctgactgtgcacagattcagacgaccggagcttgttatcaaccaaacaccctcaagaaccactgtgacgttgccgttaacagctactatcaacagaaagcttccaccggtgccacatgtgacttcaacggcgccgccgtcatctccacttcccctccttcgactacgtcaagctgtttatctagttctagttccaacggaacccccactgccggatatccatccaccggaaattcaaccacagcaagtccaggcaccacaaatccatccacaggcaattcaacaaacagcacactacccactaatgataagccgacttcatctacgataacgtttcctgacagtactactatgggaccatctagcagcacgagtggtgatcccaacggtggagaagagctatccgtcagaaccacgacgatcatcttactgactaccatcgctgccgtggcattgagggtttaggtaagatcatctcaagatgatgacgaggacgcttatttgttgtggacggctgagataatgccaagttaattagagcctatctttcttcccaccgaattttaatctttaatttccaattaggattgtgactctcgctcgtcttcttaagtattttggtttatagaaaatcttaatcaagagcttttttcttgctttcttttgtaaatccagaaaaaatgagatgctctttgggttgtattagttttacttataattatgccttcgccaataaagataacatgtttctcgaaaaaaaaaaaaaaaaaaactcgagggggggcccggt

SEQ ID NO: 10413 - protein, 197 aa, Arabidopsis thaliana
MAVLLPLFLLSFMFTYSNAAVCVCKDANELDLQKVIDFACGGGADCAQIQTTGACYQPNTLKNHCDVAVNSYYQQKASTGATCDFNGAAVISTSPPSTTSSCLSSSSSNGTPTAGYPSTGNSTTASPGTTNPSTGNSTNSTLPTNDKPTSSTITFPDSTTMGPSSSTSGDPNGGEELSVRTTTIILLTTIAAVALRV

SEQ ID NO: 10414 - protein, 185 aa, Arabidopsis thaliana
MFTYSNAAVCVCKDANELDLQKVIDFACGGGADCAQIQTTGACYQPNTLKNHCDVAVNSYYQQKASTGATCDFNGAAVISTSPPSTTSSCLSSSSSNGTPTAGYPSTGNSTTASPGTTNPSTGNSTNSTLPTNDKPTSSTITFPDSTTMGPSSSTSGDPNGGEELSVRTTTIILLTTIAAVALRV

SEQ ID NO: 10415 - DNA, 1388 bp, Arabidopsis thaliana
gtggtgacatttacgcgcagaaacgttgatactctctctctctcgacggaaaattcttcctcggagatatggtgacggagctggaagagcttgtcgaatttttgtcatctccttcaccgcctgtgaagaaagctgcggtggaaattgttagtggtttaactggttccgaggaaggtttacaatctctatcaaagtattccgagattcttcttccatcattgtctcagcttctaaatgaaagcaaggaggtatcagagccagcagctcaagctcttgttaatctttctcagaagtgtgaattggcaaagaagatgattcaaatgggtttgattaaagtggccatggacatgttgtataagccagagtcatgtattaccagattacttgttatgcttctagtgaatcttactcagttggatgatggggtttcttctttgcttcagattgacgatgagaagatgcatggactacatatcatgaagcttgttaggtcattttgcaggtcttctggtgaaactgctgatgatcagtttgagcatgttggttcgatccttgtcaacatatcaaaaacagaagatgggaggaaattgttactggagccaaagagacgactattaaaacagatcattaggcagtttgattcaacaaatcagttgcgaaagaaaggggttgctgggactattcgtaactgttgttttgaagccaaaaaccaactccagaatatactcttgatatcagagtttctttggcccgctctgctcctaccagttgcaggcagcaagacatacagtgagcaagatgtcgcaaaaatgccacctgagcttggaagtgcactgtccattgagcgagaaccagttactgatcctgacattcgcgttcagacactcgaagctatatatttgatcatcttagaggaggcaggtcgaagggcattttggtcagtcaacggcccacggattctacaattgggatacgaatatgaagaagatccgaaagcaatgagagcctatgagcaagtcggttctttgcttgttgaggaagctggaggtccggaagagtcgttggagccaacaaaagcagagtcttgaagttcattatttgttgttctccgactctagtccccattattggctgccctcgcaaagtaagttacttatcctgttatgaaagagttactactacatcttgtgcactactagttgtaacactagattcgttattgacttacgcgatcttattagtgctccattttctatttttggttgtaattttattttatattagacattatagtatgttatcttcgttagacaatatatttgtgtattcttacacacattttttgctaagaaaaaaaaaaaaaaaaaactcgagggggggcccggtac

SEQ ID NO: 10416 - protein, 339 aa, Arabidopsis thaliana
MVTELEELVEFLSSPSPPVKKAAVEIVSGLTGSEEGLQSLSKYSEILLPSLSQLLNESKEVSEPAAQALVNLSQKCELAKKMIQMGLIKVAMDMLYKPESCITRLLVMLLVNLTQLDDGVSSLLQIDDEKMHGLHIMKLVRSFCRSSGETADDQFEHVGSILVNISKTEDGRKLLLEPKRRLLKQIIRQFDSTNQLRKKGVAGTIRNCCFEAKNQLQNILLISEFLWPALLLPVAGSKTYSEQDVAKMPPELGSALSIEREPVTDPDIRVQTLEAIYLIILEEAGRRAFWSVNGPRILQLGYEYEEDPKAMRAYEQVGSLLVEEAGGPEESLEPTKAES

SEQ ID NO: 10417 - protein, 258 aa, Arabidopsis thaliana
MIQMGLIKVAMDMLYKPESCITRLLVMLLVNLTQLDDGVSSLLQIDDEKMHGLHIMKLVRSFCRSSGETADDQFEHVGSILVNISKTEDGRKLLLEPKRRLLKQIIRQFDSTNQLRKKGVAGTIRNCCFEAKNQLQNILLISEFLWPALLLPVAGSKTYSEQDVAKMPPELGSALSIEREPVTDPDIRVQTLEAIYLIILEEAGRRAFWSVNGPRILQLGYEYEEDPKAMRAYEQVGSLLVEEAGGPEESLEPTKAES

SEQ ID NO: 10418 - protein, 255 aa, Arabidopsis thaliana
MGLIKVAMDMLYKPESCITRLLVMLLVNLTQLDDGVSSLLQIDDEKMHGLHIMKLVRSFCRSSGETADDQFEHVGSILVNISKTEDGRKLLLEPKRRLLKQIIRQFDSTNQLRKKGVAGTIRNCCFEAKNQLQNILLISEFLWPALLLPVAGSKTYSEQDVAKMPPELGSALSIEREPVTDPDIRVQTLEAIYLIILEEAGRRAFWSVNGPRILQLGYEYEEDPKAMRAYEQVGSLLVEEAGGPEESLEPTKAES

SEQ ID NO: 10419 - DNA, 1172 bp, Arabidopsis thaliana
agagagctcactagtccccccccccccccccacagagtttcggctcctccgttgtgtttcaggacgacgcaaaggggaaaaaaaattgaattctttctctccaagcgaaactagggtttcgaaagtctctgtctcatcaaagcttcgaaaagaaagtgattgcattaagagaaacattgggataaaagatgagctttactcaggctaattgttttcgaccatcctactatcctgcaaggataacacgaccaaattgcatctccagtgtacctattaggtcttcagtacgctttgatcacttcccgcgtacctcgtttactcttcgagctactgctgcagtgtctactcagttttcgcctcttcttgatcatcgccgtcgtttacctactgggaaatcgaaacaaagttctgctgtgtgcttatttggtgggaaagataaacctgatggtagtgatgagatatcgccatggaaagcaatagagaaagctatggggaagaaatcggttgaagatatgttgcgagagcagatacagaagaaagacttttatgatactgacagtggcggcaacatgcctccacgtggaggaggcagtggtggcggtggtggaaatggtgaggagcgtcctgaagggtcaggaggagaagatggtggtcttgctgggatcgcagatgaaactttgcaagtggttttggcgaccttaggcttcatctttttgtacacatacattatcactggggaggaattggtcaagcttgcaagggattacattaggtttcttatgggaagacctaagactgttcgattgacccgagccatggatagttggaacggattcttggagaagatgtcgaggcaaagagtgtatgatgagtattggctagaaaaggcgatcatcaacacaccaacctggtatgatagccctgagaagtacagacgtgttatcaaggcttatgttgattcaaattctgatgaagcttatgtggaatcaaattctgatgaggtatcttactaggttaggaacaggaagagatccataataacaattgagttttttttcttagtgtttgaaattaagaatcagtttctttgaattagatttatgttcgtacatttgtatggaattggtttatttatacacgatgaacattctcgagggggggcccggtcccaa

SEQ ID NO: 10420 - protein, 274 aa, Arabidopsis thaliana
MSFTQANCFRPSYYPARITRPNCISSVPIRSSVRFDHFPRTSFTLRATAAVSTQFSPLLDHRRRLPTGKSKQSSAVCLFGGKDKPDGSDEISPWKAIEKAMGKKSVEDMLREQIQKKDFYDTDSGGNMPPRGGGSGGGGGNGEERPEGSGGEDGGLAGIADETLQVVLATLGFIFLYTYIITGEELVKLARDYIRFLMGRPKTVRLTRAMDSWNGFLEKMSRQRVYDEYWLEKAIINTPTWYDSPEKYRRVIKAYVDSNSDEAYVESNSDEVSY

SEQ ID NO: 10421 - protein, 174 aa, Arabidopsis thaliana
MGKKSVEDMLREQIQKKDFYDTDSGGNMPPRGGGSGGGGGNGEERPEGSGGEDGGLAGIADETLQVVLATLGFIFLYTYIITGEELVKLARDYIRFLMGRPKTVRLTRAMDSWNGFLEKMSRQRVYDEYWLEKAIINTPTWYDSPEKYRRVIKAYVDSNSDEAYVESNSDEVSY

SEQ ID NO: 10422 - protein, 166 aa, Arabidopsis thaliana
MLREQIQKKDFYDTDSGGNMPPRGGGSGGGGGNGEERPEGSGGEDGGLAGIADETLQVVLATLGFIFLYTYIITGEELVKLARDYIRFLMGRPKTVRLTRAMDSWNGFLEKMSRQRVYDEYWLEKAIINTPTWYDSPEKYRRVIKAYVDSNSDEAYVESNSDEVSY

SEQ ID NO: 10423 - DNA, 1962 bp, Arabidopsis thaliana
gtcgtctttttaaaaacgttttactttccacggcgaattttggtctgaatccaaattcttccctagtttgaaaaatcttctgtattctgaaaagagattttatgcgtatcgctgaaataggaagaaaacagattcctttccatttcccaaattttgtcattgagtcttggcatttcaaccaatcgcaatttattgaaattccggcgagtcattagatttttttggattccgtttcaaggtacggtgctttttcgcagattgagaagagcttaataagaaagatgacattgacgatcccaaacgcacctgggagctccgggtacttggatatgttcccagagagaaggatgtcgtattttgggaattcttacattctgggtttgactgtcactgccggaatcggtggccttctgttcggttatgatacaggtgtaatttccggtgcccttttgtacattaaggatgatttcgaagttgttaagcagagcagtttcttacaggaaactattgtaagtatggctttagttggtgccatgattggtgctgcagctggaggttggatcaatgactactacggtcgtaaaaaggcgactctttttgcagatgttgtctttgcagctggagctatcgttatggctgctgctcctgatccgtatgttttgatatcgggtcgtctcttggtcggtttaggagttggtgttgcttctgtgactgctccggtttatatagcggaagcatctccatcggaagttagaggtggacttgtgagcaccaacgtattgatgatcactggtggacagtttctttcatatctcgttaattctgctttcacacaggttccaggaacatggagatggatgcttggtgtttcaggcgttcccgctgtgattcagttcatcctcatgcttttcatgccagaatcccctcgatggcttttcatgaaaaatcgtaaagcggaagccatccaagtgctcgccagaacctatgacatctcgcggttagaagacgagattgatcatctttcagcggctgaagaggaagaaaaacaaaggaagcgcactgttggctacttggatgttttcagatccaaagaattgagacttgcatttcttgccggagcaggacttcaggcgtttcagcagttcactggtatcaatacagttatgtactacagccctacgatagtccaaatggctggatttcactcaaaccagctcgctttgttcctgtctctcattgttgctgccatgaatgctgctggaacagtcgtggggatttacttcatcgatcattgtggaaggaaaaagctagctctctcaagtttatttggcgtcattatatcactcttaatcctctcagtctcgtttttcaaacaatctgagacatcatctgatggagggctctatggttggctcgctgtgcttggcttagctctatacattgttttctttgcaccgggaatgggaccagtcccatggacggtgaactcagagatataccctcaacaataccgaggcatatgcggaggcatgtcagctacagttaactggatcagcaatttgattgtggcacaaacattcttgacaatcgcggaagctgctggaacaggaatgactttcttgattttggcgggaattgcggttcttgctgtaatctttgtgattgtgtttgtccctgagactcaagggctaacgttttcggaagttgaacagatttggaaagaaagagcttatggaaatatcagtggctggggcagtagcagtgatagcaacaacatggaagggttactcgagcagggatctcaatcttaaagatcttggatggctcatgagtcatgcatgacttacacattgtgaaatcacatagtagtaaaccgggattggttccggtttagcaatgtgagatgtatgtgatgttggaattgtaatgttcttaggaactgtgattgtaaataaatacatt

SEQ ID NO: 10424 - protein, 509 aa, Arabidopsis thaliana
MTLTIPNAPGSSGYLDMFPERRMSYFGNSYILGLTVTAGIGGLLFGYDTGVISGALLYIKDDFEVVKQSSFLQETIVSMALVGAMIGAAAGGWINDYYGRKKATLFADVVFAAGAIVMAAAPDPYVLISGRLLVGLGVGVASVTAPVYIAEASPSEVRGGLVSTNVLMITGGQFLSYLVNSAFTQVPGTWRWMLGVSGVPAVIQFILMLFMPESPRWLFMKNRKAEAIQVLARTYDISRLEDEIDHLSAAEEEEKQRKRTVGYLDVFRSKELRLAFLAGAGLQAFQQFTGINTVMYYSPTIVQMAGFHSNQLALFLSLIVAAMNAAGTVVGIYFIDHCGRKKLALSSLFGVIISLLILSVSFFKQSETSSDGGLYGWLAVLGLALYIVFFAPGMGPVPWTVNSEIYPQQYRGICGGMSATVNWISNLIVAQTFLTIAEAAGTGMTFLILAGIAVLAVIFVIVFVPETQGLTFSEVEQIWKERAYGNISGWGSSSDSNNMEGLLEQGSQS

SEQ ID NO: 10425 - protein, 493 aa, Arabidopsis thaliana
MFPERRMSYFGNSYILGLTVTAGIGGLLFGYDTGVISGALLYIKDDFEVVKQSSFLQETIVSMALVGAMIGAAAGGWINDYYGRKKATLFADVVFAAGAIVMAAAPDPYVLISGRLLVGLGVGVASVTAPVYIAEASPSEVRGGLVSTNVLMITGGQFLSYLVNSAFTQVPGTWRWMLGVSGVPAVIQFILMLFMPESPRWLFMKNRKAEAIQVLARTYDISRLEDEIDHLSAAEEEEKQRKRTVGYLDVFRSKELRLAFLAGAGLQAFQQFTGINTVMYYSPTIVQMAGFHSNQLALFLSLIVAAMNAAGTVVGIYFIDHCGRKKLALSSLFGVIISLLILSVSFFKQSETSSDGGLYGWLAVLGLALYIVFFAPGMGPVPWTVNSEIYPQQYRGICGGMSATVNWISNLIVAQTFLTIAEAAGTGMTFLILAGIAVLAVIFVIVFVPETQGLTFSEVEQIWKERAYGNISGWGSSSDSNNMEGLLEQGSQS

SEQ ID NO: 10426 - protein, 487 aa, Arabidopsis thaliana
MSYFGNSYILGLTVTAGIGGLLFGYDTGVISGALLYIKDDFEVVKQSSFLQETIVSMALVGAMIGAAAGGWINDYYGRKKATLFADVVFAAGAIVMAAAPDPYVLISGRLLVGLGVGVASVTAPVYIAEASPSEVRGGLVSTNVLMITGGQFLSYLVNSAFTQVPGTWRWMLGVSGVPAVIQFILMLFMPESPRWLFMKNRKAEAIQVLARTYDISRLEDEIDHLSAAEEEEKQRKRTVGYLDVFRSKELRLAFLAGAGLQAFQQFTGINTVMYYSPTIVQMAGFHSNQLALFLSLIVAAMNAAGTVVGIYFIDHCGRKKLALSSLFGVIISLLILSVSFFKQSETSSDGGLYGWLAVLGLALYIVFFAPGMGPVPWTVNSEIYPQQYRGICGGMSATVNWISNLIVAQTFLTIAEAAGTGMTFLILAGIAVLAVIFVIVFVPETQGLTFSEVEQIWKERAYGNISGWGSSSDSNNMEGLLEQGSQS

SEQ ID NO: 10427 - DNA, 1279 bp, Arabidopsis thaliana
ccccccactccccgtcctacaggtcgactcagtctccggctagttcgactcggtaaaatcacgattactttctccttccatttatcacgatcgtggatccagaaactctgaaagatggcgtctgagctgacaaaccggcgacacgagatagagcaaccagaagcggaatcttattatccaaagccgataaagccatggttcgtagcgattcgtccgatccgttacatgctcagagaacagagactcgtcttcgtcctcgtcggcattgtcatcgccacattaggattcacaatcttctccaaatcatccaaccaccaaccaattccttacgacgtggatccgctttccggatacggaatgcgatcggagtcatcgtatctgccagcgacgattcataagaagccaagcatcgagtacatgagccggatcggatcggcaggcggcaaaatccctctaagcttgaaacggaaagtgctaagggttgttgtgacaggtggagcagggttcgtcgggtcacacctggtggaccggttgatggctcgaggagacaacgtgatcgtggtcgacaatttcttcacgggaaggaaagagaacgtgatgcaccatttcaataaccctaatttcgagatgatccgtcacgatgtagtggagccgatccttctagaggttgatcagatctaccatttggcatgccctgcttctcctgttcactacaaattcaatcccgtcaagactatcaagacgaatgtggtgggaacattgaacatgttgggactagcgaagagagtgggagcaagattcttgctgacgagtacgagtgaggtctatggagatcctcttcaacatcctcaggttgagacttactggggcaacgttaatcccatcggtgttcggagttgttacgacgaaggcaaacgtacggctgagactttgaccatggactatcacagaggcgctaatgttgaggttaggattgctaggatattcaacacttatggcccaaggatgtgtatcgatgacggtcgtgtggttagcaacttcgttgcccaggcattaagaaaagagcctttgactgtttatggtgatggtaagcagactaggagtttccagtttgtctctgatctggtggaaggtctgatgaggttgatggagggagaacatgtcggtccatttaaccttggtaaccccggtgaattcaccatgctcgagctcgctaaggtggttcaagagacaattgacccgaacgcaaagatagagttagctcgagggggggcccggt

SEQ ID NO: 10428 - protein, 388 aa, Arabidopsis thaliana
MASELTNRRHEIEQPEAESYYPKPIKPWFVAIRPIRYMLREQRLVFVLVGIVIATLGFTIFSKSSNHQPIPYDVDPLSGYGMRSESSYLPATIHKKPSIEYMSRIGSAGGKIPLSLKRKVLRVVVTGGAGFVGSHLVDRLMARGDNVIVVDNFFTGRKENVMHHFNNPNFEMIRHDVVEPILLEVDQIYHLACPASPVHYKFNPVKTIKTNVVGTLNMLGLAKRVGARFLLTSTSEVYGDPLQHPQVETYWGNVNPIGVRSCYDEGKRTAETLTMDYHRGANVEVRIARIFNTYGPRMCIDDGRVVSNFVAQALRKEPLTVYGDGKQTRSFQFVSDLVEGLMRLMEGEHVGPFNLGNPGEFTMLELAKVVQETIDPNAKIELARGGAR

SEQ ID NO: 10429 - protein, 351 aa, Arabidopsis thaliana
MLREQRLVFVLVGIVIATLGFTIFSKSSNHQPIPYDVDPLSGYGMRSESSYLPATIHKKPSIEYMSRIGSAGGKIPLSLKRKVLRVVVTGGAGFVGSHLVDRLMARGDNVIVVDNFFTGRKENVMHHFNNPNFEMIRHDVVEPILLEVDQIYHLACPASPVHYKFNPVKTIKTNVVGTLNMLGLAKRVGARFLLTSTSEVYGDPLQHPQVETYWGNVNPIGVRSCYDEGKRTAETLTMDYHRGANVEVRIARIFNTYGPRMCIDDGRVVSNFVAQALRKEPLTVYGDGKQTRSFQFVSDLVEGLMRLMEGEHVGPFNLGNPGEFTMLELAKVVQETIDPNAKIELARGGAR

SEQ ID NO: 10430 - protein, 307 aa, Arabidopsis thaliana
MRSESSYLPATIHKKPSIEYMSRIGSAGGKIPLSLKRKVLRVVVTGGAGFVGSHLVDRLMARGDNVIVVDNFFTGRKENVMHHFNNPNFEMIRHDVVEPILLEVDQIYHLACPASPVHYKFNPVKTIKTNVVGTLNMLGLAKRVGARFLLTSTSEVYGDPLQHPQVETYWGNVNPIGVRSCYDEGKRTAETLTMDYHRGANVEVRIARIFNTYGPRMCIDDGRVVSNFVAQALRKEPLTVYGDGKQTRSFQFVSDLVEGLMRLMEGEHVGPFNLGNPGEFTMLELAKVVQETIDPNAKIELARGGAR

SEQ ID NO: 10431 - DNA, 1656 bp, Arabidopsis thaliana
atctttccgtttctcgcttctttttctccgccggcgtccttccatttcgccggctgctatcgaaccctaacccgcgacgactccaccgtctccggcgtcttcttcttccggcgaaaccggtaaccgtatcttttgtttctatagaattagcttcatgatggcggatactgaaatgcaagagcaagatgtgccgtctggtaccaaaggtgttgtagaggagccttcagaactagagaaagacctaaactctattgaaagacctaagtcccctgttccagaggatacgactcatactttggatagtgatgttcatttatctgatgctcccattgctaatcaaattgaggctaatgaagaggttggtggacagaacagtgttgatgggaggaatggtgatgttgatcagtctgaaaagaagattactagtgatggcggtcaagaggagacaacacttggggaatcaaatcctttgaagggggatccgtcgagtcctcatgttcctgaagaaagtgttaagaagtggaagacatggttgttgagtgatgctgaggccagggaagttgatgaagcaggggcaccacaggatcaagaggcgtttattaaagaagtggaggccttcaacaaggagaatttcctggaatttaaagccccaaagttttacggacagcccttaaattgtctcaagctttggagagccgttatcaagttaggtggctacgatgtggtcaccacatctaagctatggcggcaagttggagaatcgttccatcctccaaaaacatgcactacagtctcctggacattccgcattttctatgaaaaggcacttttggagtatgagaagcatttaaggcaaaatggtgagcttaaccttcctggttcagcttctcttccgtcttcaggcattgaaaaggaggcaagtagccatcaagcttcagggtcaggcagaacaagaagagatgctgcagctcgtgctatgcaaggttggcattctcagcgccttcttggatctggggaggttactgagcctattgttaaggagaaaggcttgaattcaaccccaaagcaaaagaacctcaaaaacattggtgtgcagaaacaaaaaacaacaaccggcatggaccttgttttttcacacgaatcagaaaaacagtcaactgccgaggttatagatgttggaccccctgcagactgggtgaagatcaatgtcagagaaactaaagactgctttgagatatttgccctggtacctggacttcttcgcgaagaggtccgtgttcagtcagaccctgcagggcggctagttatagcaggccaacctgagcaacttgacaatccttggggaatcacacccttcaaaaaggttgtgaactttcccgcaagaatcgatccgctgcacacgtcagcggttgtgagcctgcatggtcgactgtttgtgcgagtcccatttgagcagtgaccggtctcatcccaagtgagctagttctttatttgtctctttgttttcttttaggaattcgtttgtatcagaactaaaaacaaacgatagcaaatgtgatagtttgactgtgacttgagttctgaatattaaagtagagaaatgaatattgatgttccataaaaaaaaaaaaaaaaactcgagggggggcccggtac

SEQ ID NO: 10432 - protein, 434 aa, Arabidopsis thaliana
MMADTEMQEQDVPSGTKGVVEEPSELEKDLNSIERPKSPVPEDTTHTLDSDVHLSDAPIANQIEANEEVGGQNSVDGRNGDVDQSEKKITSDGGQEETTLGESNPLKGDPSSPHVPEESVKKWKTWLLSDAEAREVDEAGAPQDQEAFIKEVEAFNKENFLEFKAPKFYGQPLNCLKLWRAVIKLGGYDVVTTSKLWRQVGESFHPPKTCTTVSWTFRIFYEKALLEYEKHLRQNGELNLPGSASLPSSGIEKEASSHQASGSGRTRRDAAARAMQGWHSQRLLGSGEVTEPIVKEKGLNSTPKQKNLKNIGVQKQKTTTGMDLVFSHESEKQSTAEVIDVGPPADWVKINVRETKDCFEIFALVPGLLREEVRVQSDPAGRLVIAGQPEQLDNPWGITPFKKVVNFPARIDPLHTSAVVSLHGRLFVRVPFEQ

SEQ ID NO: 10433 - protein, 433 aa, Arabidopsis thaliana
MADTEMQEQDVPSGTKGVVEEPSELEKDLNSIERPKSPVPEDTTHTLDSDVHLSDAPIANQIEANEEVGGQNSVDGRNGDVDQSEKKITSDGGQEETTLGESNPLKGDPSSPHVPEESVKKWKTWLLSDAEAREVDEAGAPQDQEAFIKEVEAFNKENFLEFKAPKFYGQPLNCLKLWRAVIKLGGYDVVTTSKLWRQVGESFHPPKTCTTVSWTFRIFYEKALLEYEKHLRQNGELNLPGSASLPSSGIEKEASSHQASGSGRTRRDAAARAMQGWHSQRLLGSGEVTEPIVKEKGLNSTPKQKNLKNIGVQKQKTTTGMDLVFSHESEKQSTAEVIDVGPPADWVKINVRETKDCFEIFALVPGLLREEVRVQSDPAGRLVIAGQPEQLDNPWGITPFKKVVNFPARIDPLHTSAVVSLHGRLFVRVPFEQ

SEQ ID NO: 10434 - protein, 428 aa, Arabidopsis thaliana
MQEQDVPSGTKGVVEEPSELEKDLNSIERPKSPVPEDTTHTLDSDVHLSDAPIANQIEANEEVGGQNSVDGRNGDVDQSEKKITSDGGQEETTLGESNPLKGDPSSPHVPEESVKKWKTWLLSDAEAREVDEAGAPQDQEAFIKEVEAFNKENFLEFKAPKFYGQPLNCLKLWRAVIKLGGYDVVTTSKLWRQVGESFHPPKTCTTVSWTFRIFYEKALLEYEKHLRQNGELNLPGSASLPSSGIEKEASSHQASGSGRTRRDAAARAMQGWHSQRLLGSGEVTEPIVKEKGLNSTPKQKNLKNIGVQKQKTTTGMDLVFSHESEKQSTAEVIDVGPPADWVKINVRETKDCFEIFALVPGLLREEVRVQSDPAGRLVIAGQPEQLDNPWGITPFKKVVNFPARIDPLHTSAVVSLHGRLFVRVPFEQ

SEQ ID NO: 10435 - DNA, 1033 bp, Arabidopsis thaliana
gatatttcaattattccatcatttaccatttagtcgtctccttggtgatccaaatacttcatcatcttccttcatagcaaattctcttcgtctatctcatacatttaaacaaacatagacatacactaatcaatcttccttaatttaaaaaaaaaacatggagaaaacccaagaatcagtggttagatatggaaaaaagatcgagaaaatgccatatcttatgcccgccggccgagttgtctttgcatctgcgttcctcgtgtctgcttggagagagtattatggtttcggattagctgccgatgagttaagaccaaaacttggtttctttgagaaccaggcaaaagccatagttgctcttggtatattgatgaagtttgttggagggatcttattcatcttcaatacgtacgtaggagctgcgcttttgcttgtataccaagccatcttgagcccgatattgtacgatttctacaatcgcgattacgatagagaccatttcaccgttttctacacaaagttcaaagaatttgtggaagagacgacgtcagctgatggtggagtggccatgagcctctatacctctgtggttaacgaagaatcgcgccagaaattcatcgatcagcttaacgagattgcgagaatagccatctcgaatcctctattcacaccaagcgatttcaacacattgttcataaggtttattaagggtgttggaatagcagctgcattggcgtgcttcattgcgatgaaacataggcatgcggtgctcatcgagaagacgtccaagaagcaaaaaactaactgatccgatttggcttatttacttgtggatctcaatcaacaagtgatctctatgtttttcaataattattagtttcttttaagatttgtgagttttgctttttgctatgaataaatagcaagtatttaattatgatgttgtactgtaatttcatatccgaacaaatttaaatttccttcggatcatttgattaaaaaaaaaaaaaaaaaactcgagggggggcccggt

SEQ ID NO: 10436 - protein, 216 aa, Arabidopsis thaliana
MEKTQESVVRYGKKIEKMPYLMPAGRVVFASAFLVSAWREYYGFGLAADELRPKLGFFENQAKAIVALGILMKFVGGILFIFNTYVGAALLLVYQAILSPILYDFYNRDYDRDHFTVFYTKFKEFVEETTSADGGVAMSLYTSVVNEESRQKFIDQLNEIARIAISNPLFTPSDFNTLFIRFIKGVGIAAALACFIAMKHRHAVLIEKTSKKQKTN

SEQ ID NO: 10437 - protein, 199 aa, Arabidopsis thaliana
MPYLMPAGRVVFASAFLVSAWREYYGFGLAADELRPKLGFFENQAKAIVALGILMKFVGGILFIFNTYVGAALLLVYQAILSPILYDFYNRDYDRDHFTVFYTKFKEFVEETTSADGGVAMSLYTSVVNEESRQKFIDQLNEIARIAISNPLFTPSDFNTLFIRFIKGVGIAAALACFIAMKHRHAVLIEKTSKKQKTN

SEQ ID NO: 10438 - protein, 195 aa, Arabidopsis thaliana
MPAGRVVFASAFLVSAWREYYGFGLAADELRPKLGFFENQAKAIVALGILMKFVGGILFIFNTYVGAALLLVYQAILSPILYDFYNRDYDRDHFTVFYTKFKEFVEETTSADGGVAMSLYTSVVNEESRQKFIDQLNEIARIAISNPLFTPSDFNTLFIRFIKGVGIAAALACFIAMKHRHAVLIEKTSKKQKTN

SEQ ID NO: 10439 - DNA, 627 bp, Arabidopsis thaliana
aaatattttcacaattctctctataacttcacccttcgtataaaccgatacatacacccacacccacatatatatctctctctccgtatttacacatacgtatatagacatatacatcatacatatacgtataatagctgaaagagtgtttttttttagagcgagcgacgaattccaatggaaggaagaaagaagaaagcttcgtcttcctctccttgttcttcttcctcgttaacctctgagctttttggttccagagaaaacccttcttctccttcctcttctggtattctcggatccatttttcctcctccttctaaggttttgggaagagaatctgtgcgacaagagactgtgactggtggttgctggaacgagaaaacctccaagactggtggtaatgttgatagaaacagggaacaacaggagaatcatggttcaggttatcagcaggatcagagagtacaaccctgtcatctgagttcttccatctattacggtggtcctgatgtttatttccagcctcaaaattccaccagcaactctacgaacaagaaagatggaggcgaagatgattccggaagtgcctcaagaggaaattggtggcaagggtctctgtattactaa

SEQ ID NO: 10440 - protein, 149 aa, Arabidopsis thaliana
MEGRKKKASSSSPCSSSSLTSELFGSRENPSSPSSSGILGSIFPPPSKVLGRESVRQETVTGGCWNEKTSKTGGNVDRNREQQENHGSGYQQDQRVQPCHLSSSIYYGGPDVYFQPQNSTSNSTNKKDGGEDDSGSASRGNWWQGSLYY

SEQ ID NO: 10441 - DNA, 1331 bp, Arabidopsis thaliana
gatcggggaggagaaaatcctaccgccttcaccaccgtcgcgcagacgccgcaatcaccaacactcatcgtcactgactccagatcttcctctccaactagagagatatgggttctcatggtaagggtaagagagatagaagtggaaggcagaagaagcggagagatgaatccgagtctgggtctgagtccgagtcttacacttctgactctgatggctcagatgatttgtcgccgcccaggagttccaggaggaagaaaggtagcagcagtcgtcggactcgacgccgtagctcaagtgatgattccagtgacagtgatggtggacggaagagtaagaagagatcttcatctaaggattactcggaggaaaaagttacggagtatatgtctaaaaaagctcagaagaaggcattacgtgcagcaaagaaactgaagacgcagtcagtgtcagggtactccaatgattcaaacccatttggtgattcaaatctcactgagacatttgtgtggcggaagaagattgaaaaagatgttcatcgaggagtaccgctggaagaattttccgttaaagctgagaagagaagacaccgggaaaggatgacagaggttgaaaaggttaagaagaggagagaagagagagcagtggagaaagctcgacatgaagaagaaatggcattgttagctagagaacgtgctcgggctgagttccatgattgggagaagaaagaggaagagttccatttcgatcaaagcaaggtgaggtcagagattagattacgtgaaggtcgactgaagccaatcgacgtcctctgcaagcacttggatggttcagatgatttggatatcgagctcagtgaaccgtacatggttttcaagggacttactgttaaagatatggaagagcttcgcgatgatatcaagatgtatctggatttggatcgggcaactccaacacgtgtacaatattgggaggcgcttattgtggtatgcgattgggagttagctgaagctcgtaagagggatgcccttgatcgagctagagttagaggggaggagcctcctgcagaattgcttgctcaagagaggggactacacgctggtgttgaagctgatgtgagaaaacttctcgatgggaagacccacgcggagcttgtagaactgcagttggacatcgaatcgcagctgcgttctgggtctgcgaaagtagtagagtattgggaagcagttcttaaacgcctcgaaatatacaaggcaaaggcttgcttgaaggaaatacacgctgagatgctgagacggccagagagaactagtctcgagggggggcccggt

SEQ ID NO: 10442 - protein, 408 aa, Arabidopsis thaliana
MGSHGKGKRDRSGRQKKRRDESESGSESESYTSDSDGSDDLSPPRSSRRKKGSSSRRTRRRSSSDDSSDSDGGRKSKKRSSSKDYSEEKVTEYMSKKAQKKALRAAKKLKTQSVSGYSNDSNPFGDSNLTETFVWRKKIEKDVHRGVPLEEFSVKAEKRRHRERMTEVEKVKKRREERAVEKARHEEEMALLARERARAEFHDWEKKEEEFHFDQSKVRSEIRLREGRLKPIDVLCKHLDGSDDLDIELSEPYMVFKGLTVKDMEELRDDIKMYLDLDRATPTRVQYWEALIVVCDWELAEARKRDALDRARVRGEEPPAELLAQERGLHAGVEADVRKLLDGKTHAELVELQLDIESQLRSGSAKVVEYWEAVLKRLEIYKAKACLKEIHAEMLRRPERTSLEGGPG

SEQ ID NO: 10443 - protein, 315 aa, Arabidopsis thaliana
MSKKAQKKALRAAKKLKTQSVSGYSNDSNPFGDSNLTETFVWRKKIEKDVHRGVPLEEFSVKAEKRRHRERMTEVEKVKKRREERAVEKARHEEEMALLARERARAEFHDWEKKEEEFHFDQSKVRSEIRLREGRLKPIDVLCKHLDGSDDLDIELSEPYMVFKGLTVKDMEELRDDIKMYLDLDRATPTRVQYWEALIVVCDWELAEARKRDALDRARVRGEEPPAELLAQERGLHAGVEADVRKLLDGKTHAELVELQLDIESQLRSGSAKVVEYWEAVLKRLEIYKAKACLKEIHAEMLRRPERTSLEGGPG

SEQ ID NO: 10444 - protein, 244 aa, Arabidopsis thaliana
MTEVEKVKKRREERAVEKARHEEEMALLARERARAEFHDWEKKEEEFHFDQSKVRSEIRLREGRLKPIDVLCKHLDGSDDLDIELSEPYMVFKGLTVKDMEELRDDIKMYLDLDRATPTRVQYWEALIVVCDWELAEARKRDALDRARVRGEEPPAELLAQERGLHAGVEADVRKLLDGKTHAELVELQLDIESQLRSGSAKVVEYWEAVLKRLEIYKAKACLKEIHAEMLRRPERTSLEGGPG

SEQ ID NO: 10445 - DNA, 1169 bp, Arabidopsis thaliana
acatctctcaccatcttcaccattgtcgaaacatatcgaaaacgctaaaaccgagagagaaaggaaaacatgaggaataaatcccaatcattcatcagctcaaagcttatattcatttgttgctcaatcttggtgttgttcattctcttcttgaaaagagcaagcttctcttccaattcaaccgcaaccattcgagacgaatatcaccagaaatcgaagtgcccatcaaccccacaacaatgcaccaaattgcccacttctctatccgacgcattggttcactatgtcacctcagagatcacaccacaacaaacgtttgatgaagtctcagtctcaaagagagtcttggacaagaagtctccttgtaacttcctcgtctttggcttaggacacgatagcttgatgtgggcatctctcaatcacggtggacgcactttgttcctcgaggaagatgaagcttggattgagacagtaactaagaaattcccaaacttggaatcctaccacgtcgtatacgacacaaaagtgaaagattccaacaagcttatggagctaaagagaacagaggattgcaaagccgtgtctgatcctagagattccaaatgtgctctgtctctcaagggttttccagctgacgtgtacgagacgcaatgggatgtgataatggtcgatgctcccactggttaccacgatgaagctccagggaggatgagcgctatttacactgcgggtttattggctcgtaaccgttatgacggtggggagactgatgttttcgttcacgatattaaccggccggtggaggacgagttctcggtggcgttcttgtgtggagggtacatgaaagagcagcaaggaagacttaggcatttcaacatccctagccaccgggctagcttcggtacaccgttttgtccggcggatatcagtcgccgcttttgatattgtacaatgagagaaaagtgcaaagaacaataacaagaaaacttggcaaaggactttgaagttgcggaaatgagaattcgatattgatctagtttattctatcaaattagtaaaacttcaaatatacttttgccattttatgtttcgtatgatacaattaatcaagaagaaaagagagatatattttaatacatacgttgtgtgtcaatcttatgcctttaagc

SEQ ID NO: 10446 - protein, 290 aa, Arabidopsis thaliana
MRNKSQSFISSKLIFICCSILVLFILFLKRASFSSNSTATIRDEYHQKSKCPSTPQQCTKLPTSLSDALVHYVTSEITPQQTFDEVSVSKRVLDKKSPCNFLVFGLGHDSLMWASLNHGGRTLFLEEDEAWIETVTKKFPNLESYHVVYDTKVKDSNKLMELKRTEDCKAVSDPRDSKCALSLKGFPADVYETQWDVIMVDAPTGYHDEAPGRMSAIYTAGLLARNRYDGGETDVFVHDINRPVEDEFSVAFLCGGYMKEQQGRLRHFNIPSHRASFGTPFCPADISRRF

SEQ ID NO: 10447 - protein, 179 aa, Arabidopsis thaliana
MWASLNHGGRTLFLEEDEAWIETVTKKFPNLESYHVVYDTKVKDSNKLMELKRTEDCKAVSDPRDSKCALSLKGFPADVYETQWDVIMVDAPTGYHDEAPGRMSAIYTAGLLARNRYDGGETDVFVHDINRPVEDEFSVAFLCGGYMKEQQGRLRHFNIPSHRASFGTPFCPADISRRF

SEQ ID NO: 10448 - DNA, 564 bp, Arabidopsis thaliana
tagtccccccccccccccccccaaaaagttttatcgattccaccaaattagggcgaacgcgaaatctgggtattgtaatttgaagcgatggcgacgactggaactgctgcggttgcgacgggaacttcgacggtgaagagaaaaccggtgtttgtgaaggtggaacagctaaagcctggaacgactggtcacacgttgactgttaaagtcattgaggctaatatcgtggttcctgttacccggaagactcgtccagcgagttctctgagtcgtccttctcagcctagtcgaatcgttgagtgtctcatcggtgacgaaactgggtgtatcctcttcactgctcgtaacgatcaaggttattgtttctccacttttctcttgctttatggatatagaaatggtgtcttcgtagtttattagagtgataagtcttatcctttgttgttctctcgtttgtcttaatcaatttctattttgagcaaaaaaaaaaaaaaaaaaaactcgagggggggcccggtacccaattgttaaacacaataaagtgggaactggaggggggaaagg

SEQ ID NO: 10449 - protein, 110 aa, Arabidopsis thaliana
MATTGTAAVATGTSTVKRKPVFVKVEQLKPGTTGHTLTVKVIEANIVVPVTRKTRPASSLSRPSQPSRIVECLIGDETGCILFTARNDQGYCFSTFLLLYGYRNGVFVVY

SEQ ID NO: 10450 - DNA, 1563 bp, Arabidopsis thaliana
gaatgaaaatttctctcgcacggagaagaagatcgaattgacctgggtttttccttactctctaagaaaaaccactactttggttaattgggaagacagagagattcgtaatccatggataagcctctgctttcaggatcagagaaaacgaatgaatccgagaggttggattcataccaatacctgcagagaaatagctcatctgctcgtaacccatctttcgccggagctggcgtcgtcaccgtcgaagaaatccgtaccgcttctgctgtttcttctgatcctccgtctctttatcctcccgttatcaagacccctgtttcgttacccattcctcaagctattggttatccaagtgcatctggagcaggtcatgaattgcaacaaaggcagtttcttgatgagattgaaataagagagctgcttattgatcatattggtcatcgttgctgttggggaagccgtcctgctcgtacatggaagattcatgctgttgaagactgcaatgtttatgtcggaactcttgatactttcattgaggagagggaagctttgacacagactgtgcctttcactggtggtgaattcaatggaaagaaacatggatctgaaccggggttatgggaactggacctgagaccgcagtttcctactctgtttgtcccgtataaagaaactcaagtcctggttcctaattctgagactgttgagaagtgcacaggttgcaccggaagaggagatgtagtatgtccaacatgcaatgctgatggagagccaggattttacaaggagaatcagatgatgaagtgttccacttgctatggaagaggcttggttgctcataaagatgggtccgacacaatatgcaccaactgtaacggtaagggaaagcttccttgcccaacttgccaatctcgcgggttaatcaaatgtcagacttgtgacagtactggttctcttctgacaagtagtatcgcagttgtaaaatggaagactctgtcgaagcgaaaggtgagtgcaacaagaggagctgggtcagtaccagaagaagtatttgacagagcagaaggagttcagctttgcaacacacaagcttaccagtgcacgccagcttactttgcagactcatatttcctcaacagattctcctcagaagttatctcgttaagagctgaagttccaccgacagcgaatgtagtatgtgagagacacaccatatctgttgtgcctgtgactcgtgtcaccatggaagatcgtgggaaagcgttcagcttttacataatcggttttggtaaggagatatacttgaaagattattacccagcaagattctgttggggtttgtgtccctgtcttgagtggttaaaggtttgaaaaaccagagttgatctttgttcttctctacttgaatgtaaagagacaagatagagtgtagtcaatgtgtttgaatattagtgtggattgagagctttagagagaaaatcaaactggatttctagaccttgcgagctttaaattgttttatggtgcaaaatatgaagtcaataagattaaaataaacgt

SEQ ID NO: 10451 - protein, 419 aa, Arabidopsis thaliana
MDKPLLSGSEKTNESERLDSYQYLQRNSSSARNPSFAGAGVVTVEEIRTASAVSSDPPSLYPPVIKTPVSLPIPQAIGYPSASGAGHELQQRQFLDEIEIRELLIDHIGHRCCWGSRPARTWKIHAVEDCNVYVGTLDTFIEEREALTQTVPFTGGEFNGKKHGSEPGLWELDLRPQFPTLFVPYKETQVLVPNSETVEKCTGCTGRGDVVCPTCNADGEPGFYKENQMMKCSTCYGRGLVAHKDGSDTICTNCNGKGKLPCPTCQSRGLIKCQTCDSTGSLLTSSIAVVKWKTLSKRKVSATRGAGSVPEEVFDRAEGVQLCNTQAYQCTPAYFADSYFLNRFSSEVISLRAEVPPTANVVCERHTISVVPVTRVTMEDRGKAFSFYIIGFGKEIYLKDYYPARFCWGLCPCLEWLKV

SEQ ID NO: 10452 - DNA, 3205 bp, Arabidopsis thaliana
gatgcttcggtgttggtcagtcaccgtcgagagatcatgcgaaggaatgctcctcaggcggaggatactatcgctctctgcgtcgtcgttcagaaactttacttccggtaacaacggcgacgctattccgttctctaccttcacgaaaccttcttcttcaatcgctcccggagatttcctcgtccgtgaatggaaagactggtttaagcatcgagatgtgaaacagagccaccaattaatcgatcgaatctttgacatccttcgagctccttctaacgatggagacgatagagctttttatctccacctctccaatctccgacttcgtctcactgagaaattcgtcctcgacgtgctttcacacactcgttacgatatcctctgttgtctcaaattcttcgattgggctgctcgtcagcctgggtttcatcacacgcgtgctacttttcatgctatcttcaagatccttcgtggtgcgaagcttgtgactcttatgattgactttttggatcgaagtgttggttttgaaagttgccgtcattctcttcgtctctgtgatgctcttgttgttggttatgctgtagctggtcgtactgatatagctcttcagcattttggtaatatgagatttcgaggtttggatttggattcttttgggtatcatgtgcttttgaatgcacttgttgaggagaagtgttttgatagttttgatgtcatcttcgaccagatctccgtgcgtggcttcgtatgtgctgttacgcattcgattttggtgaagaagttttgcaagcaagggaagcttgatgaggctgaagattatcttcgagccttgctgcctaatgatcctgctggatgtggttctggcttaggtatattggttgatgctctatgttccaaacgaaagtttcaggaagctactaagttgttagacgagatcaaactggtgggaacagtgaatatggaccgtgcttataacatttggattagggcgcttattaaagctggattcttgaataaccctgcggatttcttgcagaagattagtcctttggaaggttgtgaactcgaagttttcaggtataactctatggtctttcaacttttgaaggagaacaatcttgatggtgtgtatgatattcttacggagatgatggtacgtggagtttcgccgaataagaaaacgatgaatgctgctttatgcttcttttgcaaagctggatttgtagatgaagccctcgagttataccggtcgaggtcagaaattgggtttgctcctaccgccatgtcttacaactatctgattcataccctttgtgccaatgaaagtgttgaacaagcttatgatgtcttgaaaggggcaattgaccgagggcattttcttggtggaaagacatttagtacactaaccaatgccttgtgctggaaggggaagcctgacatggcaagggagctggttattgctgccgctgaacgggacttattgcctaaacgtatagctggttgcaagattatatcagctctttgcgatgttgggaaagtggaggacgctcttatgattaatgagctattcaataaaagtggtgtagacacctcctttaaaatgttcaccagtttgatatatggctcaatcacactaatgaggggagacatagctgctaaacttatcatcaggatgcaggaaaagggctacaccccgacccgtagtctctatcgaaatgttattcaatgtgtttgtgagatggaaagtggtgaaaaaaacttctttactactttgctaaagtttcagttgtctctttgggaacacaaggttcaggcctacaacttattcattgaaggagctgggtttgcaggaaaaccaaaacttgcaagactagtgtatgatatgatggatagagatggtatcacgcccacagtagcttcaaacattctcatgcttcagagttatctaaaaaatgagaaaatcgccgatgctcttcactttttccatgacctgcgtgaacaaggtaagaccaaaaaaagactgtaccaagttatgattgttggtctctgtaaagcaaataaattggatgatgctatgcatttcttggaagaaatgaagggagaaggactacagcctagtatcgaatgttacgaagtaaacatacaaaaattgtgcaacgaagaaaagtatgatgaggcagttggattagtcaatgaatttaggaaaagtgggcgtcgtattacagctttcataggtaatgtccttttgcataacgcaatgaagagcaaaggggtgtatgaagcatggacacggatgagaaatatagaagataagatccctgagatgaagtcacttggtgagttgataggattattctcaggacgaatagatatggaagtagaactgaagcggttagatgaagttatagagaaatgctatcctcttgatatgtacacgtacaatatgctgttgagaatgattgtaatgaaccaggcggaagatgcatatgagatggttgaaagaatagctcggagaggatatgtgcctaatgaacggactgacatgatccttgaacgggctaaccgcatactagaggaacggaattcaaggtcaaacttagggaggaatggttggaatagtagacagaggcaacttgaatgatgaaaagtatgtcacagagaggtcagaattgttgaatagagagaacaagggagttgatttggattcagtatctgttttgggatttggatcatggacaacagatgaatgagaaaagccagattcttcttcttgaggctttatatgtcctggacgttgtaacttgcaggagcttttttatctctggattgcaaaagatcgatggtattttcccagaagctttttgtttttttttaagtaaagatcgatgtgtcactaaagacacttacagaattgggtagtatccattatgtacacaattgtttgtagtctttccaagaaacacacaagaattgggtagtatccattatgtacacaattgtttgtagtctttcctagaaacacacaagttttgttgtgcgacacaactactcagagagagatttcaacaattttttgtcatattctttatgtgttgcctgttggtaaggaaaatcaatggtggtcgcccgccttgtttcgaaaattggtgtttgtaattacatttgtttactagttctagtaatgatgaatcttcttattttgttg

SEQ ID NO: 10453 - protein, 879 aa, Arabidopsis thaliana
MLRCWSVTVERSCEGMLLRRRILSLSASSFRNFTSGNNGDAIPFSTFTKPSSSIAPGDFLVREWKDWFKHRDVKQSHQLIDRIFDILRAPSNDGDDRAFYLHLSNLRLRLTEKFVLDVLSHTRYDILCCLKFFDWAARQPGFHHTRATFHAIFKILRGAKLVTLMIDFLDRSVGFESCRHSLRLCDALVVGYAVAGRTDIALQHFGNMRFRGLDLDSFGYHVLLNALVEEKCFDSFDVIFDQISVRGFVCAVTHSILVKKFCKQGKLDEAEDYLRALLPNDPAGCGSGLGILVDALCSKRKFQEATKLLDEIKLVGTVNMDRAYNIWIRALIKAGFLNNPADFLQKISPLEGCELEVFRYNSMVFQLLKENNLDGVYDILTEMMVRGVSPNKKTMNAALCFFCKAGFVDEALELYRSRSEIGFAPTAMSYNYLIHTLCANESVEQAYDVLKGAIDRGHFLGGKTFSTLTNALCWKGKPDMARELVIAAAERDLLPKRIAGCKIISALCDVGKVEDALMINELFNKSGVDTSFKMFTSLIYGSITLMRGDIAAKLIIRMQEKGYTPTRSLYRNVIQCVCEMESGEKNFFTTLLKFQLSLWEHKVQAYNLFIEGAGFAGKPKLARLVYDMMDRDGITPTVASNILMLQSYLKNEKIADALHFFHDLREQGKTKKRLYQVMIVGLCKANKLDDAMHFLEEMKGEGLQPSIECYEVNIQKLCNEEKYDEAVGLVNEFRKSGRRITAFIGNVLLHNAMKSKGVYEAWTRMRNIEDKIPEMKSLGELIGLFSGRIDMEVELKRLDEVIEKCYPLDMYTYNMLLRMIVMNQAEDAYEMVERIARRGYVPNERTDMILERANRILEERNSRSNLGRNGWNSRQRQLE

SEQ ID NO: 10454 - protein, 864 aa, Arabidopsis thaliana
MLLRRRILSLSASSFRNFTSGNNGDAIPFSTFTKPSSSIAPGDFLVREWKDWFKHRDVKQSHQLIDRIFDILRAPSNDGDDRAFYLHLSNLRLRLTEKFVLDVLSHTRYDILCCLKFFDWAARQPGFHHTRATFHAIFKILRGAKLVTLMIDFLDRSVGFESCRHSLRLCDALVVGYAVAGRTDIALQHFGNMRFRGLDLDSFGYHVLLNALVEEKCFDSFDVIFDQISVRGFVCAVTHSILVKKFCKQGKLDEAEDYLRALLPNDPAGCGSGLGILVDALCSKRKFQEATKLLDEIKLVGTVNMDRAYNIWIRALIKAGFLNNPADFLQKISPLEGCELEVFRYNSMVFQLLKENNLDGVYDILTEMMVRGVSPNKKTMNAALCFFCKAGFVDEALELYRSRSEIGFAPTAMSYNYLIHTLCANESVEQAYDVLKGAIDRGHFLGGKTFSTLTNALCWKGKPDMARELVIAAAERDLLPKRIAGCKIISALCDVGKVEDALMINELFNKSGVDTSFKMFTSLIYGSITLMRGDIAAKLIIRMQEKGYTPTRSLYRNVIQCVCEMESGEKNFFTTLLKFQLSLWEHKVQAYNLFIEGAGFAGKPKLARLVYDMMDRDGITPTVASNILMLQSYLKNEKIADALHFFHDLREQGKTKKRLYQVMIVGLCKANKLDDAMHFLEEMKGEGLQPSIECYEVNIQKLCNEEKYDEAVGLVNEFRKSGRRITAFIGNVLLHNAMKSKGVYEAWTRMRNIEDKIPEMKSLGELIGLFSGRIDMEVELKRLDEVIEKCYPLDMYTYNMLLRMIVMNQAEDAYEMVERIARRGYVPNERTDMILERANRILEERNSRSNLGRNGWNSRQRQLE

SEQ ID NO: 10455 - protein, 715 aa, Arabidopsis thaliana
MIDFLDRSVGFESCRHSLRLCDALVVGYAVAGRTDIALQHFGNMRFRGLDLDSFGYHVLLNALVEEKCFDSFDVIFDQISVRGFVCAVTHSILVKKFCKQGKLDEAEDYLRALLPNDPAGCGSGLGILVDALCSKRKFQEATKLLDEIKLVGTVNMDRAYNIWIRALIKAGFLNNPADFLQKISPLEGCELEVFRYNSMVFQLLKENNLDGVYDILTEMMVRGVSPNKKTMNAALCFFCKAGFVDEALELYRSRSEIGFAPTAMSYNYLIHTLCANESVEQAYDVLKGAIDRGHFLGGKTFSTLTNALCWKGKPDMARELVIAAAERDLLPKRIAGCKIISALCDVGKVEDALMINELFNKSGVDTSFKMFTSLIYGSITLMRGDIAAKLIIRMQEKGYTPTRSLYRNVIQCVCEMESGEKNFFTTLLKFQLSLWEHKVQAYNLFIEGAGFAGKPKLARLVYDMMDRDGITPTVASNILMLQSYLKNEKIADALHFFHDLREQGKTKKRLYQVMIVGLCKANKLDDAMHFLEEMKGEGLQPSIECYEVNIQKLCNEEKYDEAVGLVNEFRKSGRRITAFIGNVLLHNAMKSKGVYEAWTRMRNIEDKIPEMKSLGELIGLFSGRIDMEVELKRLDEVIEKCYPLDMYTYNMLLRMIVMNQAEDAYEMVERIARRGYVPNERTDMILERANRILEERNSRSNLGRNGWNSRQRQLE

SEQ ID NO: 10456 - DNA, 2202 bp, Arabidopsis thaliana
ttgaccgttgaccacttcaataccttcgcgcttctcttcttcttcaccaccacacacagccacaatcttttgaattttcctcctcatcatcgtctctctccgatccatggcctttaacaatttcacccgcctcgatgctcactccgccgccgagaaagccgtctctgtaatcggattaggttacgatctctgctccgatgttcgtttctccgcttgtaaaaccacacccgacggttccaggttagtcgaaatcgacccgactcggaaccgtgacttaatcttccccggtggtatcgtcgttaacaacgtctcgagctcgattaagtgcgataaaggcgaacgtactcgattacgctccgatatactctcttttaatcagatgtcggagaagtttaatcaagatatgtgtctctccgggaagattccgtcagggatgtttaataatatgtttgcgtttagtaaatgttggccaaaagatgcgagctctgttaagactttagcttatgatggttggtttattagtttgtatagtgtagagattgttaggaagcagttgacactacgtgatgaagtgaaacgtgaggttccttcttcttgggactctgctgcacttgctgggtttattgagaaatatggtactcatgttgttgttggagtgactatgggaggtaaagatgtcattcatgtgaaacagatgcgtaaatcgaatcatgagcctgaggaaattcagaaaatgttgaagcattggggtgatgaaagattttgtgttgatcctgttgaaagtaaatctcctgcttctgtttattcagggaagccaaaggaggagaatcttctacaatggggacttcaaccgtttggtacctcggttagctctgctgttgtcatgcataccaagaacgaggagattatgagggtttgtatcagaagaggaggtgttgatctggggcaaagtcatgaacgatggctctcaacagtatcacaagcacccaacgttatatcgatgtgttttgttcctataacttcactcttgagcggtctcccaggaacaggatttcttagtcatgcagtgaacttatacctccgatataagccacctatagaagagttgcatcagtttcttgagtttcaacttccacgccaatgggctccagtgtatggagatctccctcttggactacgccgctcgaaacaaagttctccatcccttcagttctctttgatgggtccaaaactatacgtcaacacatcaaaggttgattcaggtgagcgaccagtaaccggactacgcttcttccttgagggaaagaaaggaaatcatctagcaatacatttgcagcacctctctgcatgtcctccaagtctccatctctcacacgatgacacctatgaacccatcgaggaaccagttgaaaaagggtattatgtacctgtgaaatggggaatattctcacacgtttgcacctacccagttcagtacaacggagcacggtctgatgacaccgcctctattgtaaccaaagcctggttagaagtgaaaggaatggggatgaggaaagttctcttcttgaggctcggtttctcactagatgcttcagctgttacacgtaaatcgtgctgggacaatctttcaacaaactcgcgcaaatccggtgttttctcgatgatcagtacaagactaagcacgggattaagtccaaacccggcaacaactaagccacagtctaagattgatataaactctgcagtgtatcctagagggccatcaccgcctgtgaaaccaaagttgctgagtcttgtagacacgaaggaagtgatgagaggtccagaggaacaacctggatattgggttgtgactggtgctaaactttgtgttgaggcaggcaagatctcaatcaaagctaaatactctctgctcactgtcatatcggaagactcactggtctgagagattcatttattcagttccaaatgacagggaggggtgtctaagtagagaacacaagtgtagtgtgcgtgttggattttgacagatttcagtttgtgattagctttaatcagttgtttttgggttgtgaacaaatttatttatctgttgatgtaaatgtttcgttgtatatgatattgttgaattttacatatagtatatatgtattcgtgtagaacatatttggatgaaattgaaccagtttcatttttgttctc

SEQ ID NO: 10457 - protein, 612 aa, Arabidopsis thaliana
MAFNNFTRLDAHSAAEKAVSVIGLGYDLCSDVRFSACKTTPDGSRLVEIDPTRNRDLIFPGGIVVNNVSSSIKCDKGERTRLRSDILSFNQMSEKFNQDMCLSGKIPSGMFNNMFAFSKCWPKDASSVKTLAYDGWFISLYSVEIVRKQLTLRDEVKREVPSSWDSAALAGFIEKYGTHVVVGVTMGGKDVIHVKQMRKSNHEPEEIQKMLKHWGDERFCVDPVESKSPASVYSGKPKEENLLQWGLQPFGTSVSSAVVMHTKNEEIMRVCIRRGGVDLGQSHERWLSTVSQAPNVISMCFVPITSLLSGLPGTGFLSHAVNLYLRYKPPIEELHQFLEFQLPRQWAPVYGDLPLGLRRSKQSSPSLQFSLMGPKLYVNTSKVDSGERPVTGLRFFLEGKKGNHLAIHLQHLSACPPSLHLSHDDTYEPIEEPVEKGYYVPVKWGIFSHVCTYPVQYNGARSDDTASIVTKAWLEVKGMGMRKVLFLRLGFSLDASAVTRKSCWDNLSTNSRKSGVFSMISTRLSTGLSPNPATTKPQSKIDINSAVYPRGPSPPVKPKLLSLVDTKEVMRGPEEQPGYWVVTGAKLCVEAGKISIKAKYSLLTVISEDSLV

SEQ ID NO: 10458 - protein, 521 aa, Arabidopsis thaliana
MSEKFNQDMCLSGKIPSGMFNNMFAFSKCWPKDASSVKTLAYDGWFISLYSVEIVRKQLTLRDEVKREVPSSWDSAALAGFIEKYGTHVVVGVTMGGKDVIHVKQMRKSNHEPEEIQKMLKHWGDERFCVDPVESKSPASVYSGKPKEENLLQWGLQPFGTSVSSAVVMHTKNEEIMRVCIRRGGVDLGQSHERWLSTVSQAPNVISMCFVPITSLLSGLPGTGFLSHAVNLYLRYKPPIEELHQFLEFQLPRQWAPVYGDLPLGLRRSKQSSPSLQFSLMGPKLYVNTSKVDSGERPVTGLRFFLEGKKGNHLAIHLQHLSACPPSLHLSHDDTYEPIEEPVEKGYYVPVKWGIFSHVCTYPVQYNGARSDDTASIVTKAWLEVKGMGMRKVLFLRLGFSLDASAVTRKSCWDNLSTNSRKSGVFSMISTRLSTGLSPNPATTKPQSKIDINSAVYPRGPSPPVKPKLLSLVDTKEVMRGPEEQPGYWVVTGAKLCVEAGKISIKAKYSLLTVISEDSLV

SEQ ID NO: 10459 - protein, 513 aa, Arabidopsis thaliana
MCLSGKIPSGMFNNMFAFSKCWPKDASSVKTLAYDGWFISLYSVEIVRKQLTLRDEVKREVPSSWDSAALAGFIEKYGTHVVVGVTMGGKDVIHVKQMRKSNHEPEEIQKMLKHWGDERFCVDPVESKSPASVYSGKPKEENLLQWGLQPFGTSVSSAVVMHTKNEEIMRVCIRRGGVDLGQSHERWLSTVSQAPNVISMCFVPITSLLSGLPGTGFLSHAVNLYLRYKPPIEELHQFLEFQLPRQWAPVYGDLPLGLRRSKQSSPSLQFSLMGPKLYVNTSKVDSGERPVTGLRFFLEGKKGNHLAIHLQHLSACPPSLHLSHDDTYEPIEEPVEKGYYVPVKWGIFSHVCTYPVQYNGARSDDTASIVTKAWLEVKGMGMRKVLFLRLGFSLDASAVTRKSCWDNLSTNSRKSGVFSMISTRLSTGLSPNPATTKPQSKIDINSAVYPRGPSPPVKPKLLSLVDTKEVMRGPEEQPGYWVVTGAKLCVEAGKISIKAKYSLLTVISEDSLV

SEQ ID NO: 10460 - DNA, 883 bp, Arabidopsis thaliana
ggtctcagtcactctcacacaagttacttttctccggtgatccaaatcctgcttcagtctctggacttgtttttttttcttctaagtgaccctttttgaccagattagctcaaatacttgacacaaagagttcctgcaacttcaatggcttccggtgacgtacttcctcgcttctacactgtctttctttcctgtgtcagttccaactctttgctgataccaaggtcttactacgaacatttaccgcgtcgtttacccaaaacagcgattctcacgggaactggtggaagagtttggaaagtagcaatgatgagcaagcgagagcaagtgtatttggcacgaggctgggaaaatttcgtggccgataacgagctaaaagatggagagttcttgacgtttgtttttgatgggtacaaaagttatgaagtaagtatctatggtcgcggtagctgcaaagagacgcgagcagtcgttcatgttgaagagatctctgatgagtcagaaagtgacaacgattctcttggtagccttgttgacgtaacacccatgccagcggaagagaactctgatgatactgaaggtgacaatgattcttgtgatagcgttgttgacgtaactcccatgccagtggaagagataagtgatgcaagtgagagtgactattattaaatcatctgattgatgctgaactattcgtatgtttaattcacttttcctctgtggacatgaattctcttgtatcacttcatccctgaagttgttttcgtcattgttaggattataaactctatttgtatctgagaaattgccactattaccagaagtttaaacaatggtttaatgaaaaaaaaaaaaaaaaaaaactcgagggggggcccggtac

SEQ ID NO: 10461 - protein, 174 aa, Arabidopsis thaliana
MASGDVLPRFYTVFLSCVSSNSLLIPRSYYEHLPRRLPKTAILTGTGGRVWKVAMMSKREQVYLARGWENFVADNELKDGEFLTFVFDGYKSYEVSIYGRGSCKETRAVVHVEEISDESESDNDSLGSLVDVTPMPAEENSDDTEGDNDSCDSVVDVTPMPVEEISDASESDYY

SEQ ID NO: 10462 - protein, 120 aa, Arabidopsis thaliana
MMSKREQVYLARGWENFVADNELKDGEFLTFVFDGYKSYEVSIYGRGSCKETRAVVHVEEISDESESDNDSLGSLVDVTPMPAEENSDDTEGDNDSCDSVVDVTPMPVEEISDASESDYY

SEQ ID NO: 10463 - protein, 119 aa, Arabidopsis thaliana
MSKREQVYLARGWENFVADNELKDGEFLTFVFDGYKSYEVSIYGRGSCKETRAVVHVEEISDESESDNDSLGSLVDVTPMPAEENSDDTEGDNDSCDSVVDVTPMPVEEISDASESDYY

SEQ ID NO: 10464 - DNA, 1604 bp, Arabidopsis thaliana
agctctcattttctctctcatcttcaaccttaactctcttttctctctactctttctttggacgaatctgtctattgtttgtaagttttcaaggaaggtaaagaaacagagagatctaacttcgtctgcagggtttaagcagaggttggtttgtggattcttcgatttcttcttcagatttagtctacaatgaagtgagaatttctaaagataaacaaagaaaaacttgagactttagcaagatggagactgtgagaccaatggttgttgctcctaagggtaacaaactcagacgcaagtttgctaaagttcttaacattcataagctaacgggtgttgctccagaaggagaaatgaagaagataaagttcgattccaaaaccgctaagttgtctgagtcgttctacaagcttgaggaagagtatgagagaagtcagggattggaagctcttcttgcgaagctttttgctacggtttcttcgatcaaagcggcttatgcgcagttacagcattctcagtctccgtatgactctatcgggattcaaaaagcagataacttggtagtcgccgagcttaagactttgtctgagctgaaacaatgtttcatgaagaaacaagtggatccaaatcccgaaagaactctggttctcgcggagattcaagagctgaggagtctattgaaaacgtatgagataatggggaagaagctggagtctcagtacaagcttaaagactcagagattatatttctgagagagaaacttgatgaatcgatgaaacagaacaagttgacagagaagagacttaaccaaagcggacaactttgcaatccacttgacaatcttcacctatctgcgctaaatccaacacatttcgttacttatctgcaccacacagtcaagtccaccagaggtttcgtcaagctaatgatcgaacaaatgaaactcgctggatgggatatttcatcagctgctaattcgatccatcccggtgtgttctactacaagcaagaccacaagtgtttcactttcgaacactttgtctccaatgtgatgttcgaagcgtttcatctaccgtacttctcaacttcaagcgagtcaagaagctacaagaagaagaaacagagcaatgcagatagagaaatgttctttgaaaggtttaaagaactcaggtcgatgaaagcgaaagattatctaaccgcgaggcctaaatcaagattcgctaggttctgtcgagccaagtacttgcagcttatacatccaaagatggagcaagctttcttcggacatttgcatttgagaaaccaagtttctgctggtgaattcccggagacgagcttattctctggatttcttgaaatggcgaaacgaatttggcttttgcattgcttggctctctcttttgaacgtgaagctgagatctttcgagtacctaaaggttgtagattctctgaagtgtatatgaagagtgtagcagaagaagcgtttttcccggcggcggagagttcgccggagtctgagccacgtgtcgcgttcacggttgttccagggtttagaattgggaagacttcaatacaatgcgaggtctatctctcgctttcatga

SEQ ID NO: 10465 - protein, 453 aa, Arabidopsis thaliana
METVRPMVVAPKGNKLRRKFAKVLNIHKLTGVAPEGEMKKIKFDSKTAKLSESFYKLEEEYERSQGLEALLAKLFATVSSIKAAYAQLQHSQSPYDSIGIQKADNLVVAELKTLSELKQCFMKKQVDPNPERTLVLAEIQELRSLLKTYEIMGKKLESQYKLKDSEIIFLREKLDESMKQNKLTEKRLNQSGQLCNPLDNLHLSALNPTHFVTYLHHTVKSTRGFVKLMIEQMKLAGWDISSAANSIHPGVFYYKQDHKCFTFEHFVSNVMFEAFHLPYFSTSSESRSYKKKKQSNADREMFFERFKELRSMKAKDYLTARPKSRFARFCRAKYLQLIHPKMEQAFFGHLHLRNQVSAGEFPETSLFSGFLEMAKRIWLLHCLALSFEREAEIFRVPKGCRFSEVYMKSVAEEAFFPAAESSPESEPRVAFTVVPGFRIGKTSIQCEVYLSLS

SEQ ID NO: 10466 - protein, 447 aa, Arabidopsis thaliana
MVVAPKGNKLRRKFAKVLNIHKLTGVAPEGEMKKIKFDSKTAKLSESFYKLEEEYERSQGLEALLAKLFATVSSIKAAYAQLQHSQSPYDSIGIQKADNLVVAELKTLSELKQCFMKKQVDPNPERTLVLAEIQELRSLLKTYEIMGKKLESQYKLKDSEIIFLREKLDESMKQNKLTEKRLNQSGQLCNPLDNLHLSALNPTHFVTYLHHTVKSTRGFVKLMIEQMKLAGWDISSAANSIHPGVFYYKQDHKCFTFEHFVSNVMFEAFHLPYFSTSSESRSYKKKKQSNADREMFFERFKELRSMKAKDYLTARPKSRFARFCRAKYLQLIHPKMEQAFFGHLHLRNQVSAGEFPETSLFSGFLEMAKRIWLLHCLALSFEREAEIFRVPKGCRFSEVYMKSVAEEAFFPAAESSPESEPRVAFTVVPGFRIGKTSIQCEVYLSLS

SEQ ID NO: 10467 - protein, 416 aa, Arabidopsis thaliana
MKKIKFDSKTAKLSESFYKLEEEYERSQGLEALLAKLFATVSSIKAAYAQLQHSQSPYDSIGIQKADNLVVAELKTLSELKQCFMKKQVDPNPERTLVLAEIQELRSLLKTYEIMGKKLESQYKLKDSEIIFLREKLDESMKQNKLTEKRLNQSGQLCNPLDNLHLSALNPTHFVTYLHHTVKSTRGFVKLMIEQMKLAGWDISSAANSIHPGVFYYKQDHKCFTFEHFVSNVMFEAFHLPYFSTSSESRSYKKKKQSNADREMFFERFKELRSMKAKDYLTARPKSRFARFCRAKYLQLIHPKMEQAFFGHLHLRNQVSAGEFPETSLFSGFLEMAKRIWLLHCLALSFEREAEIFRVPKGCRFSEVYMKSVAEEAFFPAAESSPESEPRVAFTVVPGFRIGKTSIQCEVYLSLS

SEQ ID NO: 10468 - DNA, 1766 bp, Arabidopsis thaliana
atctctcgtcttcaccattcttctcacttcttcttttctccttatatttcatttcttccacataactaaaaaaaaaggaattagcgatgaggggaggtgatggagaagaaggatcggagtcaagagttgcactgttgaaaagtcctcacacggcggaggaagacggtgaaggattgaaggatagaattttggttgagacaaaaaagctatggcaaatagttggtccggccatattcagtcgagtaacgacatattcgatgcttgtaatcactcaagctttcgctggtcatctcggcgatcttgaactcgccgccatatccatcgttaataacgtcaccgttggcttcaactttggcctcttgcttggaatggcgagtgcgttggaaacgctgtgtggacaagcgtttggagcgaagaaatatcatatgttgggagtttatatgcagcgttcttggattgttctcttcttttgctgtgtcttgttattaccaacttatattttcactactccggttcttaaatttcttggtcaaccggacgatatcgctgagctgtccggtgttgtcgccatttgggtcataccgcttcatttcgccttcactttgtcttttccccttcaacgtttccttcagtgccagctcaaaaaccgagtgactgcgtatgcggcagcggttgcattggtggttcatattttagtgtgttggttgttcgtggacgggcttaaactaggagtcgtggggactgtagctacgattagtatctcgtggtgggtcaatgttcttattctgttagtttactctacttgtggtggttgtccgcttacttggaccggcttatcctctgaagccttaaccggactttgggaattccttaaactctctgcttcttcaggcgtcatgctctgtttggagaattggtattatcggattttgattataatgactgggaatcttcaaaatgctcgaatcgccgttgactccttgtccatatgcatggcgataaatggttgggagatgatgatacctctcgctttcttcgccggaaccggtgtccgtgtggcgaacgaattaggagctggtaatggtaaaggagcaagatttgcgacgattgtatcggtaacacaatcgttgataatcggattgtttttttgggtgctaataatgcttctccataaccaaatcgcatggatcttctcttcgagtgtagccgtcttagacgccgtcaataaactctcacttctgctagctttcaccgttcttcttaacagcgttcaaccggttctttccggtgtggcggttggatcgggttggcaatcgtacgtggcatatataaacttgggatgttactattgcattggtgttccacttgggtttctcatgggctggggttttaaactcggtgtcatgggaatttggggtggtatgatttttggaggaaccgctgttcaaaccatgatcttaagttttatcacaatgagatgtgactgggaaaaagaggcgcagaaagcaagtgctcgtattaacaaatggtccaacacaataaaatgattcaagattttgttgaatcaactattaaataattttgcagcataatatggttttggaaaactggtgtatgttttgtatccaaatgtgatacaacatatttagagccggttcatagattacataggatcgctgcaattactgcaaaatggcctttgtgattttctttttatagcatgccttgtaatattattagataaaactgctttattttaatttagt

SEQ ID NO: 10469 - protein, 486 aa, Arabidopsis thaliana
MRGGDGEEGSESRVALLKSPHTAEEDGEGLKDRILVETKKLWQIVGPAIFSRVTTYSMLVITQAFAGHLGDLELAAISIVNNVTVGFNFGLLLGMASALETLCGQAFGAKKYHMLGVYMQRSWIVLFFCCVLLLPTYIFTTPVLKFLGQPDDIAELSGVVAIWVIPLHFAFTLSFPLQRFLQCQLKNRVTAYAAAVALVVHILVCWLFVDGLKLGVVGTVATISISWWVNVLILLVYSTCGGCPLTWTGLSSEALTGLWEFLKLSASSGVMLCLENWYYRILIIMTGNLQNARIAVDSLSICMAINGWEMMIPLAFFAGTGVRVANELGAGNGKGARFATIVSVTQSLIIGLFFWVLIMLLHNQIAWIFSSSVAVLDAVNKLSLLLAFTVLLNSVQPVLSGVAVGSGWQSYVAYINLGCYYCIGVPLGFLMGWGFKLGVMGIWGGMIFGGTAVQTMILSFITMRCDWEKEAQKASARINKWSNTIK

SEQ ID NO: 10470 - protein, 429 aa, Arabidopsis thaliana
MLVITQAFAGHLGDLELAAISIVNNVTVGFNFGLLLGMASALETLCGQAFGAKKYHMLGVYMQRSWIVLFFCCVLLLPTYIFTTPVLKFLGQPDDIAELSGVVAIWVIPLHFAFTLSFPLQRFLQCQLKNRVTAYAAAVALVVHILVCWLFVDGLKLGVVGTVATISISWWVNVLILLVYSTCGGCPLTWTGLSSEALTGLWEFLKLSASSGVMLCLENWYYRILIIMTGNLQNARIAVDSLSICMAINGWEMMIPLAFFAGTGVRVANELGAGNGKGARFATIVSVTQSLIIGLFFWVLIMLLHNQIAWIFSSSVAVLDAVNKLSLLLAFTVLLNSVQPVLSGVAVGSGWQSYVAYINLGCYYCIGVPLGFLMGWGFKLGVMGIWGGMIFGGTAVQTMILSFITMRCDWEKEAQKASARINKWSNTIK

SEQ ID NO: 10471 - protein, 392 aa, Arabidopsis thaliana
MASALETLCGQAFGAKKYHMLGVYMQRSWIVLFFCCVLLLPTYIFTTPVLKFLGQPDDIAELSGVVAIWVIPLHFAFTLSFPLQRFLQCQLKNRVTAYAAAVALVVHILVCWLFVDGLKLGVVGTVATISISWWVNVLILLVYSTCGGCPLTWTGLSSEALTGLWEFLKLSASSGVMLCLENWYYRILIIMTGNLQNARIAVDSLSICMAINGWEMMIPLAFFAGTGVRVANELGAGNGKGARFATIVSVTQSLIIGLFFWVLIMLLHNQIAWIFSSSVAVLDAVNKLSLLLAFTVLLNSVQPVLSGVAVGSGWQSYVAYINLGCYYCIGVPLGFLMGWGFKLGVMGIWGGMIFGGTAVQTMILSFITMRCDWEKEAQKASARINKWSNTIK

SEQ ID NO: 10472 - DNA, 807 bp, Arabidopsis thaliana
tccccccccccccgattgtaccattttatgctcttgttctgtctgattaggtaaacatcgtttgtggaccaaatttgagagcgaaatgagggtattttctggatttgatggctggataaatcagaacattcaagaacctcctaaggctgagtccagatctgtggatgttaatactaattcagtgtcagaaaaagatagtaataatcaagaactactctatgacaaagaggaaatgaagaagcaatatgaactttggagtgcttcagagaagaagcatccatggtatgatgcccctccgaaggtcaaggcaaaatataaaaaagaaaaaatgatgttcatgaaagtattcgaaggtacttataaagtggagccactatatgtagattcagtacgcttgtgcaagaacaaggagccaaagagtcttcaagaatacaaaacatgtagtggcggacaaggaaggattgcatcgaaagtaacaatggaccaaatactttcagccatatcctccttttaatctaccaccattttcttggttcatccgtgatatcaccattaggaccaccataactctgctcaaaatgcttcaacatgcgagtgtcgtgttgcgagactaagtctagataataacgactttataaagacttcaagcaacaaacatagaaaactataacttgaatacgcatatgtatctttttttgtttatttttctatcaacgaatacgcatataggtaagtatcttaattttatttattttaaaaaaagaaaaaaaaaaaaaaaaaaactcgagggggggcccggtacccaat

SEQ ID NO: 10473 - protein, 142 aa, Arabidopsis thaliana
MRVFSGFDGWINQNIQEPPKAESRSVDVNTNSVSEKDSNNQELLYDKEEMKKQYELWSASEKKHPWYDAPPKVKAKYKKEKMMFMKVFEGTYKVEPLYVDSVRLCKNKEPKSLQEYKTCSGGQGRIASKVTMDQILSAISSF

SEQ ID NO: 10474 - protein, 93 aa, Arabidopsis thaliana
MKKQYELWSASEKKHPWYDAPPKVKAKYKKEKMMFMKVFEGTYKVEPLYVDSVRLCKNKEPKSLQEYKTCSGGQGRIASKVTMDQILSAISSF

SEQ ID NO: 10475 - DNA, 1359 bp, Arabidopsis thaliana
gagagagagagagctcactagtcccccccccccccccccggtggcgaagagctaataaatagattcagaggagaaatagagagagacagagagcgagggacaaaaaaaaatcgattgataatttttttcggcagagtcgagaaaattttgatatattaatatccgtaattccttaaaaagcctcctcttcgtcttcttcttcttctcctccccagtttcgcatcattctcttcgataaccgccacatcctctgaaaccctaatctggagaatcgccgccttctccagaaaatatctatttctataccttgttcgtttgatttccagatactgatgaaaccggatcggatctttctctagatccgttctaggtttatcgatttctttctatcaatctctcgcatccggatgctttttgcaagttcttgaagcggattcatcataaatcgacagagaaatgtcgcaggctccgaatccagaagaagaagacgacacgattgaaatccgcgaggtctggaaccataaccttgaacaagagatggctctgattgaacaatccatcgacgatttcccttacgtagccatggacacagagttcccaggaatcgtttgcaagacagtaacggcgaatccaaacccaaacccatactctatacactacgaatacaactacgataccttgaaggcgaacgtgaatatgctcaagttgattcagctcggtctcaccttatcagatgagaaaggaaacttaccaacctgtggaaccaacaagcaatgcatctggcaattcaatttcagagaattcaatgtcatatccgacatgttcgccttggattccatcgaactcctccgtaagtcagccatcgatttggagaagaacaacgaatgcggtgtagacgcaaagagattcgcagagcttctaatgggttcaggagtagtgctaaacgataagatacattgggtgacattccattgcggatacgattttgggtacttgctgaaactcttgtcagggaaagaattgccggaggagatatcggacttctttgatcagatggagaagtttttcccggtagtgtatgatatcaaatacttgatgggattctgtactaacctctatggaggtctggagaaaatagcggagttacttggtgttaaacgagttgggatttctcaccaggctggatcagatagcttgttaacgttgcgtactttcatcaagatgaaagagttcttcttcactggttccttgctcaagtattctggttttttgtttggattagataatcctcggttgctcactggatccaaaaattaaaatcaaaaaaaaaaaaaaaaaaaactcgagggggggcccggt

SEQ ID NO: 10476 - protein, 286 aa, Arabidopsis thaliana
MSQAPNPEEEDDTIEIREVWNHNLEQEMALIEQSIDDFPYVAMDTEFPGIVCKTVTANPNPNPYSIHYEYNYDTLKANVNMLKLIQLGLTLSDEKGNLPTCGTNKQCIWQFNFREFNVISDMFALDSIELLRKSAIDLEKNNECGVDAKRFAELLMGSGVVLNDKIHWVTFHCGYDFGYLLKLLSGKELPEEISDFFDQMEKFFPVVYDIKYLMGFCTNLYGGLEKIAELLGVKRVGISHQAGSDSLLTLRTFIKMKEFFFTGSLLKYSGFLFGLDNPRLLTGSKN

SEQ ID NO: 10477 - protein, 259 aa, Arabidopsis thaliana
MALIEQSIDDFPYVAMDTEFPGIVCKTVTANPNPNPYSIHYEYNYDTLKANVNMLKLIQLGLTLSDEKGNLPTCGTNKQCIWQFNFREFNVISDMFALDSIELLRKSAIDLEKNNECGVDAKRFAELLMGSGVVLNDKIHWVTFHCGYDFGYLLKLLSGKELPEEISDFFDQMEKFFPVVYDIKYLMGFCTNLYGGLEKIAELLGVKRVGISHQAGSDSLLTLRTFIKMKEFFFTGSLLKYSGFLFGLDNPRLLTGSKN

SEQ ID NO: 10478 - protein, 244 aa, Arabidopsis thaliana
MDTEFPGIVCKTVTANPNPNPYSIHYEYNYDTLKANVNMLKLIQLGLTLSDEKGNLPTCGTNKQCIWQFNFREFNVISDMFALDSIELLRKSAIDLEKNNECGVDAKRFAELLMGSGVVLNDKIHWVTFHCGYDFGYLLKLLSGKELPEEISDFFDQMEKFFPVVYDIKYLMGFCTNLYGGLEKIAELLGVKRVGISHQAGSDSLLTLRTFIKMKEFFFTGSLLKYSGFLFGLDNPRLLTGSKN

SEQ ID NO: 10479 - DNA, 1183 bp, Arabidopsis thaliana
gaaaaaacacactgcaattgagatcgatttcgactgtaagtgaactttgattgccgcgaagattactcaaatcgccggacacaagtttttcagtgaattccattggcatagaactcgagagaaagagacacagagagagagagagatctaacaagagtcaaagtttctgactttttcgcattctttttgagatcgagttctgtttttgttggcgtgtgagatgaattcttaagaaggaagaagaagaagaaggaaagatgcgtagagagatctcgtttttgctacagcccaggtgtcttcttcttctcgttgccctaacgattttcctcgtcttcgcgctcttcaacaccggaaaagatgaggagaagcaagtaattgaagatcatgaaatcaccaacagggtttttctcgatgttgatattgatggccaacgcttaggcaggattgttatcggactatatggcactgttgtacccaaaactgtagaaaatttcagggctttatgcacaggggagaagggtaaaacctcaagcggaaagcctttacattataagggaacaccatttcatcgtataatatctggatttgtaatccaaggaggagacattatccatggtgatggaaaaagtagtgactcaatctatggtggaacctttcctgacgaaaatttcaagatacagcattcacacgcaggtatggtagcaatggctaatacaggaccggattctaatggctcgcagttctttatcactactgttaaggctagctggttggaaggagaacatgtggtgttgggaaaggtgatacaaggaatggacaatgtattcgccattgaaggtggagctggaacttacagtggcaaacccaggaagaaagttgtgattgctgattctggagagatccctaaagacaaatgggatgaagagagatgacaaagacaaacctaagatacacagcactacgacaaatctggttctgttcctgtgagattctgtctctgtattttctttctatttatagttttgcacatgtgatgatctgaattctgaacgcaatgccactgtagttagtgtttaaagctgggcctggaagcatctgtagcttttcacttgaggtttttctagactttatttatatgatttttagttcactctacttcagttatgtagatatatttattatg

SEQ ID NO: 10480 - protein, 224 aa, Arabidopsis thaliana
MRREISFLLQPRCLLLLVALTIFLVFALFNTGKDEEKQVIEDHEITNRVFLDVDIDGQRLGRIVIGLYGTVVPKTVENFRALCTGEKGKTSSGKPLHYKGTPFHRIISGFVIQGGDIIHGDGKSSDSIYGGTFPDENFKIQHSHAGMVAMANTGPDSNGSQFFITTVKASWLEGEHVVLGKVIQGMDNVFAIEGGAGTYSGKPRKKVVIADSGEIPKDKWDEER

SEQ ID NO: 10481 - DNA, 1631 bp, Arabidopsis thaliana
gagagatctttcatcttctaaatcgaagatggttcctaagatcgcatcaatggcgtctactagacctctcagttcacttccttacttgttcctctccttgtctctcctcttcgtcgtctcgcttctcttcttcttctccaattccttaatctccaatccaaatccgagcatttcacacaatactctccaaaacggtatcaatgtctatgtagctgagcttccaagatccctaaactatggtcttctcgacaaatactggtcctcttctactccagattcacgtatacccaccgacccagatcacccgacccgtaaaacccatttacccaaacccgatacacacccaccgtacccagagaatccgttgatcaagcaatacagtgctgagtactggatcatgggagacctagaaacctcaccagagaaacgaattggatcttttgctaaaagggttttcagtgaatctgacgctgatgtagtcttcgtgcccttctttgccacgttaagtgcagagatggagcttggaaatggtaaaggttcgtttagaaagaagtccggtaacgaagattatcaaagacagagacaagtgcttgattttctcaagaacactaaagcttggaaacgatctaatggtcgtgatcacgtttttgttctaactgaccctgttgcaatgtggcatgttcgtgaggagattgctttatctattcttcttgtggtggattttggaggatggtttaggcaagattctaagtcgtctaatgggactagcttgccggagaggattgagcatactcaagtctctgtcattaaggatgtgattgttccatatacgcatctgcttcctagattggatttgtctcagaaccagagacgtcatagccttctttatttcaaaggagctaagcacagacatcggggagggttaatcagagaaaaactatgggacttgttggtcaatgagcctggcgttgtcatggaagaaggttttcctaatgcaacaggaaaggaacagtcaataagaggaatgagaaactcagagttctgcttacatccagctggtgacactcccacttcatgccgtctctttgatgccattcaaagtctatgtatccctgtgattgtcagtgacaccatagagctcccgtttgagggaataatcgattactcagaattctcggtttttgcctctgtaagtgatgcattaacacctaagtggttggctaatcatctcagaaggttctctgaaagagagaaggaaacattgagaagtagaatagcaaaggttcagtcagtttttgtgtatgataatgggcatgccgatgggattggacctattgaaccagatggtgcggtgaatcacatatggaagaaggttcagcagaaggtgccaatggtgaaggaagcagtgattagggagaggagaaaaccagcaggggcttccgttccacttcgatgtcaatgtatctaaataatgcaaccaatccaaaagatagaaagtgttcctttgattttgttggtcttttcttttgtacttgtttcgtttacgaacattgttatggccactttaaaatccatgttccttagggttcaaagaaaaaaaaaaaaaaaaaaaactcgagggggggcccggt

SEQ ID NO: 10482 - protein, 488 aa, Arabidopsis thaliana
RDLSSSKSKMVPKIASMASTRPLSSLPYLFLSLSLLFVVSLLFFFSNSLISNPNPSISHNTLQNGINVYVAELPRSLNYGLLDKYWSSSTPDSRIPTDPDHPTRKTHLPKPDTHPPYPENPLIKQYSAEYWIMGDLETSPEKRIGSFAKRVFSESDADVVFVPFFATLSAEMELGNGKGSFRKKSGNEDYQRQRQVLDFLKNTKAWKRSNGRDHVFVLTDPVAMWHVREEIALSILLVVDFGGWFRQDSKSSNGTSLPERIEHTQVSVIKDVIVPYTHLLPRLDLSQNQRRHSLLYFKGAKHRHRGGLIREKLWDLLVNEPGVVMEEGFPNATGKEQSIRGMRNSEFCLHPAGDTPTSCRLFDAIQSLCIPVIVSDTIELPFEGIIDYSEFSVFASVSDALTPKWLANHLRRFSEREKETLRSRIAKVQSVFVYDNGHADGIGPIEPDGAVNHIWKKVQQKVPMVKEAVIRERRKPAGASVPLRCQCI

SEQ ID NO: 10483 - protein, 479 aa, Arabidopsis thaliana
MVPKIASMASTRPLSSLPYLFLSLSLLFVVSLLFFFSNSLISNPNPSISHNTLQNGINVYVAELPRSLNYGLLDKYWSSSTPDSRIPTDPDHPTRKTHLPKPDTHPPYPENPLIKQYSAEYWIMGDLETSPEKRIGSFAKRVFSESDADVVFVPFFATLSAEMELGNGKGSFRKKSGNEDYQRQRQVLDFLKNTKAWKRSNGRDHVFVLTDPVAMWHVREEIALSILLVVDFGGWFRQDSKSSNGTSLPERIEHTQVSVIKDVIVPYTHLLPRLDLSQNQRRHSLLYFKGAKHRHRGGLIREKLWDLLVNEPGVVMEEGFPNATGKEQSIRGMRNSEFCLHPAGDTPTSCRLFDAIQSLCIPVIVSDTIELPFEGIIDYSEFSVFASVSDALTPKWLANHLRRFSEREKETLRSRIAKVQSVFVYDNGHADGIGPIEPDGAVNHIWKKVQQKVPMVKEAVIRERRKPAGASVPLRCQCI

SEQ ID NO: 10484 - protein, 472 aa, Arabidopsis thaliana
MASTRPLSSLPYLFLSLSLLFVVSLLFFFSNSLISNPNPSISHNTLQNGINVYVAELPRSLNYGLLDKYWSSSTPDSRIPTDPDHPTRKTHLPKPDTHPPYPENPLIKQYSAEYWIMGDLETSPEKRIGSFAKRVFSESDADVVFVPFFATLSAEMELGNGKGSFRKKSGNEDYQRQRQVLDFLKNTKAWKRSNGRDHVFVLTDPVAMWHVREEIALSILLVVDFGGWFRQDSKSSNGTSLPERIEHTQVSVIKDVIVPYTHLLPRLDLSQNQRRHSLLYFKGAKHRHRGGLIREKLWDLLVNEPGVVMEEGFPNATGKEQSIRGMRNSEFCLHPAGDTPTSCRLFDAIQSLCIPVIVSDTIELPFEGIIDYSEFSVFASVSDALTPKWLANHLRRFSEREKETLRSRIAKVQSVFVYDNGHADGIGPIEPDGAVNHIWKKVQQKVPMVKEAVIRERRKPAGASVPLRCQCI

SEQ ID NO: 10485 - DNA, 2097 bp, Arabidopsis thaliana
gggtgactgttgcagtactgatttgtgttccctctaacctaaaatggggcagagagttgatctatggtctgaggtcattaaatccgaggaagaagacggagatatacctaagattgaagccgtttttcagagaagaaagaagcctgataaatcctcagaagctgtcaattttggctggttggtgaaaggggatcgtactagttcggtcaatggacccaagagagatagctgggctcgttccctttccaccagagggagagagagtattgcagtgcgcgcttatgtcaacaatcagcctcagaagaaggcagccgggagaaaaaagccccctattccaaagggaaaagttgttaaagctccagacttccagaaagagaaggagtactttcgtgatattgatgcttttgagcttctagaagagagtccttctcccaataaatctagtacatggaccatgggtgaacaagttgttcctgagatgccacatctgtccacaagattagaaaaatggctaatttcgaagaagttaaatcatacttgtggtccttcgagcacactctctaagatacttgaaaactcagccatacaccaggagtcagtatgtgataatgatgcctttgattcattgtctctaaaaaccccagacaagtcttctgctggcaacacttcagttttccggctcatcccgagctgcgatgagaacttggctgccgaagatgtgcctgttagaaaaatcaagatggaatcaatcgaccttgaagatgagctgaagcgactgtctttgacatctgatctaatccccactcatcaagattttgatcagccaattcttgatctattgtccgcctgtggacagatgcgaccatcaaacttcattgaagcattctctaaattctgtgaacctgaaagcattgtcaagattggtgaaggtacatatggggaggcttttcgggctggttctagtgtctgtaaaatagttccaattgatggagacttcagggttaatggggaagtacagaagagagctgacgaactacttgaggaagtgatactctcatggactcttaatcaactaagagaatgtgagactacagctcagaatttgtgcccgacgtacataaaaactcaagatataaaattatgtcaaggtccctatgaccctatactgataaaagcatgggaagaatgggatgcaaaacatgggtctgagaatgatcacccagattttccggagaaacaatgttatgtcatgtttgttctggaacatggtggcaaagaccttgaaagctttgttcttttgaactttgatgaagcaaggagcttactggttcaggccaccgctggcctggctgttgctgaagctgcttttgagttcgagcacagggacctgcactggggaaacattcctctcagtcgtaataactcggatactctgccttttattcttgagggaaaacaagtttgcatcaaaactttcggagtacagatatccataatcgactttactctttcaagaatcaatacaggtgaaaagatactctttctggaccttacttctgatccataccttttcaaaggaccaaaaggagataaacaatcggaaacttaccgaaaaatgaaggcggttactgaagattactgggaaggaagctttgctcgaacaaatgttctctggctaatttatctcgtggatatcttacttaccaagaagtcatttgaacggtcttcaaaacacgaaagagaactacgatcactaaagaagcgaatggagaagtatgaatcagctaaagaggctgtgtcagatcctttcttctcagatatgttgatggaccaaatatcatgaagaatataataaaccccgtaagtgattaaccagaagctctctctcttgtatatttgtttgcctagccacttaaatcaacagtactagctcttgcttcgtaatattatctaaggctccgttatctatataccaatcttgattttcatctcttcaaatgaatccaagaactgatatgttagtcttttattgtatgtgacaatagtttaatggtagcttttatctatagaaatacttttgaaaccatgaattctttt

SEQ ID NO: 10486 - protein, 599 aa, Arabidopsis thaliana
MGQRVDLWSEVIKSEEEDGDIPKIEAVFQRRKKPDKSSEAVNFGWLVKGDRTSSVNGPKRDSWARSLSTRGRESIAVRAYVNNQPQKKAAGRKKPPIPKGKVVKAPDFQKEKEYFRDIDAFELLEESPSPNKSSTWTMGEQVVPEMPHLSTRLEKWLISKKLNHTCGPSSTLSKILENSAIHQESVCDNDAFDSLSLKTPDKSSAGNTSVFRLIPSCDENLAAEDVPVRKIKMESIDLEDELKRLSLTSDLIPTHQDFDQPILDLLSACGQMRPSNFIEAFSKFCEPESIVKIGEGTYGEAFRAGSSVCKIVPIDGDFRVNGEVQKRADELLEEVILSWTLNQLRECETTAQNLCPTYIKTQDIKLCQGPYDPILIKAWEEWDAKHGSENDHPDFPEKQCYVMFVLEHGGKDLESFVLLNFDEARSLLVQATAGLAVAEAAFEFEHRDLHWGNIPLSRNNSDTLPFILEGKQVCIKTFGVQISIIDFTLSRINTGEKILFLDLTSDPYLFKGPKGDKQSETYRKMKAVTEDYWEGSFARTNVLWLIYLVDILLTKKSFERSSKHERELRSLKKRMEKYESAKEAVSDPFFSDMLMDQIS

SEQ ID NO: 10487 - protein, 462 aa, Arabidopsis thaliana
MGEQVVPEMPHLSTRLEKWLISKKLNHTCGPSSTLSKILENSAIHQESVCDNDAFDSLSLKTPDKSSAGNTSVFRLIPSCDENLAAEDVPVRKIKMESIDLEDELKRLSLTSDLIPTHQDFDQPILDLLSACGQMRPSNFIEAFSKFCEPESIVKIGEGTYGEAFRAGSSVCKIVPIDGDFRVNGEVQKRADELLEEVILSWTLNQLRECETTAQNLCPTYIKTQDIKLCQGPYDPILIKAWEEWDAKHGSENDHPDFPEKQCYVMFVLEHGGKDLESFVLLNFDEARSLLVQATAGLAVAEAAFEFEHRDLHWGNIPLSRNNSDTLPFILEGKQVCIKTFGVQISIIDFTLSRINTGEKILFLDLTSDPYLFKGPKGDKQSETYRKMKAVTEDYWEGSFARTNVLWLIYLVDILLTKKSFERSSKHERELRSLKKRMEKYESAKEAVSDPFFSDMLMDQIS

SEQ ID NO: 10488 - protein, 454 aa, Arabidopsis thaliana
MPHLSTRLEKWLISKKLNHTCGPSSTLSKILENSAIHQESVCDNDAFDSLSLKTPDKSSAGNTSVFRLIPSCDENLAAEDVPVRKIKMESIDLEDELKRLSLTSDLIPTHQDFDQPILDLLSACGQMRPSNFIEAFSKFCEPESIVKIGEGTYGEAFRAGSSVCKIVPIDGDFRVNGEVQKRADELLEEVILSWTLNQLRECETTAQNLCPTYIKTQDIKLCQGPYDPILIKAWEEWDAKHGSENDHPDFPEKQCYVMFVLEHGGKDLESFVLLNFDEARSLLVQATAGLAVAEAAFEFEHRDLHWGNIPLSRNNSDTLPFILEGKQVCIKTFGVQISIIDFTLSRINTGEKILFLDLTSDPYLFKGPKGDKQSETYRKMKAVTEDYWEGSFARTNVLWLIYLVDILLTKKSFERSSKHERELRSLKKRMEKYESAKEAVSDPFFSDMLMDQIS

SEQ ID NO: 10489 - DNA, 628 bp, Arabidopsis thaliana
gaatggaaaaaaaacagcaaaaattgaagtctactcgtcgtagtagtcgtcgtcttccactaattccgtggtttttttatcgaagacttttgaataaagtacatttgcagagtctgtcaataaccctttcttcacggtattgctctcaagccgcgtactggtaggctccaaaattatcccttctttatggtttttggaacctgggttctccgattttgaggttgttgaaatctttgagtagatttttgtggaacatctgactctcatggcgaagttatgttgcttcggttcttcagactacgatcttgtggttgggagggcatcgactagttctggaaaagggagaaataacgacggcgagattaaattcggttacagcttagtgaaagggaaagctaatcatccaatggaggattatcatgtgtctaaattcgtgaaaatagacggtaacgagctcggtttgtttgcaatctacgatggtcatttgggtgaacgtgttcctgcttatctacagaagcatttgttctccaatatcctcaaagaggagcagtttatgtatgatcctcagagatcaataattgctgcctatgagaagacagaccaagccattctgtcacattcttctgac

SEQ ID NO: 10490 - protein, 121 aa, Arabidopsis thaliana
MAKLCCFGSSDYDLVVGRASTSSGKGRNNDGEIKFGYSLVKGKANHPMEDYHVSKFVKIDGNELGLFAIYDGHLGERVPAYLQKHLFSNILKEEQFMYDPQRSIIAAYEKTDQAILSHSSD

SEQ ID NO: 10491 - protein, 74 aa, Arabidopsis thaliana
MEDYHVSKFVKIDGNELGLFAIYDGHLGERVPAYLQKHLFSNILKEEQFMYDPQRSIIAAYEKTDQAILSHSSD

SEQ ID NO: 10492 - DNA, 2600 bp, Arabidopsis thaliana
gaacgagtttgtttcctgagatatcttttcaccgcccttctcatagcagctctcgccgatcctgtgtaatcgggaatcggtaatcgtcagggtctgtttggggtacggcgacgcgattttctgattattagggtttaagatctcgaggttgaggagagcttgaaaagttgtttgtcaacatggagcgcaagactattgacttggagcaaggatgggactatatgcagactggaattactaagctgaaacggattctggaaggattgaatgagccagcatttgactctgagcaatatatgatgctttacacgactatctacaacatgtgcacccagaaacctcctcatgattactcacagcagctttatgacaagtatcgggaagcatttgaggaatatattaactcaacagttttgcctgcgttgagggagaagcatgatgagtttatgctgcgggagctatttaaaagatggtcaaaccataaagtaatggtcagatggctatcccgcttcttctactaccttgaccgttacttcattgctcggagatcacttccaccactgaatgaagttggcctgacatgcttccgtgacctggtttataatgagctacattctaaggtcaaacaagctgtaatagctcttgttgataaagaacgggagggcgagcagattgatagggccctgctgaaaaacgtattagatatctatgtagagattggaatggggcagatggagaggtatgaagaagattttgaaagcttcatgcttcaagatacttcttcgtattattctcgcaaggcatcaagctggattcaggaagattcttgccctgattacatgttgaagtctgaagaatgtctaaagaaggagagggagagagtggctcactacctacactcaagcagtgagccaaagctggttgagaaagtacaacatgaattgctggttgtgtttgcaagtcagcttctagaaaaagaacactcagggtgccgtgcattgctaagagatgacaaggtggatgatctctccaggatgtacaggctttaccataaaattttgcgaggcttggaacctgttgcaaacatctttaagcagcatgtcacagcagagggtaacgctcttgtccaacaggccgaagacacggctactaatcaggttgcaaatactgctagcgtccaggaacaggttcttatcagaaaagtgattgaacttcatgataaatacatggtatatgtcaccgagtgtttccagaaccacaccctcttccataaggctttgaaagaggcatttgagattttttgtaacaaaacggttgctggaagttcaagtgcagaactacttgcaacattttgcgacaatattctcaaaaaggggggaagtgaaaagctgagtgatgaagctatcgaagatacgcttgagaaggttgtcaaattgcttgcatacataagtgacaaggatcttttcgctgagttctacaggaagaagctggcccgtaggctcttatttgatcgcagtgctaatgatgatcatgagagaagtatcctgacaaagctcaagcaacaatgtggtggacagtttacttctaagatggagggcatggtgacggatttgacactggcaagagaaaaccaaaacagtttcgaggattatctaggcagtaaccctgctgcaaacccagggattgacttgaccgtcactgttcttaccactggtttctggccaagttacaaatcatttgacataaatctacccagtgaaatgatcaagtgtgttgaagtcttcaaagggttttatgaaacgaaaacgaaacacaggaagcttacgtggatctattcactgggaacttgtcacataaacgggaagtttgatcaaaaggccatcgagttaatagtgtctacttaccaggctgctgtgcttctactctttaacacaactgacaagttaagttacactgagatcttggctcaactgaacctaagccatgaagatctagttaggttgcttcattccttgtcatgtgctaagtacaagatactccttaaggagccaaacaccaagactgtctcccagaatgatgcctttgagttcaactccaaattcaccgatagaatgcgcagaatcaagatccctcttcccccagttgatgaaaggaagaaagtcgttgaagatgtcgataaagacagaagatatgcaattgatgctgccattgtcaggatcatgaagagcaggaaagtattgggacatcaacaacttgtttctgagtgtgttgagcaacttagccgaatgttcaagcctgatatcaaagcgatcaagaagcgtatggaggatttaataaccagagattatttggagagggacaaggagaatcctaacatgtttaggtacttggcttagggcaaaaaaacaacaactatggaagtggttggctcatgaaaggaatctgcttgtatatttagaagtccatatggagactgtcctaaaacaaatttatcgcttcattttcgctatttttctcttttaaaaaatattcggtctgtgctttttttttgggatgcaaatttgccttgtggatttttgtttcttaaatattgaatggag

SEQ ID NO: 10493 - protein, 738 aa, Arabidopsis thaliana
MERKTIDLEQGWDYMQTGITKLKRILEGLNEPAFDSEQYMMLYTTIYNMCTQKPPHDYSQQLYDKYREAFEEYINSTVLPALREKHDEFMLRELFKRWSNHKVMVRWLSRFFYYLDRYFIARRSLPPLNEVGLTCFRDLVYNELHSKVKQAVIALVDKEREGEQIDRALLKNVLDIYVEIGMGQMERYEEDFESFMLQDTSSYYSRKASSWIQEDSCPDYMLKSEECLKKERERVAHYLHSSSEPKLVEKVQHELLVVFASQLLEKEHSGCRALLRDDKVDDLSRMYRLYHKILRGLEPVANIFKQHVTAEGNALVQQAEDTATNQVANTASVQEQVLIRKVIELHDKYMVYVTECFQNHTLFHKALKEAFEIFCNKTVAGSSSAELLATFCDNILKKGGSEKLSDEAIEDTLEKVVKLLAYISDKDLFAEFYRKKLARRLLFDRSANDDHERSILTKLKQQCGGQFTSKMEGMVTDLTLARENQNSFEDYLGSNPAANPGIDLTVTVLTTGFWPSYKSFDINLPSEMIKCVEVFKGFYETKTKHRKLTWIYSLGTCHINGKFDQKAIELIVSTYQAAVLLLFNTTDKLSYTEILAQLNLSHEDLVRLLHSLSCAKYKILLKEPNTKTVSQNDAFEFNSKFTDRMRRIKIPLPPVDERKKVVEDVDKDRRYAIDAAIVRIMKSRKVLGHQQLVSECVEQLSRMFKPDIKAIKKRMEDLITRDYLERDKENPNMFRYLA

SEQ ID NO: 10494 - protein, 724 aa, Arabidopsis thaliana
MQTGITKLKRILEGLNEPAFDSEQYMMLYTTIYNMCTQKPPHDYSQQLYDKYREAFEEYINSTVLPALREKHDEFMLRELFKRWSNHKVMVRWLSRFFYYLDRYFIARRSLPPLNEVGLTCFRDLVYNELHSKVKQAVIALVDKEREGEQIDRALLKNVLDIYVEIGMGQMERYEEDFESFMLQDTSSYYSRKASSWIQEDSCPDYMLKSEECLKKERERVAHYLHSSSEPKLVEKVQHELLVVFASQLLEKEHSGCRALLRDDKVDDLSRMYRLYHKILRGLEPVANIFKQHVTAEGNALVQQAEDTATNQVANTASVQEQVLIRKVIELHDKYMVYVTECFQNHTLFHKALKEAFEIFCNKTVAGSSSAELLATFCDNILKKGGSEKLSDEAIEDTLEKVVKLLAYISDKDLFAEFYRKKLARRLLFDRSANDDHERSILTKLKQQCGGQFTSKMEGMVTDLTLARENQNSFEDYLGSNPAANPGIDLTVTVLTTGFWPSYKSFDINLPSEMIKCVEVFKGFYETKTKHRKLTWIYSLGTCHINGKFDQKAIELIVSTYQAAVLLLFNTTDKLSYTEILAQLNLSHEDLVRLLHSLSCAKYKILLKEPNTKTVSQNDAFEFNSKFTDRMRRIKIPLPPVDERKKVVEDVDKDRRYAIDAAIVRIMKSRKVLGHQQLVSECVEQLSRMFKPDIKAIKKRMEDLITRDYLERDKENPNMFRYLA

SEQ ID NO: 10495 - protein, 699 aa, Arabidopsis thaliana
MMLYTTIYNMCTQKPPHDYSQQLYDKYREAFEEYINSTVLPALREKHDEFMLRELFKRWSNHKVMVRWLSRFFYYLDRYFIARRSLPPLNEVGLTCFRDLVYNELHSKVKQAVIALVDKEREGEQIDRALLKNVLDIYVEIGMGQMERYEEDFESFMLQDTSSYYSRKASSWIQEDSCPDYMLKSEECLKKERERVAHYLHSSSEPKLVEKVQHELLVVFASQLLEKEHSGCRALLRDDKVDDLSRMYRLYHKILRGLEPVANIFKQHVTAEGNALVQQAEDTATNQVANTASVQEQVLIRKVIELHDKYMVYVTECFQNHTLFHKALKEAFEIFCNKTVAGSSSAELLATFCDNILKKGGSEKLSDEAIEDTLEKVVKLLAYISDKDLFAEFYRKKLARRLLFDRSANDDHERSILTKLKQQCGGQFTSKMEGMVTDLTLARENQNSFEDYLGSNPAANPGIDLTVTVLTTGFWPSYKSFDINLPSEMIKCVEVFKGFYETKTKHRKLTWIYSLGTCHINGKFDQKAIELIVSTYQAAVLLLFNTTDKLSYTEILAQLNLSHEDLVRLLHSLSCAKYKILLKEPNTKTVSQNDAFEFNSKFTDRMRRIKIPLPPVDERKKVVEDVDKDRRYAIDAAIVRIMKSRKVLGHQQLVSECVEQLSRMFKPDIKAIKKRMEDLITRDYLERDKENPNMFRYLA

SEQ ID NO: 10496 - DNA, 1197 bp, Arabidopsis thaliana
actccctattcttcagtaatgactaatattagaactctctatactactagctaaaactaaaaattgaagaaaaaacatgagtctcaccaccgacgaaatcgaagtgagagatttcgtggtgaaccaaaagaatggagtgaaaggactcgtcgactttctaaccctaaccacacttccttctccatacattcaacctcctcaagaacgcttcacttccgacaagatcctcctcggatcacctgtcccggtcattgacgtgtccaattggaatgaaccgcacgtggctagagagatctgccatgcagcgtcaaagctcggcttgtttcagatagtgaaccacgggatagctccggctgagttcaagggtgtgattgctgcggcgcgtgggtttttcgagttgccggcggaggagagaagaaggtattggagagggagttcagtgtcggagacggcgtggttgaccacaagtttcaatccttgcatagaaagtgttttggaatggagagatttcctcaagtttgagtatcttcctcaacgacatgacttcgctgccacgtggccttctgtctgcaaggaacaagtgatagaccatttcaaaaggatcaaaccaatcacagagaggatcttaaacatactcatcaacaatctaaacacaatcatcgatgagtccaataaagaaaccctaatgggaacaatgagaatgaacttcaactactatccgaaatgtcctgagccaagcctggccataggaactggtcgccactcagacatcaacactctcactctcctcctacaagaagatggtgtattaagcagtctttacgcccgagccactgaggatggagacaaatggattcatgtccctccaattccgggagctattgtcgttaatatcggagatgtattacagatattgagcaatgataggtataggagcgtggagcattgtgtggtggtcaataagtattgtagccgggtttccattccggttttctgcggaccggttcatgattcggttattgagccgttaccggaggtgttagataagaacaatgagatggctcggtatagaaagattgtgtattcggactacttgaagtttttttttggaagacctcatgatggaaagaagactattgagtcgataaaattaccatgatatgatttacgaagcttaaatcatcattatctacggcc

SEQ ID NO: 10497 - protein, 360 aa, Arabidopsis thaliana
MSLTTDEIEVRDFVVNQKNGVKGLVDFLTLTTLPSPYIQPPQERFTSDKILLGSPVPVIDVSNWNEPHVAREICHAASKLGLFQIVNHGIAPAEFKGVIAAARGFFELPAEERRRYWRGSSVSETAWLTTSFNPCIESVLEWRDFLKFEYLPQRHDFAATWPSVCKEQVIDHFKRIKPITERILNILINNLNTIIDESNKETLMGTMRMNFNYYPKCPEPSLAIGTGRHSDINTLTLLLQEDGVLSSLYARATEDGDKWIHVPPIPGAIVVNIGDVLQILSNDRYRSVEHCVVVNKYCSRVSIPVFCGPVHDSVIEPLPEVLDKNNEMARYRKIVYSDYLKFFFGRPHDGKKTIESIKLP

SEQ ID NO: 10498 - DNA, 630 bp, Arabidopsis thaliana
aacaaaaccaaaatatatattttttctcggaaaaaaaacatgttttcaaagatgcagctggtggttctcatgtcgttcttgctccttcttccattgtgttcttcaaggtttggagagagccatgaagatggagttcctcacaccgaccaatattcactaaatatggttgaagagagtattccgaaaatgatggaaacaggcacaaacccaagccacgatcagacaacaaacggttggggtcgtcctacgcggccaccgccatcgcggatgatggattatccgaaaacatacccaaacccaagccgcggtcagacaacaaaccgtgttattcgtttgtcgccaccgccaccacggatgatggattatccgaaaacatacccaaacccaagccgcggtcagacaacaaaccgtgttattcgtttgtcgccaccgccaccgcggatgatggattatccgaaaacatacccaaacccaagccacgatcagacaataaaccgtgttattcgtttgtcgccaccgccaccgcggatgaactaagaattatgatgatgaagtagagatgaaaatatgatgtgtaactgtcaaactaatcaataataagctataataaacttggtcaaagaattggcc

SEQ ID NO: 10499 - protein, 178 aa, Arabidopsis thaliana
NKTKIYIFSRKKNMFSKMQLVVLMSFLLLLPLCSSRFGESHEDGVPHTDQYSLNMVEESIPKMMETGTNPSHDQTTNGWGRPTRPPPSRMMDYPKTYPNPSRGQTTNRVIRLSPPPPRMMDYPKTYPNPSRGQTTNRVIRLSPPPPRMMDYPKTYPNPSHDQTINRVIRLSPPPPRMN

SEQ ID NO: 10500 - protein, 165 aa, Arabidopsis thaliana
MFSKMQLVVLMSFLLLLPLCSSRFGESHEDGVPHTDQYSLNMVEESIPKMMETGTNPSHDQTTNGWGRPTRPPPSRMMDYPKTYPNPSRGQTTNRVIRLSPPPPRMMDYPKTYPNPSRGQTTNRVIRLSPPPPRMMDYPKTYPNPSHDQTINRVIRLSPPPPRMN

SEQ ID NO: 10501 - protein, 161 aa, Arabidopsis thaliana
MQLVVLMSFLLLLPLCSSRFGESHEDGVPHTDQYSLNMVEESIPKMMETGTNPSHDQTTNGWGRPTRPPPSRMMDYPKTYPNPSRGQTTNRVIRLSPPPPRMMDYPKTYPNPSRGQTTNRVIRLSPPPPRMMDYPKTYPNPSHDQTINRVIRLSPPPPRMN

SEQ ID NO: 10502 - DNA, 736 bp, Arabidopsis thaliana
aaattacctagaacatcctaatcgaaaaaagtgttagcttttgatctttcttatattcttctctgaaatagtaacacactgtgaagagtttttcctacatctgaattttgtctgatccagctgagaacaggaaaaagaagaaaatggcgtttgtgacaactgcggaagtttgtgacgcgaatcaagagctgattcggagtggtcagctacgagctttgcaacccattttccagatttatggccgtcgacaaatattctcaggaccagttgtcactgtcaaagtttttgaagacaatggcttaatccgtcaattcatcgaggagaaaggaaacggtagagttcttgtggtggatggtggagggagtcaacgatgtgcaatactcggaggtaaccccgttgttcaagctcagaacaacggatgggcaggaatcgttgtgaacggatgcatcagagacgtcgatgagatcaacggttgtgatatcggagtgagagctttggcctctcatccgataaaagcgagtaagaaaggacttggagaacaacgagttccggtaaatatcgcagggactcggatttgtgatggtgaatggctttatgcagatactgatgggattcttgtctcccaaattgagttatccgtttaataaaaaaggctttgatcagttaccaaaaaaaaaaacagaacgtggtttgtgttcatcttcttgttacttaagagattgttgaattataatgc

SEQ ID NO: 10503 - protein, 166 aa, Arabidopsis thaliana; identical to SEQ ID NO: 4296

SEQ ID NO: 10504 - DNA, 704 bp, Arabidopsis thaliana
gtttctttacctttacttgcggccaatcgtagaagaagaacaaatcaggaaaaaaaagaatttcaagaatcggcggcggaatattctcgccggaaatggggaaagctagaggagttaacagcggcggcggagagagctctctcggttatctttttggttccggcgagtctgttcccaaaccaaacaagcccaacgctaaaaccggttttaccaccaccacgaccaccacaacaacaacggatggagctggaggtagacccaagaccacgaccacaactacaacaaccggagataaaaacaagacagaggagaactcggctggtgtgagaggaagtcctaataattactacagatcagatggacaaaactgtggcaacttcctcacggaacgaccatctacgaaggttcatgctgcaccaggtggaggatcttctttgggttacttgtttggatctggtccttgtggatctgacaaatgatttctatttccacgacaaacatctcatgcatttgaccctttgaaaaaatgtaaaaattgttctaaactttattctttatccttacaaactggttttgaggattgttttgaatttggccatttcttgtgttcttgaaaaagctacgaagctttctcaatcttgagatctccagaatgtgtttccagcaaaagaaaatcattttacaaactttgctattggttatac

SEQ ID NO: 10505 - protein, 127 aa, Arabidopsis thaliana; identical to SEQ ID NO: 410

SEQ ID NO: 10506 - protein, 108 aa, Arabidopsis thaliana
VSLPLLAANRRRRTNQEKKEFQESAAEYSRRKWGKLEELTAAAERALSVIFLVPASLFPNQTSPTLKPVLPPPRPPQQQRMELEVDPRPRPQLQQPEIKTRQRRTRLV

SEQ ID NO: 10507 - DNA, 549 bp, Arabidopsis thaliana
aaaatcaaaagcaattcttcttcacacagtagcgaaaaaaagaaatctaattctctcgagaaaatgtctggtcgtggaaagggaggaaaaggcttgggtaaaggaggagccaagcgtcacaggaaggttctgagagacaacatccaaggaatcaccaagcctgccattcgaagattggctcgtagaggtggagtcaagcgtattagtggtctcatctacgaggagacacgtggcgtcctcaagatctttctcgagaacgtaattcgtgatgctgtcacttacaccgagcacgctaggaggaagactgtgaccgccatggatgttgtctacgctctcaagaggcaaggaaggactctctacggattcggcggttaatcagggtttttcagatttgtgtttggagatctgtttctggaaattagatttgagaatttcaatgtaggtattttagtaaatgtagcaagatttgatttcctttttttgctatttcgcttttgtaatgtgttttcatttgctaaattctcaacaatggaaacacgcaatttggtg

SEQ ID NO: 10508 - protein, 124 aa, Arabidopsis thaliana
KIKSNSSSHSSEKKKSNSLEKMSGRGKGGKGLGKGGAKRHRKVLRDNIQGITKPAIRRLARRGGVKRISGLIYEETRGVLKIFLENVIRDAVTYTEHARRKTVTAMDVVYALKRQGRTLYGFGG

SEQ ID NO: 10509 - protein, 103 aa, Arabidopsis thaliana; identical to SEQ ID NO: 71

SEQ ID NO: 10510 - DNA, 828 bp, Arabidopsis thaliana
cgcctctctcgcatctcctccaaatcgaaatcgctctctgcctctcttcgtctccgtctccgtctccgtctccatctctgtctccggtaagtaactgaaagatggggcgtgttagaaccaagaccgtgaagaaatcttctcgtcaagtcattgagaagtactactctcgcatgactcttgactttcacactaacaagaagatccttgaagaggttgccatcatcccatcaaagagaggcagagagcgatttcgatttggagagagaacgagagaggcggccatgggaggaggaatgggtgcgttttggggaactcgagtgatggaattagtgaagaagcacgattccggtggtcttctttggaagcggatcaagctaacccctactcgtaaagccaatgccaaaacccgcctccgtcgtgtttggcagaatgaggctgttctaagggcgtgtggtgaatcagatgcaccaaatccgccgggagctagcaacacaaaaagctctagcaatgcggtgaaaaatgcgtaaggccgaagagaagctagtcctagtttgtaaggactcgtagatcaagtctctgtcgttacctgattttacaaaaataatatttgaaccttgtgtttggttattagttttgcaaaagaagaggcacctccacaccaaagcaaaatatggtatttgagtattggtgtttttttttttattattcttgtcatcaagaaatttgttcgtcgcctgctcaatatagttcttttggctacacccgtttatccttgtcgtgccttagttatgttggccgtttagtggctacaagttcgagaaaggtctc

SEQ ID NO: 10511 - protein, 141 aa, Arabidopsis thaliana
MGRVRTKTVKKSSRQVIEKYYSRMTLDFHTNKKILEEVAIIPSKRGRERFRFGERTREAAMGGGMGAFWGTRVMELVKKHDSGGLLWKRIKLTPTRKANAKTRLRRVWQNEAVLRACGESDAPNPPGASNTKSSSNAVKNA

SEQ ID NO: 10512 - protein, 118 aa, Arabidopsis thaliana
MTLDFHTNKKILEEVAIIPSKRGRERFRFGERTREAAMGGGMGAFWGTRVMELVKKHDSGGLLWKRIKLTPTRKANAKTRLRRVWQNEAVLRACGESDAPNPPGASNTKSSSNAVKNA

SEQ ID NO: 10513 - protein, 81 aa, Arabidopsis thaliana
MGGGMGAFWGTRVMELVKKHDSGGLLWKRIKLTPTRKANAKTRLRRVWQNEAVLRACGESDAPNPPGASNTKSSSNAVKNA

SEQ ID NO: 10514 - DNA, 810 bp, Arabidopsis thaliana
acatctcactgctcactactctcactgtaatcccttagatcttcttttcaaatttcaatggcgtccggtgatgttgagtatcggtgcttcgttggaggtctagcatgggccactgatgacagagctcttgagactgccttcgctcaatacggcgacgttattgattccaagatcattaacgatcgtgagactggaagatcaaggggattcggattcgtcaccttcaaggatgagaaagccatgaaggatgcgattgagggaatgaacggacaagatctcgatggccgtagcatcactgttaacgaggctcagtcacgaggaagcggtggcggcggaggccaccgtggaggtggtggcggtggataccgcagcggcggtggtggaggttactccggtggaggtggtagctacggaggtggcggcggtagacgcgagggtggaggaggatacagcggcggcggcggttactcctcaagaggtggtggtggcggaagctacggtggtggaagacgtgagggaggaggaggatacggtggtggtgaaggaggaggttacggaggaagcggtggtggtggaggatggtaattcctttaattaggtttgggattaccaatgaatgttctctctctcgcttgttatgcttctacttggttttgtgtgttctctattttgttctggttctgctttagatttgatgtaacagttcgtgattaggtattttggtatctggaaacgtaatgttaagtcacttgtcattctctaaataacaaatttcttcggagatattatctctgttgattgattctatcc

SEQ ID NO: 10515 - protein, 175 aa, Arabidopsis thaliana
MASGDVEYRCFVGGLAWATDDRALETAFAQYGDVIDSKIINDRETGRSRGFGFVTFKDEKAMKDAIEGMNGQDLDGRSITVNEAQSRGSGGGGGHRGGGGGGYRSGGGGGYSGGGGSYGGGGGRREGGGGYSGGGGYSSRGGGGGSYGGGRREGGGGYGGGEGGGYGGSGGGGGW

SEQ ID NO: 10516 - protein, 114 aa, Arabidopsis thaliana; identical to SEQ ID NO: 5763

SEQ ID NO: 10517 - protein, 107 aa, Arabidopsis thaliana; identical to SEQ ID NO: 5764

SEQ ID NO: 10518 - DNA, 737 bp, Arabidopsis thaliana
ctcgcattaagtccaaacactttcatttgtctcctttcgtcaactccacagagatctcctcatggctccaattgctgtcggcgatgtcgtaccagacggaactatctccttcttcgatgagaatgatcaacttcagaccgcctccgttcactctctcgccgccggtaaaaaagtcattctctttggtgttcctggtgctttcactcccacttgcagcatgaagcatgttcctgggttcattgagaaagcagaggagctgaagtcaaagggtgttgatgagatcatttgctttagcgtgaacaatccgtttgtgatgaaagcatgggggaaaacatacccagagaacaaacatgtgaagtttgtagctgatgggtctggagaatacacacaccttctcggacttgagcttgaccttaaagacaagggtcttggtgttaggtcaaggagatttgctctgttacttgatgatctcaaagtgactgtagccaatgtcgaatctggtggcgaattcacagtttccagcgccgatgatatcctcaaggctctctaagaaatgtaccacttgtgttgtctatgtaaaccgctgtatgtgtagtagaggattctatagcttgttctcagacattaaccaaggttgtaataaagcggtttcattgtgacttgtttggcataacaaagtatttggttttgttgtttttctgtgcgttgattaatgaaagatgtgactcattgacgtc

SEQ ID NO: 10519 - protein, 162 aa, Arabidopsis thaliana
MAPIAVGDVVPDGTISFFDENDQLQTASVHSLAAGKKVILFGVPGAFTPTCSMKHVPGFIEKAEELKSKGVDEIICFSVNNPFVMKAWGKTYPENKHVKFVADGSGEYTHLLGLELDLKDKGLGVRSRRFALLLDDLKVTVANVESGGEFTVSSADDILKAL

SEQ ID NO: 10520 - protein, 110 aa, Arabidopsis thaliana
MKHVPGFIEKAEELKSKGVDEIICFSVNNPFVMKAWGKTYPENKHVKFVADGSGEYTHLLGLELDLKDKGLGVRSRRFALLLDDLKVTVANVESGGEFTVSSADDILKAL

SEQ ID NO: 10521 - DNA, 718 bp, Arabidopsis thaliana
gaattaagcaaaagaagaagaagaagaagtaatggcttcctctatgctctcctctgccgctgtggttacctccccggctcaagccaccatggtcgctccattcactggtttgaagtcatccgcttctttcccggtcacccgcaaggccaacaacgacattacttccatcacaagcaatgggggaagagttagctgcatgaaggtgtggccaccaatcggaaagaagaagtttgagactctatcttacctccctgaccttactgacgtcgaattggctaaggaagttgactaccttctccgcaacaagtggattccttgtgttgaattcgagttggagcacggatttgtgtaccgtgagcacggaaacactcccggatactacgatggacggtactggacaatgtggaagcttccattgttcggatgcaccgactctgctcaagtattgaaggaagttgaagaatgcaagaaggagtacccgggcgccttcaataggatcatcggattcgacaacacccgtcaagtccagtgcatcagtttcattgcctacaagcccccaagcttcaatgatgcttaaatccttttctggaatattcaatgttgactatccggaacccaattttgtatggtcaatgtaaatttaagtaattattttgccaaagtgaaaaaactgaaggtttgtttttctatcatttcctctataaaaatctctattcat

SEQ ID NO: 10522 - protein, 181 aa, Arabidopsis thaliana
MASSMLSSAAVVTSPAQATMVAPFTGLKSSASFPVTRKANNDITSITSNGGRVSCMKVWPPIGKKKFETLSYLPDLTDVELAKEVDYLLRNKWIPCVEFELEHGFVYREHGNTPGYYDGRYWTMWKLPLFGCTDSAQVLKEVEECKKEYPGAFNRIIGFDNTRQVQCISFIAYKPPSFNDA

SEQ ID NO: 10523 - protein, 177 aa, Arabidopsis thaliana
MLSSAAVVTSPAQATMVAPFTGLKSSASFPVTRKANNDITSITSNGGRVSCMKVWPPIGKKKFETLSYLPDLTDVELAKEVDYLLRNKWIPCVEFELEHGFVYREHGNTPGYYDGRYWTMWKLPLFGCTDSAQVLKEVEECKKEYPGAFNRIIGFDNTRQVQCISFIAYKPPSFNDA

SEQ ID NO: 10524 - protein, 162 aa, Arabidopsis thaliana
MVAPFTGLKSSASFPVTRKANNDITSITSNGGRVSCMKVWPPIGKKKFETLSYLPDLTDVELAKEVDYLLRNKWIPCVEFELEHGFVYREHGNTPGYYDGRYWTMWKLPLFGCTDSAQVLKEVEECKKEYPGAFNRIIGFDNTRQVQCISFIAYKPPSFNDA

SEQ ID NO: 10525 - DNA, 918 bp, Arabidopsis thaliana
ctaaggagagcgagaaggaggccatgaagcttctggaggatgaccagaagcagagaactgcaatggaattgcttgatcagtatctcaactttgtccaggaagctgaacaggacaacaagaagaagaacaagaaggagaaggaccctctgaagccaaaacatcccgtatctgccttccttgtttatgcaaacgagaggagagctgctttacgcgaagaaaacaaaagcgtcgtggaggtcgcaaagatcactggagaggagtggaagaacttgtcagacaagaaaaaggcaccctacgagaaggtggcaaagaagaacaaggagacatacctgcaagcaatggaggaatacaagaggacaaaggaagaagaagccctgagtcagaagaaagaagaagaggaactcttgaaactccacaaacaagaagctctgcaaatgcttaagaagaaggagaaaactgataatctgatcaagaaggagaaggcgaccaagaagaagaagaacgaaaacgttgaccctaacaaaccaaagaagcctgcttcttcatactttctcttcagcaaggacgaaaggaagaaattgacagaagaacgtcccgggacaaacaacgctactgttactgctctcatttcactgaaatggaaggaattgagtgaagaagagaagcaagtttacaacggaaaggccgcaaaactgatggaagcatacaaaaaggaagtggaagcttacaacaagaagtctgcggctactaccagtagctagataaatctctcttagtattgaaatcatgttcaagtcctgttgaacattccttattatgcatcgttagattactctaagtacttttatgttttaactctcgctgatcattacttactagttactatctatttctctgttacaaattttaattaataat

SEQ ID NO: 10526 - protein, 252 aa, Arabidopsis thaliana
KESEKEAMKLLEDDQKQRTAMELLDQYLNFVQEAEQDNKKKNKKEKDPLKPKHPVSAFLVYANERRAALREENKSVVEVAKITGEEWKNLSDKKKAPYEKVAKKNKETYLQAMEEYKRTKEEEALSQKKEEEELLKLHKQEALQMLKKKEKTDNLIKKEKATKKKKNENVDPNKPKKPASSYFLFSKDERKKLTEERPGTNNATVTALISLKWKELSEEEKQVYNGKAAKLMEAYKKEVEAYNKKSAATTSS

SEQ ID NO: 10527 - protein, 245 aa, Arabidopsis thaliana
MKLLEDDQKQRTAMELLDQYLNFVQEAEQDNKKKNKKEKDPLKPKHPVSAFLVYANERRAALREENKSVVEVAKITGEEWKNLSDKKKAPYEKVAKKNKETYLQAMEEYKRTKEEEALSQKKEEEELLKLHKQEALQMLKKKEKTDNLIKKEKATKKKKNENVDPNKPKKPASSYFLFSKDERKKLTEERPGTNNATVTALISLKWKELSEEEKQVYNGKAAKLMEAYKKEVEAYNKKSAATTSS

SEQ ID NO: 10528 - protein, 232 aa, Arabidopsis thaliana
MELLDQYLNFVQEAEQDNKKKNKKEKDPLKPKHPVSAFLVYANERRAALREENKSVVEVAKITGEEWKNLSDKKKAPYEKVAKKNKETYLQAMEEYKRTKEEEALSQKKEEEELLKLHKQEALQMLKKKEKTDNLIKKEKATKKKKNENVDPNKPKKPASSYFLFSKDERKKLTEERPGTNNATVTALISLKWKELSEEEKQVYNGKAAKLMEAYKKEVEAYNKKSAATTSS

SEQ ID NO: 10529 - DNA, 536 bp, Arabidopsis thaliana
aaattcactgattattgttttaaggcaaattaagatcatcttcaaaatcttctcagatctcttccaattttctagaaaaaacatgtcttgctgtggtggaagctgtggttgtggatctgcctgcaagtgcggcaatggttgcggaggttgcaaaaggtaccctgacttggagaacaccgccaccgagactcttgtcctcggtgttgctccggcgatgaactctcagtacgaggcttccggcgagactttcgttgccgagaatgatgcctgcaaatgcggatctgactgcaagtgcaacccttgtacctgcaaatgaagaacttcataaaccctaagtctgtaataaccctaatgttatgttaggtttgcttatatgtaataattggctgatttttccggtagttttgccggcgacgttggtctttctcttcttcttcttcttctgtgtgtgtttttatggtttggtcattaagatatctctgcaaagttttatctttgtgactttattaatcctaagactattatgggtttgtatt

SEQ ID NO: 10530 - protein, 104 aa, Arabidopsis thaliana; identical to SEQ ID NO: 5666

SEQ ID NO: 10531 - protein, 77 aa, Arabidopsis thaliana; identical to SEQ ID NO: 5667

SEQ ID NO: 10532 - protein, 60 aa, Arabidopsis thaliana
MLGLLICNNWLIFPVVLPATLVFLFFFFFCVCFYGLVIKISLQSFIFVTLLILRLLWVCI

SEQ ID NO: 10533 - DNA, 1294 bp, Arabidopsis thaliana
cttcttccccaccactccgattcatctttatcctctctctcatctcgtccgttgttgcataagtgctatggatctcgcgtcgaatcttggtgggaagatcgataaatccgatgttctcaccgccgtcgaaaagtatgagcaatatcatgtcttccatggaggaaacgaggaagagagaaaagccaattatactgacatggttaataagtactatgaccttgctactagcttttatgagtacggatggggagaatccttccattttgcacaaagatggaaaggagaatcgcttcgagagagtattaagcgacacgagcactttcttgctcttcagcttggcatccaaccaggacaaaaggtactggatgtaggatgtggaattggtggaccgttgagggaaattgcaagattcagcaattcagttgttaccgggctcaacaataacgaataccagatcaccagaggcaaggaactaaaccgacttgcaggtgtcgacaagacatgtaactttgtcaaggctgacttcatgaagatgccattcccggaaaacagtttcgatgcagtttatgcaatagaagcaacttgccatgcacctgatgcgtatggatgctacaaagagatctacagagtgctaaagcctgggcaatgttttgctgcctatgagtggtgtatgactgatgcatttgaccctgataacgccgaacatcagaaaataaagggagagatagagattggagatggtcttcctgacattaggctgactacaaaatgcctcgaagctctgaagcaggccggttttgaagtgatatgggaaaaggatctggccaaggactcgccggtcccatggtacttacctcttgacaaaaatcatttctcactcagtagcttccgccttacagctgttggacgattcataaccaaaaacatggtcaagatccttgaatacataagacttgcacctcaaggaagccaaagggtctcaaatttcctggagcaggctgcggaaggattagtcgacggtggaaggagagagattttcacgccaatgtatttcttcttggcccggaagccagagtaagcggatgagagatggcgatggtcatcgtaggtcgaatgaagtgacaaaatttctcaatttgcagtcttattttctatgtttatcggatttgttgcagagtttcttattcaccaactatattttggatgttcgtaacatgtcacgtgttgttcatgtgcactctgcctgaaatctgaatcatgtgcacatgcccaaaatatcttggaatctttcttt

SEQ ID NO: 10534 - protein, 358 aa, Arabidopsis thaliana
FFPTTPIHLYPLSHLVRCCISAMDLASNLGGKIDKSDVLTAVEKYEQYHVFHGGNEEERKANYTDMVNKYYDLATSFYEYGWGESFHFAQRWKGESLRESIKRHEHFLALQLGIQPGQKVLDVGCGIGGPLREIARFSNSVVTGLNNNEYQITRGKELNRLAGVDKTCNFVKADFMKMPFPENSFDAVYAIEATCHAPDAYGCYKEIYRVLKPGQCFAAYEWCMTDAFDPDNAEHQKIKGEIEIGDGLPDIRLTTKCLEALKQAGFEVIWEKDLAKDSPVPWYLPLDKNHFSLSSFRLTAVGRFITKNMVKILEYIRLAPQGSQRVSNFLEQAAEGLVDGGRREIFTPMYFFLARKPE

SEQ ID NO: 10535 - protein, 336 aa, Arabidopsis thaliana
MDLASNLGGKIDKSDVLTAVEKYEQYHVFHGGNEEERKANYTDMVNKYYDLATSFYEYGWGESFHFAQRWKGESLRESIKRHEHFLALQLGIQPGQKVLDVGCGIGGPLREIARFSNSVVTGLNNNEYQITRGKELNRLAGVDKTCNFVKADFMKMPFPENSFDAVYAIEATCHAPDAYGCYKEIYRVLKPGQCFAAYEWCMTDAFDPDNAEHQKIKGEIEIGDGLPDIRLTTKCLEALKQAGFEVIWEKDLAKDSPVPWYLPLDKNHFSLSSFRLTAVGRFITKNMVKILEYIRLAPQGSQRVSNFLEQAAEGLVDGGRREIFTPMYFFLARKPE

SEQ ID NO: 10536 - protein, 293 aa, Arabidopsis thaliana
MVNKYYDLATSFYEYGWGESFHFAQRWKGESLRESIKRHEHFLALQLGIQPGQKVLDVGCGIGGPLREIARFSNSVVTGLNNNEYQITRGKELNRLAGVDKTCNFVKADFMKMPFPENSFDAVYAIEATCHAPDAYGCYKEIYRVLKPGQCFAAYEWCMTDAFDPDNAEHQKIKGEIEIGDGLPDIRLTTKCLEALKQAGFEVIWEKDLAKDSPVPWYLPLDKNHFSLSSFRLTAVGRFITKNMVKILEYIRLAPQGSQRVSNFLEQAAEGLVDGGRREIFTPMYFFLARKPE

SEQ ID NO: 10537 - DNA, 1901 bp, Arabidopsis thaliana
aaagaaggaagaaaatttgagtgggtgagaattttttacgatagaggaagagacagcatcatctacttgtgttgtctgtgtacatatattacagtaagcgttgcaatataacttcttgaggatcttctcacattaatgggtcaaaccttttgctcttccttttgattaatttagtgtttgacaatctcctcctccttctccttcttcttcaaagttttgtcgcagtatctattgttcttacagagagaaaggaaagctttagtcttttaccagtttgatccaattctgggtttcactgaaaaaaagttgggagtttgattcttctaactgtagaagaaacagagtcaacagaagaaaactaaaaaagttgagatttttctctcacgcgctcaagaacttgagtatgtcttcttctgtagcagtgttatgggttgctacttcttctctaaatccagacccaatgaacaattgtgggttggtaagggttctagaatcttctagactgttctctccttgtcagaatcagagactaaacaaaggtaagaagaagcagataccaacttggagttcttcttttgtaaggaaccgaagtagaagaattggtgttgtgtcttcaagcttagtagcaagtccttctggagagatagctctttcatctgaagagaaggtttacaatgttgtgttgaaacaagctgctttggtgaacaaacagctaaggtcttcttcttatgaccttgatgtgaagaaaccacaagatgttgttcttcctgggagtttgagtttgttggtgggtgaagcttatgatcgatgcggtgaagtttgcgctgaatatgctaagacgttttatcttggaactttgcttatgacacccgaaaggcgaaaggcgatttgggcaatctacgtttggtgtagaagaactgatgaacttgtggatgggccaaatgcttcacatataactcccatggctttagatagatgggaagcaaggttagaagatcttttccgtggtcgtcctttcgatatgcttgatgctgctctcgctgatacagttgctagatacccggtcgatattcagccatttcgagacatgatcgaaggaatgagaatggacttgaagaaatcgagataccagaacttcgatgatctatacctttactgctactacgtcgctggaaccgtcggattgatgagcgttccggttatgggaatcgatcctaagtcgaaagcaacaaccgaaagtgtttacaacgctgccttggcccttggtatagccaatcagcttactaacatactcagagacgtaggcgaagatgcgagaagaggaagggtttatctgcctcaggatgaattggctcaggctggtctttcagatgaagacatattcgccggaaaagtaactgataaatggagaaacttcatgaaaatgcagcttaaacgagcaagaatgttcttcgacgaagctgagaaaggcgtcaccgagctcagtgccgctagcagatggcctgtatgggcttcattgctattgtacaggagaatactggacgagattgaagcgaatgattacaacaattttactaagagagcttatgtggggaaagtcaagaaaattgcagctttgccattggcttatgctaaatcagtactaaagacttcaagttcaagactatcgatatgagagcgagaggaaagtggaacaaaaacaacctaagagcgctttttgtgattaagaaaaaacttaggctcgaatttattatgttaactaatatatacatattaatggggaagcaaattcttataatgttacattatctttctgaatgtaaaaaagtatttttttttttaattttattttagttatagttctcttggcctaatgaggggatatacaatttttggttgat

SEQ ID NO: 10538 - protein, 423 aa, Arabidopsis thaliana
MSSSVAVLWVATSSLNPDPMNNCGLVRVLESSRLFSPCQNQRLNKGKKKQIPTWSSSFVRNRSRRIGVVSSSLVASPSGEIALSSEEKVYNVVLKQAALVNKQLRSSSYDLDVKKPQDVVLPGSLSLLVGEAYDRCGEVCAEYAKTFYLGTLLMTPERRKAIWAIYVWCRRTDELVDGPNASHITPMALDRWEARLEDLFRGRPFDMLDAALADTVARYPVDIQPFRDMIEGMRMDLKKSRYQNFDDLYLYCYYVAGTVGLMSVPVMGIDPKSKATTESVYNAALALGIANQLTNILRDVGEDARRGRVYLPQDELAQAGLSDEDIFAGKVTDKWRNFMKMQLKRARMFFDEAEKGVTELSAASRWPVWASLLLYRRILDEIEANDYNNFTKRAYVGKVKKIAALPLAYAKSVLKTSSSRLSI

SEQ ID NO: 10539 - protein, 404 aa, Arabidopsis thaliana
MNNCGLVRVLESSRLFSPCQNQRLNKGKKKQIPTWSSSFVRNRSRRIGVVSSSLVASPSGEIALSSEEKVYNVVLKQAALVNKQLRSSSYDLDVKKPQDVVLPGSLSLLVGEAYDRCGEVCAEYAKTFYLGTLLMTPERRKAIWAIYVWCRRTDELVDGPNASHITPMALDRWEARLEDLFRGRPFDMLDAALADTVARYPVDIQPFRDMIEGMRMDLKKSRYQNFDDLYLYCYYVAGTVGLMSVPVMGIDPKSKATTESVYNAALALGIANQLTNILRDVGEDARRGRVYLPQDELAQAGLSDEDIFAGKVTDKWRNFMKMQLKRARMFFDEAEKGVTELSAASRWPVWASLLLYRRILDEIEANDYNNFTKRAYVGKVKKIAALPLAYAKSVLKTSSSRLSI

SEQ ID NO: 10540 - protein, 270 aa, Arabidopsis thaliana
MTPERRKAIWAIYVWCRRTDELVDGPNASHITPMALDRWEARLEDLFRGRPFDMLDAALADTVARYPVDIQPFRDMIEGMRMDLKKSRYQNFDDLYLYCYYVAGTVGLMSVPVMGIDPKSKATTESVYNAALALGIANQLTNILRDVGEDARRGRVYLPQDELAQAGLSDEDIFAGKVTDKWRNFMKMQLKRARMFFDEAEKGVTELSAASRWPVWASLLLYRRILDEIEANDYNNFTKRAYVGKVKKIAALPLAYAKSVLKTSSSRLSI

SEQ ID NO: 10541 - DNA, 1854 bp, Arabidopsis thaliana
  misc_feature (1833)..(1833): n is a, c, g, or t
aaggaggggaaaatcagctttttggagaagaaaccaaagaaaacattcgaaaccctaaaatctccattagaattcgaaaatgacaaagaagagaaagctcgaaggagaagaatctaacgaagctgaagaaccgtcgcagaagctgaagcagacgccggaggaggagcagcagcttgtaattaaaaatcaggataatcaaggagacgttgaagaagttgaatacgaggaagtagaggaagagcaagaagaagaagtagaagatgatgacgatgaagatgatggtgatgagaatgaggatcagacggatgggaatcgtatagaggcggcggcgacgtctggatctggcgatcaagaagatgatgacgatgaaccaattcaggatctgttggaaccattttcaaaggagcaagttttgagtcttcttaaggaagcagcggagaagcatgttgatgtagccaatcgaattagggaagtagctgatgaggaccctgttcatcggaagatctttgtgcacggtcttggttgggatacgaaaacagagacgcttattgaagcttttaagcagtacggagagatcgaagattgcaaggctgtgtttgataagatctcagggaaatctaaaggttatggctttattctgtacaagtctcgttcaggtgctcgcaacgcactcaagcagcctcagaagaagattggtagtcgtatgacggcatgccaattagcttctaaaggacctgtctttggtggagctcctatcgctgctgcagctgtttcagcgcctgctcagcattcgaactcggagcatactcagaaaaagatttatgttagtaatgtcggagcagagcttgatccacagaagttgctgatgtttttctcaaagtttggagaaattgaagaaggtcctttgggtcttgataagtatactgggagacctaaaggtttctgtctctttgtttataagtcgtctgaaagcgccaagagggctttggaggagccacacaagacttttgaaggccatatcttgcattgccagaaagctatcgatggtcccaaaccgggcaagcagcagcagcatcaccataacccacacgcctataacaatcctcgttaccaaaggaatgataacaatggttatggtccgcctggaggtcatggacatctcatggctggtaacccagctgggatgggtggtccaacggcacaggtgataaacccggccattggacaggccttgacagctttattggcatctcagggagctggtttggcttttaatccggcaattggacaggctttgttgggttccttggggacagctgctggtgtaaacccagggaatggagttggaatgccaactggttacggtactcaagctatggcaccggggacaatgcctgggtacggtacacaacctgggttgcaaggcggttatcagactccgcaacctggtcaaggcggtacaagtagagggcaacatggtgtcgggccatacggtactccttacatgggtcactaaatgtatcatgtatccatccactcagatatcagaaatcagtgttttaatattggcctggtgattcttctcaagtttataaggagctgatgctaaatgaagtctttatgaaatgttactctttggtcactcctaaggccaaactcataaaaaaccttttaaggagttttagttttcatctacttgtttttcccaaactctctttatgaaattcctaaaaaaaactttgtactactattttcagtgtttatgtctctattttttcagttttctgaatatcccccttagactttcatttgtaaaactaaaaaagcgcaacnacgctccatgtgggtctttgc

SEQ ID NO: 10542 - protein, 478 aa, Arabidopsis thaliana
MTKKRKLEGEESNEAEEPSQKLKQTPEEEQQLVIKNQDNQGDVEEVEYEEVEEEQEEEVEDDDDEDDGDENEDQTDGNRIEAAATSGSGDQEDDDDEPIQDLLEPFSKEQVLSLLKEAAEKHVDVANRIREVADEDPVHRKIFVHGLGWDTKTETLIEAFKQYGEIEDCKAVFDKISGKSKGYGFILYKSRSGARNALKQPQKKIGSRMTACQLASKGPVFGGAPIAAAAVSAPAQHSNSEHTQKKIYVSNVGAELDPQKLLMFFSKFGEIEEGPLGLDKYTGRPKGFCLFVYKSSESAKRALEEPHKTFEGHILHCQKAIDGPKPGKQQQHHHNPHAYNNPRYQRNDNNGYGPPGGHGHLMAGNPAGMGGPTAQVINPAIGQALTALLASQGAGLAFNPAIGQALLGSLGTAAGVNPGNGVGMPTGYGTQAMAPGTMPGYGTQPGLQGGYQTPQPGQGGTSRGQHGVGPYGTPYMGH

SEQ ID NO: 10543 - protein, 270 aa, Arabidopsis thaliana
MTACQLASKGPVFGGAPIAAAAVSAPAQHSNSEHTQKKIYVSNVGAELDPQKLLMFFSKFGEIEEGPLGLDKYTGRPKGFCLFVYKSSESAKRALEEPHKTFEGHILHCQKAIDGPKPGKQQQHHHNPHAYNNPRYQRNDNNGYGPPGGHGHLMAGNPAGMGGPTAQVINPAIGQALTALLASQGAGLAFNPAIGQALLGSLGTAAGVNPGNGVGMPTGYGTQAMAPGTMPGYGTQPGLQGGYQTPQPGQGGTSRGQHGVGPYGTPYMGH

SEQ ID NO: 10544 - DNA, 430 bp, Arabidopsis thaliana
agatgactccaaccaaggcccatggttgtggagaccttctctgagtacccaccacttggacgtttcgctgttagggacatgaggcagactgttgcagtcggtgttatcaagagtgttgacaagaaggacccaaccggagccaaggttaccaaggctgcagttaagaagggtgcaaagtgaactcgaatcctcaaaactctatccgcagatgaatcaaaaaacaatattagtttctttactttagtttggtatttggtcgcgtgttatagcttcgtttcttctccatcggaactctgttcccggaactgggttcttgatcggaggtggcggagctactttgcaccttttttgcttttgaattgttatcaattttgaacctatttggagattcggttatatgatgtgattttccgaggatattctctctttt

SEQ ID NO: 10545 - protein, 52 aa, Arabidopsis thaliana
MVVETFSEYPPLGRFAVRDMRQTVAVGVIKSVDKKDPTGAKVTKAAVKKGAK

SEQ ID NO: 10546 - protein, 33 aa, Arabidopsis thaliana
MRQTVAVGVIKSVDKKDPTGAKVTKAAVKKGAK

SEQ ID NO: 10547 - DNA, 918 bp, Arabidopsis thaliana
attctcacttacttcttttctttttttgtgttcttgtttagaagaagcaatggccacttcagcaatccaacactcttcttttgccggccaaacggctctaaagccatccaacgacctccttcgcaaggtcggagcctctaatggtggcggccgcgttatcatgcgccgtaccgtcaagtctacccctcagagcatctggtatggaccagaccgtcccaaatacctaggaccattctcggaaaacacaccatcatacctaactggagaataccctggagactacggctgggacacccgctggtctctcagccgatccagaaacattcgcaaagaatcgtgagctcgaagtgatccacagtagatgggcaatgttgggagctttaggctgcaccttccctgaaattctctcaaaaaacggagtcaaattcggtgaagccgtgtggttcaaggcaggatctcaaatcttctcagaaggaggacttgactacctcggaaaccctaacttgatccacgcgcaaagcatattagctatatgggcgtgtcaagttgtgctaatgggattcattgaagggtacagaatcggaggtggtcctcttggggaagggcttgacccgctttacccgggcggggccttcgacccgttgaacttagcgtaggatccagaagcgttttcggagttgaaagtgaaggagcttaaaaacggtcgtcttgctatgttctcaatgtttggattctttgtccaagccatagttaccggtaaaggtccgatcgaaaatctgttcgatcacattgcagaccctgtggctaacaatgcttgggcttacgccaccaacttcgtccccggaaaatagagtttgatcggataatttatgtaaattatatcttttaaacatttatcaatgcattaaagttatcccc

SEQ ID NO: 10548 - protein, 112 aa, Arabidopsis thaliana
FSLTSFLFLCSCLEEAMATSAIQHSSFAGQTALKPSNDLLRKVGASNGGGRVIMRRTVKSTPQSIWYGPDRPKYLGPFSENTPSYLTGEYPGDYGWDTRWSLSRSRNIRKES

SEQ ID NO: 10549 - protein, 96 aa, Arabidopsis thaliana
MATSAIQHSSFAGQTALKPSNDLLRKVGASNGGGRVIMRRTVKSTPQSIWYGPDRPKYLGPFSENTPSYLTGEYPGDYGWDTRWSLSRSRNIRKES

SEQ ID NO: 10550 - protein, 95 aa, Arabidopsis thaliana
MLGALGCTFPEILSKNGVKFGEAVWFKAGSQIFSEGGLDYLGNPNLIHAQSILAIWACQVVLMGFIEGYRIGGGPLGEGLDPLYPGGAFDPLNLA

SEQ ID NO: 10551 - DNA, 1192 bp, Arabidopsis thaliana
actcatctctaacgtttctttctatctctaatccaagcaacaatatggattccgtaatcgctttcgacagatctccgatgtttcgagtctacaagagtggccgcattgagcgtctcttaggagaaacaaccgtcccaccatctcttacaccacaaaacggtgtcgtctccaaagatatcatccattcaccggagaaaaacctctccctccgcatctacctaccggagaaagtcactgttaaaaagctcccaatcctcatctacttccacggtggtggtttcatcatagaaacagctttttctccaccctaccacactttcctcacatccaccgtcgcggccgctaactgcttagcaatatcagtaaactatcgccgtgcaccggagtttccggtacctattccgtacgaagattcatgggattcactcaaatgggtgttaactcatatcacaggaaccggaccggaaacttggataaacaaacacggcgatttcggaaaagtgtttctcgccggagatagcgccggtggaaacatatctcatcatctaacgatgcgagcgaaaaaagagaagctttgtgattctttaatatcagggataatcttgattcatccatatttttggagtaagactccaattgatgagtttgaggttagagacgtggggaagacgaaaggtgttgaaggaagttggagagtcgcaagtccgaatagtaaacaaggagttgatgatccatggctcaacgttgtcggatcggatccatccggattaggttgcgggcgggttttggtaatggtagctggagatgatctgtttgtgagacaaggttggtgttacgcggagaagctgaagaagagtggatgggaaggtgaagttgaggtaatggaggctaaaaatgaaggtcatgtttttcatttgaagaatcctaatagtgataatgctcgtcaagtcgtgaagaaacttgaagagtttattaataagtaatattaatgagtacgtttgtcgaaggagataacaataactaaagaataaattggtgtatttgtcactgattacatatagaattatgctatcacatttagggttaaagccaagaggagtcagttaaagtttcagttacttttctttcaagtaactgatagaaagacgattaattgtattagtttgtggtaaataaatggtttggtttgaat

SEQ ID NO: 10552 - protein, 326 aa, Arabidopsis thaliana
SSLTFLSISNPSNNMDSVIAFDRSPMFRVYKSGRIERLLGETTVPPSLTPQNGVVSKDIIHSPEKNLSLRIYLPEKVTVKKLPILIYFHGGGFIIETAFSPPYHTFLTSTVAAANCLAISVNYRRAPEFPVPIPYEDSWDSLKWVLTHITGTGPETWINKHGDFGKVFLAGDSAGGNISHHLTMRAKKEKLCDSLISGIILIHPYFWSKTPIDEFEVRDVGKTKGVEGSWRVASPNSKQGVDDPWLNVVGSDPSGLGCGRVLVMVAGDDLFVRQGWCYAEKLKKSGWEGEVEVMEAKNEGHVFHLKNPNSDNARQVVKKLEEFINK

SEQ ID NO: 10553 - protein, 312 aa, Arabidopsis thaliana
MDSVIAFDRSPMFRVYKSGRIERLLGETTVPPSLTPQNGVVSKDIIHSPEKNLSLRIYLPEKVTVKKLPILIYFHGGGFIIETAFSPPYHTFLTSTVAAANCLAISVNYRRAPEFPVPIPYEDSWDSLKWVLTHITGTGPETWINKHGDFGKVFLAGDSAGGNISHHLTMRAKKEKLCDSLISGIILIHPYFWSKTPIDEFEVRDVGKTKGVEGSWRVASPNSKQGVDDPWLNVVGSDPSGLGCGRVLVMVAGDDLFVRQGWCYAEKLKKSGWEGEVEVMEAKNEGHVFHLKNPNSDNARQVVKKLEEFINK

SEQ ID NO: 10554 - protein, 301 aa, Arabidopsis thaliana
MFRVYKSGRIERLLGETTVPPSLTPQNGVVSKDIIHSPEKNLSLRIYLPEKVTVKKLPILIYFHGGGFIIETAFSPPYHTFLTSTVAAANCLAISVNYRRAPEFPVPIPYEDSWDSLKWVLTHITGTGPETWINKHGDFGKVFLAGDSAGGNISHHLTMRAKKEKLCDSLISGIILIHPYFWSKTPIDEFEVRDVGKTKGVEGSWRVASPNSKQGVDDPWLNVVGSDPSGLGCGRVLVMVAGDDLFVRQGWCYAEKLKKSGWEGEVEVMEAKNEGHVFHLKNPNSDNARQVVKKLEEFINK

SEQ ID NO: 10555 - DNA, 1909 bp, Arabidopsis thaliana
tcttcccatctctctcccctctaagcaattaagcagacaagacactgatgatatgagacgaagagaaagaagtcttatcactcatcctttcctcttatgaatctctccgccgaccaagctcccgtcaccgccgtcgacgaactagctccgccttctcaaccgcatcgcttatctacatcatgtgatctccacccagaagagcgtttctccggtttctgtccttcttgtctttgcgaccgcctctccgtcttagatcacaacgccgctccgccaccgtcttcttcttcccggaaacctccctctatctccgctgtttcgttaaaagctctcttcaagccctcctctagtggtaccaacaactccaacggaaacggtcgggtcagacccggtttcttcccggagctccgacgtacaaagtccttttccgcaaagaacaacgaaggattttccggtgggtttgagccacagcgtcggtcttgtgacgtcagacttcgtgacgacgaaagaaaccttcccatcaatgaagctgcctccgtcgataaaatcgaggaggaggctagggagtctagcgtgagtgagatagttttagaggtgactgaagaagctgaaattgaggaggatgaagaaaacggtgagaacgatcccggcgagatagttgaggaaaaaagcagcgaaattggtgaggaagaagaggaattgaagccaatgaaggattacatggatctctactcacaaacaaagaaaccgtcggtgaaagatttcgccgggagtttcttttcggcggcctctgttttcagcaagaagcttcagaaatggaagcagaagcagaaggtgaagaagccgagaaacggtgtcggcggaggacggccacagtctgaaatcggaataggccggagatcaagcgacaccgacccgagattctctcttgacgccgggagattctccgtcgatataggtcggatttcaatggacgattctcgctactcattagatgagccaagagcgtcgtgggatggacacttaatcggcaggacaacggcggctagggttcctctgccgccatcgatgttatcagttgtggaaaatgctccgttgaatcgatcagacatgcagattccatcgtctccgtcaattaaaccgattagcggtgactccgacccgattatcataatcccaggcggatccaatcaaactcgagactactacactggacctccgtcgtcacggagacggaagagcctcgacagatccaattctattagaaaaattgtaacggagctagaggatgtcaaatcggtatcaaattcgacaacaacaatagactcaaattccatggaaacagcggagaacaaagggaatcaaaacggcgataagaaatcgagacggtggggaaaatggagcattttagggtttatatacagaaaaggtaaggacgatgaagaagaagataggtatagcagatccaacagcgccggaatggttgagaggtctttatcggaatcatggccggagatgaggaatggagaaggaggaggaccgaagatgaggaggagtaacagcaatgtgagctggcgaagctccggtggaggatcggcgaggaataagagttcgaggtattcgtccaaagatggagagaacggaatgttgaggttttatttgactccgatgaggagaagctggaagaccagcggtggtagtggtggaggcggaggcggtggtggtggtggtgggtgggagaagacggcggctaaggcgaatagtcacggccactctatagcgaggagggttatgaggctgtattgaccaaagtgtccctcttcattttaattattgggagcaatgtgaggttttggtttggggttctctaattatctttctttgtgaataaattggatatctacttaaccgg

SEQ ID NO: 10556 - protein, 568 aa, Arabidopsis thaliana
MNLSADQAPVTAVDELAPPSQPHRLSTSCDLHPEERFSGFCPSCLCDRLSVLDHNAAPPPSSSSRKPPSISAVSLKALFKPSSSGTNNSNGNGRVRPGFFPELRRTKSFSAKNNEGFSGGFEPQRRSCDVRLRDDERNLPINEAASVDKIEEEARESSVSEIVLEVTEEAEIEEDEENGENDPGEIVEEKSSEIGEEEEELKPMKDYMDLYSQTKKPSVKDFAGSFFSAASVFSKKLQKWKQKQKVKKPRNGVGGGRPQSEIGIGRRSSDTDPRFSLDAGRFSVDIGRISMDDSRYSLDEPRASWDGHLIGRTTAARVPLPPSMLSVVENAPLNRSDMQIPSSPSIKPISGDSDPIIIIPGGSNQTRDYYTGPPSSRRRKSLDRSNSIRKIVTELEDVKSVSNSTTTIDSNSMETAENKGNQNGDKKSRRWGKWSILGFIYRKGKDDEEEDRYSRSNSAGMVERSLSESWPEMRNGEGGGPKMRRSNSNVSWRSSGGGSARNKSSRYSSKDGENGMLRFYLTPMRRSWKTSGGSGGGGGGGGGGGWEKTAAKANSHGHSIARRVMRLY

SEQ ID NO: 10557 - protein, 365 aa, Arabidopsis thaliana
MKDYMDLYSQTKKPSVKDFAGSFFSAASVFSKKLQKWKQKQKVKKPRNGVGGGRPQSEIGIGRRSSDTDPRFSLDAGRFSVDIGRISMDDSRYSLDEPRASWDGHLIGRTTAARVPLPPSMLSVVENAPLNRSDMQIPSSPSIKPISGDSDPIIIIPGGSNQTRDYYTGPPSSRRRKSLDRSNSIRKIVTELEDVKSVSNSTTTIDSNSMETAENKGNQNGDKKSRRWGKWSILGFIYRKGKDDEEEDRYSRSNSAGMVERSLSESWPEMRNGEGGGPKMRRSNSNVSWRSSGGGSARNKSSRYSSKDGENGMLRFYLTPMRRSWKTSGGSGGGGGGGGGGGWEKTAAKANSHGHSIARRVMRLY

SEQ ID NO: 10558 - protein, 361 aa, Arabidopsis thaliana
MDLYSQTKKPSVKDFAGSFFSAASVFSKKLQKWKQKQKVKKPRNGVGGGRPQSEIGIGRRSSDTDPRFSLDAGRFSVDIGRISMDDSRYSLDEPRASWDGHLIGRTTAARVPLPPSMLSVVENAPLNRSDMQIPSSPSIKPISGDSDPIIIIPGGSNQTRDYYTGPPSSRRRKSLDRSNSIRKIVTELEDVKSVSNSTTTIDSNSMETAENKGNQNGDKKSRRWGKWSILGFIYRKGKDDEEEDRYSRSNSAGMVERSLSESWPEMRNGEGGGPKMRRSNSNVSWRSSGGGSARNKSSRYSSKDGENGMLRFYLTPMRRSWKTSGGSGGGGGGGGGGGWEKTAAKANSHGHSIARRVMRLY

SEQ ID NO: 10559 - DNA, 2133 bp, Arabidopsis thaliana
aaaaaatcactaactcatgactagtcataacctttaaatcacttctgctttttttctgtttctcttttgatttattcaaagacaacaaagttttgtttttgacaaaaaaatctgatctttgtttgtttgtttgtttgttacatggggatgaagaaacaatggcaaccggagaaaacagaacggtgccggacaatctaaagaaacagctcgcagtttcagttcgaaacattcaatggagttatggaatcttctggtctgtctctgcttctcaaccaggagtgttggagtggggagatggatattacaatggagacataaagacaaggaagacgattcaagcagcagaagtcaaaattgaccagttaggtcttgagagaagtgagcagcttagagagctttatgaatctctctccctcgctgaatcctcagcttccggtagctctcaggtcactagacgagcttccgccgccgctctctcaccggaggacctcaccgacaccgagtggtactacttagtatgcatgtctttcgtcttcaacatcggtgaaggaatccccggaggagcgttatccaatggagaaccaatatggctttgtaacgctgaaaccgccgaaagcaaagtcttcactcgttctcttctagctaaaagtgcttcgcttcagacagtggtttgcttcccgtttcttggaggagtccttgagattggcacgaccgaacatattaaagaggacatgaacgtgatacaaagtgttaagacgttgttccttgaagctcctccatatactacaatatcgacaagatcagactatcaagaaatttttgatcccttaagtgacgataaatacactccggtgtttataaccgaagcttttccaacaacttctactagcgggtttgagcaagaacctgaggatcatgattcgttcatcaacgatggtggtgcgtctcaggtacaaagctggcagtttgtgggtgaagaaatcagtaactgcattcaccaatcgttaaattcaagcgattgcgtttcccaaacgtttgttggaacaaccgggagacttgcttgcgatccaaggaagagtaggattcaacggttaggtcagattcaagaacagagtaaccatgtaaatatggacgacgatgttcattaccaaggcgtgatatcgacgattttcaaaacaacgcatcagctaatactcggaccgcagtttcagaacttcgataagcggtctagcttcacaaggtggaagcgatcatcatctgtgaaaacattgggagagaaatcgcagaagatgataaagaagatactcttcgaggttcctttgatgaacaagaaagaagagttgttaccggacacaccagaggaaaccgggaaccatgccttgtccgagaagaaacgccgcgagaaattgaatgaacggtttatgacattgagatcaatcattccctcaattagtaagattgataaagtgtcgattcttgatgatacaattgagtatcttcaagatttacagaaacgggttcaagagttggaatcttgtagagaatctgctgatacagagacacggataacgatgatgaagaggaagaaaccggatgatgaggaggaaagagcatcagcgaattgtatgaacagcaaaaggaaggggagtgatgtgaatgtaggagaagatgaaccagctgatatcggttatgctggtctaacggataacttaaggatcagttcattaggtaacgaggtggttattgagcttagatgcgcttggagagaagggatattgcttgagataatggatgtgattagtgatctcaacttggattctcactcggttcagtcgtcaaccggagacggtttactctgcttaactgtcaattgcaagcataaagggacaaaaatagcaacaacaggaatgatccaagaggcacttcaaagggttgcatggatatgttaaggattcaaggtttagatttgacaaaattagctttttctctggtttggtttcccaattttcggtaatcagtgattctaaccgagtttttgtgattttgaagttttggaagatccttaagaattcttgtaaaatcgttccttttggctcattacgtaggagaagacaataagaaaacaacaaatat

SEQ ID NO: 10560 - protein, 596 aa, Arabidopsis thaliana
MATGENRTVPDNLKKQLAVSVRNIQWSYGIFWSVSASQPGVLEWGDGYYNGDIKTRKTIQAAEVKIDQLGLERSEQLRELYESLSLAESSASGSSQVTRRASAAALSPEDLTDTEWYYLVCMSFVFNIGEGIPGGALSNGEPIWLCNAETAESKVFTRSLLAKSASLQTVVCFPFLGGVLEIGTTEHIKEDMNVIQSVKTLFLEAPPYTTISTRSDYQEIFDPLSDDKYTPVFITEAFPTTSTSGFEQEPEDHDSFINDGGASQVQSWQFVGEEISNCIHQSLNSSDCVSQTFVGTTGRLACDPRKSRIQRLGQIQEQSNHVNMDDDVHYQGVISTIFKTTHQLILGPQFQNFDKRSSFTRWKRSSSVKTLGEKSQKMIKKILFEVPLMNKKEELLPDTPEETGNHALSEKKRREKLNERFMTLRSIIPSISKIDKVSILDDTIEYLQDLQKRVQELESCRESADTETRITMMKRKKPDDEEERASANCMNSKRKGSDVNVGEDEPADIGYAGLTDNLRISSLGNEVVIELRCAWREGILLEIMDVISDLNLDSHSVQSSTGDGLLCLTVNCKHKGTKIATTGMIQEALQRVAWIC

SEQ ID NO: 10561 - protein, 475 aa, Arabidopsis thaliana
MSFVFNIGEGIPGGALSNGEPIWLCNAETAESKVFTRSLLAKSASLQTVVCFPFLGGVLEIGTTEHIKEDMNVIQSVKTLFLEAPPYTTISTRSDYQEIFDPLSDDKYTPVFITEAFPTTSTSGFEQEPEDHDSFINDGGASQVQSWQFVGEEISNCIHQSLNSSDCVSQTFVGTTGRLACDPRKSRIQRLGQIQEQSNHVNMDDDVHYQGVISTIFKTTHQLILGPQFQNFDKRSSFTRWKRSSSVKTLGEKSQKMIKKILFEVPLMNKKEELLPDTPEETGNHALSEKKRREKLNERFMTLRSIIPSISKIDKVSILDDTIEYLQDLQKRVQELESCRESADTETRITMMKRKKPDDEEERASANCMNSKRKGSDVNVGEDEPADIGYAGLTDNLRISSLGNEVVIELRCAWREGILLEIMDVISDLNLDSHSVQSSTGDGLLCLTVNCKHKGTKIATTGMIQEALQRVAWIC

SEQ ID NO: 10562 - protein, 405 aa, Arabidopsis thaliana
MNVIQSVKTLFLEAPPYTTISTRSDYQEIFDPLSDDKYTPVFITEAFPTTSTSGFEQEPEDHDSFINDGGASQVQSWQFVGEEISNCIHQSLNSSDCVSQTFVGTTGRLACDPRKSRIQRLGQIQEQSNHVNMDDDVHYQGVISTIFKTTHQLILGPQFQNFDKRSSFTRWKRSSSVKTLGEKSQKMIKKILFEVPLMNKKEELLPDTPEETGNHALSEKKRREKLNERFMTLRSIIPSISKIDKVSILDDTIEYLQDLQKRVQELESCRESADTETRITMMKRKKPDDEEERASANCMNSKRKGSDVNVGEDEPADIGYAGLTDNLRISSLGNEVVIELRCAWREGILLEIMDVISDLNLDSHSVQSSTGDGLLCLTVNCKHKGTKIATTGMIQEALQRVAWIC

SEQ ID NO: 10563 - DNA, 1340 bp, Arabidopsis thaliana
atatctacgccgtctccattgattatttctccgtctcttgaaaaatccgactgacactgacctcaaaactctcctctcactttcgtcgtgaagaagccaaatctcgaatcgaatcagcaccacacatttccatggataattcagctccagattcgttatccagatcggaaaccgccgtcacatacgactcaccatatccactctacgccatggctttctcttctctccgctcatcctccggtcacagaatcgccgtcggaagcttcctcgaagattacaacaaccgcatcgacattctctctttcgattccgattcaatgaccgttaagcctctcccgaatctctccttcgagcatccttatcctccaacaaagctaatgttcagtcctccttctctccgtcgtccttcctccggagatctcctcgcttcctccggcgatttcctccgtctttgggaaattaacgaagattcatcaaccgtcgagccaatctcggttctcaacaacagcaaaacgagcgagttttgtgcgccgttgacttccttcgattggaacgatgtagagccgaaacgtctcggaacttgtagtattgatacgacgtgtacgatttgggatattgagaagtctgttgttgagactcagcttatagctcatgataaagaggttcatgacattgcttggggagaagctagggttttcgcatcagtctctgctgatggatccgttaggatctttgatttacgtgataaggaacattctacaatcatttacgagagtcctcagcctgatacgcctttgttaagacttgcttggaacaaacaagatcttagatatatggctacgattttgatggattctaataaggttgtgattctcgatattcgttcgccgactatgcctgttgctgagcttgaaagacatcaggctagtgtgaatgctatagcttgggcgcctcagagctgtaaacatatttgttctggtggtgatgatacacaggctcttatttgggagcttcctactgttgctggacccaatgggattgatccgatgtcggtttattcggctggttcggagattaatcagttgcagtggtcttcttcgcagcctgattggattggtattgcttttgctaacaaaatgcagctccttagagtttgaggtgcagatgtgaagtgatcaataaggattttagcatagacccgtataatcgtcatgtgcgtaagtaggtttggtttgcgctccctctcgcttttaggtccgcaatgactctgtatctatctgattgtaactaaaactgaattcatttgatgaaccaaatgatactattatcttatgttgtgc

SEQ ID NO: 10564 - protein, 341 aa, Arabidopsis thaliana
MDNSAPDSLSRSETAVTYDSPYPLYAMAFSSLRSSSGHRIAVGSFLEDYNNRIDILSFDSDSMTVKPLPNLSFEHPYPPTKLMFSPPSLRRPSSGDLLASSGDFLRLWEINEDSSTVEPISVLNNSKTSEFCAPLTSFDWNDVEPKRLGTCSIDTTCTIWDIEKSVVETQLIAHDKEVHDIAWGEARVFASVSADGSVRIFDLRDKEHSTIIYESPQPDTPLLRLAWNKQDLRYMATILMDSNKVVILDIRSPTMPVAELERHQASVNAIAWAPQSCKHICSGGDDTQALIWELPTVAGPNGIDPMSVYSAGSEINQLQWSSSQPDWIGIAFANKMQLLRV

SEQ ID NO: 10565 - protein, 315 aa, Arabidopsis thaliana
MAFSSLRSSSGHRIAVGSFLEDYNNRIDILSFDSDSMTVKPLPNLSFEHPYPPTKLMFSPPSLRRPSSGDLLASSGDFLRLWEINEDSSTVEPISVLNNSKTSEFCAPLTSFDWNDVEPKRLGTCSIDTTCTIWDIEKSVVETQLIAHDKEVHDIAWGEARVFASVSADGSVRIFDLRDKEHSTIIYESPQPDTPLLRLAWNKQDLRYMATILMDSNKVVILDIRSPTMPVAELERHQASVNAIAWAPQSCKHICSGGDDTQALIWELPTVAGPNGIDPMSVYSAGSEINQLQWSSSQPDWIGIAFANKMQLLRV

SEQ ID NO: 10566 - protein, 279 aa, Arabidopsis thaliana
MTVKPLPNLSFEHPYPPTKLMFSPPSLRRPSSGDLLASSGDFLRLWEINEDSSTVEPISVLNNSKTSEFCAPLTSFDWNDVEPKRLGTCSIDTTCTIWDIEKSVVETQLIAHDKEVHDIAWGEARVFASVSADGSVRIFDLRDKEHSTIIYESPQPDTPLLRLAWNKQDLRYMATILMDSNKVVILDIRSPTMPVAELERHQASVNAIAWAPQSCKHICSGGDDTQALIWELPTVAGPNGIDPMSVYSAGSEINQLQWSSSQPDWIGIAFANKMQLLRV

SEQ ID NO: 10567 - DNA, 1354 bp, Arabidopsis thaliana
aaaaaaagcttttcgtcatcgccgtttggctttctgaaacaaatcacaccgtttaagattttctctggttctgagattatggagatggagcgtgtgcatgaattccctcatactcacatggatcgtcgtcccagaaagagagcgcgtctcggttgggatgtgttgcctcaggcaaccaaggctcaggtaggaatgttttgtgggcaagagattggaaatatatcaagctttgcatcttccggagctccttcagacaatagtagctctctttgtgttaagggtgtggctcgaaatggttctcccccatggcgagaagatgataaggatggacattacatatttgaactgggagatgacttaactccacgctataaaatttatagcaaaatgggggaaggtacttttggtcaagtgctagaatgttgggatagggagaggaaggaaatggtggcagtaaaaattgtccgtggtgtgaagaaataccgtgaggctgctatgattgaaattgaaatgctgcaacagcttggtaaacatgacaaaggtggcaatcgttatgcatgacttgcgcatgattcatacggaccttaaaccagaaaatattctgttagtctcctcagactatgtgaagattcccgagtacaaggggtcccgattacaaagggatgtatgctataaaagagtgcctaaatcaagtgcaataaaggtgattgattttggtagcacaacttatgagcgccaggaccaaacctacattgtatcaaccagacattatagggcaccagaagtcattttaggtcttggctggagttatccgtgtgatgtttggagcgttggatgtatcatagtggagttgtgcacgggtgaagcattgttccaaacacatgaaaacctggagcatctagcgatgatggagcgtgttcttgggccgtttcctcaacaaatgctgaagaaagtggaccggcactcagagaaatatgtgagaagaggtcgtttggattggccagatggggcaacctcaagagatagcctgaaggcagtattgaagcttcctcggcttcagaatttaataatgcaacatgtggaccactcagccggggagttaataaatatggtgcaaggacttctgcgatttgatccgtcagagagaataaccgctcgtgaagctctgaggcatccgtttttcgcaaggagaagatagcgggacttgaatttgacgagtgtaaatagggatgaaatatgtatgatttgtagcaagtctttaccccacaaccccacgaattctgatataaattaacaaatatgctaagatcactctttttttaaccgtgataggcgattgtttgtctatctttgt

SEQ ID NO: 10568 - protein, 221 aa, Arabidopsis thaliana
MTKVAIVMHDLRMIHTDLKPENILLVSSDYVKIPEYKGSRLQRDVCYKRVPKSSAIKVIDFGSTTYERQDQTYIVSTRHYRAPEVILGLGWSYPCDVWSVGCIIVELCTGEALFQTHENLEHLAMMERVLGPFPQQMLKKVDRHSEKYVRRGRLDWPDGATSRDSLKAVLKLPRLQNLIMQHVDHSAGELINMVQGLLRFDPSERITAREALRHPFFARRR

SEQ ID NO: 10569 - protein, 214 aa, Arabidopsis thaliana
MHDLRMIHTDLKPENILLVSSDYVKIPEYKGSRLQRDVCYKRVPKSSAIKVIDFGSTTYERQDQTYIVSTRHYRAPEVILGLGWSYPCDVWSVGCIIVELCTGEALFQTHENLEHLAMMERVLGPFPQQMLKKVDRHSEKYVRRGRLDWPDGATSRDSLKAVLKLPRLQNLIMQHVDHSAGELINMVQGLLRFDPSERITAREALRHPFFARRR

SEQ ID NO: 10570 - protein, 209 aa, Arabidopsis thaliana
MIHTDLKPENILLVSSDYVKIPEYKGSRLQRDVCYKRVPKSSAIKVIDFGSTTYERQDQTYIVSTRHYRAPEVILGLGWSYPCDVWSVGCIIVELCTGEALFQTHENLEHLAMMERVLGPFPQQMLKKVDRHSEKYVRRGRLDWPDGATSRDSLKAVLKLPRLQNLIMQHVDHSAGELINMVQGLLRFDPSERITAREALRHPFFARRR

SEQ ID NO: 10571 - protein, 160 aa, Arabidopsis thaliana
MEMERVHEFPHTHMDRRPRKRARLGWDVLPQATKAQVGMFCGQEIGNISSFASSGAPSDNSSSLCVKGVARNGSPPWREDDKDGHYIFELGDDLTPRYKIYSKMGEGTFGQVLECWDRERKEMVAVKIVRGVKKYREAAMIEIEMLQQLGKHDKGGNRYA

SEQ ID NO: 10572 - DNA, 3169 bp, Arabidopsis thaliana
gctctctctctctctttcgctgctctcacacgcaaataatggctcatctcttcagggagctgtctctgggccactccaagagagagtctacgccgccgccgccgtcacattcggcgacttcacgttcttcttcaatgtcttccgatctacctccatcaccactcggacaactcgctgtccaactttccgattccgatctccgtctcactgcttacgagatcttcgtcgccgcatgtcgtagcgccaccggtaaacctctctcatcggctgtttcagtcgctgttttgaatcaggattctcccaatggctctcctgcttcgccggcgattcagcgttctctgacctcaaccgccgctagtaaaatgaagaaagctttggggttaaggtcgtcttcttcgctttcacctggatctaataagagttctggttctgcttcgggttctaatggtaagtcgaaacgtcctactactgtcggtgagcttatgcggatccaaatgcgagtatcggaggctgtcgattctcgtgttcgtagagcttttcttagaatcgctgcttcacaggttggaaggaagattgagtcagtagttcttcctttagagttgttacagcagctaaagtcttctgattttacggatcagcaagaatatgatgcttggctgaagagatcattgaaggttcttgaggcaggtcttttgttgcatcctcgtgtacctcttgataagacgaatagttctcaacgactgcgacagattattcatggtgctttagatcggcctttggagactggaaggaataatgagcaaatgcaaagtcttagatcagcggtcatgtctcttgcaactagatctgatgggtctttctctgattcttgtcactgggctgatggatctccgtttaatctcaggctttatgaattgcttttagaagcgtgttttgattctaatgatgcgacgtccatggttgaggaagttgacgacctaatggaacatataaagaagacgtgggtaattcttggaatcaatcaaatgctgcataacctctgttttacgtggcttttgtttagtcggtatgttgttactggacaagttgagatggacctgcttcatgcttgtgattctcaactggcagaagttgctaaagatgcaaagacaacaaaggatcctgaatactcccaggttttaagttctacactgagtgctatattaggatgggcagagaaaaggctccttgcataccatgacacttttgaccgaggaaatattcataccatggagggaattgtttctgtgggtgtatcagctgccaggatattagttgaagatatatctaacgagtaccgtagaagaaggaaaggagaagttgatgtagctcgtaccaggattgagacgtacatcaggtcctcactacgaacttcgtttgcgcagagaatggagaaagcagattcaagccggagagcatctaggaaccagaaaaatcctcttcctgttctagccatccttgctaaggacattggtgagctagctattcaggaaaagcggatgttcagtccaatattgaagagatggcatccgtttgctgcaggggttgctgtggcgacccttcatgtttgttacggaaatgagattaaacagtttatagccggaatatctgaattgacacctgatgctgtccagatactaagagctgcagataagctagaaaaggatctggtgcaaatcgcagtagaggattctgttgacagtgatgatggtggcaaagcaattatccgtgaaatgcctcccttcgaagctgagaccgtaattgctaatttggtcaaagactggataaaggcaagaatagacagacttaaggaatgggttgacaggaatttgcagcaagaggtttggaaacccctggagaacctagaaggaggatatgcacagtctgctgccgaagtgttgcggattactgatgaaactttggaagctttttttcagcttcccatacctatgcatcctgctgtattacctgatttaattattggtttagacaaatatcttcagtattatgtctcaaaggcgaaatctggctgcggctctcggactacgtacatgcctacaatgcctgcactcaccagatgtacaacgggatcaaaattccaatggaagaagaaagaaaagacacctaccactcagaagagagaatctcaggtttcggttatgaacggtgagaattcttttggggtcacgcaaatatgtgtcagaataaacagcttgcacaaaatccgcagtgagcttgatgttgtggaaaaaagagtgatcacacatttgaggaactgtgagtcagctcacaccgatgacttttccaacggcttagaaaaaaagtttgagctcacaccagcggcttgcatagaaggcgttcaacagctttctgagtctctggcttataaggtcgtcttccacgacctaagccacacgttatgggacgggttatacatcggagacctctcttcctctagaatcgatcctttcctcaaggaactcgaacagaatttgacagtcatagcagagacagtacatgaaagagttcgaacacgcatcatcaccgatattatgagagcctctttagatggcttcttacttgtcctgcttgccggaggaccctctagggcgttcacaagacaagactctcagataatggaagaagatttcaaatcaatgaaagatatgttctgggctaacggagatggtctagccatggacctgatcgataaattctcaaccactgtcagaggcgtgcttcctctgttcagtacagatacagacagtttaatagagaggttcaagggaacgaccctcgaagcatatggttcttcagctaagtcgaggcttccgttgcctccaacatcaggccagtggaatggcatggagccaaacacactcttacgtgttttgtgttaccgtaacgacgaatctgccacgaggtttctcaagaagacatataatctacctaagaagctttagtaaacttacggctactactgcaacgtataataacctcacaagatgaagagtgtgtgttccacttgcaggagggagcctccgagatttgtatagtgagtttcattttttttgttttatggttttttttctaatacattcctatacgtactatataattcatttatatc

SEQ ID NO: 10573 - protein, 999 aa, Arabidopsis thaliana
SLSLFRCSHTQIMAHLFRELSLGHSKRESTPPPPSHSATSRSSSMSSDLPPSPLGQLAVQLSDSDLRLTAYEIFVAACRSATGKPLSSAVSVAVLNQDSPNGSPASPAIQRSLTSTAASKMKKALGLRSSSSLSPGSNKSSGSASGSNGKSKRPTTVGELMRIQMRVSEAVDSRVRRAFLRIAASQVGRKIESVVLPLELLQQLKSSDFTDQQEYDAWLKRSLKVLEAGLLLHPRVPLDKTNSSQRLRQIIHGALDRPLETGRNNEQMQSLRSAVMSLATRSDGSFSDSCHWADGSPFNLRLYELLLEACFDSNDATSMVEEVDDLMEHIKKTWVILGINQMLHNLCFTWLLFSRYVVTGQVEMDLLHACDSQLAEVAKDAKTTKDPEYSQVLSSTLSAILGWAEKRLLAYHDTFDRGNIHTMEGIVSVGVSAARILVEDISNEYRRRRKGEVDVARTRIETYIRSSLRTSFAQRMEKADSSRRASRNQKNPLPVLAILAKDIGELAIQEKRMFSPILKRWHPFAAGVAVATLHVCYGNEIKQFIAGISELTPDAVQILRAADKLEKDLVQIAVEDSVDSDDGGKAIIREMPPFEAETVIANLVKDWIKARIDRLKEWVDRNLQQEVWKPLENLEGGYAQSAAEVLRITDETLEAFFQLPIPMHPAVLPDLIIGLDKYLQYYVSKAKSGCGSRTTYMPTMPALTRCTTGSKFQWKKKEKTPTTQKRESQVSVMNGENSFGVTQICVRINSLHKIRSELDVVEKRVITHLRNCESAHTDDFSNGLEKKFELTPAACIEGVQQLSESLAYKVVFHDLSHTLWDGLYIGDLSSSRIDPFLKELEQNLTVIAETVHERVRTRIITDIMRASLDGFLLVLLAGGPSRAFTRQDSQIMEEDFKSMKDMFWANGDGLAMDLIDKFSTTVRGVLPLFSTDTDSLIERFKGTTLEAYGSSAKSRLPLPPTSGQWNGMEPNTLLRVLCYRNDESATRFLKKTYNLPKKL

SEQ ID NO: 10574 - protein, 987 aa, Arabidopsis thaliana
MAHLFRELSLGHSKRESTPPPPSHSATSRSSSMSSDLPPSPLGQLAVQLSDSDLRLTAYEIFVAACRSATGKPLSSAVSVAVLNQDSPNGSPASPAIQRSLTSTAASKMKKALGLRSSSSLSPGSNKSSGSASGSNGKSKRPTTVGELMRIQMRVSEAVDSRVRRAFLRIAASQVGRKIESVVLPLELLQQLKSSDFTDQQEYDAWLKRSLKVLEAGLLLHPRVPLDKTNSSQRLRQIIHGALDRPLETGRNNEQMQSLRSAVMSLATRSDGSFSDSCHWADGSPFNLRLYELLLEACFDSNDATSMVEEVDDLMEHIKKTWVILGINQMLHNLCFTWLLFSRYVVTGQVEMDLLHACDSQLAEVAKDAKTTKDPEYSQVLSSTLSAILGWAEKRLLAYHDTFDRGNIHTMEGIVSVGVSAARILVEDISNEYRRRRKGEVDVARTRIETYIRSSLRTSFAQRMEKADSSRRASRNQKNPLPVLAILAKDIGELAIQEKRMFSPILKRWHPFAAGVAVATLHVCYGNEIKQFIAGISELTPDAVQILRAADKLEKDLVQIAVEDSVDSDDGGKAIIREMPPFEAETVIANLVKDWIKARIDRLKEWVDRNLQQEVWKPLENLEGGYAQSAAEVLRITDETLEAFFQLPIPMHPAVLPDLIIGLDKYLQYYVSKAKSGCGSRTTYMPTMPALTRCTTGSKFQWKKKEKTPTTQKRESQVSVMNGENSFGVTQICVRINSLHKIRSELDVVEKRVITHLRNCESAHTDDFSNGLEKKFELTPAACIEGVQQLSESLAYKVVFHDLSHTLWDGLYIGDLSSSRIDPFLKELEQNLTVIAETVHERVRTRIITDIMRASLDGFLLVLLAGGPSRAFTRQDSQIMEEDFKSMKDMFWANGDGLAMDLIDKFSTTVRGVLPLFSTDTDSLIERFKGTTLEAYGSSAKSRLPLPPTSGQWNGMEPNTLLRVLCYRNDESATRFLKKTYNLPKKL

SEQ ID NO: 10575 - protein, 955 aa, Arabidopsis thaliana
MSSDLPPSPLGQLAVQLSDSDLRLTAYEIFVAACRSATGKPLSSAVSVAVLNQDSPNGSPASPAIQRSLTSTAASKMKKALGLRSSSSLSPGSNKSSGSASGSNGKSKRPTTVGELMRIQMRVSEAVDSRVRRAFLRIAASQVGRKIESVVLPLELLQQLKSSDFTDQQEYDAWLKRSLKVLEAGLLLHPRVPLDKTNSSQRLRQIIHGALDRPLETGRNNEQMQSLRSAVMSLATRSDGSFSDSCHWADGSPFNLRLYELLLEACFDSNDATSMVEEVDDLMEHIKKTWVILGINQMLHNLCFTWLLFSRYVVTGQVEMDLLHACDSQLAEVAKDAKTTKDPEYSQVLSSTLSAILGWAEKRLLAYHDTFDRGNIHTMEGIVSVGVSAARILVEDISNEYRRRRKGEVDVARTRIETYIRSSLRTSFAQRMEKADSSRRASRNQKNPLPVLAILAKDIGELAIQEKRMFSPILKRWHPFAAGVAVATLHVCYGNEIKQFIAGISELTPDAVQILRAADKLEKDLVQIAVEDSVDSDDGGKAIIREMPPFEAETVIANLVKDWIKARIDRLKEWVDRNLQQEVWKPLENLEGGYAQSAAEVLRITDETLEAFFQLPIPMHPAVLPDLIIGLDKYLQYYVSKAKSGCGSRTTYMPTMPALTRCTTGSKFQWKKKEKTPTTQKRESQVSVMNGENSFGVTQICVRINSLHKIRSELDVVEKRVITHLRNCESAHTDDFSNGLEKKFELTPAACIEGVQQLSESLAYKVVFHDLSHTLWDGLYIGDLSSSRIDPFLKELEQNLTVIAETVHERVRTRIITDIMRASLDGFLLVLLAGGPSRAFTRQDSQIMEEDFKSMKDMFWANGDGLAMDLIDKFSTTVRGVLPLFSTDTDSLIERFKGTTLEAYGSSAKSRLPLPPTSGQWNGMEPNTLLRVLCYRNDESATRFLKKTYNLPKKL

SEQ ID NO: 10576 - DNA, 2679 bp, Arabidopsis thaliana
gaacaacacatatctgtctctccgtcgtcagagagtttctttcgccgatttcgcaaaaaccctatggagctcctccgatccaacttgtctagggttcagatccctgaacctactcatcgcatctacaagcatgagtgttgcatctccttcgatactccgagatccgaaggaggattgttcgttgatatgaatagttttcttgctttcgggaaggattatgtttcttggaactatgagaagactggaaaccctgtttatcttcatattaagcagactaggaagtctattcccgaggatcggcctctcaagaaaccgactctgctcgctataggtgttgatggaggctttgataacaatgagccagagtacgaggagtcttatagcatagtcatacttccggattttgtttcactcccgtttccttctgttgagctaccagagaaggtgaggattgctgtcgatactgtagtgaatgccgttggtgctgagcggaaagagcaagttgcagcttggacagctgagaaaaagttaattagtgaacatgcattgacactgcagcaaatcaagagtggcattgtcattcctccctctggttggaaatgttctaagtgtgataagacggagaatctctggcttaatcttaccgatggaatgattctctgtggaagaaaaaactgggatggaactggtggaaacaaccatgctgttgagcactacaaagagacagcctaccctcttgctgtaaagcttggaactatcactgctgacttagaagcagcagatgtttattcctatccggaagatgacagtgttttggacccgctcctggctgagcatctggcccattttggaattgacttctcgtcgatgcagaagactgaaatgacaactgctgaaagagaacttgatcaaaatacaaattttgattggaaccgtatacaagagagtggaaaagaattggtgccagtttttggacctggatataccggacttgtcaatcttgggaacagttgctacttggcagctacgatgcagattgttttctctacccattcatttatttcaagatacttttcacatcagagcttaaagatggcttttgagatggctcctgctgatccaactttggacctcaatatgcaattaacaaagcttggacacggcttactatctgggaagtactcaatgcctgcaactcagaaggatgctacaactggagatcctagacaagaaggaatacctcctcgcatgttcaaaaacgtaattgccgcgagccacgcagaattctcttctatgagacagcaggatgctctcgactttttcctccatctggtaggcaaggttgagcgtgctagcaacacgacaccagatttagacccctcgaggagcttcaagtttggaatagaagagaagatcctttgtccgtctggaaaggttggatataataagagggaagactgtattctttctttgaacattccgctacatgaggcaactaataaagatgaattagaagcctttcacaagcaaaaagcaggaaaaggattggaagagaatgatatgaggtcaagtgatgaaatagtacgcccacgagttcctttagaagcctgtctagcaaattttgcatcatcagagccgattgaagactactatagctctgctttgaagggaatgacaacagctatcaagacaactggtttgacatctttcccagattatttggtcttgcacatgcggaaatttgttatggaggaaggctgggtgccaaagaaacttgatgtatacattgatgttccggatgttattgatatcagccacatgcgtagcaaaggactccaacctggggaagaactgttgccagatggcgttccagaagaagtgatggaatcagcgcagcccgtggcaaatgaggagatagttgcacagctagtctcaatgggatttagccagcttcactgccagaaagctgccataaatacttccaatgctggggttgaagaggcaatgaactggttactttctcacatggatgatccagacatcgatgcaccaatctcccaccagacatctgacattgatcaatcaagcgttgataccttactctcctttggttttgctgaagatgttgctcggaaggcactaaaagcctcgggaggagacattgagaaagcaacagactgggtattcaacaaccctaatgcatctgtttcagacatggatgtatcctctagcaattcagcgcagactccggctcaaagtggattaccagatggaggagggaaatacaagctgtttggaatagtaagtcacatgggaacatcagtgcactgtggtcattacgtggctcacatattgaaagaaggccgctgggtaattttcaatgacgacaaagttggtatctcgactgatcctcctaaagacatgggttatgtctacttctttcagcggcttgattgattcgatggagccagttacagagacaaaaactaatcctttttttttaaaatagaaacttttaaggtcgatagggtttttaacatttggattgaggtgacccatgtgactagtttcggttccaaaatcttacatgtggattagtaaatttggttcacttgatgattttatctgtggaacttcgtcacaaattttaagacccgtttagaagctaaacatcaaaag

SEQ ID NO: 10577 - protein, 818 aa, Arabidopsis thaliana
EQHISVSPSSESFFRRFRKNPMELLRSNLSRVQIPEPTHRIYKHECCISFDTPRSEGGLFVDMNSFLAFGKDYVSWNYEKTGNPVYLHIKQTRKSIPEDRPLKKPTLLAIGVDGGFDNNEPEYEESYSIVILPDFVSLPFPSVELPEKVRIAVDTVVNAVGAERKEQVAAWTAEKKLISEHALTLQQIKSGIVIPPSGWKCSKCDKTENLWLNLTDGMILCGRKNWDGTGGNNHAVEHYKETAYPLAVKLGTITADLEAADVYSYPEDDSVLDPLLAEHLAHFGIDFSSMQKTEMTTAERELDQNTNFDWNRIQESGKELVPVFGPGYTGLVNLGNSCYLAATMQIVFSTHSFISRYFSHQSLKMAFEMAPADPTLDLNMQLTKLGHGLLSGKYSMPATQKDATTGDPRQEGIPPRMFKNVIAASHAEFSSMRQQDALDFFLHLVGKVERASNTTPDLDPSRSFKFGIEEKILCPSGKVGYNKREDCILSLNIPLHEATNKDELEAFHKQKAGKGLEENDMRSSDEIVRPRVPLEACLANFASSEPIEDYYSSALKGMTTAIKTTGLTSFPDYLVLHMRKFVMEEGWVPKKLDVYIDVPDVIDISHMRSKGLQPGEELLPDGVPEEVMESAQPVANEEIVAQLVSMGFSQLHCQKAAINTSNAGVEEAMNWLLSHMDDPDIDAPISHQTSDIDQSSVDTLLSFGFAEDVARKALKASGGDIEKATDWVFNNPNASVSDMDVSSSNSAQTPAQSGLPDGGGKYKLFGIVSHMGTSVHCGHYVAHILKEGRWVIFNDDKVGISTDPPKDMGYVYFFQRLD

SEQ ID NO: 10578 - protein, 797 aa, Arabidopsis thaliana
MELLRSNLSRVQIPEPTHRIYKHECCISFDTPRSEGGLFVDMNSFLAFGKDYVSWNYEKTGNPVYLHIKQTRKSIPEDRPLKKPTLLAIGVDGGFDNNEPEYEESYSIVILPDFVSLPFPSVELPEKVRIAVDTVVNAVGAERKEQVAAWTAEKKLISEHALTLQQIKSGIVIPPSGWKCSKCDKTENLWLNLTDGMILCGRKNWDGTGGNNHAVEHYKETAYPLAVKLGTITADLEAADVYSYPEDDSVLDPLLAEHLAHFGIDFSSMQKTEMTTAERELDQNTNFDWNRIQESGKELVPVFGPGYTGLVNLGNSCYLAATMQIVFSTHSFISRYFSHQSLKMAFEMAPADPTLDLNMQLTKLGHGLLSGKYSMPATQKDATTGDPRQEGIPPRMFKNVIAASHAEFSSMRQQDALDFFLHLVGKVERASNTTPDLDPSRSFKFGIEEKILCPSGKVGYNKREDCILSLNIPLHEATNKDELEAFHKQKAGKGLEENDMRSSDEIVRPRVPLEACLANFASSEPIEDYYSSALKGMTTAIKTTGLTSFPDYLVLHMRKFVMEEGWVPKKLDVYIDVPDVIDISHMRSKGLQPGEELLPDGVPEEVMESAQPVANEEIVAQLVSMGFSQLHCQKAAINTSNAGVEEAMNWLLSHMDDPDIDAPISHQTSDIDQSSVDTLLSFGFAEDVARKALKASGGDIEKATDWVFNNPNASVSDMDVSSSNSAQTPAQSGLPDGGGKYKLFGIVSHMGTSVHCGHYVAHILKEGRWVIFNDDKVGISTDPPKDMGYVYFFQRLD

SEQ ID NO: 10579 - protein, 756 aa, Arabidopsis thaliana
MNSFLAFGKDYVSWNYEKTGNPVYLHIKQTRKSIPEDRPLKKPTLLAIGVDGGFDNNEPEYEESYSIVILPDFVSLPFPSVELPEKVRIAVDTVVNAVGAERKEQVAAWTAEKKLISEHALTLQQIKSGIVIPPSGWKCSKCDKTENLWLNLTDGMILCGRKNWDGTGGNNHAVEHYKETAYPLAVKLGTITADLEAADVYSYPEDDSVLDPLLAEHLAHFGIDFSSMQKTEMTTAERELDQNTNFDWNRIQESGKELVPVFGPGYTGLVNLGNSCYLAATMQIVFSTHSFISRYFSHQSLKMAFEMAPADPTLDLNMQLTKLGHGLLSGKYSMPATQKDATTGDPRQEGIPPRMFKNVIAASHAEFSSMRQQDALDFFLHLVGKVERASNTTPDLDPSRSFKFGIEEKILCPSGKVGYNKREDCILSLNIPLHEATNKDELEAFHKQKAGKGLEENDMRSSDEIVRPRVPLEACLANFASSEPIEDYYSSALKGMTTAIKTTGLTSFPDYLVLHMRKFVMEEGWVPKKLDVYIDVPDVIDISHMRSKGLQPGEELLPDGVPEEVMESAQPVANEEIVAQLVSMGFSQLHCQKAAINTSNAGVEEAMNWLLSHMDDPDIDAPISHQTSDIDQSSVDTLLSFGFAEDVARKALKASGGDIEKATDWVFNNPNASVSDMDVSSSNSAQTPAQSGLPDGGGKYKLFGIVSHMGTSVHCGHYVAHILKEGRWVIFNDDKVGISTDPPKDMGYVYFFQRLD

SEQ ID NO: 10580 - DNA, 2071 bp, Arabidopsis thaliana
gatcatttcctgaaaactagaaaacacagtttaaagggaacataaaaagcaactctttgagagatcagagaaaccctaatttgctaagaaccctaatctcaatttccatcttccaaagttcagattctgtatgtaaatgcatctgaagaattctactgtagcagaacggcggtacatcggaaaagaaaccgccggttatttaacttcttcctccgatttggatccgaaacctaagattaaacatcatcgtcctcttcaggtacctgagattctgactccagacattggtgctggtgctggattcagtgtgtataacaatcaagttcaagctcagagtcgtcatcatctgacggttgaaatcccagattcatcgtctcacaatcttacatctaagagacctgtggtggttcaatcttctaatccgttcaacgttgacgatttccgaagacagcaacgcacaagcttgggttcgatttcatcttattgtccgtcgtatctcttatcgtttttttcttcttctcttccatcgatcccatcggcgactaatcagaagcttcttcgtcatgttcttagagtccgtttgatatgtttccatcttcgtttcttacttcttctctctgttcctcctctctatatctttttcctggtgattagtttcagattcttccttctctttgtcttctcgattatcgctttctctttcgtcctttcgatctctctcaaattcgctcttcctcacttaccatcgattcgtttgattatcgctcggttactttctctcaagcttacccctaccagatcatcctcttcatctcaggagaacactaaacatgttatttggtcaattgggtctaagcctgtgactgagaagaagaccaactctggctcatgggttcagaagtacagctctggtgatgtatacgagggagagtttcatagggggaagtgttcaggaagtggagtttattactattctatgaagggtaaatacgaaggggattggattgatgggaagtatgatggatatggagttgaaacttgggctaaagggagtaggtaccgaggtcaatacaggcaagggatgagacatggaactggtatctacagattttatacaggggatgtatatgctggtgagtggtcgaatggacagagccatggctgtggtgtgtatacctctgaggatggtagtcgttttgttggagagtttaaatggggtgtcaaacatggccttggtcattatcatttcagaaatggtgatacatatgctggggagtattttgcagacaggatgcatggttttggagtgtatcaatttggaaacgggcatcggtatgaaggagcctggcatgaggggagaaggcaaggacttggtatgtacacgttcaggaatggtgagacacaggcaggccattgggaagacggagttcttaactgtcctaccgagcagaccactcgccctgattcatcgttttccatcagtcattccaaggttgtcgacactgtccagcaagcaaggaaagcagccaagaaagcacgcgaagttgtgaaagttgaagagagagtgaacagagcagtgatggtcgcaaaccgagcagcaaatgctgctagagttgctgctacaaaggctgtccaaacccaaacatttcattgtagtagtggtgacgatcccttgtgaattcctgcggcaaagattttgacataatcgcagtcatgaccttacctcaaacttctacgaagacagaagagtgaaagagagatgtttagagaacagagtcagaattcgcaatctccgttgagattttcttgaaggtgaaccacttggaaccaatatcgagatctcataagtaataagtaagagatctggctatggagcaagtattactggtttactttttcttttctcccacttgttttatgagcaggctggtttaaaactgtacataggttgttgaagagtaagcaatgtgtgttaacaaaagatctttgtaacaagcgtaatccatgtaagagaagtaacaaaacattgttttacttttacaacgtgttgaaaataacacctttttttacc

SEQ ID NO: 10581 - protein, 513 aa, Arabidopsis thaliana
MHLKNSTVAERRYIGKETAGYLTSSSDLDPKPKIKHHRPLQVPEILTPDIGAGAGFSVYNNQVQAQSRHHLTVEIPDSSSHNLTSKRPVVVQSSNPFNVDDFRRQQRTSLGSISSYCPSYLLSFFSSSLPSIPSATNQKLLRHVLRVRLICFHLRFLLLLSVPPLYIFFLVISFRFFLLFVFSIIAFSFVLSISLKFALPHLPSIRLIIARLLSLKLTPTRSSSSSQENTKHVIWSIGSKPVTEKKTNSGSWVQKYSSGDVYEGEFHRGKCSGSGVYYYSMKGKYEGDWIDGKYDGYGVETWAKGSRYRGQYRQGMRHGTGIYRFYTGDVYAGEWSNGQSHGCGVYTSEDGSRFVGEFKWGVKHGLGHYHFRNGDTYAGEYFADRMHGFGVYQFGNGHRYEGAWHEGRRQGLGMYTFRNGETQAGHWEDGVLNCPTEQTTRPDSSFSISHSKVVDTVQQARKAAKKAREVVKVEERVNRAVMVANRAANAARVAATKAVQTQTFHCSSGDDPL

SEQ ID NO: 10582 - DNA, 1391 bp, Arabidopsis thaliana
acgattttgcctttgagttcatgtagtttacttaacttttgacgcaacgctacttcggaaagatctaaggatgaaattgttcataaaataagatcatctccctccgcttttctcttgaagtctctagtgtcttgcgtttttgaaatggcgatggtgaaaaactcctatatattattcgctcgtttatgcgtagagctttttcaagagcttccccctcttccatcagatgaatctcacggcgaaattacaactgtagagagacagtttttgcgtaattgtcaaatggagcttgaaaacttgtccctcaaaacagagctaccacttgtttatgttgatgaatcaaaatattggagattcatcaaaactgttagggttttggctgaggtttttaacaatatgaagactactcgaacaacacggaaaagtatcattcaggtgcttatgaatcccatcttaccatctgagagaagcaccgatacaatgaatttatttctgtccaccattgaaaaactagctgacttgcagttttctgatgaagatttcaatcagctttttcttcatttacagttggagaataagtacaatgacaaagtcgaagtgaagcttaggaaagaagcagaagatgcacttgctagaaaaattaaggaagtagtagatttgacggaacggttacttcaagtcgaagccttggagcaaaaacataaagcaaagttgcagcttaggacagaaactgaaaccgcggtagccatagaacgtgattatatgcgttggaaggctgaaattttcgagagcgaattcaacaatcaattggtactcaggagagaatcagaaattgcacttgataaagaaaggaaagagctggagggtattaaaaatctgcttgaaacttgtttcacaggacaaaagaacctgaaatcgcaggtgataacatggaaagacaagtacgaccaagagtcaagtattaggaaagaaaaagaggttgctctttctactaagaaactagaactcgagattttcaaacagctagccggatcgtacaaacaagatgcagatgcgatgcgacaagagagagacaatgctctcaaaacagtacaagagatagtggacgagcaacaacctccaccatcatttatctgccctatcacacaggatgtcatgaaaaatccacacatggctgctgatggattcacatacgaattagaagctattcaaaaatggattaacacaggtcacaggacgtcgccgatgactaatctcaaactttcacatttcagctttttccctaaccgagctctccgctctgcaattgaggagttgggacgttgattcttcttgtttttcaaaccggtttactcaagttgatattgggccgataatggacccatgaaacg

SEQ ID NO: 10583 - protein, 393 aa, Arabidopsis thaliana
MAMVKNSYILFARLCVELFQELPPLPSDESHGEITTVERQFLRNCQMELENLSLKTELPLVYVDESKYWRFIKTVRVLAEVFNNMKTTRTTRKSIIQVLMNPILPSERSTDTMNLFLSTIEKLADLQFSDEDFNQLFLHLQLENKYNDKVEVKLRKEAEDALARKIKEVVDLTERLLQVEALEQKHKAKLQLRTETETAVAIERDYMRWKAEIFESEFNNQLVLRRESEIALDKERKELEGIKNLLETCFTGQKNLKSQVITWKDKYDQESSIRKEKEVALSTKKLELEIFKQLAGSYKQDADAMRQERDNALKTVQEIVDEQQPPPSFICPITQDVMKNPHMAADGFTYELEAIQKWINTGHRTSPMTNLKLSHFSFFPNRALRSAIEELGR

SEQ ID NO: 10584 - protein, 391 aa, Arabidopsis thaliana
MVKNSYILFARLCVELFQELPPLPSDESHGEITTVERQFLRNCQMELENLSLKTELPLVYVDESKYWRFIKTVRVLAEVFNNMKTTRTTRKSIIQVLMNPILPSERSTDTMNLFLSTIEKLADLQFSDEDFNQLFLHLQLENKYNDKVEVKLRKEAEDALARKIKEVVDLTERLLQVEALEQKHKAKLQLRTETETAVAIERDYMRWKAEIFESEFNNQLVLRRESEIALDKERKELEGIKNLLETCFTGQKNLKSQVITWKDKYDQESSIRKEKEVALSTKKLELEIFKQLAGSYKQDADAMRQERDNALKTVQEIVDEQQPPPSFICPITQDVMKNPHMAADGFTYELEAIQKWINTGHRTSPMTNLKLSHFSFFPNRALRSAIEELGR

SEQ ID NO: 10585 - protein, 347 aa, Arabidopsis thaliana
MELENLSLKTELPLVYVDESKYWRFIKTVRVLAEVFNNMKTTRTTRKSIIQVLMNPILPSERSTDTMNLFLSTIEKLADLQFSDEDFNQLFLHLQLENKYNDKVEVKLRKEAEDALARKIKEVVDLTERLLQVEALEQKHKAKLQLRTETETAVAIERDYMRWKAEIFESEFNNQLVLRRESEIALDKERKELEGIKNLLETCFTGQKNLKSQVITWKDKYDQESSIRKEKEVALSTKKLELEIFKQLAGSYKQDADAMRQERDNALKTVQEIVDEQQPPPSFICPITQDVMKNPHMAADGFTYELEAIQKWINTGHRTSPMTNLKLSHFSFFPNRALRSAIEELGR

SEQ ID NO: 10586 - DNA, 2531 bp, Arabidopsis thaliana
ggtcttaccttgatcctctctctctctttctctcgccaacacaagatagttaaatgaaaggcttcagagactgggttttcgctctatccaactcaatggcatcatctagaccacttttgggaagtgacccttttttccgtgaccctcatcaagaacaagataaccactctcaagcacctgccgcaccacaaccagtgacactctcggaaccaccatgttcaaccagtagtgatttagaaattctgcctcctctctctcagcaacaagttccacttgaaagcttgtaccagtcaagtattgatcttaacggaaagaaacataatccactagcaaagattggtggccttcaagtgcagttcttacgccttgttcaaaggtttgggcagtcacagaataatattctagtctccaaggttttgtatcgggtacatcttgcgatgctgatacgagctgaggaatcagaacttaagaatgtaaaacttaggcaagatagggccaaagctttagcaagggagcaagaatcatctggcataccggagcttgatttctcacttagaatccttgtcctggggaaaacaggtgtcggcaagagtgcaaccataaactctatttttggtcagcccaaaagtgagactgatgctttccgaccgggcacagatcgcatagaagaggttatgggaactgtcagtggagttaaagttacctttattgatacccctggttttcacccactgtcatcttctagcacaagaaaaaaccgaaagattctcctatctattaagagatatgttaagaagcgtccacctgatgtagttctttacttggaccgccttgatatgatcgacatgcgatacagtgatttctccctcctgcagcttataactgaaatctttggtgcagctatatggttaaacacgatacttgtaatgacgcattccgcagctactacagaaggacgtaatggacaatctgtgaactatgagtcatatgtgggccagcgcatggatgtggttcaacattatatacatcaggctgtgtctgatacaaaactagaaaaccctgttctgttagttgaaaatcatcccagctgtaaaaagaatcttgctggtgagtatgttcttccaaatggggtggtatggaagcctcagtttatgtttctgtgcgtttgtaccaaagttcttggcgatgtccagtctttactgagatttcgtgacagcattggcctgggtcagccaagtagtacccgaacagcttcccttcctcatcttctttcagtttttctgcgccgtcgcttatcatcaggtgcagatgaaacagagaaagagatagataagcttctgaatttggatttagaggaggaagatgagtatgaccagttgcctacaatccgtatccttgggaaatcccggtttgagaagctgtcaaagtctcagaagaaggagtatctcgatgagcttgattacagggaaaccctttatctgaagaaacaattgaaggaagaatgccgaagacgacgggatgaaaagctagttgaagaggaaaatctcgaggacactgaacagcgtgaagcagctgttccactgcctgacatggcaggtccagacagttttgattcggattttccggctcacagatatcgatgcgtatcggcaggtgaccagtggctcgtgagacctgtctatgacccacaaggttgggatcgcgatgtgggatttgatggaataaatattgagacggctgcaaaaataaataggaatctattcgcttcagctacaggacaggtgagcagagacaagcaacgcttcactatccaatctgagactaatgcagcttatactagaaactttagagaacagacattctctgtagctgttgaccttcaatcatcaggagaagatctggtgtactcgtttcagggcggcacaaagcttcaaacatttaagcacaacacaactgatgttggagttggtttgacatcttttggtgggaaatactatgtgggcggaaagcttgaggataccttattggttgggaagagggtgaagttaactgcgaatgcaggtcagatgaggggttcagggcaaacagcaaacggcgggagctttgaagcttgtatcagagggagagattacccggtcagaaatgagcaaatcggtttgacaatgacggctctgtctttcaagcgagaactggtcttgaactatggtttacagactcagtttagaccagcccggggcacgaacatagacgtcaacataaacatgaacaataggaaaatggggaagataaatgtgaaacttaacagctctgagcactgggagattgctttgatatcagcgttaacgatgttcaaggctttagtacggcggagtaagactgaaatgactgaggaaaatgaagaagaaaagattgtgaattttctcgtttcctaaaaaaattaggtaaagaaaagatattttggacacatatgaatagatgataactgatgtaagagatgtttggaagacagaacatatgcacatttccttcag

SEQ ID NO: 10587 - protein, 792 aa, Arabidopsis thaliana
MKGFRDWVFALSNSMASSRPLLGSDPFFRDPHQEQDNHSQAPAAPQPVTLSEPPCSTSSDLEILPPLSQQQVPLESLYQSSIDLNGKKHNPLAKIGGLQVQFLRLVQRFGQSQNNILVSKVLYRVHLAMLIRAEESELKNVKLRQDRAKALAREQESSGIPELDFSLRILVLGKTGVGKSATINSIFGQPKSETDAFRPGTDRIEEVMGTVSGVKVTFIDTPGFHPLSSSSTRKNRKILLSIKRYVKKRPPDVVLYLDRLDMIDMRYSDFSLLQLITEIFGAAIWLNTILVMTHSAATTEGRNGQSVNYESYVGQRMDVVQHYIHQAVSDTKLENPVLLVENHPSCKKNLAGEYVLPNGVVWKPQFMFLCVCTKVLGDVQSLLRFRDSIGLGQPSSTRTASLPHLLSVFLRRRLSSGADETEKEIDKLLNLDLEEEDEYDQLPTIRILGKSRFEKLSKSQKKEYLDELDYRETLYLKKQLKEECRRRRDEKLVEEENLEDTEQREAAVPLPDMAGPDSFDSDFPAHRYRCVSAGDQWLVRPVYDPQGWDRDVGFDGINIETAAKINRNLFASATGQVSRDKQRFTIQSETNAAYTRNFREQTFSVAVDLQSSGEDLVYSFQGGTKLQTFKHNTTDVGVGLTSFGGKYYVGGKLEDTLLVGKRVKLTANAGQMRGSGQTANGGSFEACIRGRDYPVRNEQIGLTMTALSFKRELVLNYGLQTQFRPARGTNIDVNINMNNRKMGKINVKLNSSEHWEIALISALTMFKALVRRSKTEMTEENEEEKIVNFLVS

SEQ ID NO: 10588 - protein, 778 aa, Arabidopsis thaliana
MASSRPLLGSDPFFRDPHQEQDNHSQAPAAPQPVTLSEPPCSTSSDLEILPPLSQQQVPLESLYQSSIDLNGKKHNPLAKIGGLQVQFLRLVQRFGQSQNNILVSKVLYRVHLAMLIRAEESELKNVKLRQDRAKALAREQESSGIPELDFSLRILVLGKTGVGKSATINSIFGQPKSETDAFRPGTDRIEEVMGTVSGVKVTFIDTPGFHPLSSSSTRKNRKILLSIKRYVKKRPPDVVLYLDRLDMIDMRYSDFSLLQLITEIFGAAIWLNTILVMTHSAATTEGRNGQSVNYESYVGQRMDVVQHYIHQAVSDTKLENPVLLVENHPSCKKNLAGEYVLPNGVVWKPQFMFLCVCTKVLGDVQSLLRFRDSIGLGQPSSTRTASLPHLLSVFLRRRLSSGADETEKEIDKLLNLDLEEEDEYDQLPTIRILGKSRFEKLSKSQKKEYLDELDYRETLYLKKQLKEECRRRRDEKLVEEENLEDTEQREAAVPLPDMAGPDSFDSDFPAHRYRCVSAGDQWLVRPVYDPQGWDRDVGFDGINIETAAKINRNLFASATGQVSRDKQRFTIQSETNAAYTRNFREQTFSVAVDLQSSGEDLVYSFQGGTKLQTFKHNTTDVGVGLTSFGGKYYVGGKLEDTLLVGKRVKLTANAGQMRGSGQTANGGSFEACIRGRDYPVRNEQIGLTMTALSFKRELVLNYGLQTQFRPARGTNIDVNINMNNRKMGKINVKLNSSEHWEIALISALTMFKALVRRSKTEMTEENEEEKIVNFLVS

SEQ ID NO: 10589 - protein, 664 aa, Arabidopsis thaliana
MLIRAEESELKNVKLRQDRAKALAREQESSGIPELDFSLRILVLGKTGVGKSATINSIFGQPKSETDAFRPGTDRIEEVMGTVSGVKVTFIDTPGFHPLSSSSTRKNRKILLSIKRYVKKRPPDVVLYLDRLDMIDMRYSDFSLLQLITEIFGAAIWLNTILVMTHSAATTEGRNGQSVNYESYVGQRMDVVQHYIHQAVSDTKLENPVLLVENHPSCKKNLAGEYVLPNGVVWKPQFMFLCVCTKVLGDVQSLLRFRDSIGLGQPSSTRTASLPHLLSVFLRRRLSSGADETEKEIDKLLNLDLEEEDEYDQLPTIRILGKSRFEKLSKSQKKEYLDELDYRETLYLKKQLKEECRRRRDEKLVEEENLEDTEQREAAVPLPDMAGPDSFDSDFPAHRYRCVSAGDQWLVRPVYDPQGWDRDVGFDGINIETAAKINRNLFASATGQVSRDKQRFTIQSETNAAYTRNFREQTFSVAVDLQSSGEDLVYSFQGGTKLQTFKHNTTDVGVGLTSFGGKYYVGGKLEDTLLVGKRVKLTANAGQMRGSGQTANGGSFEACIRGRDYPVRNEQIGLTMTALSFKRELVLNYGLQTQFRPARGTNIDVNINMNNRKMGKINVKLNSSEHWEIALISALTMFKALVRRSKTEMTEENEEEKIVNFLVS

SEQ ID NO: 10590 - DNA, 1281 bp, Arabidopsis thaliana
gcaaaacaccaggaggaaaccaaaaagctagaggctttgtggagtgagaagaagagtctcagtgaaaacagaaagcagcatttgagattccactgttaatctttgaatcaaaaatgagtgcagcagctacaatgcctatgccccgagaagcgtctaattacgatgagatctctatgcaacagagcatgctcttctctgatagtctcaaggatctgaagaatctgagaacacagttgtattcagcagctgagtatttcgaactatcctacacaaacgatgaacaaaaacagatagtcgtggagacactgaaagattatgcaataaaggctctggtgaatacagttgaccatttggggtctgttacatataaagtaaatgactttgtagatgaaaaagtcgatgaagtagcaggaaccgaactgcgagtatcttgcattgaacagaggctacggatgtgccaagagtacatggatcatgaaggtcgttcccagcaatcacttgtgatcgacactccaaagttccacaagcggtacttcttgccttctggtgaaatcaaaagaggtggcaacctcgcaaagcttaagaatgttgaaggtagttttgatggagaagatgactggaaccaattcagaaatgctgttcgcgctacaattcgtgaaacgcctccaccacctgttagaaaaccgatacttcagtctccctctcaacggaaacctcaacgttcagcaaccttttcgttctcctctatcgccaccgcaccaaagaaagaacaagataagcgagcagtatcaccacatcggtttccgctgctaagatctggttcggttgctatccgaccgtcatcaatcagccggccaacaaccccgagcaagagtagagcggtaactccaactcctaaacggtatccgtcagaaccaagaagatcggcttcggttcgggttgcgttcgagaaagaagctcagaaagaaccagagcatcaacaacaaccgagcaagagcaaacggctgctaaaggcgctacttagccgacgcaaaacaaagaaggacgatacgctctacacttatttggacgaatattaaaccgaaagctggttttgtatgttgactggtaaaccggaaattacattccagttttaattgcatttacgtaatgtcaaattgtcaatatatgtgttacaaaatatgtccatgattctatgattttgtgtataccttatgactgtcagagtgtgaatgcagttttgtttacaagcgtagtaaaatttgctgtgaattattttag

SEQ ID NO: 10591 - protein, 321 aa, Arabidopsis thaliana
MSAAATMPMPREASNYDEISMQQSMLFSDSLKDLKNLRTQLYSAAEYFELSYTNDEQKQIVVETLKDYAIKALVNTVDHLGSVTYKVNDFVDEKVDEVAGTELRVSCIEQRLRMCQEYMDHEGRSQQSLVIDTPKFHKRYFLPSGEIKRGGNLAKLKNVEGSFDGEDDWNQFRNAVRATIRETPPPPVRKPILQSPSQRKPQRSATFSFSSIATAPKKEQDKRAVSPHRFPLLRSGSVAIRPSSISRPTTPSKSRAVTPTPKRYPSEPRRSASVRVAFEKEAQKEPEHQQQPSKSKRLLKALLSRRKTKKDDTLYTYLDEY

SEQ ID NO: 10592 - protein, 315 aa, Arabidopsis thaliana
MPMPREASNYDEISMQQSMLFSDSLKDLKNLRTQLYSAAEYFELSYTNDEQKQIVVETLKDYAIKALVNTVDHLGSVTYKVNDFVDEKVDEVAGTELRVSCIEQRLRMCQEYMDHEGRSQQSLVIDTPKFHKRYFLPSGEIKRGGNLAKLKNVEGSFDGEDDWNQFRNAVRATIRETPPPPVRKPILQSPSQRKPQRSATFSFSSIATAPKKEQDKRAVSPHRFPLLRSGSVAIRPSSISRPTTPSKSRAVTPTPKRYPSEPRRSASVRVAFEKEAQKEPEHQQQPSKSKRLLKALLSRRKTKKDDTLYTYLDEY

SEQ ID NO: 10593 - protein, 313 aa, Arabidopsis thaliana
MPREASNYDEISMQQSMLFSDSLKDLKNLRTQLYSAAEYFELSYTNDEQKQIVVETLKDYAIKALVNTVDHLGSVTYKVNDFVDEKVDEVAGTELRVSCIEQRLRMCQEYMDHEGRSQQSLVIDTPKFHKRYFLPSGEIKRGGNLAKLKNVEGSFDGEDDWNQFRNAVRATIRETPPPPVRKPILQSPSQRKPQRSATFSFSSIATAPKKEQDKRAVSPHRFPLLRSGSVAIRPSSISRPTTPSKSRAVTPTPKRYPSEPRRSASVRVAFEKEAQKEPEHQQQPSKSKRLLKALLSRRKTKKDDTLYTYLDEY

SEQ ID NO: 10594 - DNA, 1720 bp, Arabidopsis thaliana
tcactagtccccccccccccgacaccagttcttcttctcagggattacttactacctcttgtaagttctcattcgattctatttttgcttgaattctgtttcagctgatgaaacgcttgttatcatcttagccgtttcgttttctactctttctagttataaaattttgacttcttcaagagaattttttttgggttccaatcaatcagattgctatgatcctctgaatagaattttcttgttgatatagggacttgtgttgttgagtttgagcctatagtgatcaaacgggattttcatatgaactttactcaaatttagttacttttttaatcttataactgtagacaaaagcttatccttttattggttacaaatcgtatgaacatttgattctatgctttttgctttgccattaagcaattgattttttttagtttgcttgtttccggattatgggaatgaagcttcactgggattaagaatctgtaagtaatatgtttttgtttaataagctttaggcttatagatatgtttttttaaagttctaagttagtgttgtgtttgttactcttaaacatacttaaaaagctactaaatgagtgctattcaataatgttctgtttgatttcgatggaataatttagtgtgactgatgttgcttttatgtcgcttatgtattattggtgatctatgtgtaaaacatgtgttgcaggatagtaatgaaccgaagtaaagaagagaacgttgctccgacaatgaaagatgatagtccatttggaaagcttacagaggatctcttgatagagatatttatcagaattccaataacaaattgggaacaagtatcgtgtgttagaaagcagtgggctaatttattccgcggagaatgcttatggctggctgctcttaatcgggcgtatccacttgctagcaaaactaagagctggattggaccaattcgtcaaggattaagcaaacggtgactggaaacacacttgatttctatgaaaaaagctagcttaataatgtcttagttagattcaaggaacttaacagccttttagctgcaggagatatgtggctttatacatcagcagaaacatattaggtgtggatgatacagacatagatgagatgcttggacatatttacgtgttcttgaatgatcagcttcaactttccactatgcctgcttcaggcattttgcatggaacccttatcgaccaattgattgtttgtggccaatcgaaagaagaagctggtgagcttgcaacaaagatttggctggctcttcttgacaatttagaggacacaaaacatacatttaccgtgctgaaatcaatcgcacaagaatatgatggctttcttccatatccatattcaagaccaatcaaagtgcagtggaaggtgttcgagaaactgtttgtagatttccgtgacttgcttgatcattcagagtactgcgacttaataggaattgccaaaaataagtttcaaaccataccttatgtttggttaggctactaaacttagcctgcttcttccagtttccacagccctgtaaagtaatttgaggtccaattctacaacatacttgtacataagacattcaaagtctgcatcttgtaagaaagaaagacgtgtaaaatgcagattcttggccatgtataattcgtggttcgttttaaagcaaaagtcaaacattttgttgactaat

SEQ ID NO: 10595 - protein, 130 aa, Arabidopsis thaliana
MLGHIYVFLNDQLQLSTMPASGILHGTLIDQLIVCGQSKEEAGELATKIWLALLDNLEDTKHTFTVLKSIAQEYDGFLPYPYSRPIKVQWKVFEKLFVDFRDLLDHSEYCDLIGIAKNKFQTIPYVWLGY

SEQ ID NO: 10596 - protein, 113 aa, Arabidopsis thaliana
MPASGILHGTLIDQLIVCGQSKEEAGELATKIWLALLDNLEDTKHTFTVLKSIAQEYDGFLPYPYSRPIKVQWKVFEKLFVDFRDLLDHSEYCDLIGIAKNKFQTIPYVWLGY

SEQ ID NO: 10597 - protein, 93 aa, Arabidopsis thaliana
MCCRIVMNRSKEENVAPTMKDDSPFGKLTEDLLIEIFIRIPITNWEQVSCVRKQWANLFRGECLWLAALNRAYPLASKTKSWIGPIRQGLSKR

SEQ ID NO: 10598 - DNA, 2211 bp, Arabidopsis thaliana
aacttaaacggcgtttactgcttcaagataaaatacgctttgcccaaaaaacgttattagttcgtaatccgtttttgctctcccttttgagatcttttaattaaaaaaattccgttttaagtgaatgcgtgtaagcaacagttcgaattcgaagcgagagctaaaatcaaaatctctctgatttgttgttttgttgatgttttatgaagtgatttgcattagattggattgaaatggctacggagcctacaaggagctggttccagatacggcagcagaaaccggataaatcaagccctactaaaaagggacaagagggaaatgtgaagaatcttgggagacctcctatgaatgatgcaccatctaatgctactaaacagaaagttgctgcagcgaagcaatatatcgagaatcattataaaattcagaagaagagtctccaggaaagaaaagagcgtcggagcatcttggaacaaaacctagctgatgctgatgttactgttgaagacaagatggatatattaaagaactttgagaaaaaggaaatggagtatatgcgtctacaaagacagaaaatgggggttgatgactttgaactgcttagcatcattggccggggtgctttcggtgaggtgagaatttgtaaagaaaaatctactggaagcgtatatgcaatgaaaaagttaaagaaatccgagatgcttcgacgagggcaggtggaacatgttaaagctgaaagaaatgtgcttgcagaagtggatagccctttcattgtcaagctttgttactctttccaagatgatgagcatttgtatcttattatggaatacctccctggaggtgatatgatgacactgctgatgcgaaaggataccttacgggaagatgagactcggttttatgttgcgcagacaattctggctattgagtctatccataagcataattacgtccacagggatataaagcctgataatttattgattactcgaaacggccatatcaagctttcagattttggattgagcaagtctctggaaagcaaaaattttccagattttaaggcggagcttgttgacaggagtacaaagcctgcagcagaacatgatagactctccaagcctccttctgcacctaggagaactcagcaggaacagcttttacattggcaacaaaacagaaggaccctggctttttctacagtaggaactcccgattacattgcccctgaggtgctgctgaagaaagggtatggaatggagtgtgattggtggtctcttggagcaatcatgttcgagatgcttgtagggtttccgccattctattccgaagaacctttggcaacatgtagaaagtttatctctgcagattgtaaactggaaaacctgcttgaagttccctgatgaagctaagctctccatcgaggtaaaagatctcatccgaagactgctctgcaatgtcgaacagaggcttgggaccaaaggagttcacgaaatcaaagcacacccttggtttaggggagtcgaatgggaacggctatatgagtcaaatgctccatatataccacaagtgaagcatgagcttgatacccaaaactttgaaaagtttgatgaggtaccatctactagccaaacttcttcaaagtctagcccttggagaaagatgatctcatccaaagatgcaaatttccttggttatacattcaagaatctggagatagttgatgaacaccatatccctggcatggcggaactgaagcggaagagtaagacagcaaataaaccatctctcaaaacactcttcgaaacaccatatcctccttctgagaatcaagccttaaaggatttgcttgattcacctatttactctgaaggctctagagggtcttccggatcaccattttcacgaccgaatcaatcacaggcccggagatgatcaaaagggaaaatctaaaagtgattaagaacaaacaaagtaaaagtaaaaaaaaaggtagtcattgttcttcagttgcaaattttcatcttttcatacatatatactctgtaatgtaaaaaaaaaacagtgaacatccgaaagagaatcaaaaccaaaatgcatataggaaactttataggtatacaaacatattccaatgtttctgtgatccccaattatctaaccttgtaagctcttttatttttatttttgcttataaatatttacatacat

SEQ ID NO: 10599 - protein, 389 aa, Arabidopsis thaliana
MATEPTRSWFQIRQQKPDKSSPTKKGQEGNVKNLGRPPMNDAPSNATKQKVAAAKQYIENHYKIQKKSLQERKERRSILEQNLADADVTVEDKMDILKNFEKKEMEYMRLQRQKMGVDDFELLSIIGRGAFGEVRICKEKSTGSVYAMKKLKKSEMLRRGQVEHVKAERNVLAEVDSPFIVKLCYSFQDDEHLYLIMEYLPGGDMMTLLMRKDTLREDETRFYVAQTILAIESIHKHNYVHRDIKPDNLLITRNGHIKLSDFGLSKSLESKNFPDFKAELVDRSTKPAAEHDRLSKPPSAPRRTQQEQLLHWQQNRRTLAFSTVGTPDYIAPEVLLKKGYGMECDWWSLGAIMFEMLVGFPPFYSEEPLATCRKFISADCKLENLLEVP

SEQ ID NO: 10600 - protein, 351 aa, Arabidopsis thaliana
MNDAPSNATKQKVAAAKQYIENHYKIQKKSLQERKERRSILEQNLADADVTVEDKMDILKNFEKKEMEYMRLQRQKMGVDDFELLSIIGRGAFGEVRICKEKSTGSVYAMKKLKKSEMLRRGQVEHVKAERNVLAEVDSPFIVKLCYSFQDDEHLYLIMEYLPGGDMMTLLMRKDTLREDETRFYVAQTILAIESIHKHNYVHRDIKPDNLLITRNGHIKLSDFGLSKSLESKNFPDFKAELVDRSTKPAAEHDRLSKPPSAPRRTQQEQLLHWQQNRRTLAFSTVGTPDYIAPEVLLKKGYGMECDWWSLGAIMFEMLVGFPPFYSEEPLATCRKFISADCKLENLLEVP

SEQ ID NO: 10601 - protein, 296 aa, Arabidopsis thaliana
MDILKNFEKKEMEYMRLQRQKMGVDDFELLSIIGRGAFGEVRICKEKSTGSVYAMKKLKKSEMLRRGQVEHVKAERNVLAEVDSPFIVKLCYSFQDDEHLYLIMEYLPGGDMMTLLMRKDTLREDETRFYVAQTILAIESIHKHNYVHRDIKPDNLLITRNGHIKLSDFGLSKSLESKNFPDFKAELVDRSTKPAAEHDRLSKPPSAPRRTQQEQLLHWQQNRRTLAFSTVGTPDYIAPEVLLKKGYGMECDWWSLGAIMFEMLVGFPPFYSEEPLATCRKFISADCKLENLLEVP

SEQ ID NO: 10602 - DNA, 2717 bp, Arabidopsis thaliana
gaagggaagaagaatccaacttcatcaattcagattcgcacgcttgaaattatctgaataaaaatcgaaagctaataatgagctgatcgctaaaaatatctctcgaattcaatcttcctgattttcgatttctgtctctagggtttcaatatccgataaaagcgatggagacggagatggatttctcagatggtgaacaaactaatggtaattcacatgttactgcctcccaatactttgctcctccgggttataatagaagtcctgtggctgcttatgggaatggaaacacaaccattggattagaaaaaggaatagaaaggagactagatcatcatgagcaactacctggttatatctttatgtgtaatgggagaacgaaaaccgattgctaccgttaccgtgttttcgggattccaagaggaggaaaagacgttgttgagagtataaagccaggcatgaagcttttcctctatgactttgagaagagacttctttatggtgtgtatgaagctactgttggtggcaggttggatatagaacctgaagcttttgaagggaaatatccagctcaagttggatttagaattgtcatgaactgtttacccttgacagaaaacactttcaagtctactatctatgaaaattacaaaggttccaaatttaagcaagaactttctcctcaccaagttatgtctctgttatcattgtttcgttcatttacgtctccagaactcgatttgttgcctcataggttggcttccagagcttcagcacctaggactctatcttttgaggaaaggttcatagcggctacacatcttagaaatgcttcatcggttttagatcctctgtctgctcgtcatgtagaaccacgacttggctctgttatggcccatcagcctgttccccgcacatctctgcttcaacatagttactttagacaagacgactatacgaccccacctagagaaagtctgtcaaatttgaatcagccttattatcctacagaagctcggcaactacggttgctcggagacccttctcggtcagattctcctctgtccgaacctccgcggtcatctattcaggatcctcaactcaaatacctcaccattttatctaatattcggagatatggatctgcatcagatcgcttggcctcagaaaatgaatatcatccggcaacaccatcagagaaggaccagtttgctgtaccttattctgataataaaaattacccttcgactttatctgggagtgagcatccttctgcttctgcagctaatgggagtgtgtatagaagtgagttctataattcagcatcacaaaaggaaggggaagctagtcagcagcatgagatccctgctgggacttaccatcacccagaagcatcaacagtttccaatactacaaagtccatgcaaccagatatgcaggcagttagtgttgctcaatctcataccgagacagctggctatcctacaccggcacatggtgaagcttcacaaccacctgctggagcaattggttacacacaccaacctcaaagtgtagcgggtaattatagcacgcattcacagcctgggaatgtggaagaaagtacacaatcatatgctggaacagatagttactcacaacagcaatattatgcagctatggggcctactactcaactccatgctggtggatatattcaaaaacctcatgaaattgggtactctcagcaacctcatgatgcggcaaccgggtactctcagcaacctcatgatgcagcaaccgggtactctcagcaacctcatgatgcagcaaccgggtactctcagcaacctcatgccgcatcaaccgggtactctcagcaaacctatgctgcagcaaccgggtacactcagcaaccccatgcggcggcagccgggtacactcagcaaccccatgcggcggcaaccgggtattctcagcaaccccatgctgcagctaccgcgcacgctcagcaaccctatgctgcagcgaccgcgcacgctcagcaactccatgctgtagctactgggtatgctctgcaactccatgctgcagctaccgggtacgctcagcaaccccatgctgccgcaactgggtatgctttgcaaccacatgctcaagctgttgaatacacaatgcaaccacatgctcaagctgttggctacatgccgcaataccatgctcacgctgttgtatacagtcaacaaggtgtgacgcaaggttctgtaccaagggctcctgggacaactgattgtaatgctgcaaaccaggcatattctgcaacaggagattggaatgcagtgcatcagtcttattaccctcagacagcagatgcaaccacaacctattatcaaacatcttaaaacgttaaagcaaagtgttgctactctggatctgagaaacttgtgcgtgatgggtgcggaagcatggactcgaactggtgcactcagtggaaaagaaggtcaaggacataaaactagagtctccagctccgtttactgtaagtttaaaagttctatgttacggtttgatcatattcatttctgagctgcgcatgaggaaattcctcaaaccatcaaaacttctttaagtcccgtttcaggagtgcaatctgaaatgcaattctgattgggatttaaagttaataaaacatattataactctgttatcattacttatgctaaaacatttcttttagt

SEQ ID NO: 10603 - protein, 738 aa, Arabidopsis thaliana
METEMDFSDGEQTNGNSHVTASQYFAPPGYNRSPVAAYGNGNTTIGLEKGIERRLDHHEQLPGYIFMCNGRTKTDCYRYRVFGIPRGGKDVVESIKPGMKLFLYDFEKRLLYGVYEATVGGRLDIEPEAFEGKYPAQVGFRIVMNCLPLTENTFKSTIYENYKGSKFKQELSPHQVMSLLSLFRSFTSPELDLLPHRLASRASAPRTLSFEERFIAATHLRNASSVLDPLSARHVEPRLGSVMAHQPVPRTSLLQHSYFRQDDYTTPPRESLSNLNQPYYPTEARQLRLLGDPSRSDSPLSEPPRSSIQDPQLKYLTILSNIRRYGSASDRLASENEYHPATPSEKDQFAVPYSDNKNYPSTLSGSEHPSASAANGSVYRSEFYNSASQKEGEASQQHEIPAGTYHHPEASTVSNTTKSMQPDMQAVSVAQSHTETAGYPTPAHGEASQPPAGAIGYTHQPQSVAGNYSTHSQPGNVEESTQSYAGTDSYSQQQYYAAMGPTTQLHAGGYIQKPHEIGYSQQPHDAATGYSQQPHDAATGYSQQPHDAATGYSQQPHAASTGYSQQTYAAATGYTQQPHAAAAGYTQQPHAAATGYSQQPHAAATAHAQQPYAAATAHAQQLHAVATGYALQLHAAATGYAQQPHAAATGYALQPHAQAVEYTMQPHAQAVGYMPQYHAHAVVYSQQGVTQGSVPRAPGTTDCNAANQAYSATGDWNAVHQSYYPQTADATTTYYQTS

SEQ ID NO: 10604 - protein, 734 aa, Arabidopsis thaliana
MDFSDGEQTNGNSHVTASQYFAPPGYNRSPVAAYGNGNTTIGLEKGIERRLDHHEQLPGYIFMCNGRTKTDCYRYRVFGIPRGGKDVVESIKPGMKLFLYDFEKRLLYGVYEATVGGRLDIEPEAFEGKYPAQVGFRIVMNCLPLTENTFKSTIYENYKGSKFKQELSPHQVMSLLSLFRSFTSPELDLLPHRLASRASAPRTLSFEERFIAATHLRNASSVLDPLSARHVEPRLGSVMAHQPVPRTSLLQHSYFRQDDYTTPPRESLSNLNQPYYPTEARQLRLLGDPSRSDSPLSEPPRSSIQDPQLKYLTILSNIRRYGSASDRLASENEYHPATPSEKDQFAVPYSDNKNYPSTLSGSEHPSASAANGSVYRSEFYNSASQKEGEASQQHEIPAGTYHHPEASTVSNTTKSMQPDMQAVSVAQSHTETAGYPTPAHGEASQPPAGAIGYTHQPQSVAGNYSTHSQPGNVEESTQSYAGTDSYSQQQYYAAMGPTTQLHAGGYIQKPHEIGYSQQPHDAATGYSQQPHDAATGYSQQPHDAATGYSQQPHAASTGYSQQTYAAATGYTQQPHAAAAGYTQQPHAAATGYSQQPHAAATAHAQQPYAAATAHAQQLHAVATGYALQLHAAATGYAQQPHAAATGYALQPHAQAVEYTMQPHAQAVGYMPQYHAHAVVYSQQGVTQGSVPRAPGTTDCNAANQAYSATGDWNAVHQSYYPQTADATTTYYQTS

SEQ ID NO: 10605 - protein, 672 aa, Arabidopsis thaliana
MCNGRTKTDCYRYRVFGIPRGGKDVVESIKPGMKLFLYDFEKRLLYGVYEATVGGRLDIEPEAFEGKYPAQVGFRIVMNCLPLTENTFKSTIYENYKGSKFKQELSPHQVMSLLSLFRSFTSPELDLLPHRLASRASAPRTLSFEERFIAATHLRNASSVLDPLSARHVEPRLGSVMAHQPVPRTSLLQHSYFRQDDYTTPPRESLSNLNQPYYPTEARQLRLLGDPSRSDSPLSEPPRSSIQDPQLKYLTILSNIRRYGSASDRLASENEYHPATPSEKDQFAVPYSDNKNYPSTLSGSEHPSASAANGSVYRSEFYNSASQKEGEASQQHEIPAGTYHHPEASTVSNTTKSMQPDMQAVSVAQSHTETAGYPTPAHGEASQPPAGAIGYTHQPQSVAGNYSTHSQPGNVEESTQSYAGTDSYSQQQYYAAMGPTTQLHAGGYIQKPHEIGYSQQPHDAATGYSQQPHDAATGYSQQPHDAATGYSQQPHAASTGYSQQTYAAATGYTQQPHAAAAGYTQQPHAAATGYSQQPHAAATAHAQQPYAAATAHAQQLHAVATGYALQLHAAATGYAQQPHAAATGYALQPHAQAVEYTMQPHAQAVGYMPQYHAHAVVYSQQGVTQGSVPRAPGTTDCNAANQAYSATGDWNAVHQSYYPQTADATTTYYQTS

SEQ ID NO: 10606 - DNA, 1240 bp, Arabidopsis thaliana
aagaagagttgagaattaaaaaatggaggagacgacgattcctttcaagagcttacatagcagagaatatcaaggtcataagaagaaggtacattcagtagcttggaattcgaatggaacaaagcttgcttcgggttctgttgatcaaacggctcgcatttggaatatcgaaccacacggtcatagcaaggctaaggaccttgagctaaagggtcatactgatagtgtggatcagctatgttgggatcccaaacattcagatcttgttgctactgcctctggtgataaaagcgttcgtctttgggatgctcgcagtggaaaatgcacacagcaggcagaacttagtggagagaatataaacatcacctacaaacctgacgggacacatgtagctgttggtaatagggatgatgagcttacaattctggatgtccgtaagtttaaacctctacacaggcgcaaattcaattatgaggttaatgagattgcttggaacatgcctggagattttttcttcttgactactggacttggcactgttgaagttctttcatatccatctcttaaaccacttgacactctcacagcccacacagccgggtgttattgtattgcaattgatcctaaagggagatattttgctgtcgggagtgcggattccttagtaagcctttgggatatctcagacatgctttgtttgagaacatttaccaaacttgagtggccagtcagaacaataagcttcaactattcgggagagtatattgcttcagccagtgaagatttattcattgatattgctaatgtccaaaccgggcggacggtgcatcagattccatgtcgggcagccatgaacagtgttgagtggaatcccaaatacaatttacttgcatatgcaggtgatgacaagaatcccaagtataatactgatgaaggtgttttccggatatttggttttgagagctcgtaggaacagagcactgaatcgggaaacatgatacacaactccacttgattgttccttgttgagttagaaaaagtttatgtgcctagtgtacctaaatatgtattgtcagtatatcaagttggaataatcttacagtatcactaaatacattgaaagtttgcagttctgaatctggcattttatttattgcaaaaatttgttactatacaagcaatgttgtttattattaacgaagaatgaaattaataagatcaagatcagaattctaatccc

SEQ ID NO: 10607 - protein, 315 aa, Arabidopsis thaliana
MEETTIPFKSLHSREYQGHKKKVHSVAWNSNGTKLASGSVDQTARIWNIEPHGHSKAKDLELKGHTDSVDQLCWDPKHSDLVATASGDKSVRLWDARSGKCTQQAELSGENINITYKPDGTHVAVGNRDDELTILDVRKFKPLHRRKFNYEVNEIAWNMPGDFFFLTTGLGTVEVLSYPSLKPLDTLTAHTAGCYCIAIDPKGRYFAVGSADSLVSLWDISDMLCLRTFTKLEWPVRTISFNYSGEYIASASEDLFIDIANVQTGRTVHQIPCRAAMNSVEWNPKYNLLAYAGDDKNPKYNTDEGVFRIFGFESS

SEQ ID NO: 10608 - protein, 157 aa, Arabidopsis thaliana
MPGDFFFLTTGLGTVEVLSYPSLKPLDTLTAHTAGCYCIAIDPKGRYFAVGSADSLVSLWDISDMLCLRTFTKLEWPVRTISFNYSGEYIASASEDLFIDIANVQTGRTVHQIPCRAAMNSVEWNPKYNLLAYAGDDKNPKYNTDEGVFRIFGFESS

SEQ ID NO: 10609 - DNA, 1474 bp, Arabidopsis thaliana
acataaacactccacacgctctgcttcgtccaatcaccaaacacgctttaatgactctcacgttttcctcctccgccgcaaccgttgccgttgctgctgcaaccgtaacctcctccgctagggttccggtttatccactcgcttcgtcgactcttcgtggattagtatctttcagattaaccgcgaagaagctgtttctgccgcctcttcgttctcgcggcggcgttagtgtgagagccatgtctgagcttgttcaggataaagaatcgtccgtcgcggcgagcattctttcaatgaagccgccggtgagacgccgagtgagcttagtcattcccgtactttcttggatgcgcgaagtgaacaagatcttttatctggtatcaagaaggaagctgaagctggaaggttgccagcaaatgttgcagcaggaatggaagaattgtattggaactacaaaaatgcagttttaagtagtggagcttccagggcagatgaaactgttgtatcaaacatgtctgttgcttttgatcgcatgcttcttggtgtggaggatccttatacttttaatccatatcataaagcagtcagagaaccatttgactactacatgtttgtccatacatacatccgtcctcttattgatttcaaaaattcgtacgttggaaatgcttctatattctctgagctggaagacaagattcgacagggacacaatatcgtgttgatatcaaaccatcaaagtgaagctgatccggctgtcatttctctattgcttgaagcacaatctcctttcataggagagaacattaaatgtgtggctggtgatcgattcatcactgatcctctttgtaagccgttcagtatgggaaggaacctcatatgtgtttactcgaaaaagcacatgaatgatgatcctgagcttgttgacatgaaaagaaaagcaaacacacgaagcttaaaggagatggctacaatgctaaggtctggcggtcaacttatatggattgcaccaagcggtggaagggaccgcccgaatccttctactggggaatggtttcctgcaccctttgatgcttcttcggtagacaacatgagaagactggttgaacattctggcgctcctggacatatatatccaatgtctttgctttgctatgacatcatgccccctccaccccaggttgagaaagaaatcggagagaaaagattagttgggtttcacggtactggactatcaattgctcctgaaatcaacttctcagacgtcacagcagactgcgagagccctaatgaggcgaaagaagcatacagccaagctttgtacaagtcggtgaatgaacaatacgagatcttaaactctgcgattaaacacagaagaggagtagaagcatcaacttcaagggtctctttgtcacaaccttggaattagtctctcgttttagggatacacaaacacaatcaatggaaaatactc

SEQ ID NO: 10610 - protein, 332 aa, Arabidopsis thaliana
MEELYWNYKNAVLSSGASRADETVVSNMSVAFDRMLLGVEDPYTFNPYHKAVREPFDYYMFVHTYIRPLIDFKNSYVGNASIFSELEDKIRQGHNIVLISNHQSEADPAVISLLLEAQSPFIGENIKCVAGDRFITDPLCKPFSMGRNLICVYSKKHMNDDPELVDMKRKANTRSLKEMATMLRSGGQLIWIAPSGGRDRPNPSTGEWFPAPFDASSVDNMRRLVEHSGAPGHIYPMSLLCYDIMPPPPQVEKEIGEKRLVGFHGTGLSIAPEINFSDVTADCESPNEAKEAYSQALYKSVNEQYEILNSAIKHRRGVEASTSRVSLSQPWN

SEQ ID NO: 10611 - protein, 305 aa, Arabidopsis thaliana
MSVAFDRMLLGVEDPYTFNPYHKAVREPFDYYMFVHTYIRPLIDFKNSYVGNASIFSELEDKIRQGHNIVLISNHQSEADPAVISLLLEAQSPFIGENIKCVAGDRFITDPLCKPFSMGRNLICVYSKKHMNDDPELVDMKRKANTRSLKEMATMLRSGGQLIWIAPSGGRDRPNPSTGEWFPAPFDASSVDNMRRLVEHSGAPGHIYPMSLLCYDIMPPPPQVEKEIGEKRLVGFHGTGLSIAPEINFSDVTADCESPNEAKEAYSQALYKSVNEQYEILNSAIKHRRGVEASTSRVSLSQPWN

SEQ ID NO: 10612 - protein, 298 aa, Arabidopsis thaliana
MLLGVEDPYTFNPYHKAVREPFDYYMFVHTYIRPLIDFKNSYVGNASIFSELEDKIRQGHNIVLISNHQSEADPAVISLLLEAQSPFIGENIKCVAGDRFITDPLCKPFSMGRNLICVYSKKHMNDDPELVDMKRKANTRSLKEMATMLRSGGQLIWIAPSGGRDRPNPSTGEWFPAPFDASSVDNMRRLVEHSGAPGHIYPMSLLCYDIMPPPPQVEKEIGEKRLVGFHGTGLSIAPEINFSDVTADCESPNEAKEAYSQALYKSVNEQYEILNSAIKHRRGVEASTSRVSLSQPWN

SEQ ID NO: 10613 - DNA, 1060 bp, Arabidopsis thaliana
gacaaacacagtcaccatctctctctctctttctctctcactcacacattagggagtaaacagctaccagaaaaaccttttttatcttctcacaaatttaataaagtgggtgctgagattgaataacgtaatccaagatcctccaactcacagaaaggcagattcaagaacagtagtgaaggagagatctggtaaaatggcgagagagaagataaggataaagaagattgataacataacagcgagacaagttactttctcaaagagaagaagaggaatcttcaagaaagccgatgaactttcagttctttgcgatgctgatgttgctctcatcatcttctctgccaccggaaagctcttcgagttctccagctcaagaatgagagacatattgggaaggtatagtcttcatgcaagtaacatcaacaaattgatggatccaccttctactcatctccggcttgagaattgtaacctctccagactaagtaaggaagtcgaagacaaaaccaagcagctacggaaactgagaggagaggatcttgatggattgaacttagaagagttgcagcggctggagaaactacttgaatccggacttagccgtgtgtctgaaaagaagggcgagtgtgtgatgagccaaattttctcacttgagaaacggggatcggaattggtggatgagaataagagactgagggataaactagagacgttggaaagggcaaaactgacgacgcttaaagaggctttggagacagagtcggtgaccacaaatgtgtcaagctacgacagtggaactccccttgaggatgactccgacacttccctgaagcttgggcttccatcttgggaatgaatctgagagagagaaagatccagcagagttgacttcgatggaagcccacaaatattaagcctaccttttccctttcttttctttgaataagtgttgaaaaagaattgagatgggaagaatgaattctcattgcattgcagagaagcaagtttcagatattgtacgtgttattggtctttataactattttgcaccaaaaag

SEQ ID NO: 10614 - protein, 220 aa, Arabidopsis thaliana
MAREKIRIKKIDNITARQVTFSKRRRGIFKKADELSVLCDADVALIIFSATGKLFEFSSSRMRDILGRYSLHASNINKLMDPPSTHLRLENCNLSRLSKEVEDKTKQLRKLRGEDLDGLNLEELQRLEKLLESGLSRVSEKKGECVMSQIFSLEKRGSELVDENKRLRDKLETLERAKLTTLKEALETESVTTNVSSYDSGTPLEDDSDTSLKLGLPSWE

SEQ ID NO: 10615 - protein, 159 aa, Arabidopsis thaliana
MRDILGRYSLHASNINKLMDPPSTHLRLENCNLSRLSKEVEDKTKQLRKLRGEDLDGLNLEELQRLEKLLESGLSRVSEKKGECVMSQIFSLEKRGSELVDENKRLRDKLETLERAKLTTLKEALETESVTTNVSSYDSGTPLEDDSDTSLKLGLPSWE

SEQ ID NO: 10616 - protein, 141 aa, Arabidopsis thaliana
MDPPSTHLRLENCNLSRLSKEVEDKTKQLRKLRGEDLDGLNLEELQRLEKLLESGLSRVSEKKGECVMSQIFSLEKRGSELVDENKRLRDKLETLERAKLTTLKEALETESVTTNVSSYDSGTPLEDDSDTSLKLGLPSWE

SEQ ID NO: 10617 - DNA, 480 bp, Arabidopsis thaliana
gacaatttgtttttcattcagaacaaataataaaaacgaaacacacaaaaaagaaaaaaaaaaaagaagggacatggacgctattgattccgtcgtggatcctcttagagactttgccaaggacagcattcgcctcgttaagcgttgtcacaagccagatcgcaaagaattcacgaaagttgcagtccgtacagcaatcgggttcgtagtaatgggattcgtgggattctttgtgaagctcatctttattccaatcaacaacatcatcgtcggtgctacttagataacaaagggaagataaaagatggagaagggtagttacagctttgttgttttcatgaagacacttcacagtttttttcttttttcttgttcagatactcaaaaagaggaaacattttgtgaacctagtttaaccacacatttgggatcaatctctagtaattttccttctgtttaatgtatgtcactgtttatttc

SEQ ID NO: 10618 - protein, 93 aa, Arabidopsis thaliana
TICFSFRTNNKNETHKKEKKKRRDMDAIDSVVDPLRDFAKDSIRLVKRCHKPDRKEFTKVAVRTAIGFVVMGFVGFFVKLIFIPINNIIVGAT

SEQ ID NO: 10619 - protein, 69 aa, Arabidopsis thaliana
MDAIDSVVDPLRDFAKDSIRLVKRCHKPDRKEFTKVAVRTAIGFVVMGFVGFFVKLIFIPINNIIVGAT

SEQ ID NO: 10620 - protein, 68 aa, Arabidopsis thaliana
QFVFHSEQIIKTKHTKKKKKKEGTWTLLIPSWILLETLPRTAFASLSVVTSQIAKNSRKLQSVQQSGS

SEQ ID NO: 10621 - DNA, 1243 bp, Arabidopsis thaliana
gtcacatgacatcttacttctctcttccttttgctttcgcatcttcttcttcgtcaacgaatcctcggactctccggcgatgccccgtcgattaaacgacggcgagcctggccgttttaccgccaccgctcttcttttaatcggtttaatctcttgtgttatcgtctacgctgttttctcttctgtcctccgtccatcccaagatcctacactcgttgattccgcggttcgattcaaagaggagccgcgagatcacgatgcaactgaagacggtgaaggtgggtgttgccgtggaattgataatctggagctttggggtccggcggtgaagtggggcacggattttaagtttaattcgtctgatggatgttgtaaagcttgtaaagttatgtgtagtggcaacgatggaccttgcttgtgcgattcatgggtgttttgtgggaacaaagaggattgtggctcgaagtttggagagtgttggttgaagaagcaaaaagatgtcttggtgcctgatcgacaaggaggtggcgagaaagtaatgtggacatctggacttatcttcggacaaggccagggcattgttggttttgagacggaacacggcgtaattcatgtcaaacttcaccctgaatgcgctcctcactcagtatactacattctgagtttgttaactctacgccattgtgcaggctgccagtttcatcgagcagagaaccggggatcatattgggactcagaaggcaatcatgtaaagaatgctccctttggtccaccatacgctatgattcaaggaatactccaggccgagggaaacattttcacaccgatcccaaccgagcactgcccaactataagccgtggctcggtggcgtgggtcggctcgggtccagaattcttcatcagtttagcaaaccaccacgaatggaaacaatcttacacggtattcggctcagttctaccagaagacatggatgtcgtggagacaattgccggtttaccaacaagagccgatgtctggaacagcgtcaatgtctctgtgctggagaaaccggtttccttaaccgtacggagaatgaagacgggccaagaacaagaagaaaccggttcatgaagaacatagaaatgagttcagaatagttattgtttcttttttggaattttacaatttctctttgttcatagatagaaaactgaaattttcttggtcttctggccatttcaatgaaaaattattggttaccat

SEQ ID NO: 10622 - protein, 369 aa, Arabidopsis thaliana
SHDILLLSSFCFRIFFFVNESSDSPAMPRRLNDGEPGRFTATALLLIGLISCVIVYAVFSSVLRPSQDPTLVDSAVRFKEEPRDHDATEDGEGGCCRGIDNLELWGPAVKWGTDFKFNSSDGCCKACKVMCSGNDGPCLCDSWVFCGNKEDCGSKFGECWLKKQKDVLVPDRQGGGEKVMWTSGLIFGQGQGIVGFETEHGVIHVKLHPECAPHSVYYILSLLTLRHCAGCQFHRAENRGSYWDSEGNHVKNAPFGPPYAMIQGILQAEGNIFTPIPTEHCPTISRGSVAWVGSGPEFFISLANHHEWKQSYTVFGSVLPEDMDVVETIAGLPTRADVWNSVNVSVLEKPVSLTVRRMKTGQEQEETGS

SEQ ID NO: 10623 - protein, 343 aa, Arabidopsis thaliana
MPRRLNDGEPGRFTATALLLIGLISCVIVYAVFSSVLRPSQDPTLVDSAVRFKEEPRDHDATEDGEGGCCRGIDNLELWGPAVKWGTDFKFNSSDGCCKACKVMCSGNDGPCLCDSWVFCGNKEDCGSKFGECWLKKQKDVLVPDRQGGGEKVMWTSGLIFGQGQGIVGFETEHGVIHVKLHPECAPHSVYYILSLLTLRHCAGCQFHRAENRGSYWDSEGNHVKNAPFGPPYAMIQGILQAEGNIFTPIPTEHCPTISRGSVAWVGSGPEFFISLANHHEWKQSYTVFGSVLPEDMDVVETIAGLPTRADVWNSVNVSVLEKPVSLTVRRMKTGQEQEETGS

SEQ ID NO: 10624 - protein, 240 aa, Arabidopsis thaliana
MCSGNDGPCLCDSWVFCGNKEDCGSKFGECWLKKQKDVLVPDRQGGGEKVMWTSGLIFGQGQGIVGFETEHGVIHVKLHPECAPHSVYYILSLLTLRHCAGCQFHRAENRGSYWDSEGNHVKNAPFGPPYAMIQGILQAEGNIFTPIPTEHCPTISRGSVAWVGSGPEFFISLANHHEWKQSYTVFGSVLPEDMDVVETIAGLPTRADVWNSVNVSVLEKPVSLTVRRMKTGQEQEETGS

SEQ ID NO: 10625 - DNA, 776 bp, Arabidopsis thaliana
gaaccataaactacaaacatgagtttggtcgccagtttgcaactcatcctcccgccacggccgagaagcaccaagttgttgtgctcattgcaaagcccaaaacaagaacaagaactctcttctacttctcctccaatctctcttttaccaaaactaatctcttttgctcttgctatctctctaacttcctattcccctgccttagccattccttctctctcctcttctcagccactcaccactcctttcacccaatccaagttcgtccagaccggtcttctcaatggcaaaattaggccttgcccttccacgaacccaggatgtgtatcgacgaatccaacctcatcttccttctcttttccattgacgatcccagaaaccgatacacaggatcccattgagaaactgaaagaagcaataatgagcacccagaagaaccccaagtttgtggttcttgaagatactccctatgggaggtatgtggaggcagaggtagaaggaggaggatttagcagagatgtgatggagtttttggtgaagcaagatgtggttgcttacaggtgtatggccactaaggttacctttgtgtatcctttcaccactgcttttggagactccaagggacaagaagagaggttgaagaagctcatcgatcagcttggttggtatgctcctacctttgaatctatggaataaattgcaagtaatgtatattttgttcatcactttccaacttactactacttgagacattaatatgagtttgtgtttgtcct

SEQ ID NO: 10626 - protein, 225 aa, Arabidopsis thaliana
MSLVASLQLILPPRPRSTKLLCSLQSPKQEQELSSTSPPISLLPKLISFALAISLTSYSPALAIPSLSSSQPLTTPFTQSKFVQTGLLNGKIRPCPSTNPGCVSTNPTSSSFSFPLTIPETDTQDPIEKLKEAIMSTQKNPKFVVLEDTPYGRYVEAEVEGGGFSRDVMEFLVKQDVVAYRCMATKVTFVYPFTTAFGDSKGQEERLKKLIDQLGWYAPTFESME

SEQ ID NO: 10627 - DNA, 379 bp, Arabidopsis thaliana
atgtggtttcttcatcaaactggagcaacaacatacagcctggtgggatctctaaacaagatacctctatccatcgcggggatcgttcttttcaatgtaccgaccagtttgcagaactcagcaagcatactctttggtcttgtcgctggagttgtatttgctagagccaaaatgagggagaagtcctaaaatactaaccatctacaacacattttactacatcaatcagtataggacatggcaaaagctgattaaagcagagcaatgagtttataacctcagaattctatgcacgttatgtgtttcttgtaaaagctttcgccactctacttgtataatgttagtaaaatattaatgaatgtatcgattcttgagtggt

SEQ ID NO: 10628 - protein, 62 aa, Arabidopsis thaliana
MWFLHQTGATTYSLVGSLNKIPLSIAGIVLFNVPTSLQNSASILFGLVAGVVFARAKMREKS

SEQ ID NO: 10629 - protein, 53 aa, Arabidopsis thaliana
VVSSSNWSNNIQPGGISKQDTSIHRGDRSFQCTDQFAELSKHTLWSCRWSCIC

SEQ ID NO: 10630 - DNA, 1289 bp, Arabidopsis thaliana
ggtactgctgcacaagtgtagaggcagtggcacaacatctttaagaaagagagagagaaagagtcatttattcatttcctcgcttaaaaatcttgagcacccagacagaattcttctttcttctttctggggttgagaaaaatgagtgaaagagatgatggattggggctaagtttgagcttgagtttaggttttaatcaaaaggacccgtcctcgaggttaaatccaatgcctctggcttcttatgcatcttcatcacacatgcagcatatgcagcagagcaattataaccatcctcaaaagattcagaacacttggattaacatgtttcagtcatcagagagaaactcggacatgagatcgtttctccggggaatagacgtaaacagagctccatcgacggtggtggttgacgtggaggatgaaggcgccggagtttcgtctccgaacagcaccgtctcaagcgtgatgagcgggaagaggagcgagcgagagctaatggctgcggcagctgcagttggaggaggaggtagagtagaagataatgagattgagagagcttcttgctcgctcggcggtggtagcgacgatgaagacggtagcgggaacggagatgactgttcgaggaagaaactccgattgtctaaagaacaagctttggttcttgaagaaacttttaaagaacatagtacactcaatccgaagcaaaagatggctttggctaagcaattgaatctgaggacgagacaagttgaagtgtggttccaaaaccgaagggcaaggacgaagctgaagcaaacggaagtagactgtgaatatcttaagagatgttgcgagaatctaacggatgagaatcggagattgcaaaaggaagtgagtgagcttagggctttaaagctttctccacacttatacatgcacatgaaacctcccactactctcacaatgtgtccttcttgcgagcgagtcgctgttacgtcatcttcgtcatcggtggctcctcctgtgatgaattcatcgtctccgatgggtccgatgagtccgatgagtccgtgggctgccatgcctctacggcaacgacctgctgctggttctcattagagtttaattagtctaaagataataggtttggtgatttgtttttattatatcgttgaacggacttggaagttcttttcaagagttggtcccatgctcttctttcctttgttttattcagtttctatttatagctgaattctggataatggaaaatctactaatattattgtccaattattagtttgggg

SEQ ID NO: 10631 - protein, 319 aa, Arabidopsis thaliana
MSERDDGLGLSLSLSLGFNQKDPSSRLNPMPLASYASSSHMQHMQQSNYNHPQKIQNTWINMFQSSERNSDMRSFLRGIDVNRAPSTVVVDVEDEGAGVSSPNSTVSSVMSGKRSERELMAAAAAVGGGGRVEDNEIERASCSLGGGSDDEDGSGNGDDCSRKKLRLSKEQALVLEETFKEHSTLNPKQKMALAKQLNLRTRQVEVWFQNRRARTKLKQTEVDCEYLKRCCENLTDENRRLQKEVSELRALKLSPHLYMHMKPPTTLTMCPSCERVAVTSSSSSVAPPVMNSSSPMGPMSPMSPWAAMPLRQRPAAGSH

SEQ ID NO: 10632 - protein, 290 aa, Arabidopsis thaliana
MPLASYASSSHMQHMQQSNYNHPQKIQNTWINMFQSSERNSDMRSFLRGIDVNRAPSTVVVDVEDEGAGVSSPNSTVSSVMSGKRSERELMAAAAAVGGGGRVEDNEIERASCSLGGGSDDEDGSGNGDDCSRKKLRLSKEQALVLEETFKEHSTLNPKQKMALAKQLNLRTRQVEVWFQNRRARTKLKQTEVDCEYLKRCCENLTDENRRLQKEVSELRALKLSPHLYMHMKPPTTLTMCPSCERVAVTSSSSSVAPPVMNSSSPMGPMSPMSPWAAMPLRQRPAAGSH

SEQ ID NO: 10633 - protein, 279 aa, Arabidopsis thaliana
MQHMQQSNYNHPQKIQNTWINMFQSSERNSDMRSFLRGIDVNRAPSTVVVDVEDEGAGVSSPNSTVSSVMSGKRSERELMAAAAAVGGGGRVEDNEIERASCSLGGGSDDEDGSGNGDDCSRKKLRLSKEQALVLEETFKEHSTLNPKQKMALAKQLNLRTRQVEVWFQNRRARTKLKQTEVDCEYLKRCCENLTDENRRLQKEVSELRALKLSPHLYMHMKPPTTLTMCPSCERVAVTSSSSSVAPPVMNSSSPMGPMSPMSPWAAMPLRQRPAAGSH

SEQ ID NO: 10634 - DNA, 1880 bp, Arabidopsis thaliana
  misc_feature (1019)..(1019): n is a, c, g, or t
  misc_feature (1024)..(1024): n is a, c, g, or t
gacgttgtgaaatccacaattccatggctttcgcttcaaaattcgctcgttctaaaactattctctcttttctccggccttgtcgtcagctccactcgacgcccaagtcaaccggtgacgtgaccgtactttctccggtgaagggacgccggagacttccaacttgctggtcgagctctctgttcccattggcgatagctgcctccgccacttctttcgcttacctgaatctgtcgaatccttctatcagtgaatcatcatcggctttggattcaagagatataactgttggtggaaaagatagcactgaagctgttgttaaaggagaatacaaacaagtccctaaggagcttatttctcaattgaaaactatcctcgaggataacttgacaactgactacgatgagaggtacttccatgggaagccccagaacagttttcacaaggcagtcaacattcctgatgtcgttgttttccctaggtccgaagaagaagtctccaagattcttaaatcctgcaatgaatataaggttcctattgtaccatatggtggggcaacatcgatcgagggtcatacccttgctccaaaaggaggtgtgtgcattgacatgtcattaatgaagagggtgaaagcattacatgtggaggatatggatgttattgttgagcctggaattggttggctggagcttaatgaatatttggaagagtatggtctattctttcctcttgatccaggacctggtgcctccataggaggcatgtgtgctacgcgttgctctggctctttagctgtaaggtatggaactatgcgtgacaatgttataagcctcaaggtggttcttcctaatggagatgttgtgaagacagcttcacgtgccagaaagagtgctgctggatacgatttgactcgcttgataattgggagtgagggtactttaggagtcattactgagattactctccgacttcagaaaatcccacagcattcagtggtggcagtttgcaattccctacangtaangatgctgcagacgtggccattgccactatgatgtctggaatacaggtgtcaagagtggaactccttgacgaggttcaaatcagagctattaatatggcaaacgggaaaaatttgactgaagctccaactctgatgttcgagtttataggaacagaggcatatacacgtgagcagacgcaaattgttcagcaaattgcttccaaacacaatggatcagactttatgttcgcagaagaacctgaagcaaaaaaagaactctggaagataagaaaagaggcgctgtgggcttgctatgctatggcgccaggtcatgaagcaatgattacagatgtctgtgtccctttatctcaccttgcagaactcatatcaagatccaaaaaagagcttgatgcatcatcgttgttgtgtaccgttattgctcatgccggagatggaaactttcacacatgtattatgtttgatccaagcagtgaagagcagagaagagaagcagaaagactgaaccactttatggttcacagtgcactgtccatggatggaacatgtactggagaacacggtgttggaacaggaaaaatgaagtatctggagaaggaactgggaatagaagcactgcaaactatgaagagaatcaagaaaacgttggacccaaacgatatcatgaacccgggaaagttaattcctcctcatgtatgtttctaaaattgcttgtgtttcttcgtttaacgtttctgtatgttgtgtgtgtaacactgttgtatcgtttggcctcatactgtttctcttttgttttgttaaaaccgaaaagttacctttaagtacaaaagctgatgcaagcaattgcatccgtttactt

SEQ ID NO: 10635 - protein, 350 aa, Arabidopsis thaliana
  misc_feature (339)..(339): Xaa can be any naturally occurring amino acid
  misc_feature (341)..(341): Xaa can be any naturally occurring amino acid
RCEIHNSMAFASKFARSKTILSFLRPCRQLHSTPKSTGDVTVLSPVKGRRRLPTCWSSSLFPLAIAASATSFAYLNLSNPSISESSSALDSRDITVGGKDSTEAVVKGEYKQVPKELISQLKTILEDNLTTDYDERYFHGKPQNSFHKAVNIPDVVVFPRSEEEVSKILKSCNEYKVPIVPYGGATSIEGHTLAPKGGVCIDMSLMKRVKALHVEDMDVIVEPGIGWLELNEYLEEYGLFFPLDPGPGASIGGMCATRCSGSLAVRYGTMRDNVISLKVVLPNGDVVKTASRARKSAAGYDLTRLIIGSEGTLGVITEITLRLQKIPQHSVVAVCNSLXVXMLQTWPLPL

SEQ ID NO: 10636 - protein, 343 aa, Arabidopsis thaliana
  misc_feature (332)..(332): Xaa can be any naturally occurring amino acid
  misc_feature (334)..(334): Xaa can be any naturally occurring amino acid
MAFASKFARSKTILSFLRPCRQLHSTPKSTGDVTVLSPVKGRRRLPTCWSSSLFPLAIAASATSFAYLNLSNPSISESSSALDSRDITVGGKDSTEAVVKGEYKQVPKELISQLKTILEDNLTTDYDERYFHGKPQNSFHKAVNIPDVVVFPRSEEEVSKILKSCNEYKVPIVPYGGATSIEGHTLAPKGGVCIDMSLMKRVKALHVEDMDVIVEPGIGWLELNEYLEEYGLFFPLDPGPGASIGGMCATRCSGSLAVRYGTMRDNVISLKVVLPNGDVVKTASRARKSAAGYDLTRLIIGSEGTLGVITEITLRLQKIPQHSVVAVCNSLXVXMLQTWPLPL

SEQ ID NO: 10637 - protein, 224 aa, Arabidopsis thaliana
MMSGIQVSRVELLDEVQIRAINMANGKNLTEAPTLMFEFIGTEAYTREQTQIVQQIASKHNGSDFMFAEEPEAKKELWKIRKEALWACYAMAPGHEAMITDVCVPLSHLAELISRSKKELDASSLLCTVIAHAGDGNFHTCIMFDPSSEEQRREAERLNHFMVHSALSMDGTCTGEHGVGTGKMKYLEKELGIEALQTMKRIKKTLDPNDIMNPGKLIPPHVCF

SEQ ID NO: 10638 - DNA, 664 bp, Arabidopsis thaliana
gatcacaaatatcatcttactaaaataaaaatccaatggatccatcagaatttcccttcgatatcgaagcttacaaaagacaatttcatatcaaagagaggtatatcatcaaccggtttagagagcgtcacaaaaaaattgaagaagattatccacgtcgcaataaaagaacatatatcaagagggatcatgtagcaccaaactaaaggttgattgacaactactttgctattcaacctacgtatgatgatgcaatgtttcgacggtgattccggatgcgaaaacatgtttttcttcgaatcgttggagccttatcaagaaatgacgactacttcacccaacgtgttgacgaaacaaataaagaaggtatatctccactagcaaaatgtatcacggccatgcggatgttagcatatggtatggcgtcagacacggtggatgaatacatcaaaataggaggttctacaacattagagtgcttgcgtagattctgtaatggaatcatacaattgtacgagcaagaatatcttagagcttgtcgcatctggtccccatctttttgttttctactgcgttgaatccacgtatgattttttgctttttcaacaccctcattgtaagagttcaacagttaaataaattattcaacatctccattgcacat

SEQ ID NO: 10639 - protein, 100 aa, Arabidopsis thaliana
MRKHVFLRIVGALSRNDDYFTQRVDETNKEGISPLAKCITAMRMLAYGMASDTVDEYIKIGGSTTLECLRRFCNGIIQLYEQEYLRACRIWSPSFCFLLR

SEQ ID NO: 10640 - protein, 64 aa, Arabidopsis thaliana
DHKYHLTKIKIQWIHQNFPSISKLTKDNFISKRGISSTGLESVTKKLKKIIHVAIKEHISRGIM

SEQ ID NO: 10641 - protein, 59 aa, Arabidopsis thaliana
MRMLAYGMASDTVDEYIKIGGSTTLECLRRFCNGIIQLYEQEYLRACRIWSPSFCFLLR

SEQ ID NO: 10642 - DNA, 1840 bp, Arabidopsis thaliana
ccccccccccccgaacaactaaactaattgacatttgacaataaaaagctgaactttattatgtatctctaggttttttccttgagagtttctctctttgaagtcatttacgtatatatatataaacccttgcaccattcttcttcgtcttgttaagcttttaagaatctctactcacattttctctgtaaaaatgggaactaggttccaatcattcttgctcgtgttcttgctttcatgtttaatcctcatatcaactgcctcgtgtgagcgaaatggtgatggaacgattagaattggattgaagaagaggaaactagaccggagcaacaggctagcttctcagctttttttgaaaaaccgagggtctcattggtctcccaaacactattttcgcctgaacgatgaaaatgcggatatggttccgctgaaaaactatttggatgctcaatactatggtgacattaccattggtactcctcctcagaagttcactgtgatctttgatactggtagctccaatctctggataccatctactaaatgttacctatcggttgcttgttatttccactccaagtacaaggctagccagtcatcgtcatatagaaagaacggaaaacccgcgtctatccgctatgggacgggtgctatttctggttactttagcaatgatgatgttaaagttggtgatattgttgtgaaagagcaggaattcatagaggctactagtgagcctggtataacattcttgctagcaaagtttgatggtatcctcggtttgggtttcaaagagatttctgtaggaaactcaactccggtttggtataacatggtagaaaaaggtttagttaaggaaccgattttttcgttctggcttaaccgtaacccgaaagatccagaaggcggtgagattgttttcggtggagtcgacccgaagcacttcaaaggagagcatacttttgttcctgtgacacataaaggttactggcagtttgacatgggtgatctccaaattgctggcaaaccaaccggatattgtgctaaaggttgttctgctattgctgattccggaacttctctgctcaccggtccatcgactgtcatcacgatgatcaatcacgcgataggagcacaaggaattgtaagccgtgaatgcaaggccgtggtggatcaatacggaaaaaccatgttgaattctcttctagctcaggaggatccgaagaaagtatgctcacaaattggagtctgcgcttatgatggtacacagagtgtgagtatggggatccagtcagttgtagacgatggaacatcgggtcttttaaaccaagcgatgtgcagtgcttgcgaaatggcagccgtgtggatggagagcgaattgactcagaatcaaacacaagaacgcatactcgcttatgctgctgagctatgtgaccatataccaacccaaaaccaacaatcagcagtggactgtgggagggtttcgtcgatgcctatagtcacattctcaattggtggcagaagctttgatctaactcctcaagactatatattcaagatcggggaaggagttgagtctcagtgcaccagcggtttcacggcaatggatattgctccgcctcgtggacctctctggatcttgggtgatatcttcatgggaccataccacacagtgttcgattatgggaaaggaagagttggattcgccaaagctgcttaaacaatatctcttctttaataccctcgttttttatatgatgtttgtcaatgtgtttgtaataacttaaaacatattgctatcctagaatggtatcatcttaatacagatttttatttggtt

SEQ ID NO: 10643 - protein, 508 aa, Arabidopsis thaliana; identical to SEQ ID NO: 8825

SEQ ID NO: 10644 - protein, 433 aa, Arabidopsis thaliana; identical to SEQ ID NO: 8826

SEQ ID NO: 10645 - protein, 295 aa, Arabidopsis thaliana; identical to SEQ ID NO: 8827

SEQ ID NO: 10646 - DNA, 1811 bp, Arabidopsis thaliana
agttccttttccacttttaaccatcaccctataagtggttataactagtaacttgaaatagaaacactctatctctaaaagaggcaaccaaacaaacaaggtctagctttttataaccaaactctgcttctgaacagagttagtcaaagagagagaagccatggaagctatgaaggagactgtggaggagagcttgagagagatgagagagacgtttgcgagtgggaggacgaagagtctgaagtggaggaaggcacagatcggagctatatacgagatggttaaagacaacgaagacaagatctgcaatgctctgtttcaagatttgggcaaacacagtactgaagcttttagagatgagcttggtgttgtcttgcgaacagctactggtgcaatcaactgtcttgataaatgggccgtccccaaacatagcaaacttcctctgttgttctacccagcaaaagggaaagtcatatcggaaccctatgggacggttcttgttctgtctagctggaattttcctatatctttgtctctggatccattgattggggcaatagcagcaggaaataccgtgcttctcaagtcatctgaactaagccctaacgcatctgccttccttgccaagacaattccagcttatctcgatactaaagccatcaaagttatcgaaggaggacctgatgtcgctactatcctcttgcagcatcaatgggacaagatcttcttcaccgggagtcccaagattggaaggatcataatggctgcagcagcacagcatctgactcctgtgacattggagcttggtggaaaatgtcccaccattgttgatcatcacaccatttcaaagaacatcaagtcggttgtcaagaggattgctggaggaaaatggggatcttgcaatggacaagcttgtatctctgtagattacgttcttatcgaaaagagtttcgcgcctactctgattgatatgttgaagcctacgataaagtctttctttggcgaaaatcctaaagaatctggatgtctctcaaggattgcaaacaagcaccacgttcagagactgtctcgtcttcttagcgatcctcgtgtccaagcttccatcgtctatggtggttctatagacgaagataagctgtatgttgagccaacgatcttgttggaccctcctcttgattctgagatcatgaatgaagagatctttggtccaattctcccgattatcacggtacgtgacatccaagaaagcatagggatcattaatacaaaaccgaagccacttgccatttatgcattcacaaatgacgagaaccttaaaactagaattttgtcagaaacatcctcaggaagtgttaccttcaatgacgtcatgatccagtatatgtgtgatgcgttaccttttggaggagtgggagaaagtggaatagggaggtatcacgggaaatactcatttgattgtttcagtcacgagaaagcaataatggaaggaagcttaggtatggatcttgaagctcgataccctccatggaacaacttcaagctcaccttcatcagactcgcatttcgtgaagcttacttcaagcttatcctccttatgcttggtcttaaaagataaaagggggaaagtgagagacagagacacatacacacaaacagagacaatataagtgattgaattacatcacacttatgtttgcttatcatatcttcacctaataagtctcattccgaatgttttacatttctttcaagcttgagagattctatataaagtgatttgatatctatttctacgggatacgttcttagtg

SEQ ID NO: 10647 - protein, 484 aa, Arabidopsis thaliana
MEAMKETVEESLREMRETFASGRTKSLKWRKAQIGAIYEMVKDNEDKICNALFQDLGKHSTEAFRDELGVVLRTATGAINCLDKWAVPKHSKLPLLFYPAKGKVISEPYGTVLVLSSWNFPISLSLDPLIGAIAAGNTVLLKSSELSPNASAFLAKTIPAYLDTKAIKVIEGGPDVATILLQHQWDKIFFTGSPKIGRIIMAAAAQHLTPVTLELGGKCPTIVDHHTISKNIKSVVKRIAGGKWGSCNGQACISVDYVLIEKSFAPTLIDMLKPTIKSFFGENPKESGCLSRIANKHHVQRLSRLLSDPRVQASIVYGGSIDEDKLYVEPTILLDPPLDSEIMNEEIFGPILPIITVRDIQESIGIINTKPKPLAIYAFTNDENLKTRILSETSSGSVTFNDVMIQYMCDALPFGGVGESGIGRYHGKYSFDCFSHEKAIMEGSLGMDLEARYPPWNNFKLTFIRLAFREAYFKLILLMLGLKR

SEQ ID NO: 10648 - protein, 481 aa, Arabidopsis thaliana
MKETVEESLREMRETFASGRTKSLKWRKAQIGAIYEMVKDNEDKICNALFQDLGKHSTEAFRDELGVVLRTATGAINCLDKWAVPKHSKLPLLFYPAKGKVISEPYGTVLVLSSWNFPISLSLDPLIGAIAAGNTVLLKSSELSPNASAFLAKTIPAYLDTKAIKVIEGGPDVATILLQHQWDKIFFTGSPKIGRIIMAAAAQHLTPVTLELGGKCPTIVDHHTISKNIKSVVKRIAGGKWGSCNGQACISVDYVLIEKSFAPTLIDMLKPTIKSFFGENPKESGCLSRIANKHHVQRLSRLLSDPRVQASIVYGGSIDEDKLYVEPTILLDPPLDSEIMNEEIFGPILPIITVRDIQESIGIINTKPKPLAIYAFTNDENLKTRILSETSSGSVTFNDVMIQYMCDALPFGGVGESGIGRYHGKYSFDCFSHEKAIMEGSLGMDLEARYPPWNNFKLTFIRLAFREAYFKLILLMLGLKR

SEQ ID NO: 10649 - protein, 470 aa, Arabidopsis thaliana
MRETFASGRTKSLKWRKAQIGAIYEMVKDNEDKICNALFQDLGKHSTEAFRDELGVVLRTATGAINCLDKWAVPKHSKLPLLFYPAKGKVISEPYGTVLVLSSWNFPISLSLDPLIGAIAAGNTVLLKSSELSPNASAFLAKTIPAYLDTKAIKVIEGGPDVATILLQHQWDKIFFTGSPKIGRIIMAAAAQHLTPVTLELGGKCPTIVDHHTISKNIKSVVKRIAGGKWGSCNGQACISVDYVLIEKSFAPTLIDMLKPTIKSFFGENPKESGCLSRIANKHHVQRLSRLLSDPRVQASIVYGGSIDEDKLYVEPTILLDPPLDSEIMNEEIFGPILPIITVRDIQESIGIINTKPKPLAIYAFTNDENLKTRILSETSSGSVTFNDVMIQYMCDALPFGGVGESGIGRYHGKYSFDCFSHEKAIMEGSLGMDLEARYPPWNNFKLTFIRLAFREAYFKLILLMLGLKR

SEQ ID NO: 10650 - DNA, 1410 bp, Arabidopsis thaliana
ggttcatatggaaaacgctcatcaacctcaacaatctctctcctctctctctctgtatatagaagaatctccattgtctttaatttctctccatttctctttctctcttccttcaaagttttctcttttcttgatgggtttaagagagtaaagatcatcaagtactatgcattaaattgagaagttattaaaaatttcgattaattaaagattgttgatgatgaagagattaagtagttcagattcagtgggtggtctcatctctttatgtcctacaacttccacagatgagcagagtccgaggagatacggtgggagagagtttcagtcgatgcttgaaggatacgaggaagaagaagaagctatagtagaagaaagaggacacgtgggcttgtcggagaagaagagaaggttaagcattaaccaagttaaagctttggagaagaattttgagttagagaataagcttgagcctgagaggaaagttaagttagctcaagaacttggtcttcaacctcgtcaagttgctgtttggtttcaaaaccgtcgtgctcggtggaagacaaaacagcttgagaaagattatggtgttcttaaaacccagtacgattctctccgtcataactttgattccctccgccgtgacaatgaatctctccttcaagagattagtaaactgaaaacgaagcttgatggaggaggagaagaagaagaagaagaagagaacaacgcggcggtgacaacggagagtgatatttcggtcaaggaggaagaagtttcgttgccggagaagattacagaggcaccgtcgtctcctccacagtttcttgaacattctgatggtcttaattaccggagtttcacagatctacgtgatcttcttccattaaaggcggcggcttcttcattcgccgccgcagctggatcttcagacagtagcgattcaagcgcactgctgaatgaagaaagcagctctaatgtcactgtggcggctccggtgacggttccaggaggtaatttcttccagtttgtgaaaatggagcagacggaggatcatgaggactttctgagtggagaagaagcttgtgaattcttttccgatgaacagccgccgtctctacactggtactccaccgttgatcattggaattgaagctgaaaacaccaccggaagagattttggattggattagatgctcttttcttctctgtggaaaaaacagaggagggcaaaatgggaataaggttaaaaattgaaggtgaaagggcaattaaggaagggttaaatctgggcgggaataatgatttagggtgaatttgtaattatgctttttctctagtggttttcgtgcacttcttgtaattaaggatcatcagatcaaagagaaattgagaaggggttaacatgtc

SEQ ID NO: 10651 - protein, 311 aa, Arabidopsis thaliana
MMKRLSSSDSVGGLISLCPTTSTDEQSPRRYGGREFQSMLEGYEEEEEAIVEERGHVGLSEKKRRLSINQVKALEKNFELENKLEPERKVKLAQELGLQPRQVAVWFQNRRARWKTKQLEKDYGVLKTQYDSLRHNFDSLRRDNESLLQEISKLKTKLDGGGEEEEEEENNAAVTTESDISVKEEEVSLPEKITEAPSSPPQFLEHSDGLNYRSFTDLRDLLPLKAAASSFAAAAGSSDSSDSSALLNEESSSNVTVAAPVTVPGGNFFQFVKMEQTEDHEDFLSGEEACEFFSDEQPPSLHWYSTVDHWN

SEQ ID NO: 10652 - protein, 310 aa, Arabidopsis thaliana
MKRLSSSDSVGGLISLCPTTSTDEQSPRRYGGREFQSMLEGYEEEEEAIVEERGHVGLSEKKRRLSINQVKALEKNFELENKLEPERKVKLAQELGLQPRQVAVWFQNRRARWKTKQLEKDYGVLKTQYDSLRHNFDSLRRDNESLLQEISKLKTKLDGGGEEEEEEENNAAVTTESDISVKEEEVSLPEKITEAPSSPPQFLEHSDGLNYRSFTDLRDLLPLKAAASSFAAAAGSSDSSDSSALLNEESSSNVTVAAPVTVPGGNFFQFVKMEQTEDHEDFLSGEEACEFFSDEQPPSLHWYSTVDHWN

SEQ ID NO: 10653 - protein, 273 aa, Arabidopsis thaliana
MLEGYEEEEEAIVEERGHVGLSEKKRRLSINQVKALEKNFELENKLEPERKVKLAQELGLQPRQVAVWFQNRRARWKTKQLEKDYGVLKTQYDSLRHNFDSLRRDNESLLQEISKLKTKLDGGGEEEEEEENNAAVTTESDISVKEEEVSLPEKITEAPSSPPQFLEHSDGLNYRSFTDLRDLLPLKAAASSFAAAAGSSDSSDSSALLNEESSSNVTVAAPVTVPGGNFFQFVKMEQTEDHEDFLSGEEACEFFSDEQPPSLHWYSTVDHWN

SEQ ID NO: 10654 - DNA, 1701 bp, Arabidopsis thaliana
gcaccaggagctcactagtccccccccccccccggtctcctccaatcatgtcgtttcaaaatcctctaatttctcagtcctagtgctaaagctcttgctgggttcaagttgatttctcagtcatcgattgaaattttctcgggaaaaagttctcatcgtctaccatcgacaacgagaaaccagaaaatgcaaagtcttagtcaacttggaccttcagagattttccttgtcgccagaagagaaaaacccagtacgagagcacagctttggtttacgggaagactctcttttagacaagaaacaaatggggttcgtttaaagaatagagtagagtttagtccaagacctgtacctccaaatctgattgcagcagagaaagaagaagctaaagcagttcttactctattcttcaagaagcaaggtcttagcaacagtctctcttctcggttaatcaacaaatccgatcaattcattgaccatttagtgtccaggctccattctgttcacaaagctcgatacctcgtaggaagagaacttactacacttgagattcgagattctcttattccttacctcgaacaacttcatgaagaacatggtgatcttctcgctgagcttgttgtgagcttccctgatccaccagctgagcctagactcgttgcttcatcttcagttccggtcctaccacctcgtggtgacacagattctgcggcagacactcggaaactgagagctgtgtctcgagtcagcgaacttgacacagaaggtgcattacgtcctcagaccctttaccttcttgaccttggtttaaacctggagcagatcaaaacaatcactcgaaagttcgctgcctttccttattacagcctcgacggaaaaataaaacccgttgtggaattccttctagacctcggaattcctaaatcagatatccccacaatcctctgcaaacgcccacagatatgcggaatcagcctaacagataacctgaaaccgacaatggcctttcttgagacgcttggcattgacaagaaccaatgggcaaagatcatttcccgtttcccagccatcctcacttacagccgccagaaacttacttcaactgtcgagttcttatcccaaactggtctcacagaagaacagatagggagaatcctaacccgatgtccaaacatcatgagttacagtgtagaagacaagctccgtccaactatggagtactttagatcgctaaatgtcgatgttgcggttctcctacatcgatgtccccaaacgttcggattaagcatagagtcgaatttgaagccagtaactgagttcttcctcgaaaagggttttggtttagatgaaattggagtcatgatctctagatatggagctttgtacacattcagcttgaaagagaatgtcatgccgaaatgggattactttcagacaatggactatccgaaatccgagcttgtgaaattccctcagttttttgggtacagtttacaagagaggatcaagccgagatacgagctggttcagagaagtggagtgagactgctgttgaaccaggttttatcgctgtcgggaattgagttcgagaaagttgttaagaagaagatgatgaaacttgtgtctaataacgtaatcgatgaacaaagtagtggtggtttgttgtgaatgttttagttttagagtaatcaatttgccgag

SEQ ID NO: 10655 - protein, 493 aa, Arabidopsis thaliana
MQSLSQLGPSEIFLVARREKPSTRAQLWFTGRLSFRQETNGVRLKNRVEFSPRPVPPNLIAAEKEEAKAVLTLFFKKQGLSNSLSSRLINKSDQFIDHLVSRLHSVHKARYLVGRELTTLEIRDSLIPYLEQLHEEHGDLLAELVVSFPDPPAEPRLVASSSVPVLPPRGDTDSAADTRKLRAVSRVSELDTEGALRPQTLYLLDLGLNLEQIKTITRKFAAFPYYSLDGKIKPVVEFLLDLGIPKSDIPTILCKRPQICGISLTDNLKPTMAFLETLGIDKNQWAKIISRFPAILTYSRQKLTSTVEFLSQTGLTEEQIGRILTRCPNIMSYSVEDKLRPTMEYFRSLNVDVAVLLHRCPQTFGLSIESNLKPVTEFFLEKGFGLDEIGVMISRYGALYTFSLKENVMPKWDYFQTMDYPKSELVKFPQFFGYSLQERIKPRYELVQRSGVRLLLNQVLSLSGIEFEKVVKKKMMKLVSNNVIDEQSSGGLL

SEQ ID NO: 10656 - DNA, 2230 bp, Arabidopsis thaliana
ggtggtagtagcagtgaaaaacaaaagcaatccaatcccaaacccatttgctcttaagattcttcacatagagaagtcacatgttccttcttcttcttccttcatcatccccaaacacacacaaactaaaaaaaaggcaaaaccctagatccaagatcagacctaatctaatcgaaactcatagctgaaaaatgaagagagatcatcaccaattccaaggtcgattgtccaaccacgggacttcttcttcttcatcatcaatctctaaagataagatgatgatggtgaaaaaagaagaagacggtggaggtaacatggacgacgagcttctcgctgttttaggttacaaagttaggtcatcggagatggcggaggttgctttgaaactcgaacaattagagacgatgatgagtaatgttcaagaagatggtttatctcatctcgcgacggatactgttcattataatccgtcggagctttattcttggcttgataatatgctctctgagcttaatcctcctcctcttccggcgagttctaacggtttagatccggttcttccttcgccggagatttgtggttttccagcttcggattatgaccttaaagtcattcccggaaacgcgatttatcagtttccggcgattgattcttcgtcttcgtcgaataatcagaacaagcgtttgaaatcatgctcgagtcctgattctatggttacatcgacttcgacgggtacgcagattggtggagtcataggaacgacggtgacgacaaccaccacgacaacgacggcggcggctgagtcaactcgttctgttatcctggttgactcgcaagagaacggtgttcgtttagtccacgcgcttatggcttgtgcagaagcaatccagcagaacaatttgactctagcggaagctcttgtgaagcaaatcggatgcttagctgtgtctcaagccggagctatgagaaaagtggctacttacttcgccgaagctttagcgcggcggatctaccgtctctctccgccgcagaatcagatcgatcattgtctctccgatactcttcagatgcacttttacgagacttgtccttatcttaaattcgctcacttcacggcgaaccaagcgattctcgaagcttttgaaggtaagaagagagtacacgtcattgatttctcgatgaaccaaggtcttcaatggcctgcacttatgcaagctcttgcgcttcgagaaggaggtcctccaactttccggttaaccggaattggtccaccggcgccggataattctgatcatcttcatgaagttggttgtaaattagctcagcttgcggaggcgattcacgtagaattcgaataccgtggattcgttgctaacagcttagccgatctcgatgcttcgatgcttgagcttagaccgagcgatacggaagctgttgcggttaactctgtttttgagctacataagctcttaggtcgtcccggtgggatagagaaagttctcggcgttgtgaaacagattaaaccggtgattttcacggtggttgagcaagaatcgaaccataacggaccggttttcttagaccggtttactgaatcgttacattattattcgactctgtttgattcgttggaaggagttccgaatagtcaagacaaagtcatgtctgaagtttacttagggaaacagatttgtaatctggtggcttgtgaaggtcctgacagagtcgagagacacgaaacgttgagtcaatggggaaaccggtttggttcgtccggtttagcgccggcacatcttgggtctaacgcgtttaagcaagcgagtatgcttttgtctgtgtttaatagtggccaaggttatcgtgtggaggagagtaatggatgtttgatgttgggttggcacactcgcccactcattaccacctccgcttggaaactctcgacggcggcgcactgagtttgactcgaagcatacgacggtggtggagtcgagtcgagtgaatttgagattgagatcagtggaccggtgatgacatatgttcggaccaagacctaaaccgaactgaatcgaaccgttttgccttttgtttattttatttattttcgttcacttgtttaaaattcttatatatatcgttttggtaggtcattttataatttatgcctttttgggatcaatttttaataggctgagtttgtatttattaataaatatcttatgaattttaaaac

SEQ ID NO: 10657 - protein, 587 aa, Arabidopsis thaliana
MKRDHHQFQGRLSNHGTSSSSSSISKDKMMMVKKEEDGGGNMDDELLAVLGYKVRSSEMAEVALKLEQLETMMSNVQEDGLSHLATDTVHYNPSELYSWLDNMLSELNPPPLPASSNGLDPVLPSPEICGFPASDYDLKVIPGNAIYQFPAIDSSSSSNNQNKRLKSCSSPDSMVTSTSTGTQIGGVIGTTVTTTTTTTTAAAESTRSVILVDSQENGVRLVHALMACAEAIQQNNLTLAEALVKQIGCLAVSQAGAMRKVATYFAEALARRIYRLSPPQNQIDHCLSDTLQMHFYETCPYLKFAHFTANQAILEAFEGKKRVHVIDFSMNQGLQWPALMQALALREGGPPTFRLTGIGPPAPDNSDHLHEVGCKLAQLAEAIHVEFEYRGFVANSLADLDASMLELRPSDTEAVAVNSVFELHKLLGRPGGIEKVLGVVKQIKPVIFTVVEQESNHNGPVFLDRFTESLHYYSTLFDSLEGVPNSQDKVMSEVYLGKQICNLVACEGPDRVERHETLSQWGNRFGSSGLAPAHLGSNAFKQASMLLSVFNSGQGYRVEESNGCLMLGWHTRPLITTSAWKLSTAAH

SEQ ID NO: 10658 - protein, 559 aa, Arabidopsis thaliana
MMMVKKEEDGGGNMDDELLAVLGYKVRSSEMAEVALKLEQLETMMSNVQEDGLSHLATDTVHYNPSELYSWLDNMLSELNPPPLPASSNGLDPVLPSPEICGFPASDYDLKVIPGNAIYQFPAIDSSSSSNNQNKRLKSCSSPDSMVTSTSTGTQIGGVIGTTVTTTTTTTTAAAESTRSVILVDSQENGVRLVHALMACAEAIQQNNLTLAEALVKQIGCLAVSQAGAMRKVATYFAEALARRIYRLSPPQNQIDHCLSDTLQMHFYETCPYLKFAHFTANQAILEAFEGKKRVHVIDFSMNQGLQWPALMQALALREGGPPTFRLTGIGPPAPDNSDHLHEVGCKLAQLAEAIHVEFEYRGFVANSLADLDASMLELRPSDTEAVAVNSVFELHKLLGRPGGIEKVLGVVKQIKPVIFTVVEQESNHNGPVFLDRFTESLHYYSTLFDSLEGVPNSQDKVMSEVYLGKQICNLVACEGPDRVERHETLSQWGNRFGSSGLAPAHLGSNAFKQASMLLSVFNSGQGYRVEESNGCLMLGWHTRPLITTSAWKLSTAAH

SEQ ID NO: 10659 - protein, 558 aa, Arabidopsis thaliana
MMVKKEEDGGGNMDDELLAVLGYKVRSSEMAEVALKLEQLETMMSNVQEDGLSHLATDTVHYNPSELYSWLDNMLSELNPPPLPASSNGLDPVLPSPEICGFPASDYDLKVIPGNAIYQFPAIDSSSSSNNQNKRLKSCSSPDSMVTSTSTGTQIGGVIGTTVTTTTTTTTAAAESTRSVILVDSQENGVRLVHALMACAEAIQQNNLTLAEALVKQIGCLAVSQAGAMRKVATYFAEALARRIYRLSPPQNQIDHCLSDTLQMHFYETCPYLKFAHFTANQAILEAFEGKKRVHVIDFSMNQGLQWPALMQALALREGGPPTFRLTGIGPPAPDNSDHLHEVGCKLAQLAEAIHVEFEYRGFVANSLADLDASMLELRPSDTEAVAVNSVFELHKLLGRPGGIEKVLGVVKQIKPVIFTVVEQESNHNGPVFLDRFTESLHYYSTLFDSLEGVPNSQDKVMSEVYLGKQICNLVACEGPDRVERHETLSQWGNRFGSSGLAPAHLGSNAFKQASMLLSVFNSGQGYRVEESNGCLMLGWHTRPLITTSAWKLSTAAH

SEQ ID NO: 10660 - DNA, 1196 bp, Arabidopsis thaliana
atcttcttcttctacttcttattaagctccattgggtttagagattctggtgtataaactgctaatgacgagtaaccttatccagccaccatcaatggcagcttcacgaggagcaatctcgagaagaacaggaaacgtgaaagtattagtctctttcaccagttctaatagcaaaacgctgagttttagtgacaactcatttaggctcagacccatgttcatcgggaaagtcacagaacagagttcttgctcctctttaaatgaacaacaacaagatgaagaacaagaacaagaagaagaagagattacagtttctcatataaaagaagagctctacgaagctctcaaagggatcaatagagggatattcggagttaagtcggataaaaagacagagatcgagggactggtgaagcttttggaatgtcggaatccgacaccggagccgactggagagttagacaagatcggaggttgctggaaactcatttacagtacaatcactgtattgggttctaaacgaactaaattgggtcttcgagatttcgtctctcttggtgatcttcttcaacagattgacattgctcagggcaaaacggtccatgtgttgaaattcgatgtccggggattgaatctactcgacggcgagtttagaatcgtcgcttccttcaagatctcgtccaaatcgagtgtagagattacttatgaaagctcaacgatcaaaccagaccagttgatgaacatatttaggaagaacatggatcttcttttgggaatcttcaaccccgagggactattcgagatttcatacttagacgaagatttacaagtagggagagatgggaaagggaatgtttttgttttggaaagaatagagaaaccttaaatcttttataccaaaatgtttactgcatttttttcaaactcatttccataagaagaaattgcttgtttctcaagaaaattttcaattttttctttggtttgggttatgaccatcagtatttcttctttcttttggtttaaaagaagaagaaaaatctagatttagtctttttttgtcttgggaatgttagtaactccagttcattcattattgacataattgattgctcaataatactgtataagtactattagcttgctcccatctgtttacttctaaatcctagtgttgatattacaacaaaagaact

SEQ ID NO: 10661 - protein, 273 aa, Arabidopsis thaliana
MTSNLIQPPSMAASRGAISRRTGNVKVLVSFTSSNSKTLSFSDNSFRLRPMFIGKVTEQSSCSSLNEQQQDEEQEQEEEEITVSHIKEELYEALKGINRGIFGVKSDKKTEIEGLVKLLECRNPTPEPTGELDKIGGCWKLIYSTITVLGSKRTKLGLRDFVSLGDLLQQIDIAQGKTVHVLKFDVRGLNLLDGEFRIVASFKISSKSSVEITYESSTIKPDQLMNIFRKNMDLLLGIFNPEGLFEISYLDEDLQVGRDGKGNVFVLERIEKP

SEQ ID NO: 10662 - protein, 263 aa, Arabidopsis thaliana
MAASRGAISRRTGNVKVLVSFTSSNSKTLSFSDNSFRLRPMFIGKVTEQSSCSSLNEQQQDEEQEQEEEEITVSHIKEELYEALKGINRGIFGVKSDKKTEIEGLVKLLECRNPTPEPTGELDKIGGCWKLIYSTITVLGSKRTKLGLRDFVSLGDLLQQIDIAQGKTVHVLKFDVRGLNLLDGEFRIVASFKISSKSSVEITYESSTIKPDQLMNIFRKNMDLLLGIFNPEGLFEISYLDEDLQVGRDGKGNVFVLERIEKP

SEQ ID NO: 10663 - protein, 223 aa, Arabidopsis thaliana
MFIGKVTEQSSCSSLNEQQQDEEQEQEEEEITVSHIKEELYEALKGINRGIFGVKSDKKTEIEGLVKLLECRNPTPEPTGELDKIGGCWKLIYSTITVLGSKRTKLGLRDFVSLGDLLQQIDIAQGKTVHVLKFDVRGLNLLDGEFRIVASFKISSKSSVEITYESSTIKPDQLMNIFRKNMDLLLGIFNPEGLFEISYLDEDLQVGRDGKGNVFVLERIEKP

SEQ ID NO: 10664 - DNA, 1440 bp, Arabidopsis thaliana
gaaggagacttacacaatcttacatggtatcagagcacatctctctttgattgcttcttctctcttatatctcttctctattctcttttccttactcaaaaatggccgctatcatgaacccagaaaagatctatggtgtctctaacatcaaatctcacattcctgtgattcttgacattgaagaaagtaactacgatgcgtggagagaactctttctcacccactgcctctcctttgatgttcttggtcacatcgatggaacccttcaacctgccaacgccgctgatgttaactggcagaaacgtgatggaattgtgaagctctggctctacggaactctcacaccaaagcagttccaaggttcgttcgtctttggttcaacctcaagggagatctggctgagaattgaaaatcaattccgcaacaacaaggatgctcgtgctcttcgtttggacaatgagctccgtacgaaagagattggtgacatgaagatcgccgattactgtcgtgagatgaaaaagcttcctgactctctctcaaatgttgatgctccagttcaagatcggacactcatgatgtacgtgttgaatggtctgaatgctaagtttgacaacatcatcaatgttatcaaacatcgccagccacttccgcgcttcgacgacgccacaaccatgttacaagatgaagaggatcacctgaacggctcatcatgaagaccgaacccaacacatgtggaccactcatcctcctctactgtgcttgttatctcagaggcgcctcatgtgaactaccaacgctcaggtcctactcagatgacttacaaaggacgtggcggaggcaacaacaggtttcggggcggaggacgatcctcatatggttacaatcgtcaaggtttcaactcctggaacaggccaccattctatccaaacccgtatcagatgtggaatcatcagtggggatacccaccgcagctgaatgccaatggacaaggcttttttggtcttttacctccttaccattctcagcagtcaaacgctcacttcaggactcctaaacctgagagcacggctgatcttgcagaagcattcaacaccttttctcttcaagatccccctgattctcagtggtacatggactctggtgcaacagcctacttgacttctggtgcaggatcttcgcaccaagaggactcttcttcgcaatgatagcagtggggatctatatccggtttttccagctttcaataaaacttcagctccagcctctacctttctagctcaatcgtctgacatatggcatcgaagactaccacaccctagcaacgatgttttgaagacgttaatttcttattcttattttcatccaaataaaaagactctcacattgacttgtaatgcatgtcaaattggaaagcatgttaagcttccgttttattcatcc

SEQ ID NO: 10665 - protein, 203 aa, Arabidopsis thaliana
MAAIMNPEKIYGVSNIKSHIPVILDIEESNYDAWRELFLTHCLSFDVLGHIDGTLQPANAADVNWQKRDGIVKLWLYGTLTPKQFQGSFVFGSTSREIWLRIENQFRNNKDARALRLDNELRTKEIGDMKIADYCREMKKLPDSLSNVDAPVQDRTLMMYVLNGLNAKFDNIINVIKHRQPLPRFDDATTMLQDEEDHLNGSS

SEQ ID NO: 10666 - protein, 199 aa, Arabidopsis thaliana
MNPEKIYGVSNIKSHIPVILDIEESNYDAWRELFLTHCLSFDVLGHIDGTLQPANAADVNWQKRDGIVKLWLYGTLTPKQFQGSFVFGSTSREIWLRIENQFRNNKDARALRLDNELRTKEIGDMKIADYCREMKKLPDSLSNVDAPVQDRTLMMYVLNGLNAKFDNIINVIKHRQPLPRFDDATTMLQDEEDHLNGSS

SEQ ID NO: 10667 - protein, 130 aa, Arabidopsis thaliana
MTYKGRGGGNNRFRGGGRSSYGYNRQGFNSWNRPPFYPNPYQMWNHQWGYPPQLNANGQGFFGLLPPYHSQQSNAHFRTPKPESTADLAEAFNTFSLQDPPDSQWYMDSGATAYLTSGAGSSHQEDSSSQ

SEQ ID NO: 10668 - DNA, 493 bp, Arabidopsis thaliana
ttctccaagaggaagactaagaggtcaagattctcctttcaaggatgatgatagcctcacaagctgccctccattccctagctacatggctccaacagtctctgccaaagcaaaagttagaccaaacagcaatccaaaggagagagtgatgggtacaccagtcagcgagaagaggagaatgtcgtatccccccacgcaagatacgtttagatggaacaaagggtcattggtcatgagcaacagcagcagccacagaggtcctggttcacctggaggtgtggttcttgagaagcacaagacacttaaatcagtaggaaatttgagcattggttccactgcctccatggcaacaacagttgggagaaaggaatttaacagatttgtgtgatttcttttgatttgaacatttttctttgggttgtgttgattttgagtgttgtaacataataaaaggtaaaacagaaaaacaaaaaaaaacggaggatttggtttg

SEQ ID NO: 10669 - protein, 128 aa, Arabidopsis thaliana
SPRGRLRGQDSPFKDDDSLTSCPPFPSYMAPTVSAKAKVRPNSNPKERVMGTPVSEKRRMSYPPTQDTFRWNKGSLVMSNSSSHRGPGSPGGVVLEKHKTLKSVGNLSIGSTASMATTVGRKEFNRFV

SEQ ID NO: 10670 - protein, 100 aa, Arabidopsis thaliana
MAPTVSAKAKVRPNSNPKERVMGTPVSEKRRMSYPPTQDTFRWNKGSLVMSNSSSHRGPGSPGGVVLEKHKTLKSVGNLSIGSTASMATTVGRKEFNRFV

SEQ ID NO: 10671 - protein, 79 aa, Arabidopsis thaliana
MGTPVSEKRRMSYPPTQDTFRWNKGSLVMSNSSSHRGPGSPGGVVLEKHKTLKSVGNLSIGSTASMATTVGRKEFNRFV

SEQ ID NO: 10672 - DNA, 1592 bp, Arabidopsis thaliana
atcgtcttcatcgttaacttcgcagactctgttgattagtcaacacagatcagaatctgaggctttggccgagacgagagaagcagaagaagaaaatggcggagactgtacattctccgatcgttacttacgcatcgatgttatcgcttctcgccttctgtccacctttcgtcattctcctatggtacacaatggttcatcaggatggttctgttactcagacctttggcttcttttgggagaatggagttcaaggacttatcaacatatggccaagacccactttgattgcttggaaaattatattttgctatggagcatttgaagctattcttcagctgcttctgcctggtaaaagagttgagggtccaatatctccagccggaaaccgaccagtttacaaggccaatggtctggctgcttactttgtgacactagcaacctatcttggtctttggtggtttggaatcttcaaccctgcaattgtctatgatcacttgggtgaaatattttcggcactaatattcggaagcttcatattttgtgttttgttgtacataaaaggccatgttgcaccttcatcaagtgactctggttcatgtggtaacctaataattgacttctattggggcatggagttgtaccctcgaattggtaagagctttgacatcaaggtgtttactaattgcagattcggaatgatgtcttgggcagttcttgcagtcacgtactgcataaaacagtatgaaataaatggcaaagtatctgattcaatgctggtgaacaccatcctgatgctggtgtatgtcacaaaattcttctggtgggaagctggttattggaacaccatggacattgcacatgaccgagctggattctatatatgctggggttgcccagtgtgggtgccttctgtctacacttctccaggcatgtaccttgtgaaccaccccgtcgaactcggaactcagttggcaatatacattctcgttgcaggaattctgtgcatttacataaactatgactgtgatagacaaaggcaagagttcaggaggacaaacgggaaatgtttggtttggggaagagccccgtcaaagattgtggcgtcgtatactacaacatctggtgaaactaaaactagtcttctcttaacgtctggatggtggggattggctcgtcatttccattatgttcctgagatcttaagtgctttcttctggaccgtaccggctctcttcgataacttcttggcatacttctacgtcatatttctcacccttcttctctttgatcgagccaagagagacgatgaccgatgccgatcaaagtatgggaaatattggaagctgtattgtgagaaagtcaaatacaggatcattccgggaatttattgattgtaacgaagtctgttgttctcattttctagttattacgttaattcgaacgttggaatcatcaaaagaccgtgccaaaacaaaaatgcaaattgatgcgatagacattcttttgctgatttgtatgctataggttttcaaatctctagctacgcttatgtatttccctagattatcaaagttagcctgccgttttct

SEQ ID NO: 10673 - protein, 432 aa, Arabidopsis thaliana
MAETVHSPIVTYASMLSLLAFCPPFVILLWYTMVHQDGSVTQTFGFFWENGVQGLINIWPRPTLIAWKIIFCYGAFEAILQLLLPGKRVEGPISPAGNRPVYKANGLAAYFVTLATYLGLWWFGIFNPAIVYDHLGEIFSALIFGSFIFCVLLYIKGHVAPSSSDSGSCGNLIIDFYWGMELYPRIGKSFDIKVFTNCRFGMMSWAVLAVTYCIKQYEINGKVSDSMLVNTILMLVYVTKFFWWEAGYWNTMDIAHDRAGFYICWGCPVWVPSVYTSPGMYLVNHPVELGTQLAIYILVAGILCIYINYDCDRQRQEFRRTNGKCLVWGRAPSKIVASYTTTSGETKTSLLLTSGWWGLARHFHYVPEILSAFFWTVPALFDNFLAYFYVIFLTLLLFDRAKRDDDRCRSKYGKYWKLYCEKVKYRIIPGIY

SEQ ID NO: 10674 - protein, 418 aa, Arabidopsis thaliana
MLSLLAFCPPFVILLWYTMVHQDGSVTQTFGFFWENGVQGLINIWPRPTLIAWKIIFCYGAFEAILQLLLPGKRVEGPISPAGNRPVYKANGLAAYFVTLATYLGLWWFGIFNPAIVYDHLGEIFSALIFGSFIFCVLLYIKGHVAPSSSDSGSCGNLIIDFYWGMELYPRIGKSFDIKVFTNCRFGMMSWAVLAVTYCIKQYEINGKVSDSMLVNTILMLVYVTKFFWWEAGYWNTMDIAHDRAGFYICWGCPVWVPSVYTSPGMYLVNHPVELGTQLAIYILVAGILCIYINYDCDRQRQEFRRTNGKCLVWGRAPSKIVASYTTTSGETKTSLLLTSGWWGLARHFHYVPEILSAFFWTVPALFDNFLAYFYVIFLTLLLFDRAKRDDDRCRSKYGKYWKLYCEKVKYRIIPGIY

SEQ ID NO: 10675 - protein, 400 aa, Arabidopsis thaliana
MVHQDGSVTQTFGFFWENGVQGLINIWPRPTLIAWKIIFCYGAFEAILQLLLPGKRVEGPISPAGNRPVYKANGLAAYFVTLATYLGLWWFGIFNPAIVYDHLGEIFSALIFGSFIFCVLLYIKGHVAPSSSDSGSCGNLIIDFYWGMELYPRIGKSFDIKVFTNCRFGMMSWAVLAVTYCIKQYEINGKVSDSMLVNTILMLVYVTKFFWWEAGYWNTMDIAHDRAGFYICWGCPVWVPSVYTSPGMYLVNHPVELGTQLAIYILVAGILCIYINYDCDRQRQEFRRTNGKCLVWGRAPSKIVASYTTTSGETKTSLLLTSGWWGLARHFHYVPEILSAFFWTVPALFDNFLAYFYVIFLTLLLFDRAKRDDDRCRSKYGKYWKLYCEKVKYRIIPGIY

SEQ ID NO: 10676 - DNA, 2111 bp, Arabidopsis thaliana
ctcactgtccccccccccccgaagcgaggaatatgctgagcttatcattgagtaatcatgttcctccattaacgctcttgagccatgaacgaagaatcctcaagctccaaagtcgatcgtctattctctttcaccaactcttccacactaagttccttctcctgtcgaattcttcctctttgtcttcttcacatggagttgttgctatttcggcatctccgtcttcagtcgcagttccggaattagaagacgaggaccacttcgatgacgaattacgtcgtctattggcgctcgtaccggaggagatacgccagacactgaaggagcaccctgaaattagtgaactcatagagatagtgttggatttaggtcgtaaacctctggcgcgattcccttcaggtgactttgttatctccgacgatgctgttagagttaaagatctggaattcgctgtttctcaggttggtgagtttactaatgataatcgagctggaatcagccggacgttgcatcggattagtgcgataaggaatcggaaaggagaaattattggattaacttgccgtgttggtcgatctgttagaggaagcgctaatttgctgcgtgatcttgttcaagatgggaactcattgttgcttattggtcctccaggtgtggggaaaactacaatgattagggaggtagcacgaatgctaggaaatgactatgagaagagagtaatgattgttgatacttccaatgagattggtggtgatggtgatatacctcatccagggatcggtaatgctaggcggatgcaagtccctaactctgacatacaacacaaggtgctgattgaggcagtagaaaaccatatgccccaagtaattgtgattgatgagattggaactaaacttgaagcgatagctgcaagtactatagcagaacgtggaatccagttagtcgccactgctcatggagccactatcgagaatttgattaagaatccttcattagaccttctggttggaggtgtacagagtgtaactcttggagatgaggaagcgaccagaagaggtggccagaagactgtccttgaaagaaaaggtcccttcaacatttaactgtggtgcagaaatagtttcaaagactgaagttcgagttcatcgtagtcttgaagcaactgttgatgctatcctcgcaggtcgcttaccaaacgttgaaatccgcaaaataaagtctcatggagtggaagtgattatggagaaggaacctttcatcgacgagaagactgtggataagaaacatgaagaggaaacattagatgtttcgaagctcaccaaggaggaaactgtctctgaagtccttcaaactaaggagataactgaagcagaatcttcagagaaagatacattgatgtatctatatgtctatgggattgcagaatcaactgttcttcaggcaatcaaacaactagagatggaaactgcggtagagttaactgacgacattagtgaagcagaagccttactcgcgttgcaagcaaagatcaggaagaatccccggattaaatcatttgctacatctcacggtatacctgtttatgtaacaaagactaactcaggtatccaagtggccaaggcgatacgggcattactaacagattacgaagacggactcggagagtttggatcagaagatcgtctaaaactatctgaaaaaatggacgccttagaagaagcgagattagcgatagagcggatagtgataccgaaaaaggaaacaaccgatttactcccgaggccacctaggattgtgtctcttcaaggaaagctagtcaggaagtataatttacgatcagaaagaaaatggagaggggatgagatgtatctacggattctcccttatagcacggaagaagatagagacgaccgtgaagatgaaggagagtttggagaagcgaacggggaagagcttgacgagttaggtttcgccaccggcgagtctaatgactcaccctctggcatcgataggttacctctattgcctgattagttttatttgttcatacattgttacagatacacttttgtgaatgagaaaagtcaaaaaaaagaaaaaaatgtcaactg

SEQ ID NO: 10677 - protein, 366 aa, Arabidopsis thaliana
HCPPPPEARNMLSLSLSNHVPPLTLLSHERRILKLQSRSSILFHQLFHTKFLLLSNSSSLSSSHGVVAISASPSSVAVPELEDEDHFDDELRRLLALVPEEIRQTLKEHPEISELIEIVLDLGRKPLARFPSGDFVISDDAVRVKDLEFAVSQVGEFTNDNRAGISRTLHRISAIRNRKGEIIGLTCRVGRSVRGSANLLRDLVQDGNSLLLIGPPGVGKTTMIREVARMLGNDYEKRVMIVDTSNEIGGDGDIPHPGIGNARRMQVPNSDIQHKVLIEAVENHMPQVIVIDEIGTKLEAIAASTIAERGIQLVATAHGATIENLIKNPSLDLLVGGVQSVTLGDEEATRRGGQKTVLERKGPFNI

SEQ ID NO: 10678 - protein, 356 aa, Arabidopsis thaliana
MLSLSLSNHVPPLTLLSHERRILKLQSRSSILFHQLFHTKFLLLSNSSSLSSSHGVVAISASPSSVAVPELEDEDHFDDELRRLLALVPEEIRQTLKEHPEISELIEIVLDLGRKPLARFPSGDFVISDDAVRVKDLEFAVSQVGEFTNDNRAGISRTLHRISAIRNRKGEIIGLTCRVGRSVRGSANLLRDLVQDGNSLLLIGPPGVGKTTMIREVARMLGNDYEKRVMIVDTSNEIGGDGDIPHPGIGNARRMQVPNSDIQHKVLIEAVENHMPQVIVIDEIGTKLEAIAASTIAERGIQLVATAHGATIENLIKNPSLDLLVGGVQSVTLGDEEATRRGGQKTVLERKGPFNI

SEQ ID NO: 10679 - protein, 332 aa, Arabidopsis thaliana
MRKRPEEVARRLSLKEKVPSTFNCGAEIVSKTEVRVHRSLEATVDAILAGRLPNVEIRKIKSHGVEVIMEKEPFIDEKTVDKKHEEETLDVSKLTKEETVSEVLQTKEITEAESSEKDTLMYLYVYGIAESTVLQAIKQLEMETAVELTDDISEAEALLALQAKIRKNPRIKSFATSHGIPVYVTKTNSGIQVAKAIRALLTDYEDGLGEFGSEDRLKLSEKMDALEEARLAIERIVIPKKETTDLLPRPPRIVSLQGKLVRKYNLRSERKWRGDEMYLRILPYSTEEDRDDREDEGEFGEANGEELDELGFATGESNDSPSGIDRLPLLPD

SEQ ID NO: 10680 - DNA, 1265 bp, Arabidopsis thaliana
tagtggtgacttcacgaatatctctcttcagacgtggtttgctccagtccggtgagcgcggcgccgaggaatagagattgattcagcgacaatggcgattaggaagcttttgcttcttctgaaacccattgatccgtacccattccttcaaacagaaggtgcatcgctcatcaaaaatcctcaggttcttcaatatctagaaagcaggtgcaaagtacacaagaatgctatcaagttttgtcaggaaatactaagtaagaagcctgttgagtggaaacccatttcacgtaacgacttatcgcatcccattcgtgatgttgatatggtcatcaccgtgggtggagacggtaccctcttgcatgccagtcatttcattgatgactctgttccggttctaggagtcaattctgacccaacacaagctcacgaggtcgaagaactgagcgatcagtttgacgctagtagaagtactggtcatctttgtgctgcaactgtcgagaattttgaacaggtgctggatgacattttgtttggcagagtggttcctgcaaaagtatcgagaatatcattgaagttaaattcagaaactcttctttcacatgcacttaatgacattttgatcgcacacccatgccctgctgcggtttcaaggttctctttcaagattaagaacaaagatggtgcgagcagtccaaagacagtgaactgccgctcaagcggtctaagaatctgcacagctgctggttcaactgcagcaatgcagtcagcaggtgggttcgtgatgccaatgttgtctcgtgatctacagttcatggttagagagccaatatctcctggttcaaccgcttcgttaatgcattcgaccttcaaaccagaccaattcatggacgttaactggtattcagaccacgggactatctacatcgatggttgtcaggttcaacacagcgtgcagctcggagatacaatcgagatatcatcggatgcgccagtcttaaacgttttcttgtcacacggcatatctcagatcagatcaaggtactagaattggtacaatggtagattttgttcataaagttagagttggtacacattaagagcccacttgtctgtagatatggtaaaagattccttggtccgaaagattcgttgattcttgaatctttggtgcttgaagaagtttaattcaagtagctatctttctcctaccaagaacgtggatgtgtctaatcctcttgaataaaacttatatttaaagaaaaatg

SEQ ID NO: 10681 - protein, 317 aa, Arabidopsis thaliana
MAIRKLLLLLKPIDPYPFLQTEGASLIKNPQVLQYLESRCKVHKNAIKFCQEILSKKPVEWKPISRNDLSHPIRDVDMVITVGGDGTLLHASHFIDDSVPVLGVNSDPTQAHEVEELSDQFDASRSTGHLCAATVENFEQVLDDILFGRVVPAKVSRISLKLNSETLLSHALNDILIAHPCPAAVSRFSFKIKNKDGASSPKTVNCRSSGLRICTAAGSTAAMQSAGGFVMPMLSRDLQFMVREPISPGSTASLMHSTFKPDQFMDVNWYSDHGTIYIDGCQVQHSVQLGDTIEISSDAPVLNVFLSHGISQIRSRY

SEQ ID NO: 10682 - protein, 240 aa, Arabidopsis thaliana
MVITVGGDGTLLHASHFIDDSVPVLGVNSDPTQAHEVEELSDQFDASRSTGHLCAATVENFEQVLDDILFGRVVPAKVSRISLKLNSETLLSHALNDILIAHPCPAAVSRFSFKIKNKDGASSPKTVNCRSSGLRICTAAGSTAAMQSAGGFVMPMLSRDLQFMVREPISPGSTASLMHSTFKPDQFMDVNWYSDHGTIYIDGCQVQHSVQLGDTIEISSDAPVLNVFLSHGISQIRSRY

SEQ ID NO: 10683 - DNA, 2405 bp, Arabidopsis thaliana
gatcttcattattttagatttgaccgtttagaaaagtaagaaccagaccgtaccgaaccaaaacgaaccagagccagacgactccttaacggcggctaagctatctgtaaaccgaccgaaccacacagccacaggcacacaaatcaaaccttctagaaatcaaagagagacatttattctctaaattcattttcctattttgcccctacgaatatttttcttcttcgtctctctctctcagctcttgaagtctttggtctgttggcgaattttcaagcagctttctaattctgaactgaaaatttcgtctttggaactttatattctctcatctgaaactgaaggagaaggaagatgacgactatggagagtttgattgggttagttaataggatacagagagcatgtaccgtactcggtgactatggtggtggaactggaagtaacgctttcaattctctctgggaagctcttccaaccgtcgccgtcgtcggtggtcagagttctgggaaatcttcggttcttgagagtatagttgggagagattttcttcctagaggatctggtatcgttacgagacggcctttagtgttgcagcttcataagactgatgatggaacagaggagtatgcagagttccttcatcttcccaagaagcaattcacagattttgctttggttcgcagggagattcaggatgagactgatagaatcacagggaaaaacaaacagatatctccagttcctattcacctcagtatctactctccaaatgttgtgaatttgacactcattgatttgcccggtttaactaaagtggctgttgagggacagccggaaaccattgctgaggatatcgaatccatggttcgcacatatgttgataagcccaattgtatcatattggctatatctcctgccaaccaagacattgccacatcagatgcaattaagctcgcaaaagatgtcgatccaacaggtgagaggacatttggtgttcttaccaagttagacttgatggacaaaggaactaatgcgttagaagttcttgaaggaagatcttacaggctgcaacatccttaggttgggatagtgaaccgttcacaagcagatattaataagaatgtcgatatgatgcttgcaagacgcaaggaacgagaatattttgataccagtcctgactatggtcacttagccagcaaaatgggttcagaatatctggcaaaactgctctctaagcacttggagtctgttatcaggacccgtattccaagtatactatccttaataaacaaaagcattgaagaacttgaaagagagttagaccgaatgggtcggcctgtcgcagttgatgctggggctcaactatacactatattggagatgtgccgtgcattcgataagatattcaaggaacatcttgatggcgggcgtcctggaggtgaccgtatctatggagtctttgacaaccaacttccagctgcacttaaaaagcttccttttgatcgccatctttctctacaaagcgtgaagaaaatcgtgtccgaggcagatggttatcaacctcacttgattgcaccagaacagggttatcgccgtctaatcgaaggggcactgggttactttagaggtccagctgaagcttctgtggatgctgttcactatgtcttgaaagagcttgtgaggaaatcaatatcagaaactgaggagctaaagcgtttcccttcactgcaagtcgagcttgctgcagcagccaacagctccttggagaaattcagggaagaaagcaagaagtcggttattcgacttgttgacatggaatctgcgtatctaacagctgagttcttccggaaacttcctcaagaaatagaaagaccagtaaccaacagcaaaaaccaaaccgcttctccttcgtctgcaacattagaccagtatggagacggacatttcagaaggatagcatcaaatgtatctgcgtatgttaatatggtttcggacacacttcgtaacaccattccaaaagcttgtgtgtactgtcaggttagacaagccaagctcgcattgctcaattacttctactctcagatcagcaagagagaggggaaacagttgggacagttactagatgaagatccggcattgatggaccggagactagagtgcgcgaagaggctagagttatacaagaaagcaagagatgaaattgatgctgttgcttgggtaagatgataaaacctaaaagtgtgtttctggtgatggttttagagaactataaattcgtctgttgtttaagttcgttgactatgtctttgtatgtatgtatatgatcatcagaccctattgagagagacttgagacgttttgtaataaacttatcattactatttaaaaacgccatagcgtgt

SEQ ID NO: 10684 - protein, 365 aa, Arabidopsis thaliana
MMLARRKEREYFDTSPDYGHLASKMGSEYLAKLLSKHLESVIRTRIPSILSLINKSIEELERELDRMGRPVAVDAGAQLYTILEMCRAFDKIFKEHLDGGRPGGDRIYGVFDNQLPAALKKLPFDRHLSLQSVKKIVSEADGYQPHLIAPEQGYRRLIEGALGYFRGPAEASVDAVHYVLKELVRKSISETEELKRFPSLQVELAAAANSSLEKFREESKKSVIRLVDMESAYLTAEFFRKLPQEIERPVTNSKNQTASPSSATLDQYGDGHFRRIASNVSAYVNMVSDTLRNTIPKACVYCQVRQAKLALLNYFYSQISKREGKQLGQLLDEDPALMDRRLECAKRLELYKKARDEIDAVAWVR

SEQ ID NO: 10685 - protein, 364 aa, Arabidopsis thaliana
MLARRKEREYFDTSPDYGHLASKMGSEYLAKLLSKHLESVIRTRIPSILSLINKSIEELERELDRMGRPVAVDAGAQLYTILEMCRAFDKIFKEHLDGGRPGGDRIYGVFDNQLPAALKKLPFDRHLSLQSVKKIVSEADGYQPHLIAPEQGYRRLIEGALGYFRGPAEASVDAVHYVLKELVRKSISETEELKRFPSLQVELAAAANSSLEKFREESKKSVIRLVDMESAYLTAEFFRKLPQEIERPVTNSKNQTASPSSATLDQYGDGHFRRIASNVSAYVNMVSDTLRNTIPKACVYCQVRQAKLALLNYFYSQISKREGKQLGQLLDEDPALMDRRLECAKRLELYKKARDEIDAVAWVR

SEQ ID NO: 10686 - protein, 341 aa, Arabidopsis thaliana
MGSEYLAKLLSKHLESVIRTRIPSILSLINKSIEELERELDRMGRPVAVDAGAQLYTILEMCRAFDKIFKEHLDGGRPGGDRIYGVFDNQLPAALKKLPFDRHLSLQSVKKIVSEADGYQPHLIAPEQGYRRLIEGALGYFRGPAEASVDAVHYVLKELVRKSISETEELKRFPSLQVELAAAANSSLEKFREESKKSVIRLVDMESAYLTAEFFRKLPQEIERPVTNSKNQTASPSSATLDQYGDGHFRRIASNVSAYVNMVSDTLRNTIPKACVYCQVRQAKLALLNYFYSQISKREGKQLGQLLDEDPALMDRRLECAKRLELYKKARDEIDAVAWVR

SEQ ID NO: 10687 - DNA, 760 bp, Arabidopsis thaliana
gctcactagtcccccccccccggaaaatctctgaaagtctttttgtttgaagaagatgacgcatgttgaagatgataaggaattcaaggagaaacctttggttcaggttctgagcgacgacgacagtgaagtgaaggaagccaaagacggaggaggtgaagaagttaccggcggcgacggtgaaggagaggctaatgtagaagaggaagacgacgaagcagaaaatgaagacgatgatgatgatgatgatgatgatgacgacgacgaggacgaggacgatgaagaaggggaggaggatcttgggacagagtacctagtgaggccggttggtgaggttgaagatgaggatgatgcaagtgattttgaccctgaggagaatggcttggatgaagaagaaggtgatgaagagattgaagaagatgatgttgatgaggacatcagcttgagtgctggcaaatctgagcctctgtccaagaggaagagggttgctaaggaccacagtgagcaaggagatgtcactggtgataacattaggccttctaaacggtagttcttctaacttcgaactgatctcaatccaagaagaaagtcagaaattgattcgaattctcagtattttgaatcattcgttgggttgatatagtttttaatctaatggtagtagtgttgcttagagcttaatggattgttgtttcttctttatgttccttgagactgctttcaaacaagtttaagtattcaacgcttttcttttcaaggg

SEQ ID NO: 10688 - protein, 164 aa, Arabidopsis thaliana
MTHVEDDKEFKEKPLVQVLSDDDSEVKEAKDGGGEEVTGGDGEGEANVEEEDDEAENEDDDDDDDDDDDDEDEDDEEGEEDLGTEYLVRPVGEVEDEDDASDFDPEENGLDEEEGDEEIEEDDVDEDISLSAGKSEPLSKRKRVAKDHSEQGDVTGDNIRPSKR

SEQ ID NO: 10689 - DNA, 1691 bp, Arabidopsis thaliana
tctctcttctgaagcactcaaagagtaaagtttctctgcatttcagcttctctctctcttctctctgtagaaatggcgggtcggatccaatcccaccagctaccaaatggactctacgtatcgggaaagctcgagcaaccaaaagagcgaccaccgacaatggcggctcgagctgtgccttacaacggaggcgacatcaagaaatccggcgagctcggaaggatgttcgacatctccgtcgtcgattcagcttcttttcaaggaccaccgccgttaatcgtcggtggtaatagcagcggaggtacgtcaaggcttcaggcgccgccacgtgtctccggttcttcttcaaaccctaacagtggatccgttcgatctggtcccaactctggttcggttaagaaattctcaggtccactctctcagcttcagccaaccggtttaattacctccggttctctcggttcttcgggtccaattttgtccgggtctagaaggtcgggtcagttggatcaccaattgagtaatctagcgtcgagcaagcctaaatacgggtcgtcggtgacgagtcttaacgtagacccggttcgggtcgggtttaaagtaccaaaagcaatggtttgggcggttttgatagtggcggcgatgggattgcttgtgggagcttttcttaccgtggcggtgaagaaaccggtggtgattgctgcggttttagctgcggtttgtcctgcaatcgtggttttggtttggaattgcgtttggagaagaaaagggttgttgagttttatcaaaaagtatccagatgctgagcttagaggtgccattgatggacaattcgttaaggttacaggggttgtgacatgtggaagcattcctttggaatcttcgttccaaagaacaccaagatgcgtttatgtatccacggagttgtatgaatacaaaggttttggtgggaaatccgcaaacccaaaacatcgatgcttttcttggggatctagacatgcagagaaatatgtgtcggatttttacatctcggatttccaatctggattgcgagcactagtaaaagcaggatatggatcaaaagtttctccttttgtcaaaccggcgacagtggctaatgtaacaacgcagaacaaagatttatctcccagcttcttaaagtggctgtcagatcgcaacctctcagctgatgaccgtgttatgcgtctcaaagaaggatacataaaagaaggaagcacagtgagcgtgatggggatggtaagaaggcacgacaacgttctgatgatagttcctccggcagaagcagtctccagtgggtgccggtggtggcactgcctcttcccaacctacgcagatggcttaatcataacctgcgacgataatcaaaacgctgatgtcattcctgtctgaaaccaatatgtatgtaatgcttcttttgcccgatattcaaatataaaaatgcttaaagagttaggctcacgatactgaaggaaggaagagaagagaggacagccaaattggttcaaaaagaaaaccaaataggctttgccttttgccttattagtttttgtttttctttcttaattctgttttttttttgccccttgtatggggtttatgtttgtgtacatagagccccaaagtgtaaatgctattttctgttaaaataattattatgtcatatccactag

SEQ ID NO: 10690 - protein, 445 aa, Arabidopsis thaliana
MAGRIQSHQLPNGLYVSGKLEQPKERPPTMAARAVPYNGGDIKKSGELGRMFDISVVDSASFQGPPPLIVGGNSSGGTSRLQAPPRVSGSSSNPNSGSVRSGPNSGSVKKFSGPLSQLQPTGLITSGSLGSSGPILSGSRRSGQLDHQLSNLASSKPKYGSSVTSLNVDPVRVGFKVPKAMVWAVLIVAAMGLLVGAFLTVAVKKPVVIAAVLAAVCPAIVVLVWNCVWRRKGLLSFIKKYPDAELRGAIDGQFVKVTGVVTCGSIPLESSFQRTPRCVYVSTELYEYKGFGGKSANPKHRCFSWGSRHAEKYVSDFYISDFQSGLRALVKAGYGSKVSPFVKPATVANVTTQNKDLSPSFLKWLSDRNLSADDRVMRLKEGYIKEGSTVSVMGMVRRHDNVLMIVPPAEAVSSGCRWWHCLFPTYADGLIITCDDNQNADVIPV

SEQ ID NO: 10691 - protein, 416 aa, Arabidopsis thaliana
MAARAVPYNGGDIKKSGELGRMFDISVVDSASFQGPPPLIVGGNSSGGTSRLQAPPRVSGSSSNPNSGSVRSGPNSGSVKKFSGPLSQLQPTGLITSGSLGSSGPILSGSRRSGQLDHQLSNLASSKPKYGSSVTSLNVDPVRVGFKVPKAMVWAVLIVAAMGLLVGAFLTVAVKKPVVIAAVLAAVCPAIVVLVWNCVWRRKGLLSFIKKYPDAELRGAIDGQFVKVTGVVTCGSIPLESSFQRTPRCVYVSTELYEYKGFGGKSANPKHRCFSWGSRHAEKYVSDFYISDFQSGLRALVKAGYGSKVSPFVKPATVANVTTQNKDLSPSFLKWLSDRNLSADDRVMRLKEGYIKEGSTVSVMGMVRRHDNVLMIVPPAEAVSSGCRWWHCLFPTYADGLIITCDDNQNADVIPV

SEQ ID NO: 10692 - protein, 395 aa, Arabidopsis thaliana
MFDISVVDSASFQGPPPLIVGGNSSGGTSRLQAPPRVSGSSSNPNSGSVRSGPNSGSVKKFSGPLSQLQPTGLITSGSLGSSGPILSGSRRSGQLDHQLSNLASSKPKYGSSVTSLNVDPVRVGFKVPKAMVWAVLIVAAMGLLVGAFLTVAVKKPVVIAAVLAAVCPAIVVLVWNCVWRRKGLLSFIKKYPDAELRGAIDGQFVKVTGVVTCGSIPLESSFQRTPRCVYVSTELYEYKGFGGKSANPKHRCFSWGSRHAEKYVSDFYISDFQSGLRALVKAGYGSKVSPFVKPATVANVTTQNKDLSPSFLKWLSDRNLSADDRVMRLKEGYIKEGSTVSVMGMVRRHDNVLMIVPPAEAVSSGCRWWHCLFPTYADGLIITCDDNQNADVIPV

SEQ ID NO: 10693 - DNA, 1569 bp, Arabidopsis thaliana
gatgcgtactgtgaccattacatactacagttagctttcttctctagccgtcgaagtttcacgcgccgccgtgagaaaatgcagcacacaccggagcaaccgagagtcactctttacataatcctcaccaccgcgtttctctctctatgtttcctcctctctctctcttcctcttcccagtactcttcatcttcctacaccggacgacccgatgatctacgacccgacccgagactctttccttcttcctccaaaatcgccgccgatacagctcctccttcaatcgcttacctaatttccggatcttctggtgacacgcgacgaatccttcgacttctctacgctacttaccatcctcgaaatcgatatcttcttcatctcgatagcttagcgacacaatctgaacgagatcggctcgctgttgatgtacaagatgtaccgatttttagagctgcaaggaatgttgatgttattgggaagcctgatttcgcgtatcagagaggatcgtctccgatggcttcaacgcttcatggtgcttcgattcttcttagattgtcaggaacttgggattggtttgttagtattagtgttgatgattatcctctcgttactcaagatgagcttcttcatattatgtcacatttgcctaaggacttgaattttgtgaaccacactagctacattggttggaaagagtccaggaagttgaagccagttattgttgatccagggctctatcttgtggagaaaaccgatatgtttttcgcttcgcagaaacgagagttgcctaaggctttcaagttattctcaggtccatctttctccatcttaagccggaatttcatggagcactgtgtcttaggcactgacaacttccctcggactctactcatgtacttgtccaacacacctgattctctttccaactacttcccaactatcctctgcaacacggataccttcaaaaagaccatcatgaacaacaacttactctacctagcttctaacgacacttctaaagaaagataccatcagcttgatcacaaagagttcacagaaatggttgactccggagcagcttttgcaagaggattcaggtacgacgacactgtccttgatcgcatcgatcatgaacttctgggacgcaaacctggtgaagttgtgcctggtggttggtgtttaggagattctagtaaaaaccgtagctcgtgttccgtctggggtgactcgggtatccttcggcccggttctggttccgataggctcgagagacgaattgttgagttactatcaaacgattggttcagattgcaccaatgcgtacctgaatgatcggatgatcctcaccgcactttcaatagagtaaatagttgtccaagacacgaagaagataacggtactttatgcttctgtatctttagagagagttccacttctacattgtaacctgtgactttgagagtgtttgttccattgttgttgtagaaaaaccatctcaaagctgagaaatgaaacgactcggttcattggttgaagtttaaaccggtataaaatcccggtttttttttt

SEQ ID NO: 10694 - protein, 443 aa, Arabidopsis thaliana
DAYCDHYILQLAFFSSRRSFTRRREKMQHTPEQPRVTLYIILTTAFLSLCFLLSLSSSSQYSSSSYTGRPDDLRPDPRLFPSSSKIAADTAPPSIAYLISGSSGDTRRILRLLYATYHPRNRYLLHLDSLATQSERDRLAVDVQDVPIFRAARNVDVIGKPDFAYQRGSSPMASTLHGASILLRLSGTWDWFVSISVDDYPLVTQDELLHIMSHLPKDLNFVNHTSYIGWKESRKLKPVIVDPGLYLVEKTDMFFASQKRELPKAFKLFSGPSFSILSRNFMEHCVLGTDNFPRTLLMYLSNTPDSLSNYFPTILCNTDTFKKTIMNNNLLYLASNDTSKERYHQLDHKEFTEMVDSGAAFARGFRYDDTVLDRIDHELLGRKPGEVVPGGWCLGDSSKNRSSCSVWGDSGILRPGSGSDRLERRIVELLSNDWFRLHQCVPE

SEQ ID NO: 10695 - protein, 417 aa, Arabidopsis thaliana
MQHTPEQPRVTLYIILTTAFLSLCFLLSLSSSSQYSSSSYTGRPDDLRPDPRLFPSSSKIAADTAPPSIAYLISGSSGDTRRILRLLYATYHPRNRYLLHLDSLATQSERDRLAVDVQDVPIFRAARNVDVIGKPDFAYQRGSSPMASTLHGASILLRLSGTWDWFVSISVDDYPLVTQDELLHIMSHLPKDLNFVNHTSYIGWKESRKLKPVIVDPGLYLVEKTDMFFASQKRELPKAFKLFSGPSFSILSRNFMEHCVLGTDNFPRTLLMYLSNTPDSLSNYFPTILCNTDTFKKTIMNNNLLYLASNDTSKERYHQLDHKEFTEMVDSGAAFARGFRYDDTVLDRIDHELLGRKPGEVVPGGWCLGDSSKNRSSCSVWGDSGILRPGSGSDRLERRIVELLSNDWFRLHQCVPE

SEQ ID NO: 10696 - protein, 272 aa, Arabidopsis thaliana
MASTLHGASILLRLSGTWDWFVSISVDDYPLVTQDELLHIMSHLPKDLNFVNHTSYIGWKESRKLKPVIVDPGLYLVEKTDMFFASQKRELPKAFKLFSGPSFSILSRNFMEHCVLGTDNFPRTLLMYLSNTPDSLSNYFPTILCNTDTFKKTIMNNNLLYLASNDTSKERYHQLDHKEFTEMVDSGAAFARGFRYDDTVLDRIDHELLGRKPGEVVPGGWCLGDSSKNRSSCSVWGDSGILRPGSGSDRLERRIVELLSNDWFRLHQCVPE

SEQ ID NO: 10697 - DNA, 1970 bp, Arabidopsis thaliana
aacctcgtataaatctcaccaatccatttcttctcttcttctttgcgttttttgtttggaactgaatcgaaaaagatggatgctaatttcgagatgcctccagtcggtggaatgaacgacgacgacgacatggatttcggtgacggcgcctcgtttcttaaagtcggtgaagagaaagagatccaacaaggtttgaagaagaagcttcttaaagaaggtgaaggatatgaaactcctgagaatggcgatgaagttgaagtgcattacactggaactttgcttgatgggacgaagtttgattcgagtcgtgatagagcaacgcctttcaaattcactcttggacaaggtcaagttattaaaggatgggatattggtattaagacgatgaagaaaggtgaaaacgctgttttcactatacctgcggagctagcatatggggaatctggttccccgccaactattcctgcgaatgctacgcttcagtttgatgtggagttgcttaaatgggacagtgtgaaggatatatgtaaagatggtggtgtgtttaagaagattcttgctgttggagagaagtgggagaatccaaaggaccttgatgaagttcttgttaagtttgaggcgaaacttgaggatggtactgttgttgggaaatctgatggtgtggagttcactgttaaagatggtcatttctgccctgcacttactaaggctgtgaaaactatgaaaaagggtgaaaaggtccttctgacagttaaaccacaatatggttttggggagaagggcaagccagcctctgctggtgaaggcgcggttcctcctaatgcgacgctcgagatcaatttggagttagtttcgtggaaaacagtgtcagaagtaactgatgataacaaggttgtgaagaaagtcttgaaggaaggggatggatatgagcgtcctaacgagggggcagttgtgaaagtgaaattgatagggaaacttcaagatggtactgtatttttgaagaaaggtcatggtgagaatgaggaaccgtttgagttcaaaacagatgaagagcaagttgtcgatggacttgatagagctgtcatgaagatgaaaaagggtgaagtggcattggtgaccatagaccctgagtatgcctttggttctaatgagtcacaacaggaattggctgtggtgccgccaaactcaactgttacttatgaggttgacctattgactttcgacaaggaaagggaatcgtgggacatgaacactgaggagaagattgaagctgctagtaagaagaaggaagaaggaaattccaagtttaaaggaggcaaatattccctggcttccaagagatatgagaaggctgtcaaattcattgaatacgacacatccttcagtgaggaagagaagaagcaagcaaaagcattgaaggtggcatgcaatctaaacgatgcagcctgcaaactcaaattgaaagattacaagcaggccgaaaaactatgcacaaaggtgttagagctagaaagcaccaatgtgaaggccttataccggagagcgcaagcgtacatggagttgtctgatttagacttggccgagtttgatgtcaagaaggcccttgaaatcgatcccaacaacagggaagtgaagctagagcagaaaaggttgaaggagaaaatgaaggaattcaataaaaaggaagccaaattttatggaaacatgtttgcgaaactaagtaaggaataatcaaaagatggagaggcaatgagcacctgaggtcttgaaaacgttgcaagaactctgcatttttcattttctactcttttggtttgttgcaatgttttctagtttttcaacctgagcgttagtgagacactaagacttataaaacagtgagagattatcccaatgtgttgcttttttcgtctgattgttggtagaaacttggagctattgatagcaaaaaaaacctaactttccagatt

SEQ ID NO: 10698 - protein, 551 aa, Arabidopsis thaliana
MDANFEMPPVGGMNDDDDMDFGDGASFLKVGEEKEIQQGLKKKLLKEGEGYETPENGDEVEVHYTGTLLDGTKFDSSRDRATPFKFTLGQGQVIKGWDIGIKTMKKGENAVFTIPAELAYGESGSPPTIPANATLQFDVELLKWDSVKDICKDGGVFKKILAVGEKWENPKDLDEVLVKFEAKLEDGTVVGKSDGVEFTVKDGHFCPALTKAVKTMKKGEKVLLTVKPQYGFGEKGKPASAGEGAVPPNATLEINLELVSWKTVSEVTDDNKVVKKVLKEGDGYERPNEGAVVKVKLIGKLQDGTVFLKKGHGENEEPFEFKTDEEQVVDGLDRAVMKMKKGEVALVTIDPEYAFGSNESQQELAVVPPNSTVTYEVDLLTFDKERESWDMNTEEKIEAASKKKEEGNSKFKGGKYSLASKRYEKAVKFIEYDTSFSEEEKKQAKALKVACNLNDAACKLKLKDYKQAEKLCTKVLELESTNVKALYRRAQAYMELSDLDLAEFDVKKALEIDPNNREVKLEQKRLKEKMKEFNKKEAKFYGNMFAKLSKE

SEQ ID NO: 10699 - protein, 545 aa, Arabidopsis thaliana
MPPVGGMNDDDDMDFGDGASFLKVGEEKEIQQGLKKKLLKEGEGYETPENGDEVEVHYTGTLLDGTKFDSSRDRATPFKFTLGQGQVIKGWDIGIKTMKKGENAVFTIPAELAYGESGSPPTIPANATLQFDVELLKWDSVKDICKDGGVFKKILAVGEKWENPKDLDEVLVKFEAKLEDGTVVGKSDGVEFTVKDGHFCPALTKAVKTMKKGEKVLLTVKPQYGFGEKGKPASAGEGAVPPNATLEINLELVSWKTVSEVTDDNKVVKKVLKEGDGYERPNEGAVVKVKLIGKLQDGTVFLKKGHGENEEPFEFKTDEEQVVDGLDRAVMKMKKGEVALVTIDPEYAFGSNESQQELAVVPPNSTVTYEVDLLTFDKERESWDMNTEEKIEAASKKKEEGNSKFKGGKYSLASKRYEKAVKFIEYDTSFSEEEKKQAKALKVACNLNDAACKLKLKDYKQAEKLCTKVLELESTNVKALYRRAQAYMELSDLDLAEFDVKKALEIDPNNREVKLEQKRLKEKMKEFNKKEAKFYGNMFAKLSKE

SEQ ID NO: 10700 - protein, 539 aa, Arabidopsis thaliana
MNDDDDMDFGDGASFLKVGEEKEIQQGLKKKLLKEGEGYETPENGDEVEVHYTGTLLDGTKFDSSRDRATPFKFTLGQGQVIKGWDIGIKTMKKGENAVFTIPAELAYGESGSPPTIPANATLQFDVELLKWDSVKDICKDGGVFKKILAVGEKWENPKDLDEVLVKFEAKLEDGTVVGKSDGVEFTVKDGHFCPALTKAVKTMKKGEKVLLTVKPQYGFGEKGKPASAGEGAVPPNATLEINLELVSWKTVSEVTDDNKVVKKVLKEGDGYERPNEGAVVKVKLIGKLQDGTVFLKKGHGENEEPFEFKTDEEQVVDGLDRAVMKMKKGEVALVTIDPEYAFGSNESQQELAVVPPNSTVTYEVDLLTFDKERESWDMNTEEKIEAASKKKEEGNSKFKGGKYSLASKRYEKAVKFIEYDTSFSEEEKKQAKALKVACNLNDAACKLKLKDYKQAEKLCTKVLELESTNVKALYRRAQAYMELSDLDLAEFDVKKALEIDPNNREVKLEQKRLKEKMKEFNKKEAKFYGNMFAKLSKE

SEQ ID NO: 10701 - DNA, 944 bp, Arabidopsis thaliana
aaaaaaaacgaaaaggattattccgccgtagaatccatattctctccctcatcactttgataaacaagagtctcatttttcgcttttccaaagggaacaacttcttcggattattatctatggcagagaagcttgagccggtgaaggttttgtactgcggagtttgctctcttccagcggaatactgcgaattcggtcccgatttcgctagatgtaagccctggctcgtcgaaaacgccccagatctctatcctgatctcctcaaagaagcaaatgagaaggcagcagataatgtttctgacaaactccagtcggtgggaatctcttcaggtggtgctgatggggcaccatcttcagctcagactggagggacatccaagaaggaggaagtgaagcgcctacctggggggaaagttaaaaagaaagatcgacaggaagttatcattgaaaaggttgtacgcaacaaacgcaagtgtatcaccattgtgaaaggactagaactgtttgggataaaactcagtgatgcctctaaaaagcttggtaagaagtttgccactggagcatcagttgtcaagggaccaactgaaaaggagcaaattgatgttcaaggggatataatctatgatatcgttgaattcattacagacacttggcccgacgtacctgaaagatccattttcttcatcgaagatgggaagaaggttcaggctggttgatgatcacctttgtcctcgttttttggcatggcgggttcatgtagacgagctagttcctgagttttcctatgtgtttggaggaaatcgcatcatgattataactttcaacgtaacgtatagttggatttatcatactattttcttattcgggttgcgatagttccagacatgtttctccaaacatttctctttttgggggtcttaatatttaaaatgtgtcttgaaatg

SEQ ID NO: 10702 - protein, 237 aa, Arabidopsis thaliana
KKRKGLFRRRIHILSLITLINKSLIFRFSKGNNFFGLLSMAEKLEPVKVLYCGVCSLPAEYCEFGPDFARCKPWLVENAPDLYPDLLKEANEKAADNVSDKLQSVGISSGGADGAPSSAQTGGTSKKEEVKRLPGGKVKKKDRQEVIIEKVVRNKRKCITIVKGLELFGIKLSDASKKLGKKFATGASVVKGPTEKEQIDVQGDIIYDIVEFITDTWPDVPERSIFFIEDGKKVQAG

SEQ ID NO: 10703 - protein, 198 aa, Arabidopsis thaliana
MAEKLEPVKVLYCGVCSLPAEYCEFGPDFARCKPWLVENAPDLYPDLLKEANEKAADNVSDKLQSVGISSGGADGAPSSAQTGGTSKKEEVKRLPGGKVKKKDRQEVIIEKVVRNKRKCITIVKGLELFGIKLSDASKKLGKKFATGASVVKGPTEKEQIDVQGDIIYDIVEFITDTWPDVPERSIFFIEDGKKVQAG

SEQ ID NO: 10704 - DNA, 1140 bp, Arabidopsis thaliana
gatcaaaaaagaaaaaaaaactcaggaagaatctagttgcggttatcttcagcccaaagagtaaagacccatccatccgttgctgaatctgctgctttgatcgaaaatgacgtcgtcctctccaacacagcgtactcacgtctcagttcctcctgaaccaggaggaaagtcactaacacaagaagctaatgagccaccagttccgatatcagtttcctcgccgtgcgggaaacgaaccagagatcccgaagacgaggtctatctcgataaccttcgctctcagaaacgttatcttagtgagataatggcttgtagtttaaacggactaacagtaggagactcacttcctgtcaacatgttagagtctccagcacggtctgagagctttctttatcacagggatgatttatcattacaatactctcccatgtcagaagactcggacgaagcgagattctgtgaggacccaacagcaacagcaagcactagctcatcgcaacccgagagccgcccaactagtccagtttcaccataccgataccaaagacctcttacttcaacaaactcaccacaaccgtcaccaacaatcttacaccattcacatacatgtcctgcctccatgatctccaatgcagcaactactactacaccacagtctcgccaaagaggatcagacacagaaggaaggtttccatcatcgcccagtgatatctgccattcgggtgacttgaggagaaccgctctactcaggtcggttcaaatgagaacacaaccatgtggttatagttcaagttcgggaccaagcaatattgacggtgaagagaggatgtgttctaagtctatggaagaagatagaggctataacaaaggggaagatatcccttacgctgaagtctctagtaagagcaagtcttgtaaagcattggacatgagactttgtgaaaagtgatgaaagaggctctatgaagctgacatggcaatcctccttttaacagtgttaaaaaataaaaatccaaatatattaatatccgtttttattttctttagttataatttttttttttaaagttgtgaggtatgttaaaattttttttttaattaaagaacataaagttatttggattaaaaaaaaaaaaaaag

SEQ ID NO: 10705 - protein, 280 aa, Arabidopsis thaliana
MTSSSPTQRTHVSVPPEPGGKSLTQEANEPPVPISVSSPCGKRTRDPEDEVYLDNLRSQKRYLSEIMACSLNGLTVGDSLPVNMLESPARSESFLYHRDDLSLQYSPMSEDSDEARFCEDPTATASTSSSQPESRPTSPVSPYRYQRPLTSTNSPQPSPTILHHSHTCPASMISNAATTTTPQSRQRGSDTEGRFPSSPSDICHSGDLRRTALLRSVQMRTQPCGYSSSSGPSNIDGEERMCSKSMEEDRGYNKGEDIPYAEVSSKSKSCKALDMRLCEK

SEQ ID NO: 10706 - protein, 214 aa, Arabidopsis thaliana
MACSLNGLTVGDSLPVNMLESPARSESFLYHRDDLSLQYSPMSEDSDEARFCEDPTATASTSSSQPESRPTSPVSPYRYQRPLTSTNSPQPSPTILHHSHTCPASMISNAATTTTPQSRQRGSDTEGRFPSSPSDICHSGDLRRTALLRSVQMRTQPCGYSSSSGPSNIDGEERMCSKSMEEDRGYNKGEDIPYAEVSSKSKSCKALDMRLCEK

SEQ ID NO: 10707 - protein, 197 aa, Arabidopsis thaliana
MLESPARSESFLYHRDDLSLQYSPMSEDSDEARFCEDPTATASTSSSQPESRPTSPVSPYRYQRPLTSTNSPQPSPTILHHSHTCPASMISNAATTTTPQSRQRGSDTEGRFPSSPSDICHSGDLRRTALLRSVQMRTQPCGYSSSSGPSNIDGEERMCSKSMEEDRGYNKGEDIPYAEVSSKSKSCKALDMRLCEK

SEQ ID NO: 10708 - DNA, 1327 bp, Arabidopsis thaliana
gaatcacacagataataatcctcagcttctctctcgctggatttcaacattcttccactcatcgcttctctttaccaaatcaaactcaacacttcactcaactcttatcggaccttccaaactatatccttcaatggatctatggactcttcaattaaaagacgtcacgatccgaaaccctatcttctcatcatcgatccctgagaaatcatcatcgtttaataggaaacttagtgaattggagtttaggtttctcaatcgtaaggtttctgcttctggatatcgttctttggttgttcgagctacctcgaagaagagtaacgacgattcttcttctcctggagatgcttctcaggaaaacaaaccttctaacggcaacaagtccggcgattccgcggctccgaaatcgttcggtttaaacacggattggagagaattcagagcgaacttgtttatgaaagagcaggaagaaaaagcagaagctgagggtcatgaatcagaaccgataggtttgaaatgggcacatccgattccgtttcctgagactggttgtgttctagttgctacagagaagctagatggttatagaacatttgcgagaactgttgtgcttcttcttagagcaggtactagacacccacaagaagggccgtttggtgttgttatcaaccgtccacttcataaaaacatcaagcatatgaaatctacgaaaaccgagctcgctactacgttttctgaatgttctttgtactttggtggtcctcttgaagcaagcatgtttttgttgaagactggtgataaaaccaagatacctgggtttgaagaagtcatgcccgggcttaactttggtactcgaaatagtttggatgaagctgcagtgcttgtaaagaagggagttcttaagccacaggagtttagattctttgttggttacgccggttggcagctagatcagctcagagaagagattgaatcagattactggcatgttgctgcgtgcagctcggatttaatatgcggagcttcatcggaaaacttgtgggaggagattttacagttaatgggcggtcaatactccgagcttagccgaaaacctaagctggatatctgaagttttctaagagaacttgaggctttttataacttatatatattttttctattaagccaatttgtatagcttactttcgttggcttgtacgtgagaataatgcacttctatgctatttataaagatttgctttgtgaaaacacactcttattatgtattctgcagtttataactaaacaacatctatctaataaattgaaacagttgttctaagat

SEQ ID NO: 10709 - protein, 369 aa, Arabidopsis thaliana
NHTDNNPQLLSRWISTFFHSSLLFTKSNSTLHSTLIGPSKLYPSMDLWTLQLKDVTIRNPIFSSSIPEKSSSFNRKLSELEFRFLNRKVSASGYRSLVVRATSKKSNDDSSSPGDASQENKPSNGNKSGDSAAPKSFGLNTDWREFRANLFMKEQEEKAEAEGHESEPIGLKWAHPIPFPETGCVLVATEKLDGYRTFARTVVLLLRAGTRHPQEGPFGVVINRPLHKNIKHMKSTKTELATTFSECSLYFGGPLEASMFLLKTGDKTKIPGFEEVMPGLNFGTRNSLDEAAVLVKKGVLKPQEFRFFVGYAGWQLDQLREEIESDYWHVAACSSDLICGASSENLWEEILQLMGGQYSELSRKPKLDI

SEQ ID NO: 10710 - protein, 325 aa, Arabidopsis thaliana
MDLWTLQLKDVTIRNPIFSSSIPEKSSSFNRKLSELEFRFLNRKVSASGYRSLVVRATSKKSNDDSSSPGDASQENKPSNGNKSGDSAAPKSFGLNTDWREFRANLFMKEQEEKAEAEGHESEPIGLKWAHPIPFPETGCVLVATEKLDGYRTFARTVVLLLRAGTRHPQEGPFGVVINRPLHKNIKHMKSTKTELATTFSECSLYFGGPLEASMFLLKTGDKTKIPGFEEVMPGLNFGTRNSLDEAAVLVKKGVLKPQEFRFFVGYAGWQLDQLREEIESDYWHVAACSSDLICGASSENLWEEILQLMGGQYSELSRKPKLDI

SEQ ID NO: 10711 - protein, 218 aa, Arabidopsis thaliana
MKEQEEKAEAEGHESEPIGLKWAHPIPFPETGCVLVATEKLDGYRTFARTVVLLLRAGTRHPQEGPFGVVINRPLHKNIKHMKSTKTELATTFSECSLYFGGPLEASMFLLKTGDKTKIPGFEEVMPGLNFGTRNSLDEAAVLVKKGVLKPQEFRFFVGYAGWQLDQLREEIESDYWHVAACSSDLICGASSENLWEEILQLMGGQYSELSRKPKLDI

SEQ ID NO: 10712 - DNA, 1336 bp, Arabidopsis thaliana
gacgacgacagacaaaacataaaagatggaggaagaaagagaaaacactaactctatctacatagtttccgagctacttgaagaaattttccttggattgcctttgaaatcaatcctcaaattcaaaaccgtctcaaaacaatggagatcaatcctggaatcgaacttgttcgtggagaggcgtagaactcttcaaaagaaccacccgaaaatcctggctgcttataactgcgactactgcacgcggccgggtatcctccctaagtctcagttcgaaggggacgaagagatcgtttatcttcataccgacgccacgcaaccctcgatgacttgcgacggtttagtctgcatcaccgaacctagttggttcaacgttttgaacgtctccaccggacaactccgaagatttctacccggtccagatccaggaccgcaagcaaattggctcttgggattcggtagagacaaagttacgggcaagtataaaatagtgaggatgtgttttcatgattgttatgaatttgggattcttgatattgaatctggcgaatggagcaaactgatgtcacctcctcatataatgcgagtgggaagtaaatcggtgtgtgtgaatggatcaatctactagttacaaattagtgtgagttacataatactggccttggatcttcaccaagaaacgttcaatggtgtctaccacctcccggctacgtgggtacgcaagatacccaattagtgaaccttgaggaccgtctagccatggccatgacgaccaaagttgggcctgaatggatactagagatctggagcatggatatagaagaaaaaggatggagcaagcgttacacatggagcaaggcttactccataagttatcccatagagttgttgtatcctggccatggcaaaaaaggtggttcacgccggtatcggtttctaagcaagggaatcttgtcttctatgataatcacaagaggctgttcaaatattattcaggtacagatgagattcgttgtctctcctctaacattaatgttatatcttcttacgttgaaaatttggccccacttccgttaaaaccaagccatacgcatcacgatcttgggaattcgaattccaagttcagcacatccagatgccacttgtttccgacgcgaggttcttggatatccaaagtttttagaaggaatgttttgtttacctctctagtagtagttggttatatatacttacctctctaagagtttacttatttagtatcaaactattattgtggttctaaagatcttgttatgtttttaatgctaatgaatttaattgtttgcttttatagttt

SEQ ID NO: 10713 - protein, 200 aa, Arabidopsis thaliana
MEEERENTNSIYIVSELLEEIFLGLPLKSILKFKTVSKQWRSILESNLFVERRRTLQKNHPKILAAYNCDYCTRPGILPKSQFEGDEEIVYLHTDATQPSMTCDGLVCITEPSWFNVLNVSTGQLRRFLPGPDPGPQANWLLGFGRDKVTGKYKIVRMCFHDCYEFGILDIESGEWSKLMSPPHIMRVGSKSVCVNGSIY

SEQ ID NO: 10714 - protein, 150 aa, Arabidopsis thaliana
MDTRDLEHGYRRKRMEQALHMEQGLLHKLSHRVVVSWPWQKRWFTPVSVSKQGNLVFYDNHKRLFKYYSGTDEIRCLSSNINVISSYVENLAPLPLKPSHTHHDLGNSNSKFSTSRCHLFPTRGSWISKVFRRNVLFTSLVVVGYIYLPL

SEQ ID NO: 10715 - protein, 136 aa, Arabidopsis thaliana
MEQALHMEQGLLHKLSHRVVVSWPWQKRWFTPVSVSKQGNLVFYDNHKRLFKYYSGTDEIRCLSSNINVISSYVENLAPLPLKPSHTHHDLGNSNSKFSTSRCHLFPTRGSWISKVFRRNVLFTSLVVVGYIYLPL

SEQ ID NO: 10716 - DNA, 1684 bp, Arabidopsis thaliana
gaactctgcgaaagctgcaaaaataaaatcagccgattcctattttttaatttgtcttcctgtgaagaatgaaaaagaagaagagtacaacaagtactaagaagacgaagaaggtttcaacaatagcttattcgcagcttttccgattctggtgagtgtttcgcactacattgctcttgctctactggagattgcggttgtgtgttacgagagctagagttgaattggctttggtcaacacaatggggacttgtggttgctgacttttgtgattttcagttttctacttggatttagatggatgtttcttccattgtgcgaaatacaaccctaactgatcaagatcctttgttaatggaccacggtaaccgcgagcacatcgttgacattacaagcaatgacgaggaggactcttcatcaagatcttctctcgatgagcttactcctcaaggtaactcacatcaaggtgaagagacagtattatcatcatcaaatgctacacaacaacacccaactcatccatctcctcctcagcaaagaccaacttcttctaggagaggagataacgggaatggtcgccgtactaggagtccattgaattctggcctctggatctcagttgagttagttgtcactgtcgctcagattgttgcagccattgtagttatggttctggctaaagatgaacatcctgaagcgccattatttacttgggttattggatatacttgtggctgtctagccactctccctattctctattggcgttttcgcacttataatcgagctacagggcaagactcttcacaacgtgctacctcttctcaaggcaatagtgagtccacaccatatacagcagtctcagttgctcaagcagcagatgaagaaaatagcactggcgtgagtgcagcacctagaaacaatcaagttggggaaagcttaagaacaaggctcaacgggctagtggaccacttcaagatggcgattgattgtttctttgcggtgtggtttgttgtggggaatgtatggatatttggaggtcactcatctccttctgattctcctaaactgtacaggttatgcatagcgttccttactttcagttgcattggatatgcaatgccattcatactatgtgcaaccatatgttgttgtttgccttgcttaatctcggttctcggatttcgagagaacttctcacaaactagaggagccactgccgaggccatcaacgcattgcctgtctacaggttcaaatcaaaaagtagaaatgatttggagttttcagaagaaggtgaaggtggatttcttctcttggggtcccagaagaaacgtcttatatcaggcgaggatgccagctgttgcatctgcttgactagatatggagacgacgaacaagttagagagctgccatgctcacatgtcttccatgtagactgtgtagacaaatggcttaaaatcaatgcgacttgccctctctgcaaaaatgaggttggagaaagcagcagtgcttcctcatagacaaaagctgagttgatcgcaactgtttggaatttgggatccatagtctgtgacgtgtatagacttaagacttgtatagttgagatgttgtttattcattttgtctttccaaatcaataaatttcgaaataaagttgttatgtatatgagagaactatataag

SEQ ID NO: 10717 - protein, 407 aa, Arabidopsis thaliana
MDVSSIVRNTTLTDQDPLLMDHGNREHIVDITSNDEEDSSSRSSLDELTPQGNSHQGEETVLSSSNATQQHPTHPSPPQQRPTSSRRGDNGNGRRTRSPLNSGLWISVELVVTVAQIVAAIVVMVLAKDEHPEAPLFTWVIGYTCGCLATLPILYWRFRTYNRATGQDSSQRATSSQGNSESTPYTAVSVAQAADEENSTGVSAAPRNNQVGESLRTRLNGLVDHFKMAIDCFFAVWFVVGNVWIFGGHSSPSDSPKLYRLCIAFLTFSCIGYAMPFILCATICCCLPCLISVLGFRENFSQTRGATAEAINALPVYRFKSKSRNDLEFSEEGEGGFLLLGSQKKRLISGEDASCCICLTRYGDDEQVRELPCSHVFHVDCVDKWLKINATCPLCKNEVGESSSASS

SEQ ID NO: 10718 - protein, 388 aa, Arabidopsis thaliana
MDHGNREHIVDITSNDEEDSSSRSSLDELTPQGNSHQGEETVLSSSNATQQHPTHPSPPQQRPTSSRRGDNGNGRRTRSPLNSGLWISVELVVTVAQIVAAIVVMVLAKDEHPEAPLFTWVIGYTCGCLATLPILYWRFRTYNRATGQDSSQRATSSQGNSESTPYTAVSVAQAADEENSTGVSAAPRNNQVGESLRTRLNGLVDHFKMAIDCFFAVWFVVGNVWIFGGHSSPSDSPKLYRLCIAFLTFSCIGYAMPFILCATICCCLPCLISVLGFRENFSQTRGATAEAINALPVYRFKSKSRNDLEFSEEGEGGFLLLGSQKKRLISGEDASCCICLTRYGDDEQVRELPCSHVFHVDCVDKWLKINATCPLCKNEVGESSSASS

SEQ ID NO: 10719 - protein, 284 aa, Arabidopsis thaliana
MVLAKDEHPEAPLFTWVIGYTCGCLATLPILYWRFRTYNRATGQDSSQRATSSQGNSESTPYTAVSVAQAADEENSTGVSAAPRNNQVGESLRTRLNGLVDHFKMAIDCFFAVWFVVGNVWIFGGHSSPSDSPKLYRLCIAFLTFSCIGYAMPFILCATICCCLPCLISVLGFRENFSQTRGATAEAINALPVYRFKSKSRNDLEFSEEGEGGFLLLGSQKKRLISGEDASCCICLTRYGDDEQVRELPCSHVFHVDCVDKWLKINATCPLCKNEVGESSSASS

SEQ ID NO: 10720 - DNA, 1357 bp, Arabidopsis thaliana
gacccttctgttaccgcttttacgttcgactccagattcctcctttgccggaatattccatacgtaagagatattgaaatcgccgatgatggaaagttcgattccgtctgagaacggctccgttacctctgatcgtgatagatcggctctaatattcctaggaactggatgttcaagcgcggtacctaacgcaatgtgcttgatccagcgatctgataatccctgctatgtttgttcccagtctctttcaatcccgcctgagaaaaatcctaattacagggggaatacttcactgctcattgattattgccaaagtgatggcaaacataaatacattcaaatcgatgttggcaagactttcagagaacaagtccttcgttggtttactcttcacaagattcctcaagttgattctataattttgactcatgaacatgctgatgcagtacttggcctggatgatatacgttcagtgcaaccatttagtcctactaatgatattgatcctactccaatttttgtaagccaatatgctatggaaagccttgctgtgaagttcccgtatttggttcagaagaaacttaaagaaggccaagaagttaggcgagtagcacagctagattggagagtaattgaagaagattgtgagaagccatttgtagcttcaggtttatcattcacgccacttccagtgatgcatggagaagactatgtatgtcttggcttcctttttggtgaaaaatcaagagtggcttatatatccgatgtttcacggtttcctccaaacaccgagtatgctatatcaaaatctggtggtggacaattggatctccttattttggatacattatataagacaggatcccacaacactcacttatgtttcccgcagacactagacacaatcaaaagactgagtccaaaaagggctcttctgattggaatgactcacgagtttgatcatcacaaggacaacgagtttcttgaagaatggtctaaaagggaagggatttcagtaaaactcgctcatgatggcttgagagtcccaatagacctatgaagaggtgaaaatgattacttggctttctcattaacgaaactaagatcattgccttattttttatctgacttctgattcactcaatgaggaagcttgtaggtctccttgtgttatagagagatagagagcggagtgaaacggttttgttcaagatgcataatgctcgcatggcttcatatcaacattatcactaatgtttttgtttcttcttcaagttttagctaggatttctgactaaacgacgattttttaatattatcagatatacatgttaaaataaaaacaaagaaacaagac

SEQ ID NO: 10721 - protein, 324 aa, Arabidopsis thaliana
MMESSIPSENGSVTSDRDRSALIFLGTGCSSAVPNAMCLIQRSDNPCYVCSQSLSIPPEKNPNYRGNTSLLIDYCQSDGKHKYIQIDVGKTFREQVLRWFTLHKIPQVDSIILTHEHADAVLGLDDIRSVQPFSPTNDIDPTPIFVSQYAMESLAVKFPYLVQKKLKEGQEVRRVAQLDWRVIEEDCEKPFVASGLSFTPLPVMHGEDYVCLGFLFGEKSRVAYISDVSRFPPNTEYAISKSGGGQLDLLILDTLYKTGSHNTHLCFPQTLDTIKRLSPKRALLIGMTHEFDHHKDNEFLEEWSKREGISVKLAHDGLRVPIDL

SEQ ID NO: 10722 - protein, 323 aa, Arabidopsis thaliana
MESSIPSENGSVTSDRDRSALIFLGTGCSSAVPNAMCLIQRSDNPCYVCSQSLSIPPEKNPNYRGNTSLLIDYCQSDGKHKYIQIDVGKTFREQVLRWFTLHKIPQVDSIILTHEHADAVLGLDDIRSVQPFSPTNDIDPTPIFVSQYAMESLAVKFPYLVQKKLKEGQEVRRVAQLDWRVIEEDCEKPFVASGLSFTPLPVMHGEDYVCLGFLFGEKSRVAYISDVSRFPPNTEYAISKSGGGQLDLLILDTLYKTGSHNTHLCFPQTLDTIKRLSPKRALLIGMTHEFDHHKDNEFLEEWSKREGISVKLAHDGLRVPIDL

SEQ ID NO: 10723 - protein, 288 aa, Arabidopsis thaliana
MCLIQRSDNPCYVCSQSLSIPPEKNPNYRGNTSLLIDYCQSDGKHKYIQIDVGKTFREQVLRWFTLHKIPQVDSIILTHEHADAVLGLDDIRSVQPFSPTNDIDPTPIFVSQYAMESLAVKFPYLVQKKLKEGQEVRRVAQLDWRVIEEDCEKPFVASGLSFTPLPVMHGEDYVCLGFLFGEKSRVAYISDVSRFPPNTEYAISKSGGGQLDLLILDTLYKTGSHNTHLCFPQTLDTIKRLSPKRALLIGMTHEFDHHKDNEFLEEWSKREGISVKLAHDGLRVPIDL

SEQ ID NO: 10724 - DNA, 1452 bp, Arabidopsis thaliana
gaacaatcttctgtttctttggaagcaactaactacaaaggacatcttcacgactacaaagacacatacccttctgtcttaaggacgagaccagaagcttcttctatcggctttgtaatggtctacaaaggataagaaaaaaccaaatccaaactaaagctatgcattttccacttgtttcggcttggaacaagagaaggagaagcaaatcatatgatacggatccatgtacgttccttttctccatcatcttcgccagatggcataaaagggtctacagaacagcagaatgctggcaaatcgaagatcaggcttctcagccaaggaagcgaagattcgggtcatcagtttataccctcaaggagatggaggaggccacaagttctttcagtgatgagaatctcctcggtaaaggaggctttggccgagtttaccaaggcactttaaaaacaggagaggttgttgcaatcaagaagatggatttacctacgtttaaaaaggctgacggagaaagagaatttcgtgtggaggtggatatcttgagcagactcgaccacccaaatctggtctctttgatcggctattgtgcagatgggaaacaccggttcctagtatatgaatatatgcaaaatggaaacctgcaagatcatttgaatggaatcaaagaagcaaaaataagctggccaataaggctcagaattgcactaggagcagcaaaaggactcgcgtatctccattcaagttcttctgttgggattccaattgttcacagagacttcaaatccaccaacgttctactagactccaattataatgcaaagatatccgactttggactagcaaagttgatgccagaaggaaaggatacttgtgtcacagcaagagttctaggaacatttggctatttcgacccagaatatacatcgacaggtaaacttactctacaaagcgacatttatgcatttggggttgtgctgctagaactacttactggacgcagagcagttgacttaactcagggcccaaatgaacagaacctggtgctacaggttaggaatatactgaatgatagaaagaaattgcgtaaggttatagatgtcgagctgcctcggaattcatacagcatggaagctataaccatgtttgctgatctagcatcacgatgcatccgtatagagagtaaagagcgaccttcagtgatggattgtgttaaggaactgcaactaattatctacacaaactcgaagggtggtttgggtgggacgattcctacattcagaaggctctagacactgaattcttcgaaacaagtaaaatggattactgtcatttttcctaaaatgagaggtcactgataaaaaaacacttgataaatataaacaaacaatactaattatgaattaccggataatttcaattcaacttccagctaggaaactttgatcaagcgat

SEQ ID NO: 10725 - protein, 375 aa, Arabidopsis thaliana
MHFPLVSAWNKRRRSKSYDTDPCTFLFSIIFARWHKRVYRTAECWQIEDQASQPRKRRFGSSVYTLKEMEEATSSFSDENLLGKGGFGRVYQGTLKTGEVVAIKKMDLPTFKKADGEREFRVEVDILSRLDHPNLVSLIGYCADGKHRFLVYEYMQNGNLQDHLNGIKEAKISWPIRLRIALGAAKGLAYLHSSSSVGIPIVHRDFKSTNVLLDSNYNAKISDFGLAKLMPEGKDTCVTARVLGTFGYFDPEYTSTGKLTLQSDIYAFGVVLLELLTGRRAVDLTQGPNEQNLVLQVRNILNDRKKLRKVIDVELPRNSYSMEAITMFADLASRCIRIESKERPSVMDCVKELQLIIYTNSKGGLGGTIPTFRRL

SEQ ID NO: 10726 - protein, 307 aa, Arabidopsis thaliana
MEEATSSFSDENLLGKGGFGRVYQGTLKTGEVVAIKKMDLPTFKKADGEREFRVEVDILSRLDHPNLVSLIGYCADGKHRFLVYEYMQNGNLQDHLNGIKEAKISWPIRLRIALGAAKGLAYLHSSSSVGIPIVHRDFKSTNVLLDSNYNAKISDFGLAKLMPEGKDTCVTARVLGTFGYFDPEYTSTGKLTLQSDIYAFGVVLLELLTGRRAVDLTQGPNEQNLVLQVRNILNDRKKLRKVIDVELPRNSYSMEAITMFADLASRCIRIESKERPSVMDCVKELQLIIYTNSKGGLGGTIPTFRRL

SEQ ID NO: 10727 - protein, 270 aa, Arabidopsis thaliana
MDLPTFKKADGEREFRVEVDILSRLDHPNLVSLIGYCADGKHRFLVYEYMQNGNLQDHLNGIKEAKISWPIRLRIALGAAKGLAYLHSSSSVGIPIVHRDFKSTNVLLDSNYNAKISDFGLAKLMPEGKDTCVTARVLGTFGYFDPEYTSTGKLTLQSDIYAFGVVLLELLTGRRAVDLTQGPNEQNLVLQVRNILNDRKKLRKVIDVELPRNSYSMEAITMFADLASRCIRIESKERPSVMDCVKELQLIIYTNSKGGLGGTIPTFRRL

SEQ ID NO: 10728 - DNA, 1656 bp, Arabidopsis thaliana
ggtttttgtcgaaaccttctctttctttcttgccctctacttgttttcttttcgatcagttttcgtcactgagggcataatcagatgatttagattgagtcctcagttacattttgtttttttgtttcgatattggtacagaaaaatatagtattaattaatagaattgagtttgcttggagaaattctctcctacccacctccaccattattttcttgttactgtgtaggccacaatcatagtatttcttaattattagctttgaccattgttgtcgctatttcttcgtccctgctttttttctttatttctacgagtttttttttattgattattactatcagcctaccatcaatttagaccctaacaaacaaaaaaattatatccaaattccaattttcaaaaggttgtatttgtgtctcctgttttcaactctctttcttagtcccctagcctctgtgttcaatttgtcaaaaggtttattgaattagcttttgttattttgtctagtctccctttaatccgccttcgttaatgtccaatttggtccattggatctggttaaagtcgcttcttttactaattttttaatttaaccattacaattaactttgaatctcatgtgttgtgagaaaatttatgtgtgtcattgccaagttgtgttagtccagaaatgggatgcagttacaatttaacgtacattatacttttggtcattgccaagttttcatcttttgctctttgactgctgtaacttaatcatgaccttttcctagtagcagcttgaagaaaattaacatgtttccaaaatgtatttgtgtctcactttttgttttgggtttttgattagccgagacatgttcaacaagttacaagctcaacgatggtgggcagataactatgacaaagtaatggaactttacaatgttcaaaaactaagccgccaagctttcccgcttcccaccccgcctagatccgaagacgagaatgcaaaagtggagtaccatccagaagacactcctgcaacaccgcctctaaacaaagaacggttgcctcgtactatccatcgtccacctggattggctgcttactcatcctcagattcactcgaccataattcaatgcagagccagcagttctatgactctggtctactcaactcaactcctaaagtttcaagcatcagtgtagccaagacagaaacttcttccatagatgcttccataagaagcagctcgtcgagagatgcagaccggtcagaggaaatgtcggtaagcaatgcgagtgatgttgacaacgaatgggtggagcaagatgagcctggcgtttatatcaccattaaagttttaccaggtgggaaaagagagcttcgaagagtcagattcagccgagagagattcggggagatgcacgcgagattatggtgggaagagaacagggcaaggatacatgaacaatacttgtgatcataaatctaagagttttgttttttcctcattctctcggtatacagtctttttttccagctcaagtaaattcttccacaggtactcattgtgcctcccagaaatctcaaaatatcaattgtgggatatgttttaaggaggtttcttattttcttccttcaaaaaaaattgagaaagcttggaaaagac

SEQ ID NO: 10729 - protein, 218 aa, Arabidopsis thaliana
MYLCLTFCFGFLISRDMFNKLQAQRWWADNYDKVMELYNVQKLSRQAFPLPTPPRSEDENAKVEYHPEDTPATPPLNKERLPRTIHRPPGLAAYSSSDSLDHNSMQSQQFYDSGLLNSTPKVSSISVAKTETSSIDASIRSSSSRDADRSEEMSVSNASDVDNEWVEQDEPGVYITIKVLPGGKRELRRVRFSRERFGEMHARLWWEENRARIHEQYL

SEQ ID NO: 10730 - protein, 202 aa, Arabidopsis thaliana
MFNKLQAQRWWADNYDKVMELYNVQKLSRQAFPLPTPPRSEDENAKVEYHPEDTPATPPLNKERLPRTIHRPPGLAAYSSSDSLDHNSMQSQQFYDSGLLNSTPKVSSISVAKTETSSIDASIRSSSSRDADRSEEMSVSNASDVDNEWVEQDEPGVYITIKVLPGGKRELRRVRFSRERFGEMHARLWWEENRARIHEQYL

SEQ ID NO: 10731 - protein, 184 aa, Arabidopsis thaliana
MELYNVQKLSRQAFPLPTPPRSEDENAKVEYHPEDTPATPPLNKERLPRTIHRPPGLAAYSSSDSLDHNSMQSQQFYDSGLLNSTPKVSSISVAKTETSSIDASIRSSSSRDADRSEEMSVSNASDVDNEWVEQDEPGVYITIKVLPGGKRELRRVRFSRERFGEMHARLWWEENRARIHEQYL

SEQ ID NO: 10732 - DNA, 2282 bp, Arabidopsis thaliana
gaatcatcatcttctacctctgctccaatttctctgaaaacaagaaaaccttaatcaatcgaaatctcagtgtaactaatcaatggagatcaagcctggtttatccgctctcgtcactggcggcgcctctgggatcggtcgagctctctgcttagctcttgcagagaaaggagtttttgtaacagtcgctgatttttcggaggagaaaggacaagagactacttcgcttgttcgagaagcgaatgccaagtttcatcagggcttaagctttccttctgctatctttgtgaaatgtgatgtgactaatagaggagatctcctcgctgctttcgataagcatttagccacatttggaacacttgacatctgtatcaacaatgctgggattagcactcctttaagatttgataaagatgacactgatggatctaaatcatggaaacacaccattaatgtcgatctgattgcagtagttgaaggcacacaacttgcgatcaaagctatgaaagcaaaacaaaagcctggagttatcattaacatgggatcagctgcgggtctttatccaatgcccattgatcctatctatgctgcctctaaagccggtgtcgtattattcactagatcattagcatattacaggcgccaggggattcgcatcaatgtgctttgccctgaatttatcaagacagacttagctgaagctattgatgcttcaatactagagtcaataggcggttacatgtctatggacatgttgattaaaggtgcttttgagcttataaccgatgagaaaaaggcgggggcatgtctatggattaccaaacgcaggggtttggagtattggccaactccaatggaagagacaaagtacttggtgggttcaagttccaggaaaagaccttcttttaaagtttctacaaaaatagaatttcctcaaagcttcgagaaaatgattgtacacaccttgtctcacaaattccgcagtgctacccgcatagtccgtgcaccactacaattacccattggaccacaccaagttctcctgaaaatcatctatgctggtgttaacgcaagtgatgtaaacttcagctcaggtcgttactttactggtggctccccgaagcttccctttgatgctggatttgagggagttggactaattgcagcagtgggagaatctgttaagaatttggaagttgggactccagctgctgttatgacgtttggagcatattctgaatacatgatagtatcttctaagcatgttcttcctgttccaagaccagatccagaagttgttgccatgcttacctcgggattaactgcattaatcgcccttgaaaaggcaggacaaatgaaatcaggtgaaactgtacttgtgactgctgctgcaggagggactggacaatttgcagtccagcttgcaaagttatcaggaaataaagtgattgctacttgcgggggatcagagaaggccaagctattgaaagagcttggggtcgatcgagtcatagactacaaatccgagaatataaagacggtcttgaaaaaggagtttccgaagggtgtaaatatcatctatgaatctgtaggtggtcaaatgtttgacatgtgcttgaatgctcttgctgtttacggacgactcatcgtgattggaatgatctctcagtatcaaggagagaagggatgggaacctgcaaaatatccagggctctgcgagaaaattttagcaaaaagccaaaccgtggctggtttctttctggtgcaatatagtcaactgtggaaacaaaatcttgacaagttgttcaatctttacgctctcggaaagctcaaggttgggattgatcagaaaaagtttataggtctaaatgctgtagcagatgctgttgaatatctgcattcgggtaaaagcaccggaaaggttgtcgtttgcattgatcccgcatttgagcagaaaacgtcgagactgtaaaaaaaacatccacaaagcaaaatccagtttgggagtctatacatgagtggagcttttcctttcttcttcttcttcttctttggaggcaaaaaagggcttagtaagtagagagttctttaagcttatgtttacaataaacagaggagaaagttttctaaaatctaaagttaaacgtcaaagtaacatttacaccatcacaaaaataaaagaaacaactgaataataggttgcatcgtttaagcatcaaatattattgtgtatttctttgacaattaactaactaataacgcattatatgattttaatgtgg

SEQ ID NO: 10733 - protein, 629 aa, Arabidopsis thaliana
MEIKPGLSALVTGGASGIGRALCLALAEKGVFVTVADFSEEKGQETTSLVREANAKFHQGLSFPSAIFVKCDVTNRGDLLAAFDKHLATFGTLDICINNAGISTPLRFDKDDTDGSKSWKHTINVDLIAVVEGTQLAIKAMKAKQKPGVIINMGSAAGLYPMPIDPIYAASKAGVVLFTRSLAYYRRQGIRINVLCPEFIKTDLAEAIDASILESIGGYMSMDMLIKGAFELITDEKKAGACLWITKRRGLEYWPTPMEETKYLVGSSSRKRPSFKVSTKIEFPQSFEKMIVHTLSHKFRSATRIVRAPLQLPIGPHQVLLKIIYAGVNASDVNFSSGRYFTGGSPKLPFDAGFEGVGLIAAVGESVKNLEVGTPAAVMTFGAYSEYMIVSSKHVLPVPRPDPEVVAMLTSGLTALIALEKAGQMKSGETVLVTAAAGGTGQFAVQLAKLSGNKVIATCGGSEKAKLLKELGVDRVIDYKSENIKTVLKKEFPKGVNIIYESVGGQMFDMCLNALAVYGRLIVIGMISQYQGEKGWEPAKYPGLCEKILAKSQTVAGFFLVQYSQLWKQNLDKLFNLYALGKLKVGIDQKKFIGLNAVADAVEYLHSGKSTGKVVVCIDPAFEQKTSRL

SEQ ID NO: 10734 - protein, 489 aa, Arabidopsis thaliana
MKAKQKPGVIINMGSAAGLYPMPIDPIYAASKAGVVLFTRSLAYYRRQGIRINVLCPEFIKTDLAEAIDASILESIGGYMSMDMLIKGAFELITDEKKAGACLWITKRRGLEYWPTPMEETKYLVGSSSRKRPSFKVSTKIEFPQSFEKMIVHTLSHKFRSATRIVRAPLQLPIGPHQVLLKIIYAGVNASDVNFSSGRYFTGGSPKLPFDAGFEGVGLIAAVGESVKNLEVGTPAAVMTFGAYSEYMIVSSKHVLPVPRPDPEVVAMLTSGLTALIALEKAGQMKSGETVLVTAAAGGTGQFAVQLAKLSGNKVIATCGGSEKAKLLKELGVDRVIDYKSENIKTVLKKEFPKGVNIIYESVGGQMFDMCLNALAVYGRLIVIGMISQYQGEKGWEPAKYPGLCEKILAKSQTVAGFFLVQYSQLWKQNLDKLFNLYALGKLKVGIDQKKFIGLNAVADAVEYLHSGKSTGKVVVCIDPAFEQKTSRL

SEQ ID NO: 10735 - protein, 477 aa, Arabidopsis thaliana
MGSAAGLYPMPIDPIYAASKAGVVLFTRSLAYYRRQGIRINVLCPEFIKTDLAEAIDASILESIGGYMSMDMLIKGAFELITDEKKAGACLWITKRRGLEYWPTPMEETKYLVGSSSRKRPSFKVSTKIEFPQSFEKMIVHTLSHKFRSATRIVRAPLQLPIGPHQVLLKIIYAGVNASDVNFSSGRYFTGGSPKLPFDAGFEGVGLIAAVGESVKNLEVGTPAAVMTFGAYSEYMIVSSKHVLPVPRPDPEVVAMLTSGLTALIALEKAGQMKSGETVLVTAAAGGTGQFAVQLAKLSGNKVIATCGGSEKAKLLKELGVDRVIDYKSENIKTVLKKEFPKGVNIIYESVGGQMFDMCLNALAVYGRLIVIGMISQYQGEKGWEPAKYPGLCEKILAKSQTVAGFFLVQYSQLWKQNLDKLFNLYALGKLKVGIDQKKFIGLNAVADAVEYLHSGKSTGKVVVCIDPAFEQKTSRL

SEQ ID NO: 10736 - DNA, 1342 bp, Arabidopsis thaliana
atttagcttggagggataacgcattctttatgcactttttgcagaaaatatgaccacatttcgttgaaacctcctgagtaaatggacacagacagattggacagctaaattttggttcctctacaggaggagccacagccttggactttctcggcttgttaagctcaactgagtcaacactagtttgatcagagcgacgccttgtggatctattagcaccagctgactccacatcaactacttgtgatcctctgcgtgcacttctcgatttgtttttagcctgagcaaaagcagaagcagttgattcaacaacatcatcatcatcttcaatagcaaccacattgatcctaggaggagtagccacaatctgaggcaccgttggagctcgccccccacttgatagtggactcaaccactcaaaaagtgtaacggagtcaaaaaatctctcatatccaaagtagtgtaatccattgtaaccaggtttcatcagaaagcctttggattgtaataatcctttcgtgtcctttcgtttctctcactccactctgcaatctacttcatcgtcgacatcttcttgcgcatttcaaaggttagcttaactctgttgaaagatggcttctcgggtggtgaggactagtatgagacttcgaaggagggatggtgtgactcaaaacgaacaccagggagatcaacaagtggctgaccaagctccaacggtgcctcagattgtggctactcctcctaggatcaatgtggttgctattgaagatgatgatgatgttgttgaatcaactgcttctgcttttgctcaggctaaaaacaaatcgagaagtgcacgcagaggatcacaagtagttgatgtggagtcagctggtgctaatagatccacaaggcgtcgctctgatcaaactagtgttgactcagttgagcttaacaagccgagaaagtccaaggctgtggctcctcctgtagaggaaccaaaatttagctgtccaatctgtctgtgtccatttactcaggaggtttcaacgaaatgtggtcatattttctgcaaaaagtgcataaagaatgcgttatccctccaagctaaatgcccgacatgtaggaaaaaaatcactgttaaggaccttatccgggtcttccttccaaccaccagatgaatgatacagaaacatcactagtagccatggatagtggtctagcgattctacctccaacgatgaagaaatgttgttcattagttgtagtttgttatgtcaatattgttctgttttgtaagagaaatatctaggaattatggaagacctgattttctaatggatatcgttcattggtgatcttc

SEQ ID NO: 10737 - protein, 182 aa, Arabidopsis thaliana
MASRVVRTSMRLRRRDGVTQNEHQGDQQVADQAPTVPQIVATPPRINVVAIEDDDDVVESTASAFAQAKNKSRSARRGSQVVDVESAGANRSTRRRSDQTSVDSVELNKPRKSKAVAPPVEEPKFSCPICLCPFTQEVSTKCGHIFCKKCIKNALSLQAKCPTCRKKITVKDLIRVFLPTTR

SEQ ID NO: 10738 - protein, 173 aa, Arabidopsis thaliana
MRLRRRDGVTQNEHQGDQQVADQAPTVPQIVATPPRINVVAIEDDDDVVESTASAFAQAKNKSRSARRGSQVVDVESAGANRSTRRRSDQTSVDSVELNKPRKSKAVAPPVEEPKFSCPICLCPFTQEVSTKCGHIFCKKCIKNALSLQAKCPTCRKKITVKDLIRVFLPTTR

SEQ ID NO: 10739 - DNA, 1308 bp, Arabidopsis thaliana
aatgaagcattagaagaatcatttccacacgattttccctgtgatttcttcatttccggcgacttaaaacggtgtctagcaaaatgagccgaccacaagatccaccccgaggtttcttcccatttggaaatccctttcggatgttatcatcaaagggatcagatttatcgccatggctactttctctattgaacggctttgagctacgtttggaagagagactgaagaaacttatgcctaagaacaaagatgacatcctcactttatcctggatgaagctagctatggagtcactctgcgagactcataagaacattaacactctcattactgatctccagcttcctgtctctgattgggaagagaaatgggttgatgtttacctcaacataagcgttaggttactagatctctgtaatgcctttagctctgagctcacacgtctcaaccagggagatctcttcctcaagtgtgttctgcacaatttacaatcggattctggggagaagtatctccaggctcgatcttcgcttgatagctggaggcaacatgttaatacaaacaaccctagaattgaaaactgccgtgcggttctagacagtcttgttaaatctctgagtctgcctaaagtcaagaactcgcctaaaggaaaggttctgatgcgagctttttatggtgtgaaggttcaaacagtttatatctgcagtgtatttaccgcagcctggtctgattccaccaaggatcttttcgatttacctgtctctgaaaaaccattatgggcaaaggtctttactgatatgcagagtgttgtaaatgctgagatcagagacatgttgtcttccggtagaaccacgattctcaaagagctggagagcgttgatgctagtgtcgagaagctatacccgatgatccaagatggcgttgatcctgtcgaagttgaattcttcaaagataatgttatggaattggggacacaagctgagaaattgtctcaagggttggatcagttactggaggaagttgatagtttctttaaactgactttgagagggcgcgatgtgttgctctgtaatcttaggtcaagtgactcaatctctggcaatgcagttggagaagatgtagactaaaatagtgaggtaaacaaacaagtttaacccttacaaaaggcagctttaggttctataaatagtgttttctctattttctttgttttgagtccatctgtcgagcttgtctcttccgtttaggtgtgttggtcttgtatgtgtgactgtatgaaatcaattctgcaataaaatataaatatag

SEQ ID NO: 10740 - protein, 347 aa, Arabidopsis thaliana
MSRPQDPPRGFFPFGNPFRMLSSKGSDLSPWLLSLLNGFELRLEERLKKLMPKNKDDILTLSWMKLAMESLCETHKNINTLITDLQLPVSDWEEKWVDVYLNISVRLLDLCNAFSSELTRLNQGDLFLKCVLHNLQSDSGEKYLQARSSLDSWRQHVNTNNPRIENCRAVLDSLVKSLSLPKVKNSPKGKVLMRAFYGVKVQTVYICSVFTAAWSDSTKDLFDLPVSEKPLWAKVFTDMQSVVNAEIRDMLSSGRTTILKELESVDASVEKLYPMIQDGVDPVEVEFFKDNVMELGTQAEKLSQGLDQLLEEVDSFFKLTLRGRDVLLCNLRSSDSISGNAVGEDVD

SEQ ID NO: 10741 - protein, 328 aa, Arabidopsis thaliana
MLSSKGSDLSPWLLSLLNGFELRLEERLKKLMPKNKDDILTLSWMKLAMESLCETHKNINTLITDLQLPVSDWEEKWVDVYLNISVRLLDLCNAFSSELTRLNQGDLFLKCVLHNLQSDSGEKYLQARSSLDSWRQHVNTNNPRIENCRAVLDSLVKSLSLPKVKNSPKGKVLMRAFYGVKVQTVYICSVFTAAWSDSTKDLFDLPVSEKPLWAKVFTDMQSVVNAEIRDMLSSGRTTILKELESVDASVEKLYPMIQDGVDPVEVEFFKDNVMELGTQAEKLSQGLDQLLEEVDSFFKLTLRGRDVLLCNLRSSDSISGNAVGEDVD

SEQ ID NO: 10742 - protein, 297 aa, Arabidopsis thaliana
MPKNKDDILTLSWMKLAMESLCETHKNINTLITDLQLPVSDWEEKWVDVYLNISVRLLDLCNAFSSELTRLNQGDLFLKCVLHNLQSDSGEKYLQARSSLDSWRQHVNTNNPRIENCRAVLDSLVKSLSLPKVKNSPKGKVLMRAFYGVKVQTVYICSVFTAAWSDSTKDLFDLPVSEKPLWAKVFTDMQSVVNAEIRDMLSSGRTTILKELESVDASVEKLYPMIQDGVDPVEVEFFKDNVMELGTQAEKLSQGLDQLLEEVDSFFKLTLRGRDVLLCNLRSSDSISGNAVGEDVD

SEQ ID NO: 10743 - DNA, 2056 bp, Arabidopsis thaliana
actttttcgtctagatacattcttcgtgaagaaatccaagtgcacacattcattagtgttggacggacccattttattttggatttttttgtataattctttggggtttttttgttaataattcacttctgtctataatatgattatgattgttcatcatattttagctgtaatttcctctcttgaacaaaattattattttcgtgatgtttttaagtacgtgacgaaagatcatttggtgatctcactgacatgatttgcccagcctgtcaggtttacctatggtcaaatatcattttctcgattttgccccaaacggtcaaggcatatatccccaatcttcaaagggtatttatgtacttttcgctattaaccgtgtggctatatgaagccgattcctcataacaactacaaaaaaggaaagcttcttccctccggcaaattcttacgtttctccggcggttagaaaaatgacaccacagatcaaaactcatctcttgccgaagcaagaaccttcttcgtctgagaaccatggatcatcaacctccggcatcgttttcaacgtgtcaacgagtataatcggagccggaataatgtcgatgccggcggcgtttaaagttcttggaatagttccagcgtttttgattatcacgatcatagcttggctttccacaatttccgttggatttctgatgaaatcaactctcgccggagaatcaactacttacgccggagttatgaaagagtcgtttggtaaaacaggatccatcgctgtacagattgctacgatggttgctacttttggttgtatgattatattttcgattattataggagatgtgctttctggtaatgaaaatggtggtcctgaacatattggagttttgcaagaatggtttggttcttactggtggaacacgagaatcttcgctttgttatttgtctacggctttgtcttgcttccattggtcctgcgtagacgagtcgaaagactggcaattagttccgctgtatcgtttcttcttgcggttctatttgttgtcataagctcggtgctggcgatttccgcgctggtgaatggacaaacgaagaatccaagactgtttccggagttgagcaatggaggatcgttctggcaactcttcacagcttcccctgttatagttacagccttcacgtttcacttcaatgttcatccaattggattcgagctcaaagatccattacaagtgatcccagcaactaagatctctgtcatcttgtgtgctgctatctacttcgcaactggactctttggttaccttctctttggagatgcaactatgtcggatattctagtgaactttgaccagagctctggttcttccattggttctcttctcaacgacattgtcagactcagctacgtgcttcacctcatgctggtctttcctctcctgaacttctcattgagagcaaatctcgacgaactcttgtaccccaagaagccgtccttggaaaaagacacaaaaagattcatcggactcactctggctctactgatttgctgtttcttgtctgcaatcgctgtaccagacatttggtacttctttcagttcatgggatcaaccatcacagtctccatagcattcatatttccagccgccattgttctaaggaatatccatggtgtatcaacctcaagagagaagatcgtagctgcaataatgcttgttcttgctgttgccactagcattattgctatctcgacaaatttatacagcctcgcagcaaactagtcgttgaaaaaagttttgcaaacagtcccttccatgatcacttcaaagaaatctgtaaaattattagcttgccgtagcattcatatttatatctttgtgaaataggtttgtcagaaaatgcaatgtaatagctatacaaagtgcaatttttgttgctgcttgaaacagagaaagaggaaatgaacaactcttcaaaacttgtattctttaaattactttttgtagaccattatttgaatgaacaaagtacatctgtatcagactattcctttctttgg

SEQ ID NO: 10744 - protein, 435 aa, Arabidopsis thaliana
MTPQIKTHLLPKQEPSSSENHGSSTSGIVFNVSTSIIGAGIMSMPAAFKVLGIVPAFLIITIIAWLSTISVGFLMKSTLAGESTTYAGVMKESFGKTGSIAVQIATMVATFGCMIIFSIIIGDVLSGNENGGPEHIGVLQEWFGSYWWNTRIFALLFVYGFVLLPLVLRRRVERLAISSAVSFLLAVLFVVISSVLAISALVNGQTKNPRLFPELSNGGSFWQLFTASPVIVTAFTFHFNVHPIGFELKDPLQVIPATKISVILCAAIYFATGLFGYLLFGDATMSDILVNFDQSSGSSIGSLLNDIVRLSYVLHLMLVFPLLNFSLRANLDELLYPKKPSLEKDTKRFIGLTLALLICCFLSAIAVPDIWYFFQFMGSTITVSIAFIFPAAIVLRNIHGVSTSREKIVAAIMLVLAVATSIIAISTNLYSLAAN

SEQ ID NO: 10745 - protein, 394 aa, Arabidopsis thaliana
MSMPAAFKVLGIVPAFLIITIIAWLSTISVGFLMKSTLAGESTTYAGVMKESFGKTGSIAVQIATMVATFGCMIIFSIIIGDVLSGNENGGPEHIGVLQEWFGSYWWNTRIFALLFVYGFVLLPLVLRRRVERLAISSAVSFLLAVLFVVISSVLAISALVNGQTKNPRLFPELSNGGSFWQLFTASPVIVTAFTFHFNVHPIGFELKDPLQVIPATKISVILCAAIYFATGLFGYLLFGDATMSDILVNFDQSSGSSIGSLLNDIVRLSYVLHLMLVFPLLNFSLRANLDELLYPKKPSLEKDTKRFIGLTLALLICCFLSAIAVPDIWYFFQFMGSTITVSIAFIFPAAIVLRNIHGVSTSREKIVAAIMLVLAVATSIIAISTNLYSLAAN

SEQ ID NO: 10746 - protein, 392 aa, Arabidopsis thaliana
MPAAFKVLGIVPAFLIITIIAWLSTISVGFLMKSTLAGESTTYAGVMKESFGKTGSIAVQIATMVATFGCMIIFSIIIGDVLSGNENGGPEHIGVLQEWFGSYWWNTRIFALLFVYGFVLLPLVLRRRVERLAISSAVSFLLAVLFVVISSVLAISALVNGQTKNPRLFPELSNGGSFWQLFTASPVIVTAFTFHFNVHPIGFELKDPLQVIPATKISVILCAAIYFATGLFGYLLFGDATMSDILVNFDQSSGSSIGSLLNDIVRLSYVLHLMLVFPLLNFSLRANLDELLYPKKPSLEKDTKRFIGLTLALLICCFLSAIAVPDIWYFFQFMGSTITVSIAFIFPAAIVLRNIHGVSTSREKIVAAIMLVLAVATSIIAISTNLYSLAAN

SEQ ID NO: 10747 - DNA, 672 bp, Arabidopsis thaliana
gagagagagcactagtccccccccccccgatgcatcacttgtttctccataataagagagttttaagcatttgaaacaaaaaaaatggcttccaaggctttggttctgttgggtctctttgctgttcttctcgtcgtctcagaagtagccgcggcatcttctgccacagtgaattcagagagtaaggaaactgtgaaacctgatcaacgtggctacggtgacaatggaggaaattacaataacggaggaggttaccagggaggagggggtaattaccaaggaggaggaggtaattaccaaggaggaggaggtaattaccaaggaggaggaggaagataccaaggaggaggaggacggtaccaaggaggaggaggacgataccaaggaggcggtgggcgacaaggaggagggggaagtgggggaagttactgccgccacggctgctgctacagaggttacaacggctgctcaagatgctgctcgtatgccggagaagctgttcagactcagcccggtcactaaaacaatatattaaccaatcaccaccatgcatgtattgcattatgtatgtatgattttaagtaaaccatggtgcgtttgtaatgaactgcctcaagtttttgaggcactatagattaagaagagaactatgggaataaagtttgattatgc

SEQ ID NO: 10748 - protein, 145 aa, Arabidopsis thaliana
MASKALVLLGLFAVLLVVSEVAAASSATVNSESKETVKPDQRGYGDNGGNYNNGGGYQGGGGNYQGGGGNYQGGGGNYQGGGGRYQGGGGRYQGGGGRYQGGGGRQGGGGSGGSYCRHGCCYRGYNGCSRCCSYAGEAVQTQPGH

SEQ ID NO: 10749 - protein, 103 aa, Arabidopsis thaliana
MEEITITEEVTREEGVITKEEEVITKEEEVITKEEEEDTKEEEDGTKEEEDDTKEAVGDKEEGEVGEVTAATAAATEVTTAAQDAARMPEKLFRLSPVTKTIY

SEQ ID NO: 10750 - DNA, 1412 bp, Arabidopsis thaliana
gaaggaaagagcgagagagagagagagagagagagaaaaaagaagaagaagaatttgaggcgattgggtaagcgatgcacatcgtcttctctgtcgatgatttgaccgaatccttctggcctgttcccgctccggcgccgtcgccgggatcgtcatcgactccgtcaccgacgcagaacgtggcggatgggatgactcgaagtcaatcggagtgggcgttccacaggcttatcaatgagttgtctggttccgattcgagccctacgactaacacaatcgagagatcacctccaccggttcagtctctttcgagattagaagaaaccgttgacgaaaccgaagatgttgttgagattcagaaaccgcagaatcatcgacggctccctgttgatgatcaagggaagaatcggaatcgtgctccgtcgtctgatccggttgattcttcagctcctgttgttgttgatcctaatcagtatcatgcgattcttaagagcaagctcgagcttgcttgcgctgctgttgctcgtcgtgtgggaactgtgaaaccggaagattcgagtgcttcagctagcaatcaaaaacaagctcaaggctccattgtggcacaaacctcacctggtgcttcatctgttagattttctcccacaacaagcacgcaaaagaaacctgatgttccagccagacaaactactagtatttcatcacgagatgattctgatgacgatgatcttgatggagacgcagataatggagatcctactgatgtgaagcgtgctaggaggatgctctcaaaccgagaatccgctaggcgctctaggagaagaaagcaagaacaaatgaatgaatttgatacacaggtaggccaattaagagccgagcattcaactttaattaatcgtcttagtgacatgaatcataagtatgatgcagctgctgttgacaacagaattctaagagctgatatcgaaactttgagaacaaaggttaagatggcagaggaaactgtgaaaagagtgacaggagtgaaccctttgcattggtcaagaccaaacatgggcataccattcagcaacacaccgagtgcttcctctagtattccgccaaactctaaccacattttgaaaccagcaaattcaagtaccaacaccagtgctggtttagcacaaaatcagagagtggagacggcaaatttcttgccggaacaggtgaaccgtgaaggcatgcagaatccatttgctcctgattctaatctgtacgaaaccctaccccattggaatcacaagcattaaccagaaaaagagtcattggttttgtgattttgattgaggtaactattgtctgtatttttatttactgtatgactcagcgacggtaaactcttaatattatatatatgattggacatgaaaaag

SEQ ID NO: 10751 - protein, 404 aa, Arabidopsis thaliana
MHIVFSVDDLTESFWPVPAPAPSPGSSSTPSPTQNVADGMTRSQSEWAFHRLINELSGSDSSPTTNTIERSPPPVQSLSRLEETVDETEDVVEIQKPQNHRRLPVDDQGKNRNRAPSSDPVDSSAPVVVDPNQYHAILKSKLELACAAVARRVGTVKPEDSSASASNQKQAQGSIVAQTSPGASSVRFSPTTSTQKKPDVPARQTTSISSRDDSDDDDLDGDADNGDPTDVKRARRMLSNRESARRSRRRKQEQMNEFDTQVGQLRAEHSTLINRLSDMNHKYDAAAVDNRILRADIETLRTKVKMAEETVKRVTGVNPLHWSRPNMGIPFSNTPSASSSIPPNSNHILKPANSSTNTSAGLAQNQRVETANFLPEQVNREGMQNPFAPDSNLYETLPHWNHKH

SEQ ID NO: 10752 - protein, 365 aa, Arabidopsis thaliana
MTRSQSEWAFHRLINELSGSDSSPTTNTIERSPPPVQSLSRLEETVDETEDVVEIQKPQNHRRLPVDDQGKNRNRAPSSDPVDSSAPVVVDPNQYHAILKSKLELACAAVARRVGTVKPEDSSASASNQKQAQGSIVAQTSPGASSVRFSPTTSTQKKPDVPARQTTSISSRDDSDDDDLDGDADNGDPTDVKRARRMLSNRESARRSRRRKQEQMNEFDTQVGQLRAEHSTLINRLSDMNHKYDAAAVDNRILRADIETLRTKVKMAEETVKRVTGVNPLHWSRPNMGIPFSNTPSASSSIPPNSNHILKPANSSTNTSAGLAQNQRVETANFLPEQVNREGMQNPFAPDSNLYETLPHWNHKH

SEQ ID NO: 10753 - DNA, 1319 bp, Arabidopsis thaliana
acttaacgtctctctctattcctctccttctctctttctccctgtgaaaaaatggactcggtggctctctactgcaccgctggtctcattgccggcgccgtctactggttcatatgcgtcctaggtccagcagaacgaaaaggcaaacgagcctctgatctctccggcggctcaatctccgcagaaaaagtcaaagacaactataaccaatactggtctttcttccgcaaaccaaaagagatcgaatcagccgagaaagtacctgacttcgtcgacacgttctacaatcttgtcactgatatctacgagtggggatggggacaatctttccatttctctcctcatgtccctggaaaatccgacaaagacgccacaagaatccacgaagaaatggccgtcgatctcatcaaagtgaaaccgggacaaaagattcttgacgctggttgcggcgtgggtgggccgatgagagccatcgcggcccattccaaggcccaagtcactggaatcactatcaacgagtaccaagtgcaacgagccaagcttcacaacaagaaagctggacttgattctctctgcaacgtcgtttgtggtaactttttaaagatgccgttcgatgaaaacacgtttgacggagcttactcgatcgaagctacgtgtcacgctcctaagctcgaagaagtatactcggagatcttcagagtgatgaaaccaggatctttgttcgtgtcctacgaatgggtcaccactgaaaaatacagagacgatgacgaagaacacaaggacgtgattcaagggatcgagagaggagacgcacttcctggactaagaagctacgctgatatagccgtgacggcgaagaaagttgggtttgaggtagtgaaggagaaagatttggctaaaccaccgtctaaaccgtggtggaaccggttaaagatgggaaggattgcttattggagaaaccatgttgtggttgtgattctttctgctattggggttgctcctaaaggaactgttgatgttcataagatgttgtttaagactgctgattatttgaccagaggtggtgagactggaatcttctctccgatgcatatgattctctgtagaaaaccagagaaagcttctgaatgaatgattgagaatcttcttccttgttctcgtttttcttcttctttctttctaagttcatgttttgccccttaagaatctctttgtcgtcgtattaatgttatcactttgttgtttattgtatttttttttttttcaatttgatttgtttaaattgatgatggatcactggaaattagtttttcgctctt

SEQ ID NO: 10754 - protein, 359 aa, Arabidopsis thaliana
MDSVALYCTAGLIAGAVYWFICVLGPAERKGKRASDLSGGSISAEKVKDNYNQYWSFFRKPKEIESAEKVPDFVDTFYNLVTDIYEWGWGQSFHFSPHVPGKSDKDATRIHEEMAVDLIKVKPGQKILDAGCGVGGPMRAIAAHSKAQVTGITINEYQVQRAKLHNKKAGLDSLCNVVCGNFLKMPFDENTFDGAYSIEATCHAPKLEEVYSEIFRVMKPGSLFVSYEWVTTEKYRDDDEEHKDVIQGIERGDALPGLRSYADIAVTAKKVGFEVVKEKDLAKPPSKPWWNRLKMGRIAYWRNHVVVVILSAIGVAPKGTVDVHKMLFKTADYLTRGGETGIFSPMHMILCRKPEKASE

SEQ ID NO: 10755 - protein, 246 aa, Arabidopsis thaliana
MAVDLIKVKPGQKILDAGCGVGGPMRAIAAHSKAQVTGITINEYQVQRAKLHNKKAGLDSLCNVVCGNFLKMPFDENTFDGAYSIEATCHAPKLEEVYSEIFRVMKPGSLFVSYEWVTTEKYRDDDEEHKDVIQGIERGDALPGLRSYADIAVTAKKVGFEVVKEKDLAKPPSKPWWNRLKMGRIAYWRNHVVVVILSAIGVAPKGTVDVHKMLFKTADYLTRGGETGIFSPMHMILCRKPEKASE

SEQ ID NO: 10756 - protein, 222 aa, Arabidopsis thaliana
MRAIAAHSKAQVTGITINEYQVQRAKLHNKKAGLDSLCNVVCGNFLKMPFDENTFDGAYSIEATCHAPKLEEVYSEIFRVMKPGSLFVSYEWVTTEKYRDDDEEHKDVIQGIERGDALPGLRSYADIAVTAKKVGFEVVKEKDLAKPPSKPWWNRLKMGRIAYWRNHVVVVILSAIGVAPKGTVDVHKMLFKTADYLTRGGETGIFSPMHMILCRKPEKASE

SEQ ID NO: 10757 - DNA, 1331 bp, Arabidopsis thaliana
ggccaataatctttttgtcttctatcttcgacacctgtttctgaaatcttcttcttgtcttctccttggaattctatctgtgagcccgagtttcagatccaccaggtcatgtggacagttctcaacagtagcatacttcaacaaagatcattgcttttcagcggaacctgataatctccaacaaacattcttcggtttacagtattaacaccagcaggatagtgctgttttcccattcttgaagatggacagggcagatacgtcgggctttgtaagtggcggaagttgttcatctctcaacttgctccaatatatgcttatagctacaagtatgatgtgctaagtggtactatttcggagctctctttcatctatatccttttcatcttcatgtgaatttggacaaaggtgtagttccattctctagtgccattaatatgggtgacaccgctcttagcctgaagtgtcttgggggctctgaaaaccaattttgttccgatgtatctagtttcactgatgatggctgccggttagtcctcggattgggtccaacgtcgacttcatactgttttagtgtcggcgttaataacagcaacaaagattctgcttctggatttactcaagctgattcagttctgcaacttggtcgtcctgctgtaagcatagacactttcagtggacttgataatggtggtgtgatccctgttgttgatgaaggttcttcttcagctaagagatcaggtggatacatgccatcgcttttgttagatccaaatgttaaaaacccttcacagattcaacaacttaaagattttggaaccggtatccattcacaagtgagccaagaaccatcaccttacacagagttctatgtacagcagaggacaagcaatccgaggaagtgtaaatttatgggatgtgtgaagggagctcgaggagcgtcaggactctgcatcagccatggaggaggacagagatgccaaaaaccaggctgcaacaaaggtgcagagagtaaaaccactttttgtaaaacccatggtggagggaagaggtgtgaacacttgggatgcacgaagagcgccgaaggtaaaacagatttctgtatatctcatggtggtggaagacgttgcgagttccttgaaggatgtgacaaagcagcccgtggcaggtcgggcctctgcatcaaacacggtggtggcaaaagatgtaatatcgaagactgtacacgaagtgctgaaggacaagctggtctttgtatatcccatggtggtgggaaacgttgtcagtatttttcctggtgccgaattcggcaccaggggggggcccggtac

SEQ ID NO: 10758 - protein, 298 aa, Arabidopsis thaliana
MGDTALSLKCLGGSENQFCSDVSSFTDDGCRLVLGLGPTSTSYCFSVGVNNSNKDSASGFTQADSVLQLGRPAVSIDTFSGLDNGGVIPVVDEGSSSAKRSGGYMPSLLLDPNVKNPSQIQQLKDFGTGIHSQVSQEPSPYTEFYVQQRTSNPRKCKFMGCVKGARGASGLCISHGGGQRCQKPGCNKGAESKTTFCKTHGGGKRCEHLGCTKSAEGKTDFCISHGGGRRCEFLEGCDKAARGRSGLCIKHGGGKRCNIEDCTRSAEGQAGLCISHGGGKRCQYFSWCRIRHQGGARY

SEQ ID NO: 10759 - protein, 194 aa, Arabidopsis thaliana
MPSLLLDPNVKNPSQIQQLKDFGTGIHSQVSQEPSPYTEFYVQQRTSNPRKCKFMGCVKGARGASGLCISHGGGQRCQKPGCNKGAESKTTFCKTHGGGKRCEHLGCTKSAEGKTDFCISHGGGRRCEFLEGCDKAARGRSGLCIKHGGGKRCNIEDCTRSAEGQAGLCISHGGGKRCQYFSWCRIRHQGGARY

SEQ ID NO: 10760 - DNA, 1387 bp, Arabidopsis thaliana
atcttcattctcacactcaacccctctctctcctttcattctcattctctctcggctttgttttctctttaatctgattcatctattctatttctatcaccacacaaaaagaagaaaaaaaacaaactttactttaagaattttgaagaataaaatcaaaagagaataaccatggttttctcctccatccaagcctatcttgattcatccaactggcaacaggctcctccgagcaattataatcatgacggaacaggcgcctcagcaaatggaggtcatgttcttcgtcctcagctgcagccacagcagcagccacagcagcagccgcatcctaatgggagcgggggcggaggtggaggtggaggcggctcgatccgagcaggatcaatggtggacagagcaagacaagcaaacgtagccttgccagaagcagcactgaaatgtccgagatgcgaatccaccaacaccaagttctgctacttcaacaactacagcctcactcaaccacgccacttctgcaagacctgccggagatactggacacgtggcggagctctccgcaacgtcccagtcggcggtggctgccggagaaacaggcgtaccaaaagcaacagcaacaacaacaataacagcactgctactagcaataacaccagtttctcctccgggaatgcatccaccatcagcacgattctctcctcccactatggaggaaaccaagagagtatcttaagccagattttgtctccggcgaggctaatgaatcctacttacaatcatctcggagatctcacaagtaatacaaaaacagacaacaacatgagcttgttgaactatggaggattgagtcaagacttgaggtcaatccacatgggagcttctggtggctcgcttatgagctgtgttgatgaatggagatcggcgtcttatcatcagcagtcaagtatgggcggtgggaacttggaggattcttctaatcctaatccatccgcaaatgggttttactcttttgagtcgccgaggataacttcagcgtcaatctcttctgctttagcatcgcagttttcttcggttaaagttgaagataatccttacaaatgggttaatgtcaatggtaattgctcttcctggaatgatctttctgctttcggctcttctcgttgagttcaaccacacaacaaaaaggaaacttgagggtatactttggtggggaaaaaactagttaccaggttaattttgtcttatttttcgtttttgattagttaatgttgtttactactttcctcgttctcaatctactatgcttctagttctaggtagcctaagttattggatgtttttgagactatccctttgttatttttgtcgacaatgttctttcgttatc

SEQ ID NO: 10761 - protein, 330 aa, Arabidopsis thaliana
MVFSSIQAYLDSSNWQQAPPSNYNHDGTGASANGGHVLRPQLQPQQQPQQQPHPNGSGGGGGGGGGSIRAGSMVDRARQANVALPEAALKCPRCESTNTKFCYFNNYSLTQPRHFCKTCRRYWTRGGALRNVPVGGGCRRNRRTKSNSNNNNNSTATSNNTSFSSGNASTISTILSSHYGGNQESILSQILSPARLMNPTYNHLGDLTSNTKTDNNMSLLNYGGLSQDLRSIHMGASGGSLMSCVDEWRSASYHQQSSMGGGNLEDSSNPNPSANGFYSFESPRITSASISSALASQFSSVKVEDNPYKWVNVNGNCSSWNDLSAFGSSR

SEQ ID NO: 10762 - protein, 258 aa, Arabidopsis thaliana
MVDRARQANVALPEAALKCPRCESTNTKFCYFNNYSLTQPRHFCKTCRRYWTRGGALRNVPVGGGCRRNRRTKSNSNNNNNSTATSNNTSFSSGNASTISTILSSHYGGNQESILSQILSPARLMNPTYNHLGDLTSNTKTDNNMSLLNYGGLSQDLRSIHMGASGGSLMSCVDEWRSASYHQQSSMGGGNLEDSSNPNPSANGFYSFESPRITSASISSALASQFSSVKVEDNPYKWVNVNGNCSSWNDLSAFGSSR

SEQ ID NO: 10763 - DNA, 926 bp, Arabidopsis thaliana
ggatttgcttctccgatgtcaatcccaccatcttcaggttcttcttcttcatcttcctcgtctcagtacacatacgcagctaattcttactattccgctccgtatcagcctccacagccttacgcggcggcgccttcgcctgctgtaccggcgcctgtggcatccattcccggagctacggtctatcctcagcctgttggaccggttcctgccgtctacgcttaccctcagtaccaacaggcacatcaattgttccaaagagatgcacagacaattacaccagaagctcttgagaatgtaaaagctgctttggcaagtagtgaaaccgaacacaaagcagaaactaaaaagagagccattcctcgtaaagctgctggacagtcttgggaggatcctactctttcagaatggccagaaaatgactatcgtctgttctgtggtgatcttgggaacgaagtgaatgatgatgttctttccaaagcatttgctagattccccaccttcaatatggccaaggtcattagagataagcggactggtaaaaccaagggttatgggtttgtgagtttcttaaatcctgcggatccagcagcagccttaaaagaaatgaatggtaagtatgttggaaatcgtccgataaaactacgaaagagtagctggaaagagagaacagatcaggaggctgctgaaagacaaaagcatcacagcaataagaagcaaaaaactgtgaagaagagcatacttcacaagtgacgatctcttttatttttgtggcttaaaatttccaaacctgttactcataaatataaatgaacaaacattatcattagttttgttgaaaacggtatggttatgtattgttgggctgctatgtttagctttagccccaacgcggtggtatttactttatgaaaacgtgtgtccac

SEQ ID NO: 10764 - protein, 250 aa, Arabidopsis thaliana
GFASPMSIPPSSGSSSSSSSSQYTYAANSYYSAPYQPPQPYAAAPSPAVPAPVASIPGATVYPQPVGPVPAVYAYPQYQQAHQLFQRDAQTITPEALENVKAALASSETEHKAETKKRAIPRKAAGQSWEDPTLSEWPENDYRLFCGDLGNEVNDDVLSKAFARFPTFNMAKVIRDKRTGKTKGYGFVSFLNPADPAAALKEMNGKYVGNRPIKLRKSSWKERTDQEAAERQKHHSNKKQKTVKKSILHK

SEQ ID NO: 10765 - protein, 245 aa, Arabidopsis thaliana
MSIPPSSGSSSSSSSSQYTYAANSYYSAPYQPPQPYAAAPSPAVPAPVASIPGATVYPQPVGPVPAVYAYPQYQQAHQLFQRDAQTITPEALENVKAALASSETEHKAETKKRAIPRKAAGQSWEDPTLSEWPENDYRLFCGDLGNEVNDDVLSKAFARFPTFNMAKVIRDKRTGKTKGYGFVSFLNPADPAAALKEMNGKYVGNRPIKLRKSSWKERTDQEAAERQKHHSNKKQKTVKKSILHK

SEQ ID NO: 10766 - DNA, 521 bp, Arabidopsis thaliana
gacaagatacaatgagaatgttagttcttcgcactcccaccggacctgtctccgccgtcagattcatcaccaaatccaaaccttctcctttctcttctcccgattcatggctcctccctgcaccaaacactcaccggagtcgtccccgcgtcgtcctcgctctctctaaccccgacggaagcgtcaactcaaaaccctcaacctcagcttctcaaatcccttcttcaggagatgaaacagttttcgtgggtcaagataatgttcctctcgagggcgtgattcaattcgataaaccgtcatctacttcatcttctaacattaccaaatggggtcgtgtggctttacttgcgggtggtgatgttttagctctgcttatcttctctgccattgggagatttagccatggtttccctgttttttctattgatactctccacacagctgaccctttcattgcgggatggtttctgagtgcttatttgtaatttgtgtggagataaaaagaaaaagcctgtaatgtt

SEQ ID NO: 10767 - protein, 160 aa, Arabidopsis thaliana
QDTMRMLVLRTPTGPVSAVRFITKSKPSPFSSPDSWLLPAPNTHRSRPRVVLALSNPDGSVNSKPSTSASQIPSSGDETVFVGQDNVPLEGVIQFDKPSSTSSSNITKWGRVALLAGGDVLALLIFSAIGRFSHGFPVFSIDTLHTADPFIAGWFLSAYL

SEQ ID NO: 10768 - protein, 157 aa, Arabidopsis thaliana
MRMLVLRTPTGPVSAVRFITKSKPSPFSSPDSWLLPAPNTHRSRPRVVLALSNPDGSVNSKPSTSASQIPSSGDETVFVGQDNVPLEGVIQFDKPSSTSSSNITKWGRVALLAGGDVLALLIFSAIGRFSHGFPVFSIDTLHTADPFIAGWFLSAYL

SEQ ID NO: 10769 - protein, 155 aa, Arabidopsis thaliana
MLVLRTPTGPVSAVRFITKSKPSPFSSPDSWLLPAPNTHRSRPRVVLALSNPDGSVNSKPSTSASQIPSSGDETVFVGQDNVPLEGVIQFDKPSSTSSSNITKWGRVALLAGGDVLALLIFSAIGRFSHGFPVFSIDTLHTADPFIAGWFLSAYL

SEQ ID NO: 10770 - DNA, 876 bp, Arabidopsis thaliana
ttctttcttcttctttctcccaaacgctcttcttcttcgatcccttttttttttttttattacttctctgaagccataagagttgaagaattcaaaggattgatctgactataaacagaaacttccagagcttggtgaaggagcagccaccctaacttttcaatccctaaaggagcaaaaactctgattttggagcatcgttagtgttgttctcttcccatattgttaaaacgacttcgtttggttgaagaaaaagcttcctgtggttgaagtctctctgctcaacctaagagatgaaaatagtcaaggcaaatgcaggagcactgaccaatttcgaagtgcttgactttcttaactcgagaggtgcatcaaaagatactacaagagttatagctccaattgctagatcagaatacaaggtctatgattatttggtggagactgctgcttccactcaaacacgagagagcattaacaaattcgcagacaagtgtaaagatttcaaactcgctaaagctgagattctcaatatcatcaatctccggccttcttctatagtcgaactgttaccgatcatagagaacctggatgatcgagaaatcgacactgatgggatattagagcttgtgaaggatttgttacctcctctgcctacaactgaaagtcctaaagatgatgatgaagaagaaacagagaatggtgaacagtcgtgacgtgctaatgaagttgttgagtttatgttttgattttgtaaccatcctcttaaacgcttattaactagattgagtttgttatcttttaagttaagaagataatcgatcgaacaatttacgtccattcattaacaaagaaaaaaaaaacaggtccatactatat

SEQ ID NO: 10771 - protein, 139 aa, Arabidopsis thaliana
MKIVKANAGALTNFEVLDFLNSRGASKDTTRVIAPIARSEYKVYDYLVETAASTQTRESINKFADKCKDFKLAKAEILNIINLRPSSIVELLPIIENLDDREIDTDGILELVKDLLPPLPTTESPKDDDEEETENGEQS

SEQ ID NO: 10772 - DNA, 1642 bp, Arabidopsis thaliana
aagtattccaaaagaagaagaagaaataccttctcaattttctctaatggctctgataaccttacttgaagtctcaatttctttactctttttctccttcctttacggatatttcttgattagcaagaaacctcaccgttcgtttctcaccaactggccatttctcggtatgcttccgggtttactcgtggagatccctcgtgtttacgactttgtaaccgagcttctcgaggcctcaaacttaacttatcctttcaaaggtccatgtttagggggccttgacatgttgatcaccgttgatccggctaatatccatcacatcatgagctcaaacttcgcgaattacccgaaaggaaccgagttcaagaagatattcgatgttttgggagatgggattttcaacgcggattcggagttatggaaagatctgaggaaatcagctcaaagcatgatgactcatcaagattttcaaaggtttacactaagaacaatcatgagtaagctagagaaagggcttgtcccacttcttgattacgttgctgaaaagaaacaagtcgttgacttacaagatgtgttccaaagatttacgttcgacacttcgtttgttttagcgaccggggttgacccgggttgtctctcgactgaaatgccgcaaatcgagtttgctagagctttagacgaagcagaggaagcaattttcttcaggcatgtgaagccagagattgtttggaagatgcagaggtttattgggtttggagatgagttgaaaatgaagaaagctcactcgacattcgaccgagtttgctctaaatgcatagcttctaagagagatgaaataaccaatggggttataaacattgactcttcttctaaagatttgttgatgtgctacatgaatgtggatacaaccaagtacaagttgttgaatccaagtgatgacaaattccttagagacatgatcttaagcttcatgttagctggtagagacaccacaagctctgctctcacttggttcttttggcttctctctaagaacccaaaagccataaccaagattcgtcaagaaatcaacacacaactatctccaagaaccaatgattttgattcattcaatgctcaagagttaaacaagttggtgtatttacatggagcattgtgtgaagcccttaggctatatccaccggttccatttcagcacaagtctcctacaaaatccgacgttcttccaagtggacacagagtcgatgcgagttcgaagattgtgttctgtctttactcattagggagaatgaaatcagtttggggagaagatgcatcggaatttaaaccggagagatggatttcagagagtggaaggttgattcacgtgccttcttttaagttcttatcgtttaatgccggtccaaggacttgtttggggaaagaagtggctatgacacagatgaagacagtggctgtgaaaattatacaaaactatgagataaaggtcgttgaaggacacaagatcgagccagttccttctattattcttcacatgaagcatggtcttaaagttacagtcactaagagatctaatttgctctgaatattatgcattactattgtactacatttagtatgaaaataattattagaattttac

SEQ ID NO: 10773 - protein, 527 aa, Arabidopsis thaliana
SIPKEEEEIPSQFSLMALITLLEVSISLLFFSFLYGYFLISKKPHRSFLTNWPFLGMLPGLLVEIPRVYDFVTELLEASNLTYPFKGPCLGGLDMLITVDPANIHHIMSSNFANYPKGTEFKKIFDVLGDGIFNADSELWKDLRKSAQSMMTHQDFQRFTLRTIMSKLEKGLVPLLDYVAEKKQVVDLQDVFQRFTFDTSFVLATGVDPGCLSTEMPQIEFARALDEAEEAIFFRHVKPEIVWKMQRFIGFGDELKMKKAHSTFDRVCSKCIASKRDEITNGVINIDSSSKDLLMCYMNVDTTKYKLLNPSDDKFLRDMILSFMLAGRDTTSSALTWFFWLLSKNPKAITKIRQEINTQLSPRTNDFDSFNAQELNKLVYLHGALCEALRLYPPVPFQHKSPTKSDVLPSGHRVDASSKIVFCLYSLGRMKSVWGEDASEFKPERWISESGRLIHVPSFKFLSFNAGPRTCLGKEVAMTQMKTVAVKIIQNYEIKVVEGHKIEPVPSIILHMKHGLKVTVTKRSNLL

SEQ ID NO: 10774 - protein, 512 aa, Arabidopsis thaliana
MALITLLEVSISLLFFSFLYGYFLISKKPHRSFLTNWPFLGMLPGLLVEIPRVYDFVTELLEASNLTYPFKGPCLGGLDMLITVDPANIHHIMSSNFANYPKGTEFKKIFDVLGDGIFNADSELWKDLRKSAQSMMTHQDFQRFTLRTIMSKLEKGLVPLLDYVAEKKQVVDLQDVFQRFTFDTSFVLATGVDPGCLSTEMPQIEFARALDEAEEAIFFRHVKPEIVWKMQRFIGFGDELKMKKAHSTFDRVCSKCIASKRDEITNGVINIDSSSKDLLMCYMNVDTTKYKLLNPSDDKFLRDMILSFMLAGRDTTSSALTWFFWLLSKNPKAITKIRQEINTQLSPRTNDFDSFNAQELNKLVYLHGALCEALRLYPPVPFQHKSPTKSDVLPSGHRVDASSKIVFCLYSLGRMKSVWGEDASEFKPERWISESGRLIHVPSFKFLSFNAGPRTCLGKEVAMTQMKTVAVKIIQNYEIKVVEGHKIEPVPSIILHMKHGLKVTVTKRSNLL

SEQ ID NO: 10775 - protein, 471 aa, Arabidopsis thaliana
MLPGLLVEIPRVYDFVTELLEASNLTYPFKGPCLGGLDMLITVDPANIHHIMSSNFANYPKGTEFKKIFDVLGDGIFNADSELWKDLRKSAQSMMTHQDFQRFTLRTIMSKLEKGLVPLLDYVAEKKQVVDLQDVFQRFTFDTSFVLATGVDPGCLSTEMPQIEFARALDEAEEAIFFRHVKPEIVWKMQRFIGFGDELKMKKAHSTFDRVCSKCIASKRDEITNGVINIDSSSKDLLMCYMNVDTTKYKLLNPSDDKFLRDMILSFMLAGRDTTSSALTWFFWLLSKNPKAITKIRQEINTQLSPRTNDFDSFNAQELNKLVYLHGALCEALRLYPPVPFQHKSPTKSDVLPSGHRVDASSKIVFCLYSLGRMKSVWGEDASEFKPERWISESGRLIHVPSFKFLSFNAGPRTCLGKEVAMTQMKTVAVKIIQNYEIKVVEGHKIEPVPSIILHMKHGLKVTVTKRSNLL

SEQ ID NO: 10776 - DNA, 1357 bp, Arabidopsis thaliana
agtcatcagcacatgcgacacaccaacaccaatgtctgcttcttctttatttaatctcccattgattcgcctcagatctctcgctctttcgtcttctttttcttctttccgatttgcccatcgtcctctgtcatcgatttcaccgagaaagttaccgaattttcgtgctttctctggtaccgctatgacagatactaaagatgctggtatggatgctgttcagagacgtctcatgtttgaggatgaatgcattcttgttgatgaaactgatcgtgtcgtggggcatgacagcaagtataattgtcatctgatggaaaatattgaagccaagaatttgctgcacagggcttttagtgtatttttattcaactcgaagtatgagttgcttctccagcaaaggtcaaacacaaaggttacgttccctctagtgtggactaacacttgttgcagccatcctctttaccgtgaatcagagcttatccaggacaatgcactaggtgtgaggaatgctgcacaaagaaagcttctcgatgagcttggtattgtagctgaagatgtaccagtcgatgagttcactcccttgggacgtatgctgtacaaggctccttctgatggcaaatggggagagcatgaacttgattacttgctcttcattgtgcgagacgtgaaggttcaaccaaacccagatgaagtagccgagatcaagtatgtgagccgggaagagctgaaggagctggtgaagaaagcagatgcaggtgaggaaggtttgaaactgtcaccatggttcagattggtggtggacaatttcttgatgaagtggtgggatcatgttgagaaaggaactttggttgaagctatagacatgaaaaccatccacaaactctgaacatctttttttaaagtttttaaatcaatcaactttctcttcatcatttttatcttttcgatgataataattagggatgaaggagacacaagagatgcttgatttctgcgctaagcacaacattacagctgatattgaattgattaagatggatgagattaacactgcgatggagaggcttgctaagtctgatgttaggtacaggttcgtgatcgacgtggctaactccttgagccctccatgaatgatccggatctaagaattgagcattgaggaggctttaaatctatgtcataatcttggtgtttgtttgtgtctctcgagttatcttcgttttctgctttcggtttgagaatcggtttcttctcagacaagttaccttatttcgttgttttcttctcatgttctgtttcctgagagaaactctttctgattccagataagactttgatccattttcagtttgctaat

SEQ ID NO: 10777 - protein, 294 aa, Arabidopsis thaliana
VISTCDTPTPMSASSLFNLPLIRLRSLALSSSFSSFRFAHRPLSSISPRKLPNFRAFSGTAMTDTKDAGMDAVQRRLMFEDECILVDETDRVVGHDSKYNCHLMENIEAKNLLHRAFSVFLFNSKYELLLQQRSNTKVTFPLVWTNTCCSHPLYRESELIQDNALGVRNAAQRKLLDELGIVAEDVPVDEFTPLGRMLYKAPSDGKWGEHELDYLLFIVRDVKVQPNPDEVAEIKYVSREELKELVKKADAGEEGLKLSPWFRLVVDNFLMKWWDHVEKGTLVEAIDMKTIHKL

SEQ ID NO: 10778 - protein, 284 aa, Arabidopsis thaliana
MSASSLFNLPLIRLRSLALSSSFSSFRFAHRPLSSISPRKLPNFRAFSGTAMTDTKDAGMDAVQRRLMFEDECILVDETDRVVGHDSKYNCHLMENIEAKNLLHRAFSVFLFNSKYELLLQQRSNTKVTFPLVWTNTCCSHPLYRESELIQDNALGVRNAAQRKLLDELGIVAEDVPVDEFTPLGRMLYKAPSDGKWGEHELDYLLFIVRDVKVQPNPDEVAEIKYVSREELKELVKKADAGEEGLKLSPWFRLVVDNFLMKWWDHVEKGTLVEAIDMKTIHKL

SEQ ID NO: 10779 - protein, 233 aa, Arabidopsis thaliana
MTDTKDAGMDAVQRRLMFEDECILVDETDRVVGHDSKYNCHLMENIEAKNLLHRAFSVFLFNSKYELLLQQRSNTKVTFPLVWTNTCCSHPLYRESELIQDNALGVRNAAQRKLLDELGIVAEDVPVDEFTPLGRMLYKAPSDGKWGEHELDYLLFIVRDVKVQPNPDEVAEIKYVSREELKELVKKADAGEEGLKLSPWFRLVVDNFLMKWWDHVEKGTLVEAIDMKTIHKL

SEQ ID NO: 10780 - DNA, 1711 bp, Arabidopsis thaliana
aaaaatcattcctttttaacaatcttctgcattttcgaacttgctttgctgtgataaagttctctcctttcctttctaaaggaagaagaaaggctttatctctcaaaaccctcatccacaaaatcccctttaatccgctaatcagagggtttttctgtttttgtgttgcttcgttactacggttacattcttctcttccccttttgatttcaaagtgaatcgcgaaattgggttcgtgttcttgctctgatttcggtgtaacccttcaatttcagaaccctcttgataccttaagaagaggcaatttgaagttttcttcacagatccgtcttagctctttctagagaatggcggatttgataccattttatctgaatattgtggcgtttctatgtactgttggagctattgctttggcgatatttcatatctacaggcatcttttgaattacacggaaccaacttatcagagatatattgtacgcattatcttcatggtcccggtttatgccttcatgtcattcttgtctcttgtgttacccaaaagctcgatatattttgattccatacgagaagtatatgaagcatgggttatctacaattttctatcgctgtgtttggcatgggttggaggcccaggatcagtagtgcttagtttgagtggtcgttctttaaagccatcatggtctcttatgacatgttgctttccgcctttaacactggacgggcgatttattcgacgatgcaagcagggttgtctgcaatttgtaattctgaagcctatcctagttgctgtcacacttgtgctttatgctaaagggaagtacaaggatggaaattttaaccctgatcaagcatatctctatcttaccatcatctataccatatcctacacagtggctttgtacgcacttgtgctgttttatatggcatgcagagatctacttcagccattcaatccagtcccaaagtttgtgatcataaagtctgtggtctttctaacctattggcagggtgttctcgttttccttgctgcaaaatctggattcataaagagtgcagaggcagcagctcattttcaaaattttataatatgtgtcgagatgctcattgctgcagcatgtcatttctatgcttttccatacaaggagtatgctggtgccaatgttggtggatctggcagtttctcaggaagcttatcacatgctgtaaaactaaatgacttttaccatgacactgttcaccagtttgctcctacctatcacgattatgtgctctataaccatcaagatggtggtgacgaggggacaaagaagtaccgatcgagaacctttgtgccaactggccaagagatggatgcaatgagaaaaaacaaacctgtgtatgcaaacaagatagatggtgtttcagtctcaagtagtctatcttcagaggcaagctcacctaaaagctccagcgtaacttctgatcctgcacgctctgatgctgtgaaatcttccttgctggtggatgcctcagattctcttgaaacaatgtatgatatgtcgctcattgacattgatctatctagtttccccagcaatgtcccatctgcaagtgaaagtgggcctagataggagcagagaaaatgtagaaatcaccattaacaggtacaaaacatgctcctaatagttgtattcagatgaatcttctgaggtgtgttcttagttgc

SEQ ID NO: 10781 - protein, 422 aa, Arabidopsis thaliana
MADLIPFYLNIVAFLCTVGAIALAIFHIYRHLLNYTEPTYQRYIVRIIFMVPVYAFMSFLSLVLPKSSIYFDSIREVYEAWVIYNFLSLCLAWVGGPGSVVLSLSGRSLKPSWSLMTCCFPPLTLDGRFIRRCKQGCLQFVILKPILVAVTLVLYAKGKYKDGNFNPDQAYLYLTIIYTISYTVALYALVLFYMACRDLLQPFNPVPKFVIIKSVVFLTYWQGVLVFLAAKSGFIKSAEAAAHFQNFIICVEMLIAAACHFYAFPYKEYAGANVGGSGSFSGSLSHAVKLNDFYHDTVHQFAPTYHDYVLYNHQDGGDEGTKKYRSRTFVPTGQEMDAMRKNKPVYANKIDGVSVSSSLSSEASSPKSSSVTSDPARSDAVKSSLLVDASDSLETMYDMSLIDIDLSSFPSNVPSASESGPR

SEQ ID NO: 10782 - protein, 373 aa, Arabidopsis thaliana
MVPVYAFMSFLSLVLPKSSIYFDSIREVYEAWVIYNFLSLCLAWVGGPGSVVLSLSGRSLKPSWSLMTCCFPPLTLDGRFIRRCKQGCLQFVILKPILVAVTLVLYAKGKYKDGNFNPDQAYLYLTIIYTISYTVALYALVLFYMACRDLLQPFNPVPKFVIIKSVVFLTYWQGVLVFLAAKSGFIKSAEAAAHFQNFIICVEMLIAAACHFYAFPYKEYAGANVGGSGSFSGSLSHAVKLNDFYHDTVHQFAPTYHDYVLYNHQDGGDEGTKKYRSRTFVPTGQEMDAMRKNKPVYANKIDGVSVSSSLSSEASSPKSSSVTSDPARSDAVKSSLLVDASDSLETMYDMSLIDIDLSSFPSNVPSASESGPR

SEQ ID NO: 10783 - protein, 366 aa, Arabidopsis thaliana
MSFLSLVLPKSSIYFDSIREVYEAWVIYNFLSLCLAWVGGPGSVVLSLSGRSLKPSWSLMTCCFPPLTLDGRFIRRCKQGCLQFVILKPILVAVTLVLYAKGKYKDGNFNPDQAYLYLTIIYTISYTVALYALVLFYMACRDLLQPFNPVPKFVIIKSVVFLTYWQGVLVFLAAKSGFIKSAEAAAHFQNFIICVEMLIAAACHFYAFPYKEYAGANVGGSGSFSGSLSHAVKLNDFYHDTVHQFAPTYHDYVLYNHQDGGDEGTKKYRSRTFVPTGQEMDAMRKNKPVYANKIDGVSVSSSLSSEASSPKSSSVTSDPARSDAVKSSLLVDASDSLETMYDMSLIDIDLSSFPSNVPSASESGPR

SEQ ID NO: 10784 - DNA, 1811 bp, Arabidopsis thaliana
gttaaattctccaaattttttcttctctctctcttccctctgtcgcttcactttccctctgcttcatagttcatacgattcttcgattcgtcttcttcaatcagtgaagaagaactcaaaagatggctaaagagagagaccaaaacactaaagacaaaaacctcctcatctgtttcttatggaacttctccgccgagcttaagctagctctaatggcgttactcgttctctgcactttagctactctcctcccttttctaccttcttctttctccatctccgcttccgaactccgtttctgcatctcacgcatcgccgtaaactccacctccgtcaacttcaccaccgtcgtcgaaaagccagtcttagataacgccgtcaagttaactgagaagccggtgttggataacggcgttacgaaacagccgttaactgaagagaaggtgttaaataacggcgtgattaaacggacgtttactggttacggctgggcagcttataacttcgtgttaatgaacgcttacagaggcggcgttaacacattcgccgttatcggtttatcatctaaaccacttcacgtttactctcatcccacttaccgttgcgaatggattccactaaaccaatccgataaccggattttaaccgacggtaccaaaatcttaaccgattggggttacggtagagtttacacaaccgtcgtcgtaaactgtacttttccgtcaaacaccgtgataaaccctaaaaacaccggaggtactcttctcctccacgcaaccaccggagatacagaccggaacatcaccgattcaattccggtactcaccgaaactccaaacaccgtcgattttgctctctacgaatccaatctccgccggcgagagaagtacgattatctctattgtggatcttctctctacggcaacttatcaccacagagaatcagagaatggatcgcttaccatgtaaggttcttcggtgaaagatctcattttgttctacatgacgccggagggattacagaggaagtgtttgaggttttaaagccatggatagagcttgggagagttactgttcatgatattagagaacaagagagatttgatggttattatcataatcaattcatggtggtgaatgattgtttgcataggtatagattcatggcgaagtggatgtttttcttcgatgttgatgagtttatttatgttccggcgaagagttcgatttcgtcggtgatggtatctttggaggaatattctcagtttactattgaacagatgcctatgagtagtcaactttgttacgacggtgatggtccggcgaggacttacaggaaatggggatttgagaaattggcgtatagagatgtgaagaaagtaccacgacgggataggaagtatgcggttcaaccgcggaacgtatttgcgacaggggttcacatgtctcagcatctacaagggaagacgtatcacagagcggaagggaaaatacgctattttcactaccatggttcaatctcgcagcgtcgtgagccttgtcgtcatctttataacggtacccgtatcgttcatgagaacaatccttacgtgcttgataccacaatgcgtgatattggtctcgcggtgaagacgtttgagattaggacgattggagatcgcttgcttaggacgagacaatgaaggcaggagaagaatggttaaagacatgttatcatcattatgcgttgtaacgtaaatcttttagagtattatttaggcgaatgtaacaattttcatggttttttgtttagtatattcttttattgtatt

SEQ ID NO: 10785 - protein, 519 aa, Arabidopsis thaliana
MAKERDQNTKDKNLLICFLWNFSAELKLALMALLVLCTLATLLPFLPSSFSISASELRFCISRIAVNSTSVNFTTVVEKPVLDNAVKLTEKPVLDNGVTKQPLTEEKVLNNGVIKRTFTGYGWAAYNFVLMNAYRGGVNTFAVIGLSSKPLHVYSHPTYRCEWIPLNQSDNRILTDGTKILTDWGYGRVYTTVVVNCTFPSNTVINPKNTGGTLLLHATTGDTDRNITDSIPVLTETPNTVDFALYESNLRRREKYDYLYCGSSLYGNLSPQRIREWIAYHVRFFGERSHFVLHDAGGITEEVFEVLKPWIELGRVTVHDIREQERFDGYYHNQFMVVNDCLHRYRFMAKWMFFFDVDEFIYVPAKSSISSVMVSLEEYSQFTIEQMPMSSQLCYDGDGPARTYRKWGFEKLAYRDVKKVPRRDRKYAVQPRNVFATGVHMSQHLQGKTYHRAEGKIRYFHYHGSISQRREPCRHLYNGTRIVHENNPYVLDTTMRDIGLAVKTFEIRTIGDRLLRTRQ

SEQ ID NO: 10786 - protein, 489 aa, Arabidopsis thaliana
MALLVLCTLATLLPFLPSSFSISASELRFCISRIAVNSTSVNFTTVVEKPVLDNAVKLTEKPVLDNGVTKQPLTEEKVLNNGVIKRTFTGYGWAAYNFVLMNAYRGGVNTFAVIGLSSKPLHVYSHPTYRCEWIPLNQSDNRILTDGTKILTDWGYGRVYTTVVVNCTFPSNTVINPKNTGGTLLLHATTGDTDRNITDSIPVLTETPNTVDFALYESNLRRREKYDYLYCGSSLYGNLSPQRIREWIAYHVRFFGERSHFVLHDAGGITEEVFEVLKPWIELGRVTVHDIREQERFDGYYHNQFMVVNDCLHRYRFMAKWMFFFDVDEFIYVPAKSSISSVMVSLEEYSQFTIEQMPMSSQLCYDGDGPARTYRKWGFEKLAYRDVKKVPRRDRKYAVQPRNVFATGVHMSQHLQGKTYHRAEGKIRYFHYHGSISQRREPCRHLYNGTRIVHENNPYVLDTTMRDIGLAVKTFEIRTIGDRLLRTRQ

SEQ ID NO: 10787 - protein, 389 aa, Arabidopsis thaliana
MNAYRGGVNTFAVIGLSSKPLHVYSHPTYRCEWIPLNQSDNRILTDGTKILTDWGYGRVYTTVVVNCTFPSNTVINPKNTGGTLLLHATTGDTDRNITDSIPVLTETPNTVDFALYESNLRRREKYDYLYCGSSLYGNLSPQRIREWIAYHVRFFGERSHFVLHDAGGITEEVFEVLKPWIELGRVTVHDIREQERFDGYYHNQFMVVNDCLHRYRFMAKWMFFFDVDEFIYVPAKSSISSVMVSLEEYSQFTIEQMPMSSQLCYDGDGPARTYRKWGFEKLAYRDVKKVPRRDRKYAVQPRNVFATGVHMSQHLQGKTYHRAEGKIRYFHYHGSISQRREPCRHLYNGTRIVHENNPYVLDTTMRDIGLAVKTFEIRTIGDRLLRTRQ

SEQ ID NO: 10788 - DNA, 1402 bp, Arabidopsis thaliana
atgggttttatgtttactagttgtttttgctgtttgttcttaaatttagagtaacaatatcaaaaaggacaaatcttgatattgctttgattgctgttgtgtatgtatgtgtttttatagtgagagaagaaaaaaaagcacaatctttgaatggactggaatttcaaacttagctctggttatttatctggattcgatcaagaaccagatttatcaccaatggatggttcgatctcgtttggtgggtcgtcacagtcaaaagcggatttttcatttgatctaaaacttggaagaaacattggaaactcttcctctgtttttggtgatacagagcaagtgattagtcttagtaagtggaaagatagtgctttagctaaaccagaaggttcaagaagctcgagttcaaagagaacaaggaatggtgttggaaccaaccagatgccgatttgtcttgttgatggatgtgattctgattttagtaattgtagagagtatcataagagacataaagtttgtgatgttcattcaaaaactcctgtggttactattaatggtcataaacagaggttttgtcaacaatgcagcaggtttcatgctttggaggagtttgatgaagggaagagaagttgtaggaaacgtcttgatggacataatcgaagacgacggaagccgcagcctgaacatatcggtcgtcctgccaacttctttacgggttttcaaggtagcaaattgctagagttttctggtggttcacatgtgtttccaactacatctgtgttgaacccgagctggggaaatagtcttgtaagcgttgctgtagccgccaatggttcgagttatgggcagagccagagctatgttgttggttcttctcctgcaaagacagggataatgtttccaatctcttcttctccaaacagtaccagaagcatagcaaaacaattccctttcttgcaagaagaagaaagctcgagaaccgcatcgttgtgtgagagaatgacgagttgcatccatgactctgattgtgctctctctcttctgtcatcctcctcgtcgtcagtccctcatttgcttcaaccaccactttctttgtcccaagaagcagttgagacagttttttacgggtcgggattgtttgagaatgcctgtgcagtctctgatggatcggttatatccggtaacgaggctgtccgtcttccgcagacattcccgtttcattgggagtagtagaagaagaagtaggtagatagatagaatcagaaagatctatttgtgtctcttctcttctccctcatttttcaatgttctttatcatcatcattgttcttgttaacactacaagaaatatggacattcttaacacaccgaaaacgctataataacgtttacatagcggattcat

SEQ ID NO: 10789 - protein, 358 aa, Arabidopsis thaliana
MDWNFKLSSGYLSGFDQEPDLSPMDGSISFGGSSQSKADFSFDLKLGRNIGNSSSVFGDTEQVISLSKWKDSALAKPEGSRSSSSKRTRNGVGTNQMPICLVDGCDSDFSNCREYHKRHKVCDVHSKTPVVTINGHKQRFCQQCSRFHALEEFDEGKRSCRKRLDGHNRRRRKPQPEHIGRPANFFTGFQGSKLLEFSGGSHVFPTTSVLNPSWGNSLVSVAVAANGSSYGQSQSYVVGSSPAKTGIMFPISSSPNSTRSIAKQFPFLQEEESSRTASLCERMTSCIHDSDCALSLLSSSSSSVPHLLQPPLSLSQEAVETVFYGSGLFENACAVSDGSVISGNEAVRLPQTFPFHWE

SEQ ID NO: 10790 - protein, 335 aa, Arabidopsis thaliana
MDGSISFGGSSQSKADFSFDLKLGRNIGNSSSVFGDTEQVISLSKWKDSALAKPEGSRSSSSKRTRNGVGTNQMPICLVDGCDSDFSNCREYHKRHKVCDVHSKTPVVTINGHKQRFCQQCSRFHALEEFDEGKRSCRKRLDGHNRRRRKPQPEHIGRPANFFTGFQGSKLLEFSGGSHVFPTTSVLNPSWGNSLVSVAVAANGSSYGQSQSYVVGSSPAKTGIMFPISSSPNSTRSIAKQFPFLQEEESSRTASLCERMTSCIHDSDCALSLLSSSSSSVPHLLQPPLSLSQEAVETVFYGSGLFENACAVSDGSVISGNEAVRLPQTFPFHWE

SEQ ID NO: 10791 - protein, 262 aa, Arabidopsis thaliana
MPICLVDGCDSDFSNCREYHKRHKVCDVHSKTPVVTINGHKQRFCQQCSRFHALEEFDEGKRSCRKRLDGHNRRRRKPQPEHIGRPANFFTGFQGSKLLEFSGGSHVFPTTSVLNPSWGNSLVSVAVAANGSSYGQSQSYVVGSSPAKTGIMFPISSSPNSTRSIAKQFPFLQEEESSRTASLCERMTSCIHDSDCALSLLSSSSSSVPHLLQPPLSLSQEAVETVFYGSGLFENACAVSDGSVISGNEAVRLPQTFPFHWE

SEQ ID NO: 10792 - DNA, 1415 bp, Arabidopsis thaliana
agaaaccaaatgtcgttgataataatagaacactttctttctctctctaaaaagcaaaagtagtctagtcactgatttcttctaatcctccggtggagtgagagatgatatctccgacgttgtttcctcctctgcgctttatttctatgtcttccagtggctgttatcttcacagtccagcgagaactcacctgcgttatctcgccggagtttggtttccgctctctttccgtcttctctctttactctcgaaatgtccccgactcttcttcttcttctccggcggttcggattcgacagccgattcccaaagaagacgaccctcttcttcgactatcttctcgggttaacccgaatctacctcccggttcgacccggaaaatagcttttatgtacttaacgacgtcgcctcttccgttcgcgcctctttgggagatgttcttcgacggaatctccaagaatctttacaatgtctacgttcacgcggatccgacccgagaatacgacccgccgttctccggcgtgttcttgaaccgggtcattcactctaaaccctcgctgagacacactcccactctaactgcggcggcgcgtagactactagcacacgcgcttctcgacgatccattgaattacatgtttgcggttatatcaccttcatgcgtaccaattcgctcctttgacttcacttacaagacattagtctcgtcgcgcaagagcttcatcgagatacttaaagacgagccgtggcagttcgataggtggacggcgattgggagacacgcgatgcttccggaggtgaagctcgaggagtttcggatcgggtctcagttttgggttttgaaacggagacacgcgcgtgtggtggcgcgtgatcggcgtatatgggtgaagtttaaccagacgtgcgtgcgggaagactcgtgttatcctgaagaaagttactttcctacccttcttaatatgcgggatccacgtggatgtgtccccgccacgcttactcacgtggactggactgttaacgacggtggtcacccgaggatgtacgagccggaggaagtcgtgcctgagctggtcttgcggcttagaaagactagaccaagatatggtgaggatggaatcaacggttcggagtggtctaaggttgagcggatggatccgtttctgtttgctaggaagttttcaccgcaggctcttgagccgttgctgggtatggctcgaaccgtcttgttcaatgactcagccggtggtgtgtgaatggtttctctaatggtattgttgtaaattcagttttagttttagtttttttttttttcttttttgtggggaaataataattgtaatttaaatgggtagctgggaaaaacaaaaacccgagtataccattatcgtgagtaaaaaagtaaactcgtcct

SEQ ID NO: 10793 - protein, 288 aa, Arabidopsis thaliana
MYLTTSPLPFAPLWEMFFDGISKNLYNVYVHADPTREYDPPFSGVFLNRVIHSKPSLRHTPTLTAAARRLLAHALLDDPLNYMFAVISPSCVPIRSFDFTYKTLVSSRKSFIEILKDEPWQFDRWTAIGRHAMLPEVKLEEFRIGSQFWVLKRRHARVVARDRRIWVKFNQTCVREDSCYPEESYFPTLLNMRDPRGCVPATLTHVDWTVNDGGHPRMYEPEEVVPELVLRLRKTRPRYGEDGINGSEWSKVERMDPFLFARKFSPQALEPLLGMARTVLFNDSAGGV

SEQ ID NO: 10794 - protein, 273 aa, Arabidopsis thaliana
MFFDGISKNLYNVYVHADPTREYDPPFSGVFLNRVIHSKPSLRHTPTLTAAARRLLAHALLDDPLNYMFAVISPSCVPIRSFDFTYKTLVSSRKSFIEILKDEPWQFDRWTAIGRHAMLPEVKLEEFRIGSQFWVLKRRHARVVARDRRIWVKFNQTCVREDSCYPEESYFPTLLNMRDPRGCVPATLTHVDWTVNDGGHPRMYEPEEVVPELVLRLRKTRPRYGEDGINGSEWSKVERMDPFLFARKFSPQALEPLLGMARTVLFNDSAGGV

SEQ ID NO: 10795 - protein, 206 aa, Arabidopsis thaliana
MFAVISPSCVPIRSFDFTYKTLVSSRKSFIEILKDEPWQFDRWTAIGRHAMLPEVKLEEFRIGSQFWVLKRRHARVVARDRRIWVKFNQTCVREDSCYPEESYFPTLLNMRDPRGCVPATLTHVDWTVNDGGHPRMYEPEEVVPELVLRLRKTRPRYGEDGINGSEWSKVERMDPFLFARKFSPQALEPLLGMARTVLFNDSAGGV

SEQ ID NO: 10796 - DNA, 1037 bp, Arabidopsis thaliana
ctcctttgtctcgcttttttcttttgttctttcacatgtgtatatacacacagaacacacacttacatttctattatcatataaaacttcaactttaccttttatcttccaaaaaaaacactatcttcttcatcaaattctcttgattctgtttctttttatcctcctccatggccctctcacctaattcaagctctttagatttaacaatctcaattccgagcttctctccatctccttcacttggtgatcatcacgggatgagagattttgacataaaccaaacaccaaagacggaagaagatcgtgagtggatgatcggtgcaacaccacatgtcaacgaagatgatagcaactcgggtggccggcggcgcaaaaagctccgtctaacgaaagaacaatcacatcttcttgaagagagtttcatacaaaaccataccttaacccctaagcaaaaaaaagatttggccacctttttgaagcttagtcaaaggcaagttgaggtgtggtttcaaaatcgaagagctcggagtaagctaaagcacacggaaatggaatgtgagtatctaaaaagatggttcggatcgttgaaggaacaaaatcgacggctacaaatagaagttgaagaactacgagcgctaaagccatcatcgacctcggctttaaccatgtgtcctcggtgtgaacgtgtgactgatgcagtagataatgactctaatgccgttcaagagggggcagttcttagcagccggtcacggatgacaatttcctcttcctcttccctctgttgactggtttggtcgaagtcaaaagtcaaaagataaacgcctgtttcggggtaaaaagcaaagatttgatgatgattaggaggattttgtgtatagtttgctaattatttattacaaatttacaaaccagtgaggaaaaaagataatttaattctcgatctttaattagctttttgtgttatttattcataattttatttttcgtgtttaaccaaaaaatagacaaaacaaatattgcttttcgtgttc

SEQ ID NO: 10797 - protein, 206 aa, Arabidopsis thaliana
MALSPNSSSLDLTISIPSFSPSPSLGDHHGMRDFDINQTPKTEEDREWMIGATPHVNEDDSNSGGRRRKKLRLTKEQSHLLEESFIQNHTLTPKQKKDLATFLKLSQRQVEVWFQNRRARSKLKHTEMECEYLKRWFGSLKEQNRRLQIEVEELRALKPSSTSALTMCPRCERVTDAVDNDSNAVQEGAVLSSRSRMTISSSSSLC

SEQ ID NO: 10798 - protein, 176 aa, Arabidopsis thaliana
MRDFDINQTPKTEEDREWMIGATPHVNEDDSNSGGRRRKKLRLTKEQSHLLEESFIQNHTLTPKQKKDLATFLKLSQRQVEVWFQNRRARSKLKHTEMECEYLKRWFGSLKEQNRRLQIEVEELRALKPSSTSALTMCPRCERVTDAVDNDSNAVQEGAVLSSRSRMTISSSSSLC

SEQ ID NO: 10799 - protein, 158 aa, Arabidopsis thaliana
MIGATPHVNEDDSNSGGRRRKKLRLTKEQSHLLEESFIQNHTLTPKQKKDLATFLKLSQRQVEVWFQNRRARSKLKHTEMECEYLKRWFGSLKEQNRRLQIEVEELRALKPSSTSALTMCPRCERVTDAVDNDSNAVQEGAVLSSRSRMTISSSSSLC

SEQ ID NO: 10800 - DNA, 1595 bp, Arabidopsis thaliana
agagacacagattgatacaattcactcctttctttctgttttttcctttccctttctctcatctctctctttagctacttcctcctcccataaaccctctaccaagtaaactctcagctccaccattaacacatctcggtctcaattccgagctctgtattccaatcctttgttgcatttactttctgggtttttgtttattttgattttcttccatttgggtacccacccaaagagtaaagtttcaagctttcgtggtacttgctatgctttccctcacaaaaccctaatttcatatccttatccaattccatgttttgctctgctcaactctctgtttctacttctgaatcgtcgttttccttcatataaccaaaccaattctgttgaatcatcttggcacattcattgttttgagaaggaacagaaaaagttctgatcttgtccctattcgcacatcaatggacgataatagatctactcatagctcaatgttcggtgacctatcaacagaagaggtcacaagtaagatcattctcacagcaatcattgttctattcatggcggttctgttcgtccttatcctccatctatacgccaaactctactggtggagaatagatcagctccaacagcaacagcaacaacaacagcaagagcaagagcaagaagaagaccaatcatccattgctccacctgtagtcactcgccgtcagcgacgtcgtttcatcttcgtcccaggccaagacgctctaagcaacactggactaacctcttttgaacttagttccttaccaattgtgtttttcagacaagatagttgcaaagatggtttggaatgctctatttgtttgtctgagcttgttaaaggagataaagctaggctgcttccaaagtgtaaccatagcttccatgttgagtgtattgacatgtggtttcagtctcactctacttgtccgatttgtagaaacactgttcttggtcctgagcaagctagctcaaagagagttgaacaagttccagacaatgcagaaaatgctggtaccaccaataacaaccatgatgctttgtctcaactttcaacttcttctccagaatttcccaccaatgtcttggtatggggtcgtcaggatcaagttagtaccggaaacaccaatgttgggactcaagaagacggtgctgctggtaatggtgcttctcagagtcaagaagctgttgttctggatatcagcgattcttccagtagaaatcataatgtatcatcttcgtcgtcatctatgaggtttattgttgaggaggaagaagcaaaatctccaatgacaacgaggttgaggtccttaaggaggtttctgagcagagacaagagagtgggttgtagcaatagtagtactagtaatagtagcagctccaatgctgttgcttctgttgatccttgaagattgtaattagcttagctgagtgagattgcctgaagatgtcaaactgtgtgtatgtggtctcggctctttattggctgtgtttgagagctttctttgtcataagtaaatcatttatctattccacgggtaattgaaatctaaagcttttgtttaccc

SEQ ID NO: 10801 - protein, 324 aa, Arabidopsis thaliana
MDDNRSTHSSMFGDLSTEEVTSKIILTAIIVLFMAVLFVLILHLYAKLYWWRIDQLQQQQQQQQQEQEQEEDQSSIAPPVVTRRQRRRFIFVPGQDALSNTGLTSFELSSLPIVFFRQDSCKDGLECSICLSELVKGDKARLLPKCNHSFHVECIDMWFQSHSTCPICRNTVLGPEQASSKRVEQVPDNAENAGTTNNNHDALSQLSTSSPEFPTNVLVWGRQDQVSTGNTNVGTQEDGAAGNGASQSQEAVVLDISDSSSRNHNVSSSSSSMRFIVEEEEAKSPMTTRLRSLRRFLSRDKRVGCSNSSTSNSSSSNAVASVDP

SEQ ID NO: 10802 - protein, 314 aa, Arabidopsis thaliana
MFGDLSTEEVTSKIILTAIIVLFMAVLFVLILHLYAKLYWWRIDQLQQQQQQQQQEQEQEEDQSSIAPPVVTRRQRRRFIFVPGQDALSNTGLTSFELSSLPIVFFRQDSCKDGLECSICLSELVKGDKARLLPKCNHSFHVECIDMWFQSHSTCPICRNTVLGPEQASSKRVEQVPDNAENAGTTNNNHDALSQLSTSSPEFPTNVLVWGRQDQVSTGNTNVGTQEDGAAGNGASQSQEAVVLDISDSSSRNHNVSSSSSSMRFIVEEEEAKSPMTTRLRSLRRFLSRDKRVGCSNSSTSNSSSSNAVASVDP

SEQ ID NO: 10803 - protein, 291 aa, Arabidopsis thaliana
MAVLFVLILHLYAKLYWWRIDQLQQQQQQQQQEQEQEEDQSSIAPPVVTRRQRRRFIFVPGQDALSNTGLTSFELSSLPIVFFRQDSCKDGLECSICLSELVKGDKARLLPKCNHSFHVECIDMWFQSHSTCPICRNTVLGPEQASSKRVEQVPDNAENAGTTNNNHDALSQLSTSSPEFPTNVLVWGRQDQVSTGNTNVGTQEDGAAGNGASQSQEAVVLDISDSSSRNHNVSSSSSSMRFIVEEEEAKSPMTTRLRSLRRFLSRDKRVGCSNSSTSNSSSSNAVASVDP

SEQ ID NO: 10804 - DNA, 762 bp, Arabidopsis thaliana
gaaaaacttagggttcatagcagccagagagagagagacaagtgagagggatctaccaaacgaagcaacaatggtgaagttcttgaagcagaacaaggccgtgatccttcttcaaggacgttacgccggaaagaaagccgtcatcatcaaatccttcgacgacggtaaccgtgatcgtccttacggacactgcctcgtcgccggactgaagaagtacccgagcaaagtcatccgcaaagactcagctaagaagacagctaagaaatctagggttaagtgtttcatcaagcttgttaattaccagcatctgatgcctactcgttacacactcgacgtggatctcaaggaagtggcgactcttgatgctggtaattaacaagcttctcaacttaaacatcttcattcctcttgcacttcaagctcttatcacttgtgggatcaatcctccttctggttttgtctgccctcctctcacttgatctaaaaacatccccttgatttaacaaatgtacgtatgatcaagggtggttttcgaggcttttgtaataattcaaatatatatgtggtacttttgattatcaggtttgttgattatctagggttttaattaacaagtgttgttttctgttattgtcgttgttgttataattaagctagggtttttgcatggccttctttaaatttcttttgcgtgtaatctttcgtacgttttgtattgttccagcttctcgatgtctatcaatttgactctttagtctctcc

SEQ ID NO: 10805 - protein, 124 aa, Arabidopsis thaliana
KNLGFIAARERETSERDLPNEATMVKFLKQNKAVILLQGRYAGKKAVIIKSFDDGNRDRPYGHCLVAGLKKYPSKVIRKDSAKKTAKKSRVKCFIKLVNYQHLMPTRYTLDVDLKEVATLDAGN

SEQ ID NO: 10806 - protein, 101 aa, Arabidopsis thaliana
MVKFLKQNKAVILLQGRYAGKKAVIIKSFDDGNRDRPYGHCLVAGLKKYPSKVIRKDSAKKTAKKSRVKCFIKLVNYQHLMPTRYTLDVDLKEVATLDAGN

SEQ ID NO: 10807 - DNA, 1448 bp, Arabidopsis thaliana
cacaaaaatacaacaacttagatcagtctcaaagggggaaaaaaaacttaaaagaaacattaagaggcaacacaaatcacacaaaagatcaaattgaagcctaagaagaaggcaaaaagtgagaagcaatggctaccatgttgaaggtctctcttgtattgtcattgttaggttttctggtgatcgctgtcgtgactccatcggcggcgaacccattcaggaagagcgtagttctcggagggaagtcaggcgttccaaacattcggaccaacagggaaatttaacaacttggaaggtactgcgtggagcaattcaatcaacaagcacagaacgagcaaggaaacataggatccattgcgaaaacagacacggcaatttcgaatccattgcaatttagccgagtagtgtctgctcagaaacaggtcgtcgctggactcaaatactatctaaggattgaagtcactcaacccaatggctctaccaggatgtttgactctgattcccacagacagtacacgccgaaagggtggacgaagaggaagaagactctgattgcacgatgaggctcatcatcgttgcaatgtgctcttgagactgtgggtattttcttgggtacacttcgaagttagttttgtctctctccaatttatctttccagttgctttgagaacattataagctgtgtttttttgtatttggagtttttggtattgagaaaaaaaatgttaagttaaaaaaaaaaaaaaaaaaaaagtttacattgagctaatctaaaaacacttatcgtttcgtctcttctctgatccattgttgaagatgtcgaagagaaaaactaaggagccaaaggttgagactgtgactcttggaccttctgttcgtgaaggagagcaagtttttggtgttgttcacatctttgcatctttcaatgacactttcattcatgtgactgatctctccggtagagaaactctcgtccgcatcaccggtggcatgaaggtgaaggctgaccgtgatgagtcctctccttatgctgctatgcttgcagctcaagatgttgctcaaagatgcaaggagcttggcatcactgccatgcacgtgaagctccgtgctactggaggaaacaaaaccaagactccaggtcctggtgctcagtctgctcttagagcccttgctcgttctggcatgaagattggtcgtattgaggatgtgactccgattcccacagacagtacacgccgaaagggtggacgaagaggaagaagactctgattgcacgatgaggctcatcatcgttgcaatgtgctcttgagactgtgggtattttcttgggtacacttcgaagttagttttgtctctctccaatttatctttccagttgctttgagaacattataagctgtgtttttttgtatttggagtttttggtattgagaaaaaaaatgttaagc

SEQ ID NO: 10808 - protein, 150 aa, Arabidopsis thaliana [sequence omitted]

SEQ ID NO: 10809 - protein, 92 aa, Arabidopsis thaliana; identical to SEQ ID NO: 5609

SEQ ID NO: 10810 - protein, 77 aa, Arabidopsis thaliana; identical to SEQ ID NO: 5610

SEQ ID NO: 10811 - DNA, 1620 bp, Arabidopsis thaliana
atcttcttgctttcttcacttcttcaactctttgagttatttatttccagaagcttcatagtttctggaaaatgctaatccactagcggaataaaagacagatctttaatccactatagaaaccgcgttttctgaaaatgcggttgcgttttccgatgaaatctgccgttttagcgtttgctatctttctggtgtttattccactgttttccgtcggaatacggatgattccgggaagactcaccgccgtatccgccaccgtcggaaatggctttgatctggggtcgttcgtggaagctccggagtacagaaacggcaaggagtgcgtgtctcaatcgttaaacagagagaacttcgtgtcgtcttgcgacgcttcgttagttcatgtagctatgacgcttgactcagagtacttacgtggctcaatcgcagccgttcattccatgctccgccacgcgtcatgtccagaaaacgtcttcttccatctcatcgctgcagagtttgacccggcgagtccacgcgttctgagtcaactcgtccgatctactttcccgtcgctaaacttcaaagtatacattttccgggaagatacggtgatcaaccttatctcttcttcaatcagacaagctttagagaatccattgaactatgctcggaactacctcggagatattcttgatccatgcgtagacagagtcatttacctagactcggacatcatcgtcgtcgacgacataacaaagctttggaacacgactttaacagagtcaagaatcatcggagctccggagtattgtcacgctaacttcacaaagtacttcacttcagggttctggtccgacccggctttacccggattcttctcgggtcgaaagccttgttatttcaacacgggtgtgatggtgatggatctagttagatggagagaaggaaactacagagaaaagcttgaaacttggatgcagatacagaagaagaagagaatctacgatttgggttctttgcctccgtttcttctagtcttcgcagggaacgttgaagcaattgatcataggtggaaccaacatggtctaggaggagacaatgtacgaggaagttgtaggtctttgcataaaggaccagtgagtttgttgcattggagtgggaaaggtaagccatgggtgagacttgatgagaagagaccgtgtccgttggatcatttatgggaaccgtatgatttatatgagcataagattgaaagagctaaagatcagtctttgtttgggttctcttctttgtctgagttaacagaagattcaagctttttctgaagagttgtgtaagtcaacaacattctttttacttgtttttgtagttttgggttattacaaatacattgttgagttgttgagagatatatttttttgactgttggttgtgtaaaaaattgactagtgagaaaagagtttgtagaagctattgatgaggactagttaggagaattttttgtttggaatttgtattttgttgtgttctttccctaaatggttatgttgatctcaattttctgtatgtggagtcttttcaagaatatgcagcaagtgttgttagcctgaaataaaacccaagtttgttaaactg

SEQ ID NO: 10812 - protein, 390 aa, Arabidopsis thaliana
MRLRFPMKSAVLAFAIFLVFIPLFSVGIRMIPGRLTAVSATVGNGFDLGSFVEAPEYRNGKECVSQSLNRENFVSSCDASLVHVAMTLDSEYLRGSIAAVHSMLRHASCPENVFFHLIAAEFDPASPRVLSQLVRSTFPSLNFKVYIFREDTVINLISSSIRQALENPLNYARNYLGDILDPCVDRVIYLDSDIIVVDDITKLWNTTLTESRIIGAPEYCHANFTKYFTSGFWSDPALPGFFSGRKPCYFNTGVMVMDLVRWREGNYREKLETWMQIQKKKRIYDLGSLPPFLLVFAGNVEAIDHRWNQHGLGGDNVRGSCRSLHKGPVSLLHWSGKGKPWVRLDEKRPCPLDHLWEPYDLYEHKIERAKDQSLFGFSSLSELTEDSSFF

SEQ ID NO: 10813 - protein, 384 aa, Arabidopsis thaliana
MKSAVLAFAIFLVFIPLFSVGIRMIPGRLTAVSATVGNGFDLGSFVEAPEYRNGKECVSQSLNRENFVSSCDASLVHVAMTLDSEYLRGSIAAVHSMLRHASCPENVFFHLIAAEFDPASPRVLSQLVRSTFPSLNFKVYIFREDTVINLISSSIRQALENPLNYARNYLGDILDPCVDRVIYLDSDIIVVDDITKLWNTTLTESRIIGAPEYCHANFTKYFTSGFWSDPALPGFFSGRKPCYFNTGVMVMDLVRWREGNYREKLETWMQIQKKKRIYDLGSLPPFLLVFAGNVEAIDHRWNQHGLGGDNVRGSCRSLHKGPVSLLHWSGKGKPWVRLDEKRPCPLDHLWEPYDLYEHKIERAKDQSLFGFSSLSELTEDSSFF

SEQ ID NO: 10814 - protein, 361 aa, Arabidopsis thaliana
MIPGRLTAVSATVGNGFDLGSFVEAPEYRNGKECVSQSLNRENFVSSCDASLVHVAMTLDSEYLRGSIAAVHSMLRHASCPENVFFHLIAAEFDPASPRVLSQLVRSTFPSLNFKVYIFREDTVINLISSSIRQALENPLNYARNYLGDILDPCVDRVIYLDSDIIVVDDITKLWNTTLTESRIIGAPEYCHANFTKYFTSGFWSDPALPGFFSGRKPCYFNTGVMVMDLVRWREGNYREKLETWMQIQKKKRIYDLGSLPPFLLVFAGNVEAIDHRWNQHGLGGDNVRGSCRSLHKGPVSLLHWSGKGKPWVRLDEKRPCPLDHLWEPYDLYEHKIERAKDQSLFGFSSLSELTEDSSFF

SEQ ID NO: 10815 - DNA, 1280 bp, Arabidopsis thaliana
atcataggcatagcaaaactcttccaaaatgtctgatttctcgagctccgtgaagcttaaatatgttaaactcggttaccaataccttatcaacaacttccttactcttcttttgattccagtcatagcaaccgtcgccatcgagcttctccgaatgggtcctcgagcgatcaggtctaggagaagagacttgtctccctccagctattcattacatccctccaactccaaccatggaatccgcaagaaacgaggcccaaatggttatcttcaccgccatggaagatctcttcaagaatacaggtcttaaacctaaagacatcgacatcctcattgttaattgctctctgttctcaccaacgccgtctctctccgctatgattatcaacaagtacaagcttaggagtaacatcaaaagctataacctttccgggatgggatgcagcgctagtcttatctcagttgatgtagcacgtaatttgttacaagtccatcctaactccaacgcaatcataattagcactgagatcattactcctaattactataagggtaatgagagagccatgttgctcccaaactgcctcttccgtatgggaggcgccgccattctcctctctaaccgcagatccgacaggtggcgagctaagtacaagttatgccaccttgttaggacccatcgcggtgcggatgacaaatcctacaactgtgttatggaacaggaagacaaaaatggtaacgtgggaatcaacttgtctaaagatctcatgaccattgccggagaagccttgaaagctaatatcactaccataggtcctttggtccttccggcatcggagcagcttctcttcctctcatcccttatcggacgtaaaatcttcaatccaaagtggaagccgtacataccagatttcaagcaggccttcgagcatttctgcatccacgcaggaggaagagcggtgattgatgagctgcaaaagaatctacagctgtcgggagaacacgtggaagcttcaagaatgacactacataggtttggtaatacatcgtcgtcatcattatggtatgagcttagctacatagaggctcaagggaggatgaagagaaacgatagggtttggcagatcgctttcggaagtggattcaagtgtaactccgccgtttggaaatgtaaccgtacgatcaagacaccaacggatggagcgtggtcggattgtatcgaacgataccctgtctttatccctgaagttgttaaactatgaaaatactttttttttacc

SEQ ID NO: 10816 - protein, 342 aa, Arabidopsis thaliana
MESARNEAQMVIFTAMEDLFKNTGLKPKDIDILIVNCSLFSPTPSLSAMIINKYKLRSNIKSYNLSGMGCSASLISVDVARNLLQVHPNSNAIIISTEIITPNYYKGNERAMLLPNCLFRMGGAAILLSNRRSDRWRAKYKLCHLVRTHRGADDKSYNCVMEQEDKNGNVGINLSKDLMTIAGEALKANITTIGPLVLPASEQLLFLSSLIGRKIFNPKWKPYIPDFKQAFEHFCIHAGGRAVIDELQKNLQLSGEHVEASRMTLHRFGNTSSSSLWYELSYIEAQGRMKRNDRVWQIAFGSGFKCNSAVWKCNRTIKTPTDGAWSDCIERYPVFIPEVVKL

SEQ ID NO: 10817 - protein, 333 aa, Arabidopsis thaliana
MVIFTAMEDLFKNTGLKPKDIDILIVNCSLFSPTPSLSAMIINKYKLRSNIKSYNLSGMGCSASLISVDVARNLLQVHPNSNAIIISTEIITPNYYKGNERAMLLPNCLFRMGGAAILLSNRRSDRWRAKYKLCHLVRTHRGADDKSYNCVMEQEDKNGNVGINLSKDLMTIAGEALKANITTIGPLVLPASEQLLFLSSLIGRKIFNPKWKPYIPDFKQAFEHFCIHAGGRAVIDELQKNLQLSGEHVEASRMTLHRFGNTSSSSLWYELSYIEAQGRMKRNDRVWQIAFGSGFKCNSAVWKCNRTIKTPTDGAWSDCIERYPVFIPEVVKL

SEQ ID NO: 10818 - protein, 327 aa, Arabidopsis thaliana
MEDLFKNTGLKPKDIDILIVNCSLFSPTPSLSAMIINKYKLRSNIKSYNLSGMGCSASLISVDVARNLLQVHPNSNAIIISTEIITPNYYKGNERAMLLPNCLFRMGGAAILLSNRRSDRWRAKYKLCHLVRTHRGADDKSYNCVMEQEDKNGNVGINLSKDLMTIAGEALKANITTIGPLVLPASEQLLFLSSLIGRKIFNPKWKPYIPDFKQAFEHFCIHAGGRAVIDELQKNLQLSGEHVEASRMTLHRFGNTSSSSLWYELSYIEAQGRMKRNDRVWQIAFGSGFKCNSAVWKCNRTIKTPTDGAWSDCIERYPVFIPEVVKL

SEQ ID NO: 10819 - DNA, 1291 bp, Arabidopsis thaliana
cagacacttacccacaaaatattcctctcggcgatgatccctttctgctgaatttttagtcctttgtcgctcgactgttttcttcgtctactatttgttccttttggatattcttcggacttttcgttgatttgattttcaagagagagagtttgaacaaggaaggattgaactatggaagatgcatcagagactagctactggtgtcacatgtgctcccgatcggtgattccattgattcaagacgaaatcatcaaatgcaatttctgtcaaagtggttttgttgaagaaatggataataatgatgaccatcaggctgctgattctctctggactcctatcttgatggagatgatgaacaacaatcacgaccaacattctaccaatcaggaagactcagaatctattcttgaagatgaagacgaagacgaagatgatggtgatgatggtgatcagaacaatgatggagaaattgatataactcatcaacttgaagagattaggaggataaggactagacattcaactgctattgttaatctgcttcaggggattcgagctggattattgatcgaatccgagaacaacgaggataatcccgataatagcgagcttgtcgtcttgatcaactcatttaaccaaaggatcagggttcatcaagattctgtagacaccacttctgttccttctggatctttgggtgactatttcattggacctggattcgagacgttgcttcagcgtttggctgagaatgatctgaacaacaggtatgggacacctccagctacaaaagaagcggttgaggcattggcgatggtgaaaatcgaagatagtttgttgcagtgtagtgtgtgtttggatgattttgagattggaatggaggctaaagagatgccttgtaagcataagtttcatagtgactgcttgttgccatggcttgagcttcatagctcatgccctgtttgcagatatctgcttcctacaggagatgatgatgagccaaagactgatgcagaaacatcgagaaacgatgataacaatgaagatatcagtaatgcttctatggctagtaatggatcatcaccagactcaagttcgaacaattcatcggttaactaaactaaggctcactatctgagacaggtttacttgaacagaggagaactgatgggatcgtttgagatcagtctttagtgtttaatgttatttggtttgcacatagtttctcagatttggtggaaaatgtattctttggaattaattaacagtcttttttttttttgacttt

SEQ ID NO: 10820 - protein, 315 aa, Arabidopsis thaliana
MEDASETSYWCHMCSRSVIPLIQDEIIKCNFCQSGFVEEMDNNDDHQAADSLWTPILMEMMNNNHDQHSTNQEDSESILEDEDEDEDDGDDGDQNNDGEIDITHQLEEIRRIRTRHSTAIVNLLQGIRAGLLIESENNEDNPDNSELVVLINSFNQRIRVHQDSVDTTSVPSGSLGDYFIGPGFETLLQRLAENDLNNRYGTPPATKEAVEALAMVKIEDSLLQCSVCLDDFEIGMEAKEMPCKHKFHSDCLLPWLELHSSCPVCRYLLPTGDDDEPKTDAETSRNDDNNEDISNASMASNGSSPDSSSNNSSVN

SEQ ID NO: 10821 - protein, 303 aa, Arabidopsis thaliana
MCSRSVIPLIQDEIIKCNFCQSGFVEEMDNNDDHQAADSLWTPILMEMMNNNHDQHSTNQEDSESILEDEDEDEDDGDDGDQNNDGEIDITHQLEEIRRIRTRHSTAIVNLLQGIRAGLLIESENNEDNPDNSELVVLINSFNQRIRVHQDSVDTTSVPSGSLGDYFIGPGFETLLQRLAENDLNNRYGTPPATKEAVEALAMVKIEDSLLQCSVCLDDFEIGMEAKEMPCKHKFHSDCLLPWLELHSSCPVCRYLLPTGDDDEPKTDAETSRNDDNNEDISNASMASNGSSPDSSSNNSSVN

SEQ ID NO: 10822 - protein, 276 aa, Arabidopsis thaliana
MDNNDDHQAADSLWTPILMEMMNNNHDQHSTNQEDSESILEDEDEDEDDGDDGDQNNDGEIDITHQLEEIRRIRTRHSTAIVNLLQGIRAGLLIESENNEDNPDNSELVVLINSFNQRIRVHQDSVDTTSVPSGSLGDYFIGPGFETLLQRLAENDLNNRYGTPPATKEAVEALAMVKIEDSLLQCSVCLDDFEIGMEAKEMPCKHKFHSDCLLPWLELHSSCPVCRYLLPTGDDDEPKTDAETSRNDDNNEDISNASMASNGSSPDSSSNNSSVN

SEQ ID NO: 10823 - DNA, 875 bp, Arabidopsis thaliana
acatcacataccaaaaaaaggcaaaacactcacgaaagaagaaacggagaggatgaagcattatgtgctagttcacggaggctgccacggtgcgtggtgttggtacaaggtgaagccgatgcttgaacattccggccaccgtgtcacggtttttgatcttacggcgcatggtgtgaacatgagcagagtagaagatattcagactttggaggatttcgctaagccgttgcttgaggttcttgagtcttttggctcggatgataaagtagtcctcgtcgcgcatagcctcggtggaataccggctgctcttgcagccgacatgtttcctagtaaaatctctgttgctgtcttcgttacttcttttatgcccgacacaacgaatccaccttcttacgtgttcgaaaagtttctcggaagcattacagaagaagaacgtatggacttcgagttagggagctatggaacagatgaccatccactaaagactgcttttcttggacctaactacttgaagaatatgtatctactttctcctatcgaagattatgaattggccaaaatgttgatgagagtcacaccggctattactagtaatctgacggggactaaaagcttaacggcacaaggatatggatcgattagtcgtgtgtatatcgtatgcggagaagataaaggtatacgtgtagatttccaacgatggatgattgagaactctccggttaaagaagtgatggagatcaaagatgcagatcatatgcctatgttttccaagcctcatgaactctgtgatcgtcttctaaagattgctgataaatatccctaagcaagaatatctatgacaatatcaataattttcatgggaataagtttttttg

SEQ ID NO: 10824 - protein, 273 aa, Arabidopsis thaliana
HHIPKKGKTLTKEETERMKHYVLVHGGCHGAWCWYKVKPMLEHSGHRVTVFDLTAHGVNMSRVEDIQTLEDFAKPLLEVLESFGSDDKVVLVAHSLGGIPAALAADMFPSKISVAVFVTSFMPDTTNPPSYVFEKFLGSITEEERMDFELGSYGTDDHPLKTAFLGPNYLKNMYLLSPIEDYELAKMLMRVTPAITSNLTGTKSLTAQGYGSISRVYIVCGEDKGIRVDFQRWMIENSPVKEVMEIKDADHMPMFSKPHELCDRLLKIADKYP

SEQ ID NO: 10825 - protein, 256 aa, Arabidopsis thaliana
MKHYVLVHGGCHGAWCWYKVKPMLEHSGHRVTVFDLTAHGVNMSRVEDIQTLEDFAKPLLEVLESFGSDDKVVLVAHSLGGIPAALAADMFPSKISVAVFVTSFMPDTTNPPSYVFEKFLGSITEEERMDFELGSYGTDDHPLKTAFLGPNYLKNMYLLSPIEDYELAKMLMRVTPAITSNLTGTKSLTAQGYGSISRVYIVCGEDKGIRVDFQRWMIENSPVKEVMEIKDADHMPMFSKPHELCDRLLKIADKYP

SEQ ID NO: 10826 - protein, 234 aa, Arabidopsis thaliana
MLEHSGHRVTVFDLTAHGVNMSRVEDIQTLEDFAKPLLEVLESFGSDDKVVLVAHSLGGIPAALAADMFPSKISVAVFVTSFMPDTTNPPSYVFEKFLGSITEEERMDFELGSYGTDDHPLKTAFLGPNYLKNMYLLSPIEDYELAKMLMRVTPAITSNLTGTKSLTAQGYGSISRVYIVCGEDKGIRVDFQRWMIENSPVKEVMEIKDADHMPMFSKPHELCDRLLKIADKYP

SEQ ID NO: 10827 - DNA, 1675 bp, Arabidopsis thaliana
acctctatctctctcttctctgggaggaaaaatggagatatcggttgcatcggtaacaatatcagtagttctagctgttgtgtcatggtggatatggagaactttacagtgggtttggtttaagccaaagatgcttgagcattacctgagaagacaaggtcttgccggaacaccttacacgcctctagtcggcgatttgaagaagaatttcagcatgttgtcggaggcaaggtcgaaacccctcaaactaacggatgacatctcacctcgtgtcgtgccttatcccttgcaaatgttcaagacttacggaaggacttactttacatggtttggacctatcccaaccatcacaataatggatcctgagcaaatcaaggaagtgttcaacaaagtttatgatttccaaaagccgcatacatttcctttggccacaattatagctaaaggactcgctaattatgatggtgataaatgggcaaaacaccgaagaatcatcaacccggcttttcatatagagaagatcaagaatatggtacctgcgttccaccagagctgtagggaagttgttggcgaatgggatcagttagtatcggataaagggtcgtcatgtgaggtagacgtttggcctgggcttgtgagtatgactgcagatgtgatctctcgtactgcatttggcagcagctacaaagaagggcagaggatatttgagctccaagcagaactagcacagctcatcattcaagcttttaggaaagctttcatccctggatatagttatctcccaacaaaaagtaacagaagaatgaaagcagcagccagagaaatccaagttatactaagagggatcgtaaacaaaaggttaagggccagagaagctggtgaagcaccaagcgacgatttgctgggaatacttcttgaatcgaatttgaggcaaacggaaggaaacggaatgagtaccgaggatctgatggaggagtgcaagttgttctatttcgccgggcaagagacaacatcagtacttctggtttggacaatggtgctgttaagccaacaccaagattggcaggctcgtgcacgagaagaagtgaagcaagtgtttggcgataaagaacctgatgcagaaggactcaaccagctcaaagttatgacgatgatattatatgaggtccttaggctatatcctccagtaacccagctgactcgagccattcacaaagagctgaagctaggcgatctgaccctaccaggcggtgttcagatcagtctacctattctgctagtccaacacgacatcgagctgtggggaaacgacgcagcagagttcaatcctgacagatttaaagatggtctttcaaaggcaacaaagagccaagtctccttctttccctttgcgtggggaccgaggatatgcataggccagaactttgccctgttagaggcaaaaatggcaatggcattgattctgcggaggttctcgtttgagatttctccttcctatgttcacgcaccatacacagtcatcaccattcacccacagttcggtgctcagcttatcatgcacaagctctaatcagacaacacatttgtgttgttgtcaaatatacaataaacttgttatacagagatgaatcgagatagatcataatacaaaactcaaatctttccttttatgttc

SEQ ID NO: 10828 - protein, 522 aa, Arabidopsis thaliana
PLSLSSLGGKMEISVASVTISVVLAVVSWWIWRTLQWVWFKPKMLEHYLRRQGLAGTPYTPLVGDLKKNFSMLSEARSKPLKLTDDISPRVVPYPLQMFKTYGRTYFTWFGPIPTITIMDPEQIKEVFNKVYDFQKPHTFPLATIIAKGLANYDGDKWAKHRRIINPAFHIEKIKNMVPAFHQSCREVVGEWDQLVSDKGSSCEVDVWPGLVSMTADVISRTAFGSSYKEGQRIFELQAELAQLIIQAFRKAFIPGYSYLPTKSNRRMKAAAREIQVILRGIVNKRLRAREAGEAPSDDLLGILLESNLRQTEGNGMSTEDLMEECKLFYFAGQETTSVLLVWTMVLLSQHQDWQARAREEVKQVFGDKEPDAEGLNQLKVMTMILYEVLRLYPPVTQLTRAIHKELKLGDLTLPGGVQISLPILLVQHDIELWGNDAAEFNPDRFKDGLSKATKSQVSFFPFAWGPRICIGQNFALLEAKMAMALILRRFSFEISPSYVHAPYTVITIHPQFGAQLIMHKL

SEQ ID NO: 10829 - protein, 512 aa, Arabidopsis thaliana
MEISVASVTISVVLAVVSWWIWRTLQWVWFKPKMLEHYLRRQGLAGTPYTPLVGDLKKNFSMLSEARSKPLKLTDDISPRVVPYPLQMFKTYGRTYFTWFGPIPTITIMDPEQIKEVFNKVYDFQKPHTFPLATIIAKGLANYDGDKWAKHRRIINPAFHIEKIKNMVPAFHQSCREVVGEWDQLVSDKGSSCEVDVWPGLVSMTADVISRTAFGSSYKEGQRIFELQAELAQLIIQAFRKAFIPGYSYLPTKSNRRMKAAAREIQVILRGIVNKRLRAREAGEAPSDDLLGILLESNLRQTEGNGMSTEDLMEECKLFYFAGQETTSVLLVWTMVLLSQHQDWQARAREEVKQVFGDKEPDAEGLNQLKVMTMILYEVLRLYPPVTQLTRAIHKELKLGDLTLPGGVQISLPILLVQHDIELWGNDAAEFNPDRFKDGLSKATKSQVSFFPFAWGPRICIGQNFALLEAKMAMALILRRFSFEISPSYVHAPYTVITIHPQFGAQLIMHKL

SEQ ID NO: 10830 - protein, 479 aa, Arabidopsis thaliana
MLEHYLRRQGLAGTPYTPLVGDLKKNFSMLSEARSKPLKLTDDISPRVVPYPLQMFKTYGRTYFTWFGPIPTITIMDPEQIKEVFNKVYDFQKPHTFPLATIIAKGLANYDGDKWAKHRRIINPAFHIEKIKNMVPAFHQSCREVVGEWDQLVSDKGSSCEVDVWPGLVSMTADVISRTAFGSSYKEGQRIFELQAELAQLIIQAFRKAFIPGYSYLPTKSNRRMKAAAREIQVILRGIVNKRLRAREAGEAPSDDLLGILLESNLRQTEGNGMSTEDLMEECKLFYFAGQETTSVLLVWTMVLLSQHQDWQARAREEVKQVFGDKEPDAEGLNQLKVMTMILYEVLRLYPPVTQLTRAIHKELKLGDLTLPGGVQISLPILLVQHDIELWGNDAAEFNPDRFKDGLSKATKSQVSFFPFAWGPRICIGQNFALLEAKMAMALILRRFSFEISPSYVHAPYTVITIHPQFGAQLIMHKL

SEQ ID NO: 10831 - DNA, 1194 bp, Arabidopsis thaliana
atcttgttgttgttgtggtgatttaggtttgaggagatgtagcaaaagctgtagattgaggtggactaattatcttcgacctgggatcaagcgtggaaatttcaccgagcatgaagagaagatgattctccatcttcaagctcttttgggaaacaggtgggcagctatagcatcatatcttccagaaaggacagacaatgatataaagaactattggaacactcatttgaagaaaaagctcaagaagatgaatgattcttgtgatagtactatcaacaatggccttgataataaagacttctccatatcaaacaaaaacactacctcacatcaaagcagcaactccagtaaaggtcaatgggagagaaggcttcagacagatatcaacatggctaaacaagctctttgtgatgccttgtctattgacaaaccacaaaacccaactaatttttctattcccgatcttggttatggtccatcatcttcttcgtcctctaccaccaccaccaccaccaccaccaccacgagaaacactaatccatacccatctggggtctatgcttcaagtgctgagaacattgctcgtttgcttcagaattttatgaaagacacaccaaagacctcggtgcccttgccggttgcagccaccgagatggctatcaccacggcagcttcgagccctagcacaaccgaaggagacggagaagggattgaccattctttgttcagcttcaactccatagatgaagctgaagagaagcctaaactaatagaccatgacattaatggtctaattacacaaggctctctttctttgttcgagaaatggctctttgatgagcaaagccacgatatgatcatcaataacatgtcactagagggtcaggaagtgttgttctagaaagcattaaagtttgacgatttgcttgaggaaccacgaggcttagttataaacaatttgtataattaagtactctttagttttgttttcaatccttattatgatcatattgcagtaattagggattttagtctttagtagtaactcttaagttttaacacatttttctctatctttttagtagtaactctttattttttccttaaatctttgtcgacgtggagatgatatcttctatgtagtagaaactcaaaagtgtacatcatctttattaatgtaacgtctttttaagc

SEQ ID NO: 10832 - protein, 299 aa, Arabidopsis thaliana
SCCCCGDLGLRRCSKSCRLRWTNYLRPGIKRGNFTEHEEKMILHLQALLGNRWAAIASYLPERTDNDIKNYWNTHLKKKLKKMNDSCDSTINNGLDNKDFSISNKNTTSHQSSNSSKGQWERRLQTDINMAKQALCDALSIDKPQNPTNFSIPDLGYGPSSSSSSTTTTTTTTTTRNTNPYPSGVYASSAENIARLLQNFMKDTPKTSVPLPVAATEMAITTAASSPSTTEGDGEGIDHSLFSFNSIDEAEEKPKLIDHDINGLITQGSLSLFEKWLFDEQSHDMIINNMSLEGQEVLF

SEQ ID NO: 10833 - protein, 259 aa, Arabidopsis thaliana
MILHLQALLGNRWAAIASYLPERTDNDIKNYWNTHLKKKLKKMNDSCDSTINNGLDNKDFSISNKNTTSHQSSNSSKGQWERRLQTDINMAKQALCDALSIDKPQNPTNFSIPDLGYGPSSSSSSTTTTTTTTTTRNTNPYPSGVYASSAENIARLLQNFMKDTPKTSVPLPVAATEMAITTAASSPSTTEGDGEGIDHSLFSFNSIDEAEEKPKLIDHDINGLITQGSLSLFEKWLFDEQSHDMIINNMSLEGQEVLF

SEQ ID NO: 10834 - protein, 217 aa, Arabidopsis thaliana
MNDSCDSTINNGLDNKDFSISNKNTTSHQSSNSSKGQWERRLQTDINMAKQALCDALSIDKPQNPTNFSIPDLGYGPSSSSSSTTTTTTTTTTRNTNPYPSGVYASSAENIARLLQNFMKDTPKTSVPLPVAATEMAITTAASSPSTTEGDGEGIDHSLFSFNSIDEAEEKPKLIDHDINGLITQGSLSLFEKWLFDEQSHDMIINNMSLEGQEVLF

SEQ ID NO: 10835 - DNA, 1139 bp, Arabidopsis thaliana
acatctatcgccgccgctgagaccgccacttaaggccgtctcctccgcaatctccgtaaccaaaaccaccggcatcgcctgatggggagaactaaggagcaggcaacattaactcggtatccaccctgtcctaggaatcctgctaaattcaatgatataaacaaagcactccaggaaaaaggatatggtaaggctctgaaaagaaaaccttggacgggtgtgacatgccctgtctgtcttgaggttcctcacaactcggtcgtcctcctttgttcatcttaccacaaagaatgccgtccgtacatgtgtgccacgggaaaccgtttctcaaattgtctagagcagtacaaaaaggcatatgccaaggatgagaaaagtgacaaaccgccagagctattgtgcccgctttgtaggggtcaggtgaaaggctggaccgttgtggaaaaggaacgtaagtatctgaattctaagaaaaggtcatgcatgaatgacgagtgtttgttttatggaagctatagacagctcaagaagcatgttaaggagaaccatccgagagccaagccaagagccatagaccctgtgctggaggcgaaatggaagaagcttgaggttgagagggagaggagtgatgtaatcagcacagtcatgtcgtcaacacctggggctatagtatttggagactatgtgattgagccatacaatggttatgatcatcaagatgacagtgacgattacagtgattcgtcggatgacgaaatggaaggtggggtattcgagcttggagcattcgacctgggccgtcttcaaccgcgttcggctgccatctcaagccggggaattcgcggtatgatcataaggaaccggtgggctcgaagcagaggtgcgagcagaaggcgacaaacataagattgatgattggaagcttggaaggcagatgattttacaccgtctgaccaagttaacctccgaactctatatatcggcagaggggaaggcgagtgggaacaaaacagagggttgttgattaaagtttttagttagcggtttaggttttcaggtttggaatatttgagttgtttgttccctcgacctttgatttaaagtgttcaaacgtttcatttgctacttttatttgattg

SEQ ID NO: 10836 - protein, 274 aa, Arabidopsis thaliana
MGRTKEQATLTRYPPCPRNPAKFNDINKALQEKGYGKALKRKPWTGVTCPVCLEVPHNSVVLLCSSYHKECRPYMCATGNRFSNCLEQYKKAYAKDEKSDKPPELLCPLCRGQVKGWTVVEKERKYLNSKKRSCMNDECLFYGSYRQLKKHVKENHPRAKPRAIDPVLEAKWKKLEVERERSDVISTVMSSTPGAIVFGDYVIEPYNGYDHQDDSDDYSDSSDDEMEGGVFELGAFDLGRLQPRSAAISSRGIRGMIIRNRWARSRGASRRRQT

SEQ ID NO: 10837 - protein, 200 aa, Arabidopsis thaliana
MCATGNRFSNCLEQYKKAYAKDEKSDKPPELLCPLCRGQVKGWTVVEKERKYLNSKKRSCMNDECLFYGSYRQLKKHVKENHPRAKPRAIDPVLEAKWKKLEVERERSDVISTVMSSTPGAIVFGDYVIEPYNGYDHQDDSDDYSDSSDDEMEGGVFELGAFDLGRLQPRSAAISSRGIRGMIIRNRWARSRGASRRRQT

SEQ ID NO: 10838 - protein, 140 aa, Arabidopsis thaliana
MNDECLFYGSYRQLKKHVKENHPRAKPRAIDPVLEAKWKKLEVERERSDVISTVMSSTPGAIVFGDYVIEPYNGYDHQDDSDDYSDSSDDEMEGGVFELGAFDLGRLQPRSAAISSRGIRGMIIRNRWARSRGASRRRQT

SEQ ID NO: 10839 - DNA, 638 bp, Arabidopsis thaliana
ggtcacatttctttaactttaaaaactcttccgtttcgccgaagcttcttcaatggcgatttctctcgccaccgcctatatctctccatgttttacaccggaatcgtctagttccgcttcaccatcacgaactctttcctccgtacgattaccttctcagattcgccgattcggaagtgttcaatcgccgtcttcgtctactcgcttcgctccactcactgtaagagcagcaaagaagcaaactttcaactcttttgatgatttgttgcagaattctgataaacctgtacttgtagacttctatgctacttggtgtggtccatgtcagcttatggtacctatactcaatgaagtgagtgaaacactgaaagatataattgcagttgtgaaaattgatactgagaagtacccaagtcttgctaacaaataccagattgaggctttgcccacattcatcttattcaaagacggcaaactctgggaccgtttcgagggtgccttgccagcgaaccaactcgttgagcgtattgagaattctttgcaagtgaaacagtaggtttgagaaaccaagaaaacttgtcatctatgaacaatctgttgtgacataagccattgttgattgtttgctcggtataatc

SEQ ID NO: 10840 - protein, 167 aa, Arabidopsis thaliana
MAISLATAYISPCFTPESSSSASPSRTLSSVRLPSQIRRFGSVQSPSSSTRFAPLTVRAAKKQTFNSFDDLLQNSDKPVLVDFYATWCGPCQLMVPILNEVSETLKDIIAVVKIDTEKYPSLANKYQIEALPTFILFKDGKLWDRFEGALPANQLVERIENSLQVKQ

SEQ ID NO: 10841 - DNA, 686 bp, Arabidopsis thaliana
gatcttccaaaattctcaccacaaaacattatataatttcctcttcatatttgaagaaaacattcatattttttcttgtagaattctataattctcgtaagtaaatggcgagcgagggagtcgtagttgtcggaggggagagagaaggggctgagatcgtgtatggagcggaggaatgttacaagcaatccttggagcttctagaggagctagggtttccaaaaggagtcatgcctttgaagaatcttgttgagtgtggaagagttagagccacgggttacgtttggatgaagcaagacactcctttcgagcatttcttcgaagccaccaacactcgtgtctcctacggtctcgaagtcaccgcctatgtcgacaagtgttgtatgaagaagatgacaggagtgaagagtaagcagatgtttttgtgggtaccgatcgtggagatgagtatggaggagccaaaaagcaagaagatttacttcaagactcctatgggaatcggcaggtctttccccgttaccgcattcatggacgaggaagagaaacgcaacttttacttggagaatcccaaaaattaaaccaactaataattattcttatgattattacattttgtggtgctttttattttatttcttgtaaggtttctttatgctattaatttctatcaataatacatttctggg

SEQ ID NO: 10842 - protein, 157 aa, Arabidopsis thaliana
MASEGVVVVGGEREGAEIVYGAEECYKQSLELLEELGFPKGVMPLKNLVECGRVRATGYVWMKQDTPFEHFFEATNTRVSYGLEVTAYVDKCCMKKMTGVKSKQMFLWVPIVEMSMEEPKSKKIYFKTPMGIGRSFPVTAFMDEEEKRNFYLENPKN

SEQ ID NO: 10843 - protein, 115 aa, Arabidopsis thaliana
MPLKNLVECGRVRATGYVWMKQDTPFEHFFEATNTRVSYGLEVTAYVDKCCMKKMTGVKSKQMFLWVPIVEMSMEEPKSKKIYFKTPMGIGRSFPVTAFMDEEEKRNFYLENPKN

SEQ ID NO: 10844 - protein, 96 aa, Arabidopsis thaliana
MKQDTPFEHFFEATNTRVSYGLEVTAYVDKCCMKKMTGVKSKQMFLWVPIVEMSMEEPKSKKIYFKTPMGIGRSFPVTAFMDEEEKRNFYLENPKN

SEQ ID NO: 10845 - DNA, 1130 bp, Arabidopsis thaliana
gaaaccagttgagaagtaaaattttctattgcagagagaaagagagttagagaaagagagagagagatgaaacttgtgcaagaagaataccgtaaaggaccgtggacagaacaggaggacatcctcttggtcaactttgtccacttgttcggagatcgaagatgggattttgtagcgaaagtttcaggtttgaaggtggagggagaaacataagaataggtataggtttgttttggaaaaatgggcggtctttggaaaggaccttccatttaaagaaatgacctggttttggttgtaggtttaaacagaacaggaaagagttgcaggttaaggtgggttaattacctgcatcctggtctcaaacgtggtaagatgactccacaagaagagcgtttagtccttgagcttcacgccaaatggggaaacaggtggtcaaaaattgcccggaaattaccggggagaacagataatgagataaagaactactggaggactcatatgaggaagaaggctcaagagaagaagcgacctatgtctcctacttcctcatcttcaaactgttgctcatcatctatgaccactactactactcaagacactggaggctccaacgggaaaatgaatcaagaaggcgaagacgggtactactccatggatgacatatggagagagattgatcagtctggagcaaacgttattaagccggtaaaagacaactactactcagagcaaagttgttacttgaatttccctcctctgggttgtccaacatgggaaagttccttggagtctatatggaacatggatgcagatgaaagtaagatgtcttcttttgctattgatcagtttcctctaagttttgaacatggtagtggtcgcctttagtctaggatttgattcatttggaatgtttatatgtgcagcatatatatgttatcaaacgacgactgtagtagtttcctatgacttacatcaaaaaacaccacccactgtactaatctcataagtagtcatcatcctatgcctttgtttagtttgtagagtgagtgaaaagatgtgtaatacaagtcagaactctaattccaaaataaatagacttttgaagcttctgtgaaagtttgtaagaaacc

SEQ ID NO: 10846 - protein, 170 aa, Arabidopsis thaliana
MTPQEERLVLELHAKWGNRWSKIARKLPGRTDNEIKNYWRTHMRKKAQEKKRPMSPTSSSSNCCSSSMTTTTTQDTGGSNGKMNQEGEDGYYSMDDIWREIDQSGANVIKPVKDNYYSEQSCYLNFPPLGCPTWESSLESIWNMDADESKMSSFAIDQFPLSFEHGSGRL

SEQ ID NO: 10847 - protein, 128 aa, Arabidopsis thaliana
MRKKAQEKKRPMSPTSSSSNCCSSSMTTTTTQDTGGSNGKMNQEGEDGYYSMDDIWREIDQSGANVIKPVKDNYYSEQSCYLNFPPLGCPTWESSLESIWNMDADESKMSSFAIDQFPLSFEHGSGRL

SEQ ID NO: 10848 - protein, 117 aa, Arabidopsis thaliana
MSPTSSSSNCCSSSMTTTTTQDTGGSNGKMNQEGEDGYYSMDDIWREIDQSGANVIKPVKDNYYSEQSCYLNFPPLGCPTWESSLESIWNMDADESKMSSFAIDQFPLSFEHGSGRL

SEQ ID NO: 10849 - DNA, 1461 bp, Arabidopsis thaliana
gccgaccaaacaatgacgatcgttaaaccgtcgcagttctcattctccggcggcggatcttcgccgttatgttcactcaaaagctcactcctcaccgtcgctattctcactttcatttccctcttctacctctctctcaattccttacgcacttcgccgccgtctcctgtcatcgtggtaacaccgattcatgttcctcataccttcgtgaatgagtataagactgataacgaaacaccgacgatggaagaagaaacctactccgatgtttatcactcaccggaggctttccgattgaattacgccgagatggagaagagattcaaggtttatatttatcccgacggcgatccaaatacgttttatcaaacgccgaggaaagtcaccggtaaatacgctagtgaggggtacttcttccagaacattagagagagtcgatttcgaaccctagatccagatgaagcagatctcttcttcattccaatctcttgtcacaagatgcgaggcaaaggaacatcatatgaaaatatgactgtgattgttcaaaactatgttgatggattgatagctaagtatccttattggaatagaactttaggagcagatcacttctttgttacatgtcatgatgttggtgttagagcatttgagggatctccgcttctgattaagaatactattagggttgtgtgctcacctagctacaatgttggtttcattcctcacaaagatgttgctttgcctcaagttcttcagccatttgctctccctgctggtggaaatgatgttgagaatcggacgactcttggtttttgggctggtcatcgaaattctaagatacgggttatacttgctcatgtgtgggaaaacgacacagagcttgatatttcaaacaacagaattaacagagctacagggcatttggtgtatcagaagagattctaccggactaaattctgcatatgccctggtggttctcaagtaaacagcgctcgcataacggactcgatccattacggatgtattcctgtcatattatcagactactacgacctccctttcaacgacatcctgaattggcgaaaatttgcggttgtactcagagagcaagatgtctataaccttaagcagatcctcaagaacatacctcactcagagtttgtttcgttgcataacaacttggtcaaggtgcagaagcattttcaatggaactcacctccagtcaaattcgacgcatttcacatgatcatgtatgaactatggttacgccaccatgtcgtcaagtactgatccaagactttttttttttgttttttttccttcttcaaccgcgtagatacggtcccaagccaaaaaaaagctagcatgtacacctcttgtaagttttaaatatcatagcttatgacagtaacacggaacatcaacatttcattctttgaggaaaattcattatttttgtgt

SEQ ID NO: 10850 - protein, 429 aa, Arabidopsis thaliana
ADQTMTIVKPSQFSFSGGGSSPLCSLKSSLLTVAILTFISLFYLSLNSLRTSPPSPVIVVTPIHVPHTFVNEYKTDNETPTMEEETYSDVYHSPEAFRLNYAEMEKRFKVYIYPDGDPNTFYQTPRKVTGKYASEGYFFQNIRESRFRTLDPDEADLFFIPISCHKMRGKGTSYENMTVIVQNYVDGLIAKYPYWNRTLGADHFFVTCHDVGVRAFEGSPLLIKNTIRVVCSPSYNVGFIPHKDVALPQVLQPFALPAGGNDVENRTTLGFWAGHRNSKIRVILAHVWENDTELDISNNRINRATGHLVYQKRFYRTKFCICPGGSQVNSARITDSIHYGCIPVILSDYYDLPFNDILNWRKFAVVLREQDVYNLKQILKNIPHSEFVSLHNNLVKVQKHFQWNSPPVKFDAFHMIMYELWLRHHVVKY

SEQ ID NO: 10851 - protein, 425 aa, Arabidopsis thaliana
MTIVKPSQFSFSGGGSSPLCSLKSSLLTVAILTFISLFYLSLNSLRTSPPSPVIVVTPIHVPHTFVNEYKTDNETPTMEEETYSDVYHSPEAFRLNYAEMEKRFKVYIYPDGDPNTFYQTPRKVTGKYASEGYFFQNIRESRFRTLDPDEADLFFIPISCHKMRGKGTSYENMTVIVQNYVDGLIAKYPYWNRTLGADHFFVTCHDVGVRAFEGSPLLIKNTIRVVCSPSYNVGFIPHKDVALPQVLQPFALPAGGNDVENRTTLGFWAGHRNSKIRVILAHVWENDTELDISNNRINRATGHLVYQKRFYRTKFCICPGGSQVNSARITDSIHYGCIPVILSDYYDLPFNDILNWRKFAVVLREQDVYNLKQILKNIPHSEFVSLHNNLVKVQKHFQWNSPPVKFDAFHMIMYELWLRHHVVKY

SEQ ID NO: 10852 - protein, 348 aa, Arabidopsis thaliana
MEEETYSDVYHSPEAFRLNYAEMEKRFKVYIYPDGDPNTFYQTPRKVTGKYASEGYFFQNIRESRFRTLDPDEADLFFIPISCHKMRGKGTSYENMTVIVQNYVDGLIAKYPYWNRTLGADHFFVTCHDVGVRAFEGSPLLIKNTIRVVCSPSYNVGFIPHKDVALPQVLQPFALPAGGNDVENRTTLGFWAGHRNSKIRVILAHVWENDTELDISNNRINRATGHLVYQKRFYRTKFCICPGGSQVNSARITDSIHYGCIPVILSDYYDLPFNDILNWRKFAVVLREQDVYNLKQILKNIPHSEFVSLHNNLVKVQKHFQWNSPPVKFDAFHMIMYELWLRHHVVKY

SEQ ID NO: 10853 - DNA, 1290 bp, Arabidopsis thaliana
atgttaaacgttatgggaaccaaaagattaccgtttcccggttctgtttttgaccttatccattgtgctcgttgtagagtcccttggcatattgaaggtggtaaacttcttttggaattgaaccgtgctttgaggccgggtggtttctttgtctggtcagcgactccagtctatagaaagaacgaggaagattctggtatatggaaagcaatgtcggaactcacaaaggcaatgtgctggaagctggtgacaattaagaaagacaaactgaatgaggttggtgccgccatataccaaaagccaacttcaaataaatgttacaacaaaagacctcaaaatgagccacctctctgcaaggattccgatgatcaaaatgcagcctggaatgttccacttgaggcatgtatgcataaagtgacagaagattcatcaaagcgaggagcagtgtggccaaacatgtggccagagagggttgaaactgcgcctgagtggttggattcgcaggaaggtgtttatggaaaacctgcaccagaagatttcacagcagaccaagagaagtggaaaactattgtctcaaaggcataccttaatgacatgggaatcgattggtctaatgtgagaaacgtgatggacatgagagcagtctatggaggatttgctgctgcgttgaaggatttgaagttatgggtgatgaacgtggttcctgtggatgcgccagatacacttcccatcatatatgaacgtggtttatttggaatctatcatgactggtgtgaatcattcaacacttatcccagaacttacgaccttctccatgccgatcatcttttctctaccctgaggaagaggtgcaatttggtgtcggtaatggctgagattgatcggattcttaggccacaaggaactttcatcataagggatgacatggaaacattaggagaagttgagaaaatggtgaaatctatgaaatggaaggttaaaatgacgcagtccaaagacaatgaaggcttgctttcaattgaaaagtcatggtggcgtcctgaagaaactgagacaatcaaatcggcaatcgcttaaacaagtcagaaaagaaaagaaaagcatcacttgaatatagttcagtaaaaaagttggttctttcacgcctttaaggcttgcttatcaaattcatttgaccttgtttcttagtagtatttgtatcttttggctttgagaaaagttgtatacataaattctggaatcataccgttagctctcaaaatgtatacaagatgagttttgttttgttct

SEQ ID NO: 10854 - protein, 358 aa, Arabidopsis thaliana
MLNVMGTKRLPFPGSVFDLIHCARCRVPWHIEGGKLLLELNRALRPGGFFVWSATPVYRKNEEDSGIWKAMSELTKAMCWKLVTIKKDKLNEVGAAIYQKPTSNKCYNKRPQNEPPLCKDSDDQNAAWNVPLEACMHKVTEDSSKRGAVWPNMWPERVETAPEWLDSQEGVYGKPAPEDFTADQEKWKTIVSKAYLNDMGIDWSNVRNVMDMRAVYGGFAAALKDLKLWVMNVVPVDAPDTLPIIYERGLFGIYHDWCESFNTYPRTYDLLHADHLFSTLRKRCNLVSVMAEIDRILRPQGTFIIRDDMETLGEVEKMVKSMKWKVKMTQSKDNEGLLSIEKSWWRPEETETIKSAIA

SEQ ID NO: 10855 - protein, 354 aa, Arabidopsis thaliana
MGTKRLPFPGSVFDLIHCARCRVPWHIEGGKLLLELNRALRPGGFFVWSATPVYRKNEEDSGIWKAMSELTKAMCWKLVTIKKDKLNEVGAAIYQKPTSNKCYNKRPQNEPPLCKDSDDQNAAWNVPLEACMHKVTEDSSKRGAVWPNMWPERVETAPEWLDSQEGVYGKPAPEDFTADQEKWKTIVSKAYLNDMGIDWSNVRNVMDMRAVYGGFAAALKDLKLWVMNVVPVDAPDTLPIIYERGLFGIYHDWCESFNTYPRTYDLLHADHLFSTLRKRCNLVSVMAEIDRILRPQGTFIIRDDMETLGEVEKMVKSMKWKVKMTQSKDNEGLLSIEKSWWRPEETETIKSAIA

SEQ ID NO: 10856 - protein, 288 aa, Arabidopsis thaliana
MSELTKAMCWKLVTIKKDKLNEVGAAIYQKPTSNKCYNKRPQNEPPLCKDSDDQNAAWNVPLEACMHKVTEDSSKRGAVWPNMWPERVETAPEWLDSQEGVYGKPAPEDFTADQEKWKTIVSKAYLNDMGIDWSNVRNVMDMRAVYGGFAAALKDLKLWVMNVVPVDAPDTLPIIYERGLFGIYHDWCESFNTYPRTYDLLHADHLFSTLRKRCNLVSVMAEIDRILRPQGTFIIRDDMETLGEVEKMVKSMKWKVKMTQSKDNEGLLSIEKSWWRPEETETIKSAIA

SEQ ID NO: 10857 - DNA, 1435 bp, Arabidopsis thaliana
gaatctcaaatttcacaaaaaccctctcagattttttctacaagctgatcaaaacccagaatccagttttcataaaaacctcatctttcttttattcttctttacacgctctgtttttcatcaatggcatcaaggaagcttttttttgtcaaacctaaatatatctatccagaaccaaaaccagagatgtccgatgagaatgtctttgaattcgacgaatctgatattcataacttaggcgatcatcaattgccgaattcattcgacgcgaaaagatcgatatcaatctctcggttacggagaaaaccgacgaaaaccggagattcaggtaaccgggagattacaaagaccggttcgcttccggttaatatccccgattggtctaagatcttgaagagtgagtatagaggtcatgcgatacctgacgatgacagtgacgacgatgacgaggatgatgacgatagcaacgacggtgggagacggatgattccgccgcacgagtatttggcaagacggagaggatcgtcgttcacggtgcacgaaggaatcggtgggacggcgaaaggaagagatctaaggcgattgaggaacgcgatttgggagaagattgggtttcaggattagtaatataataagtatgtaattaattataactctctataggtaaacttttaattacttagagatcttaagtaaggacttgagagcgtcagtgagagagacctccttagtcccccccccccccgctacttctctccgcctctctcgcatctcctccaaatcgaaatcgctctctgcctctcttcgtctccgtctccgtctccgtctccatctctgtctccggtaagtaactgaaagatggggcgtgttagaaccaagaccgtgaagaaatcttctcgtcaagtcattgagaagtactactctcgcatgactcttgactttcacactaacaagaagatccttgaagaggttgccatcatcccatcaaagagactccgcaacaagattgctggattctccacccacttgatgaaacgtatccagaagggaccagtccgtggaatctcactcaagcttcaagaagaagagcgtgaacgccgtatggactttgttcccgatgagtctgctatcaagactgatgagatcaaggtcgacaaagagactcttgagatgcttgcttctctaggaatgtctgacacatccggcatctctgcagtcgagccacaacaagctatggcaccaatcgctgctttcggcggcagggcacccagaagatactaagatggcctcagctaatcatcagctacgattggctctcttttttctcagttagggacaagaaagacttgtgtggttgtttattgtttcttctgattatgtcttaaactcaatgtgagactctttcgtattaatggtttttaagttatgtggaacc

SEQ ID NO: 10858 - protein, 166 aa, Arabidopsis thaliana
MASRKLFFVKPKYIYPEPKPEMSDENVFEFDESDIHNLGDHQLPNSFDAKRSISISRLRRKPTKTGDSGNREITKTGSLPVNIPDWSKILKSEYRGHAIPDDDSDDDDEDDDDSNDGGRRMIPPHEYLARRRGSSFTVHEGIGGTAKGRDLRRLRNAIWEKIGFQD

SEQ ID NO: 10859 - protein, 145 aa, Arabidopsis thaliana
MSDENVFEFDESDIHNLGDHQLPNSFDAKRSISISRLRRKPTKTGDSGNREITKTGSLPVNIPDWSKILKSEYRGHAIPDDDSDDDDEDDDDSNDGGRRMIPPHEYLARRRGSSFTVHEGIGGTAKGRDLRRLRNAIWEKIGFQD

SEQ ID NO: 10860 - protein, 140 aa, Arabidopsis thaliana
MGRVRTKTVKKSSRQVIEKYYSRMTLDFHTNKKILEEVAIIPSKRLRNKIAGFSTHLMKRIQKGPVRGISLKLQEEERERRMDFVPDESAIKTDEIKVDKETLEMLASLGMSDTSGISAVEPQQAMAPIAAFGGRAPRRY

SEQ ID NO: 10861 - DNA, 881 bp, Arabidopsis thaliana
gacgattttcaattaactctcttcttttttttttttttggtttttcatttaagtctattcaatcatggaaaccggtttaaacatcttaaagctatcgctatgcgtcagcctagtcgtggttggatcatatgctcaggctcccgcaccatggaatccatctaatgggtttcgtccggggacatgtgaccactacgagtgtcccacctataaattggtagaggccggatacggctttgagatccgcatgtacgacgctgccctatggatatctactagtcctatcccctccctatccatgactcaagccaccaaaaccggtttccgacgattaaataggtacatagaaggagataacaagagcaacgtgaagatgaacatgacagctccggtgatcgcacaagcaacgcctggaagatcagtctacacggtctcactctacctcccgaagaagaaccaacagaacccacctcaggccgatgatctccacgtgcggtctacgaaaccaacctacgtagccgtgagacagatcggtggctacgtgtcgaacaatgtagccaaggaagaagctgcggctctgatggaaagcctccgggattctaactggattttgcccatcgagaagagcaaaggaaagtcgccggcgtatttactcgctgtttataacccgccgtctcataccacggctagggtgattaatgagatcatggttccgtttaacatgtaatgatcatgttaatgacgccctcacgatttgattgttacgtagcaattggattagaagaggtggtttagaaccgatactgtaacagcagcttgcagcttctggtttaaccggtataaattgtatctctggttaagtggtgattaatattgttatttgt

SEQ ID NO: 10862 - protein, 219 aa, Arabidopsis thaliana
METGLNILKLSLCVSLVVVGSYAQAPAPWNPSNGFRPGTCDHYECPTYKLVEAGYGFEIRMYDAALWISTSPIPSLSMTQATKTGFRRLNRYIEGDNKSNVKMNMTAPVIAQATPGRSVYTVSLYLPKKNQQNPPQADDLHVRSTKPTYVAVRQIGGYVSNNVAKEEAAALMESLRDSNWILPIEKSKGKSPAYLLAVYNPPSHTTARVINEIMVPFNM

SEQ ID NO: 10863 - protein, 159 aa, Arabidopsis thaliana
MYDAALWISTSPIPSLSMTQATKTGFRRLNRYIEGDNKSNVKMNMTAPVIAQATPGRSVYTVSLYLPKKNQQNPPQADDLHVRSTKPTYVAVRQIGGYVSNNVAKEEAAALMESLRDSNWILPIEKSKGKSPAYLLAVYNPPSHTTARVINEIMVPFNM

SEQ ID NO: 10864 - protein, 142 aa, Arabidopsis thaliana
MTQATKTGFRRLNRYIEGDNKSNVKMNMTAPVIAQATPGRSVYTVSLYLPKKNQQNPPQADDLHVRSTKPTYVAVRQIGGYVSNNVAKEEAAALMESLRDSNWILPIEKSKGKSPAYLLAVYNPPSHTTARVINEIMVPFNM

SEQ ID NO: 10865 - DNA, 438 bp, Arabidopsis thaliana
tttgtttgtatgttaaaaaaaaaaaaaaaaaaaaaaaagaagtagaacgcgtccgggttgaatacgaggaaggaacatcggctatagctaaccggattaaggaatgtcggtcttatccattgtatcggtttgtccgcgatgagctaaatactgaactgcttactggagagaatgttcggtcgccaggagaggagtttgataaagtgttcttagcgatttctgatggaaaacttattgatccgttgttggaatgtctcaaggagtggaacggagctccggtttcaatctgttgaaaatctttttcgatagatctacatccaagattcttaccaactttttaatctactttacatgatttgtgttttatatatttcttgatttccacgaaaatgaacattgtcaagatctgaaaacctataagttgtttgtttgtatgtt

SEQ ID NO: 10866 - protein, 96 aa, Arabidopsis thaliana
CLYVKKKKKKKKEVERVRVEYEEGTSAIANRIKECRSYPLYRFVRDELNTELLTGENVRSPGEEFDKVFLAISDGKLIDPLLECLKEWNGAPVSIC

SEQ ID NO: 10867 - DNA, 1895 bp, Arabidopsis thaliana
ggagactcgtttcatcttttttactcggcgagcttgtgaagaagaaactggtgatttcatctccttcgatcactcccaagattcgcattacctttcttataatcgccgagattgttcgagcctgaataatcaaaatggttgtgcttgctgctgccattgtggtcaagtctgggaaagtgattgtttccagacactatgtggatatgtcccgtatcagaatcgaaggtctacttgcagcttttcctaagctggttggaatgggaaagcagcatacctatatcgagacggagaatgtgcgatatgtttatcagcctattgaagctctcttcctgcttcttgttacaactaagcagagtaacattctagaagacctggccacccttactttgctctccaaacttgtacctgagtattccatgtctttagatgaagaagggatttccagggcatcttttgagctcatatttgcatttgatgaagtcatatctcttgggcacaaggaaagtgtgacagttgcccaggtgaagcagtattgtgaaatggaaagtcatgaggagaagttgcataaactggttatgcagagcaagatcaatgacactaaggacgtgatgaagcgtaaggctaatgagattgacaaaagcaagattgaaaagaataagccaggaggattttcgtccatgggttcaatgggatctggaagacttgaaagtggtttcaatgaattgagcatatccagtggtggcggcggtggttatggaagtggttctgggtttggcatgatttcagatgtcgaccctatcaataccaaaccaaaagatcgatcacggtcttctgttactgctcctcctaagagttctggcatgaaacttggcaagtcgggaaagaaccagttaatggagtcccttaaagcagaaggtgaagaggtcattgaagatgttaagcctactggccaatccaaagcagctgccccacctccaactgatcctttcacattaactgttgaagagaagctcaatgttgcattgcgacgagatggtggacttagtagctttgatatgcagggaaccctgtcacttcaaattcttaaccaagaagatggatttgtccaagtccagattgcaaccggtgaaaatcccgaaattcttttcaagacccatcccaacatcaaccgagatatgttcaataatgagaatattctagggctgaagagacctgatcagccatttcccactggtcaaggtggagatggtgttggtcttctcaggtggagaatgcaaagagcagacgagtctatggtgccactaacaataaactgctggccttcagtctctggaaacgagacatatgtcagcctcgagtacgaagcctcgtccatgtttgatctgactaatgtcatcatctccgtaccacttcctgctctgagagaggcaacaagcgttagacaatgcgatggggagtggaggtacgacccaagaaattctgttctggaatggtctatactacttattgacaactccaaccgcagtgggtcaatggagtttgttgtgcctccagtggattcatcggtgttcttccccatctctgttcagtttgcagcgacaagtacctacagtggcttgaaggtgactggaatgattcctctgagaggaggtggtggtgcgactcctaggtttgtgcagaggacgcagctgattgcccagaactatcaagtcatatgaaacactcctttgggggcatcggttgtttttaatttcttctatactatctggtgttggatttcgctcttttttttggatgccaaaagtacaatcttaattttctcggattttgctaggatatttctttctcaacttaattctaagacattatacatattcatatcttctttttttacc

SEQ ID NO: 10868 - protein, 527 aa, Arabidopsis thaliana
MVVLAAAIVVKSGKVIVSRHYVDMSRIRIEGLLAAFPKLVGMGKQHTYIETENVRYVYQPIEALFLLLVTTKQSNILEDLATLTLLSKLVPEYSMSLDEEGISRASFELIFAFDEVISLGHKESVTVAQVKQYCEMESHEEKLHKLVMQSKINDTKDVMKRKANEIDKSKIEKNKPGGFSSMGSMGSGRLESGFNELSISSGGGGGYGSGSGFGMISDVDPINTKPKDRSRSSVTAPPKSSGMKLGKSGKNQLMESLKAEGEEVIEDVKPTGQSKAAAPPPTDPFTLTVEEKLNVALRRDGGLSSFDMQGTLSLQILNQEDGFVQVQIATGENPEILFKTHPNINRDMFNNENILGLKRPDQPFPTGQGGDGVGLLRWRMQRADESMVPLTINCWPSVSGNETYVSLEYEASSMFDLTNVIISVPLPALREATSVRQCDGEWRYDPRNSVLEWSILLIDNSNRSGSMEFVVPPVDSSVFFPISVQFAATSTYSGLKVTGMIPLRGGGGATPRFVQRTQLIAQNYQVI

SEQ ID NO: 10869 - protein, 504 aa, Arabidopsis thaliana
MSRIRIEGLLAAFPKLVGMGKQHTYIETENVRYVYQPIEALFLLLVTTKQSNILEDLATLTLLSKLVPEYSMSLDEEGISRASFELIFAFDEVISLGHKESVTVAQVKQYCEMESHEEKLHKLVMQSKINDTKDVMKRKANEIDKSKIEKNKPGGFSSMGSMGSGRLESGFNELSISSGGGGGYGSGSGFGMISDVDPINTKPKDRSRSSVTAPPKSSGMKLGKSGKNQLMESLKAEGEEVIEDVKPTGQSKAAAPPPTDPFTLTVEEKLNVALRRDGGLSSFDMQGTLSLQILNQEDGFVQVQIATGENPEILFKTHPNINRDMFNNENILGLKRPDQPFPTGQGGDGVGLLRWRMQRADESMVPLTINCWPSVSGNETYVSLEYEASSMFDLTNVIISVPLPALREATSVRQCDGEWRYDPRNSVLEWSILLIDNSNRSGSMEFVVPPVDSSVFFPISVQFAATSTYSGLKVTGMIPLRGGGGATPRFVQRTQLIAQNYQVI

SEQ ID NO: 10870 - protein, 486 aa, Arabidopsis thaliana
MGKQHTYIETENVRYVYQPIEALFLLLVTTKQSNILEDLATLTLLSKLVPEYSMSLDEEGISRASFELIFAFDEVISLGHKESVTVAQVKQYCEMESHEEKLHKLVMQSKINDTKDVMKRKANEIDKSKIEKNKPGGFSSMGSMGSGRLESGFNELSISSGGGGGYGSGSGFGMISDVDPINTKPKDRSRSSVTAPPKSSGMKLGKSGKNQLMESLKAEGEEVIEDVKPTGQSKAAAPPPTDPFTLTVEEKLNVALRRDGGLSSFDMQGTLSLQILNQEDGFVQVQIATGENPEILFKTHPNINRDMFNNENILGLKRPDQPFPTGQGGDGVGLLRWRMQRADESMVPLTINCWPSVSGNETYVSLEYEASSMFDLTNVIISVPLPALREATSVRQCDGEWRYDPRNSVLEWSILLIDNSNRSGSMEFVVPPVDSSVFFPISVQFAATSTYSGLKVTGMIPLRGGGGATPRFVQRTQLIAQNYQVI

SEQ ID NO: 10871 - DNA, 1290 bp, Arabidopsis thaliana
cccccccgaaatccccaaatcaattattttcctttgatacaacaggcatagaactcaacgacgccgttttcattcccagtctccttctttcaccattgaagcgtccaaaactgtaacaaaacaatgaagacgacgactcggcttctcgatctaacagcggctatggttcttgttgtctacgtgtctttctctcctccgctcgtttccggcgacccagggcggcgtgttagcatgacactggttcgagacgccactgctctcggtgctttttgcttggacgggagcttaccggcgtatcatttagacagaggctttggtgctggatcaaacaattggcttttgcagtttgagggaggaggatggtgcaatgatatagcatcatgtgtggaaagagccaagacccgtcgaggctcgacacgttatatgagcaagaccgtcgtcttcactggagtcttgagcaataacgcctctcaaaatccagatttttacaactggaacaaagtcaggctaaggtattgcgacggagcttcatttgcgggagattcacaatttggcaacgggacgtcattgctttatttcagaggacaacgaatatggaatgccattattcttgaccttctccccaaaggtttagcaaaagcccacaaggctcttctaaccggttgttcagctggtggtttgtctacatttttgcattgtgacaatttcacgagctatttacccacaaatgcaagtgttaagtgcatgagcgacgctggtttctttcttgacgcaatcgatgtagcagcaaaccggacaatgagatctttttactcacagcttgtgtctctacagggtatacaaaaaaacctcgatccaagttgcacacacgcattttttcccgaaccatctctgtgctttttcccgcaatacgtattgcgatttattaaaacgccatttttcatcttaaattcagcctacgatgtatttcagttccatcatggactggttccaccttctgctgatcaaaccggacgttggaaccgttgtaagcttaatgtgacggcatgtaatccacaccaactcgatgcactacaagggtttaggaaagatatgttgggagctttaatgaatttcttcagaaattctacgagaggaggaatgtttataaactcatgctttgatcattgtcaaagtgctttagaggagacttggctctctcccacatcaccaagaatcaacaataagacaattgctgagacggtcggagattggtattttgggagaggagaagagccagagagaactagt

SEQ ID NO: 10872 - protein, 389 aa, Arabidopsis thaliana
MKTTTRLLDLTAAMVLVVYVSFSPPLVSGDPGRRVSMTLVRDATALGAFCLDGSLPAYHLDRGFGAGSNNWLLQFEGGGWCNDIASCVERAKTRRGSTRYMSKTVVFTGVLSNNASQNPDFYNWNKVRLRYCDGASFAGDSQFGNGTSLLYFRGQRIWNAIILDLLPKGLAKAHKALLTGCSAGGLSTFLHCDNFTSYLPTNASVKCMSDAGFFLDAIDVAANRTMRSFYSQLVSLQGIQKNLDPSCTHAFFPEPSLCFFPQYVLRFIKTPFFILNSAYDVFQFHHGLVPPSADQTGRWNRCKLNVTACNPHQLDALQGFRKDMLGALMNFFRNSTRGGMFINSCFDHCQSALEETWLSPTSPRINNKTIAETVGDWYFGRGEEPERTS

SEQ ID NO: 10873 - protein, 376 aa, Arabidopsis thaliana
MVLVVYVSFSPPLVSGDPGRRVSMTLVRDATALGAFCLDGSLPAYHLDRGFGAGSNNWLLQFEGGGWCNDIASCVERAKTRRGSTRYMSKTVVFTGVLSNNASQNPDFYNWNKVRLRYCDGASFAGDSQFGNGTSLLYFRGQRIWNAIILDLLPKGLAKAHKALLTGCSAGGLSTFLHCDNFTSYLPTNASVKCMSDAGFFLDAIDVAANRTMRSFYSQLVSLQGIQKNLDPSCTHAFFPEPSLCFFPQYVLRFIKTPFFILNSAYDVFQFHHGLVPPSADQTGRWNRCKLNVTACNPHQLDALQGFRKDMLGALMNFFRNSTRGGMFINSCFDHCQSALEETWLSPTSPRINNKTIAETVGDWYFGRGEEPERTS

SEQ ID NO: 10874 - protein, 353 aa, Arabidopsis thaliana
MTLVRDATALGAFCLDGSLPAYHLDRGFGAGSNNWLLQFEGGGWCNDIASCVERAKTRRGSTRYMSKTVVFTGVLSNNASQNPDFYNWNKVRLRYCDGASFAGDSQFGNGTSLLYFRGQRIWNAIILDLLPKGLAKAHKALLTGCSAGGLSTFLHCDNFTSYLPTNASVKCMSDAGFFLDAIDVAANRTMRSFYSQLVSLQGIQKNLDPSCTHAFFPEPSLCFFPQYVLRFIKTPFFILNSAYDVFQFHHGLVPPSADQTGRWNRCKLNVTACNPHQLDALQGFRKDMLGALMNFFRNSTRGGMFINSCFDHCQSALEETWLSPTSPRINNKTIAETVGDWYFGRGEEPERTS

SEQ ID NO: 10875 - DNA, 1196 bp, Arabidopsis thaliana
ggtggataagcttctcactttcagttcaattggatagccggaaaggctctcctccaagtggcgtttatatggaggtgacaaatacgagcagcatcatgtggttcttcagggacaaaggtttcgatgatccgagtatcgacaagatgttgagaaaatgcaaacagttggaaaaggctcaaagcgatgtggcatcagaaaactgggactacctgagtaacattgttggtatccaagagagaaaactcccttacatcgtctcccgatgccccaaaatcctgactttacgcctcgatgagagactcatccccatggtcgagtgcctctccagtcttggaaggaatcctcgtgaagttgcttccgccattaccaaatttcctccaatactctctcatagcgtggaggagaaactctgtccccttcttgctttctttcaagcgttgggtgtgcctgagactcaacttggcaaaatgatactttttaacccaaggcttatcagctacagcatcgacaccaagctgacagtgatcgtcagctttcttgctagcttggccttgatcaagatgggatgattggcaaagttctggtgaagaacccatttcttatggggtacagtgttgataaaaggttacggcctaccactgaattcttgaaatcatccgttggcctgagtgaggatggcattaagtcggtggtcatgaatttcccacaacttttgtgcagagacgttaacaagattctcaaaccaaattatgattatttgaaggagtgtgggtttggagattcccagatagcaaccatggtcactggttatccccaaatcttgattaagagtgttaagaattcactacagcctaggatcagattcctcgtccaggtgatgggaagaggcatggatgaagtggcttcttatcctgaattctttcaccatggattgaagaagaaggtcgaatcgaggtttaaacttgtcaaaaagaacaacattgactgcagccttagagaaatgctggactgtaacacaaagaaattccatgagaagtttggcttttcggaggtaactgcaagctcctagcttttatatctctctctagttttttccttcatcaggctctctctgtaagctgttttcagcttgtgcaccaatttctagcacgagctttaccttgagtgattgtgatatcaatagagtgttttcttcc

SEQ ID NO: 10876 - protein, 188 aa, Arabidopsis thaliana
WISFSLSVQLDSRKGSPPSGVYMEVTNTSSIMWFFRDKGFDDPSIDKMLRKCKQLEKAQSDVASENWDYLSNIVGIQERKLPYIVSRCPKILTLRLDERLIPMVECLSSLGRNPREVASAITKFPPILSHSVEEKLCPLLAFFQALGVPETQLGKMILFNPRLISYSIDTKLTVIVSFLASLALIKMG

SEQ ID NO: 10877 - protein, 167 aa, Arabidopsis thaliana
MIGKVLVKNPFLMGYSVDKRLRPTTEFLKSSVGLSEDGIKSVVMNFPQLLCRDVNKILKPNYDYLKECGFGDSQIATMVTGYPQILIKSVKNSLQPRIRFLVQVMGRGMDEVASYPEFFHHGLKKKVESRFKLVKKNNIDCSLREMLDCNTKKFHEKFGFSEVTASS

SEQ ID NO: 10878 - protein, 166 aa, Arabidopsis thaliana
MEVTNTSSIMWFFRDKGFDDPSIDKMLRKCKQLEKAQSDVASENWDYLSNIVGIQERKLPYIVSRCPKILTLRLDERLIPMVECLSSLGRNPREVASAITKFPPILSHSVEEKLCPLLAFFQALGVPETQLGKMILFNPRLISYSIDTKLTVIVSFLASLALIKMG

SEQ ID NO: 10879 - DNA, 1451 bp, Arabidopsis thaliana
gaaattcgtttaccagtcatcaccaccacaacctccggcgaaaatggacgtgcgtgaatcaatctcactgcaaaaccaagtctccatgaatctcgcaaaacacgtaatcaccaccgtctctcaaaactccaacgtcatcttctcaccggcttcaatcaacgtcgtactcagtataatcgccgctggatccgccggcgctaccaaagatcagatcctctcgtttctcaaattctcttccactgatcaacttaattcattctcttccgaaatcgtctccgctgttctcgctgacggtagtgctaacggtggtcctaagctctcggtggctaatggcgcctggatcgataagtctctctcctttaaaccttcctttaaacagctcttggaagattcgtataaagctgcttcgaatcaagctgattttcaatcgaaggctgtggaggtgattgctgaagtgaattcatgggctgaaaaggagacaaatggtctcatcactgaggttcttccagaaggatcagctgatagtatgaccaaactgatatttgcaaatgcattgtacttcaagggaacatggaacgagaaattcgatgagtcgttaacacaagaaggcgagtttcaccttcttgacggtaacaaagtgactgcaccattcatgaccagcaagaagaaacaatacgtaagtgcttacgatggtttcaaagttttgggacttccttacgtacaaggacaggataagcgacaattctccatgtacttttatcttcccgatgcaaacaacggactgtctgatcttctggacaaaatagtttccactcctgggttcttagacaaccacatcccacgcagacaagttaaagtccgcgaattcaagattccaaagtttaaattctctttcgggttcgatgcttcaaatgttttaaaaggattgggactgacttcgcctttcagcggtgaagaaggtttaactgagatggttgaatctcctgagatggggaagaatctatgcgtatcgaacattttccataaagcgtgtatcgaagtgaatgaagaaggaacagaagctgcagctgcatcagctggagttataaagctaagaggattgcttatggaggaagatgaaatagattttgttgcagaccatccgtttctattggtggtcacagagaacataacaggagtggttctgttcattggccaagttgttgatccgttgcattaatctaaagctaatgtggaagtttttggttttacttaaaataaatgagtcattggttttgaggactcatctttatgtaacatcctttgtcttgactctttgatgtgtgtaagaataatagtgatacataacagcttttcttctgtatttgggtcacatgtactgaactgatagacatacatacatgtgatgcatcttaatgattcactgtattgggtcattcatggttacatac

SEQ ID NO: 10880 - protein, 405 aa, Arabidopsis thaliana
KFVYQSSPPQPPAKMDVRESISLQNQVSMNLAKHVITTVSQNSNVIFSPASINVVLSIIAAGSAGATKDQILSFLKFSSTDQLNSFSSEIVSAVLADGSANGGPKLSVANGAWIDKSLSFKPSFKQLLEDSYKAASNQADFQSKAVEVIAEVNSWAEKETNGLITEVLPEGSADSMTKLIFANALYFKGTWNEKFDESLTQEGEFHLLDGNKVTAPFMTSKKKQYVSAYDGFKVLGLPYVQGQDKRQFSMYFYLPDANNGLSDLLDKIVSTPGFLDNHIPRRQVKVREFKIPKFKFSFGFDASNVLKGLGLTSPFSGEEGLTEMVESPEMGKNLCVSNIFHKACIEVNEEGTEAAAASAGVIKLRGLLMEEDEIDFVADHPFLLVVTENITGVVLFIGQVVDPLH

SEQ ID NO: 10881 - protein, 391 aa, Arabidopsis thaliana
MDVRESISLQNQVSMNLAKHVITTVSQNSNVIFSPASINVVLSIIAAGSAGATKDQILSFLKFSSTDQLNSFSSEIVSAVLADGSANGGPKLSVANGAWIDKSLSFKPSFKQLLEDSYKAASNQADFQSKAVEVIAEVNSWAEKETNGLITEVLPEGSADSMTKLIFANALYFKGTWNEKFDESLTQEGEFHLLDGNKVTAPFMTSKKKQYVSAYDGFKVLGLPYVQGQDKRQFSMYFYLPDANNGLSDLLDKIVSTPGFLDNHIPRRQVKVREFKIPKFKFSFGFDASNVLKGLGLTSPFSGEEGLTEMVESPEMGKNLCVSNIFHKACIEVNEEGTEAAAASAGVIKLRGLLMEEDEIDFVADHPFLLVVTENITGVVLFIGQVVDPLH

SEQ ID NO: 10882 - protein, 377 aa, Arabidopsis thaliana
MNLAKHVITTVSQNSNVIFSPASINVVLSIIAAGSAGATKDQILSFLKFSSTDQLNSFSSEIVSAVLADGSANGGPKLSVANGAWIDKSLSFKPSFKQLLEDSYKAASNQADFQSKAVEVIAEVNSWAEKETNGLITEVLPEGSADSMTKLIFANALYFKGTWNEKFDESLTQEGEFHLLDGNKVTAPFMTSKKKQYVSAYDGFKVLGLPYVQGQDKRQFSMYFYLPDANNGLSDLLDKIVSTPGFLDNHIPRRQVKVREFKIPKFKFSFGFDASNVLKGLGLTSPFSGEEGLTEMVESPEMGKNLCVSNIFHKACIEVNEEGTEAAAASAGVIKLRGLLMEEDEIDFVADHPFLLVVTENITGVVLFIGQVVDPLH

SEQ ID NO: 10883 - DNA, 1074 bp, Arabidopsis thaliana
atctctaaccaccgacctcataagtcataagacaaaaacagagacactcctctcactctcattatttcattttctttccataaaaagcacgaatcttcaagaacaaagagagagggagagagaaaatttaatggcgttagcgaataacttaacggcgatactcaacttactagcgttactctgttccataccaataacggcgtcaggtatatggctagcttcaaagccagacaacgagtgtgtcaatctcctccgttggcccgttgtcgtcctcggcgttctcatcctcgtcgtctccgccacaggcttcatcggcgcctacaagtacaaggaaactctactggcggtttacttgtgctgtatggcgatattgatcggacttttgctggtggttttgatatttgctttcgttgtgacccgacccgacggatcgtatcgggttccgggtagaggttataaagaatataagcttgaagggttttcgaattggcttaaggagaacgttgttgattcgaagaactggggaaggctaagggcttgtttggctgatactaatgtttgtcctaaactcaaccaagaattcatcaccgccgatcagttcttctcctcctctaagatcactcctctccagtccggctgctgcaaaccaccgaccgcatgtggctacaactttgtgaacccaacactgtggctaaatccgacgaatatggctgcagacgcagactgttacttatggagcaatgaccaaagccagctttgttacaattgcaactcatgcaaagctggtttattgggaaaccttagaaaagaatggcgtaaagcaaatctcatacttatcatcacagtcgttgttctcatatgggtttatgttattgcttgtagcgcgtttaggaatgctcagactgaggatctcttccgcaaatacaaacaaggttgggtctaaaatgtgtgtttgtgtctataaatttgtttgtagtttgttgagattggagttttcggaaatagctcgtcatattatgatttctttgtgtgtggaaaaggtttttttctttttatggattttgtttctatgtt

SEQ ID NO: 10884 - protein, 313 aa, Arabidopsis thaliana
SLTTDLISHKTKTETLLSLSLFHFLSIKSTNLQEQRERERENLMALANNLTAILNLLALLCSIPITASGIWLASKPDNECVNLLRWPVVVLGVLILVVSATGFIGAYKYKETLLAVYLCCMAILIGLLLVVLIFAFVVTRPDGSYRVPGRGYKEYKLEGFSNWLKENVVDSKNWGRLRACLADTNVCPKLNQEFITADQFFSSSKITPLQSGCCKPPTACGYNFVNPTLWLNPTNMAADADCYLWSNDQSQLCYNCNSCKAGLLGNLRKEWRKANLILIITVVVLIWVYVIACSAFRNAQTEDLFRKYKQGWV

SEQ ID NO: 10885 - protein, 270 aa, Arabidopsis thaliana
MALANNLTAILNLLALLCSIPITASGIWLASKPDNECVNLLRWPVVVLGVLILVVSATGFIGAYKYKETLLAVYLCCMAILIGLLLVVLIFAFVVTRPDGSYRVPGRGYKEYKLEGFSNWLKENVVDSKNWGRLRACLADTNVCPKLNQEFITADQFFSSSKITPLQSGCCKPPTACGYNFVNPTLWLNPTNMAADADCYLWSNDQSQLCYNCNSCKAGLLGNLRKEWRKANLILIITVVVLIWVYVIACSAFRNAQTEDLFRKYKQGWV

SEQ ID NO: 10886 - protein, 193 aa, Arabidopsis thaliana
MAILIGLLLVVLIFAFVVTRPDGSYRVPGRGYKEYKLEGFSNWLKENVVDSKNWGRLRACLADTNVCPKLNQEFITADQFFSSSKITPLQSGCCKPPTACGYNFVNPTLWLNPTNMAADADCYLWSNDQSQLCYNCNSCKAGLLGNLRKEWRKANLILIITVVVLIWVYVIACSAFRNAQTEDLFRKYKQGWV

SEQ ID NO: 10887 - DNA, 1324 bp, Arabidopsis thaliana
ggagagtagaagaagcagaagcagtaatggtacgagcttcatcgtcgaagaaaggaggatcaaaaggaggagacaaagacgacgcagagtcaaaacagaggaagagattaaaaaccctagctctcgataaccaattgctctctgattctccggcgaaatctcattcctctctcaaaccttcaaagcaagttctcaaacaccatggcaccgacatcatccgcaaatctcagcgcaagaatcgctttctcttctctttccctggtcttctcgctcctatctccgccgctaccatcggcgatctcgatcgattatctaccaaaaaccctgtcctctaccttaatttccctcagggtcggatgaaactttttggaacgattttgtatccgaagaacaggtacttgactcttcaattttccagaggaggcaaaaatgtcttatgtgatgattattttgataacatgattgtgttctctgagtcatggtggattgggacaaaagaggagaatcctgaagaagctcgtcttgatttccctaaagaactagctcaggcagagaatactgagtttgatttccaaggcggtgctggaggagcagcttccgtcaagacgatggcaactcctgaaactggtagccaaccaacagagacagactcacctgaagttgacatggaggatgttttgtctgaggatggagaattcttggacgataagatccaagtaacaccaccagtccaattaacaccaccaatccaagtaacaccagtccgacagtctcagagaaattctgggaagaaattcaactttgcagaaacttccccagaggcctcctctggtgaaagtgaaggcaatacatctgatgaagatgagaaacctctgttggaacctgaatcttcaacaagaggtcgtgaggaatctcaagatggtaatggtgttactgcatcagcaagcaagttgcctacagaacttccggctaaaaaggaaaaaccaaaaagcaaagacagtaagctcgttcaagctactttgtctaaccttttcaagaaagctgaggagaaaacagctggaacttccaaggcgaaatcatcctcaaaagcttaaagaactcttttccagaagaaaatagaggtctgttgtttcttttgctgtgagaatatacagttttcagttcttttagttatgtttgagtgagatgagtaatgagaaattgctacaagactgatgattatgtttcacaaatcaagaattggataatgtattcatcatgcttaatcgatcgatagtttgtgttcaccgagcaatgtataaatcatctctgctcattttaatac

SEQ ID NO: 10888 - protein, 363 aa, Arabidopsis thaliana
RVEEAEAVMVRASSSKKGGSKGGDKDDAESKQRKRLKTLALDNQLLSDSPAKSHSSLKPSKQVLKHHGTDIIRKSQRKNRFLFSFPGLLAPISAATIGDLDRLSTKNPVLYLNFPQGRMKLFGTILYPKNRYLTLQFSRGGKNVLCDDYFDNMIVFSESWWIGTKEENPEEARLDFPKELAQAENTEFDFQGGAGGAASVKTMATPETGSQPTETDSPEVDMEDVLSEDGEFLDDKIQVTPPVQLTPPIQVTPVRQSQRNSGKKFNFAETSPEASSGESEGNTSDEDEKPLLEPESSTRGREESQDGNGVTASASKLPTELPAKKEKPKSKDSKLVQATLSNLFKKAEEKTAGTSKAKSSSKA

SEQ ID NO: 10889 - protein, 355 aa, Arabidopsis thaliana
MVRASSSKKGGSKGGDKDDAESKQRKRLKTLALDNQLLSDSPAKSHSSLKPSKQVLKHHGTDIIRKSQRKNRFLFSFPGLLAPISAATIGDLDRLSTKNPVLYLNFPQGRMKLFGTILYPKNRYLTLQFSRGGKNVLCDDYFDNMIVFSESWWIGTKEENPEEARLDFPKELAQAENTEFDFQGGAGGAASVKTMATPETGSQPTETDSPEVDMEDVLSEDGEFLDDKIQVTPPVQLTPPIQVTPVRQSQRNSGKKFNFAETSPEASSGESEGNTSDEDEKPLLEPESSTRGREESQDGNGVTASASKLPTELPAKKEKPKSKDSKLVQATLSNLFKKAEEKTAGTSKAKSSSKA

SEQ ID NO: 10890 - protein, 245 aa, Arabidopsis thaliana
MKLFGTILYPKNRYLTLQFSRGGKNVLCDDYFDNMIVFSESWWIGTKEENPEEARLDFPKELAQAENTEFDFQGGAGGAASVKTMATPETGSQPTETDSPEVDMEDVLSEDGEFLDDKIQVTPPVQLTPPIQVTPVRQSQRNSGKKFNFAETSPEASSGESEGNTSDEDEKPLLEPESSTRGREESQDGNGVTASASKLPTELPAKKEKPKSKDSKLVQATLSNLFKKAEEKTAGTSKAKSSSKA

SEQ ID NO: 10891 - DNA, 1276 bp, Arabidopsis thaliana
attatcgctctgtagaaagcttccccattttcgtagatcactctcactgacaagatgaattctcttcatcgtgttgtaggattgatcaccagaacgacgaacacatctccaatttctcatacccgtttcaatctcccatcgattctcgtcaatttgatgtcaacaaaatctggaaacgatgaagacaaatggaacgacgcttgggaatcagcttggttaccagatgatctcacagataaaatccgagcaccatgggagagagatgtgaacttccctgtaaaagaatcaacggcgacggcgattgaagaaatcgatgtggaagcaaaagcgttcgtagaggatatgaatgagcattgggacgagaggagagggaagagtgggaaagtggagaagagagaagagaagaagaaagagattggagatggagaagatgaatcatcatcatcgctttatagtttggagacgatgaagaaggattataggttgaagaaacaaagagttcatgcttctctgtgggttaaagagattgagaaattggaagaagctaaattggatgattctggatctggtggtggagctgatgatattgataggcttcttgatagttgctcagagattttcgattcggtagaccatgattttgacaaattagaggtttcgagtggatctgaattgaagaataagcctgatggttgggaatcaacagcaaaggaacaagatggaaacctctgggagatgtcacaaagagaagaagacattcttctccaagaatttgatcgtcgcactgccttctgcaaatttcagatagctagttttataaagcaacacatattcagtaggagaagaccgattgatgggtggaaatacatgattgaagtgattggtccaaatgcgaggaaagggaaaggaagtgtttctaggctcccggctttatcggatgtgtcgactcagccgtttaaagaagaaaccagcagtctcactaccttgaagcgtcggtagaagaaactagaggagttcacaatgtttgttagattgttaaatgatcttcaactacttgcacttgttaaaggccggccatgtcctctgttcctacagttctaccatttcgggttttatattagcatcagttcttcaatcatgcaatttcttgttagcttagttttgaaacgttgaaacaatgggtcttgtcttagatgttgatcaagaacagaggacaaatctcacccagtagaaactaacaatgttgaaaattaaagcaaatataatcagatgagag

SEQ ID NO: 10892 - protein, 314 aa, Arabidopsis thaliana
MNSLHRVVGLITRTTNTSPISHTRFNLPSILVNLMSTKSGNDEDKWNDAWESAWLPDDLTDKIRAPWERDVNFPVKESTATAIEEIDVEAKAFVEDMNEHWDERRGKSGKVEKREEKKKEIGDGEDESSSSLYSLETMKKDYRLKKQRVHASLWVKEIEKLEEAKLDDSGSGGGADDIDRLLDSCSEIFDSVDHDFDKLEVSSGSELKNKPDGWESTAKEQDGNLWEMSQREEDILLQEFDRRTAFCKFQIASFIKQHIFSRRRPIDGWKYMIEVIGPNARKGKGSVSRLPALSDVSTQPFKEETSSLTTLKRR

SEQ ID NO: 10893 - protein, 280 aa, Arabidopsis thaliana
MSTKSGNDEDKWNDAWESAWLPDDLTDKIRAPWERDVNFPVKESTATAIEEIDVEAKAFVEDMNEHWDERRGKSGKVEKREEKKKEIGDGEDESSSSLYSLETMKKDYRLKKQRVHASLWVKEIEKLEEAKLDDSGSGGGADDIDRLLDSCSEIFDSVDHDFDKLEVSSGSELKNKPDGWESTAKEQDGNLWEMSQREEDILLQEFDRRTAFCKFQIASFIKQHIFSRRRPIDGWKYMIEVIGPNARKGKGSVSRLPALSDVSTQPFKEETSSLTTLKRR

SEQ ID NO: 10894 - protein, 218 aa, Arabidopsis thaliana
MNEHWDERRGKSGKVEKREEKKKEIGDGEDESSSSLYSLETMKKDYRLKKQRVHASLWVKEIEKLEEAKLDDSGSGGGADDIDRLLDSCSEIFDSVDHDFDKLEVSSGSELKNKPDGWESTAKEQDGNLWEMSQREEDILLQEFDRRTAFCKFQIASFIKQHIFSRRRPIDGWKYMIEVIGPNARKGKGSVSRLPALSDVSTQPFKEETSSLTTLKRR

SEQ ID NO: 10895 - DNA, 1305 bp, Arabidopsis thaliana
aaaaattgaaaattgaaaataaaaccttccaaagtagcatcctttatcgctgcaatggcgatgagagagctctcgcagcttaacagagacagcgacggtgatgaagaagtatgggtcaaacactattcatccaaccatcagatacttctcgtcggcgaaggagatttctcattctctcacagcttagccactctcttcggctctgcttccaatatctgcgcttcctctctcgattcatacgatgttgtggttagaaagtacaagaaggcaagatcaaaccttaaaactttgaagagacttggagctttacttttacatggagttgatgctaccacactgcattttcaccctgaccttcgttatagaagatttgatcgcgtcatcttcaacttccctcacgccggtttccacggcagagagtctgattcctctcttatacggaagcatagagaactggtgtttggatttttcaatggtgcaagccgtttactaagagctaatggggaagttcatgtctctcacaagaacaaagcacctttttctgagtggaatctcgaggagctcgctagcagatgctttcttgtgttgattcaacgtgtggccttcgagaagaacaattaccctggttatgagaataagagaggagatgggcgtagatgtgaccaacctttccttttgggagagtgcagtactttcaagttcagattctctcgtgtcgctaaggaactttatgcagagaaagtgagatcgagagaatctgaacagacttcactctctgctttgttctatgcccatctctcaaaagaagcgggaattcctgatggtgtgctcaacattgtaactggttttggatcaactgctggagctgccattgcctcccatatggacgtagacaaagttagtttcactgggtcaacagatgttggaaggaagataatgcaagccgcagccgcaagtaatctcaaaaaagtttcccttgaattaggcgggaaatcgccacttctcatattcaacgacgctgatattgacaaagccgccgatcttgcgcttctcggttgcttttacaacaagggtgaaatttgcgtggcgagctctcgtgtgtttgttcaagaaggtatatacgataaggttgtggagaagttagtagagaaggctaaagattggaccgttggtgatccttttgattccactgctcgacaaggaccttatcgtatataatatatatctaccccatatgtaatttgtaatgtgcctttgactgtgatgagttatctctccctctctaccaactttcttcatatatat

SEQ ID NO: 10896 - protein, 387 aa, Arabidopsis thaliana
MAMRELSQLNRDSDGDEEVWVKHYSSNHQILLVGEGDFSFSHSLATLFGSASNICASSLDSYDVVVRKYKKARSNLKTLKRLGALLLHGVDATTLHFHPDLRYRRFDRVIFNFPHAGFHGRESDSSLIRKHRELVFGFFNGASRLLRANGEVHVSHKNKAPFSEWNLEELASRCFLVLIQRVAFEKNNYPGYENKRGDGRRCDQPFLLGECSTFKFRFSRVAKELYAEKVRSRESEQTSLSALFYAHLSKEAGIPDGVLNIVTGFGSTAGAAIASHMDVDKVSFTGSTDVGRKIMQAAAASNLKKVSLELGGKSPLLIFNDADIDKAADLALLGCFYNKGEICVASSRVFVQEGIYDKVVEKLVEKAKDWTVGDPFDSTARQGPYRI

SEQ ID NO: 10897 - protein, 385 aa, Arabidopsis thaliana
MRELSQLNRDSDGDEEVWVKHYSSNHQILLVGEGDFSFSHSLATLFGSASNICASSLDSYDVVVRKYKKARSNLKTLKRLGALLLHGVDATTLHFHPDLRYRRFDRVIFNFPHAGFHGRESDSSLIRKHRELVFGFFNGASRLLRANGEVHVSHKNKAPFSEWNLEELASRCFLVLIQRVAFEKNNYPGYENKRGDGRRCDQPFLLGECSTFKFRFSRVAKELYAEKVRSRESEQTSLSALFYAHLSKEAGIPDGVLNIVTGFGSTAGAAIASHMDVDKVSFTGSTDVGRKIMQAAAASNLKKVSLELGGKSPLLIFNDADIDKAADLALLGCFYNKGEICVASSRVFVQEGIYDKVVEKLVEKAKDWTVGDPFDSTARQGPYRI

SEQ ID NO: 10898 - DNA, 1080 bp, Arabidopsis thaliana
ttaaacacacaaacaagaaaacgcaaaactaatcctctctcgaattagggtttcgtcaaggtattacattatttcacacccttatcatcatcttctgatttctgatcctggagttgatgtattgagagaagccattgagataagagatgagctctacgcaggctaatctatgcagaccatccttgttctgtgcaaggacaactcaaacaagacatgtctctagtgcaccttttatgtcgtcattacgctttgattatcgaccactccccaaattagctattcgggcatctgcatcatcatcgatgtcttctcagttttcgcctctacagaatcatcgctgccggaatcagaggcaaggtcctgttgtgtgtttacttggtgggaaggataagtctaacggtagtaatgagctatcatcaacatgggaagctattgagaaagcaatggggaagaaatcagttgaagatatgttgcgtgagcagatacaaaagaaagacactggcggcattcctccacgaggacgaggaggagggggtggcggtagaaatggtgggaataatgggtctggaggctcatcaggggaagatggtggtcttgctagttttggggatgaaactctgcaagtggtattagcaaccttaggcttcatctttctgtacttctacatcatcaatggggaggagttgttccgtcttgcaagagattacattaggtaccttataggaagacccaagagtgttaggctgacccgagttatggaaggttggagtagattcttcgagaagatgtcgaggaaaaaagtgtataacgagtactggctaaagattaagcgatcatcaacaagtctacctggtctggtaacccgggcaaatacaaacgcatcttgagatcttatgttgattcaaatgaaacgaagatagtgatcggttttcttactggtttaagtagtttcccttagaccctgacccgtgtttttgtttttgtttaagttactttcgccagtagtaaatattgatgctcatcgtcacaagtattgactctcataatatcgattatgaaagaaaatagtaaagcacttgc

SEQ ID NO: 10899 - protein, 246 aa, Arabidopsis thaliana
MSSTQANLCRPSLFCARTTQTRHVSSAPFMSSLRFDYRPLPKLAIRASASSSMSSQFSPLQNHRCRNQRQGPVVCLLGGKDKSNGSNELSSTWEAIEKAMGKKSVEDMLREQIQKKDTGGIPPRGRGGGGGGRNGGNNGSGGSSGEDGGLASFGDETLQVVLATLGFIFLYFYIINGEELFRLARDYIRYLIGRPKSVRLTRVMEGWSRFFEKMSRKKVYNEYWLKIKRSSTSLPGLVTRANTNAS

SEQ ID NO: 10900 - protein, 217 aa, Arabidopsis thaliana
MSSLRFDYRPLPKLAIRASASSSMSSQFSPLQNHRCRNQRQGPVVCLLGGKDKSNGSNELSSTWEAIEKAMGKKSVEDMLREQIQKKDTGGIPPRGRGGGGGGRNGGNNGSGGSSGEDGGLASFGDETLQVVLATLGFIFLYFYIINGEELFRLARDYIRYLIGRPKSVRLTRVMEGWSRFFEKMSRKKVYNEYWLKIKRSSTSLPGLVTRANTNAS

SEQ ID NO: 10901 - protein, 194 aa, Arabidopsis thaliana
MSSQFSPLQNHRCRNQRQGPVVCLLGGKDKSNGSNELSSTWEAIEKAMGKKSVEDMLREQIQKKDTGGIPPRGRGGGGGGRNGGNNGSGGSSGEDGGLASFGDETLQVVLATLGFIFLYFYIINGEELFRLARDYIRYLIGRPKSVRLTRVMEGWSRFFEKMSRKKVYNEYWLKIKRSSTSLPGLVTRANTNAS

SEQ ID NO: 10902 - DNA, 2368 bp, Arabidopsis thaliana
atcaatacttctctctgctctcaagataattttgttctctcaatttcattcttaaaccctaattcttcgtttttatccgatctacgaaaatggcggacgctgaaacctttgctttccaagctgagatcaaccagttgctctccctcatcatcaataccttttactccaacaaggagatcttcctccgtgaactcatcagtaactcttctgatgctttagacaagattagattcgagtccttgacggacaagagcaagcttgatggtcagcctgagctcttcattcacatcattcccgacaagactaacaacaccttgaccattattgatagtggtatcggcatgaccaaggctgatttggtcaacaacctcggaacaattgcaagatctggtaccaaggaattcatggaagcgttggctgctggagctgatgttagcatgattggtcagtttggtgttggtttctactctgcatacttggttgctgacaaagtggttgttactaccaagcacaatgacgatgagcaatacgtgtgggagtctcaggccggtggatctttcaccgtgaccagagacacctctggggaggctcttggtagaggaacaaagatggtcctttacctcaaggaagaccagttggagtaccttgaggagcgaaggcttaaggatttggtgaagaagcactctgagttcatcagctacccaatctctctctggattgagaagaccattgagaaggagatctctgatgatgaagaggaggaagaaaagaaagatgaggaaggaaaggttgaggaggtcgatgaggagaaagagaaggaggagaagaaaaagaagaagattaaggaggtttctcatgagtgggatttggtgaacaagcagaaaccgatttggatgaggaagccagaggagatcaacaaggaggagtacgctgctttctacaagagtttgagcaatgactgggaagagcatttggctgtgaagcatttctcagttgaaggacagcttgagttcaaagctatcctctttgttcccaagagagctcctttcgatctctttgacactaagaagaagcccaacaacatcaagctctatgtccgtcgtgtcttcatcatggacaactgtgaagacatcattcctgagtaccttgggtttgttaagggtattgttgactctgaagatcttcctctcaacatctcgagagaaacattgcagcagaacaagatcctcaaggtcatccgcaagaaccttgtgaagaagtgccttgagctcttctttgagattgctgagaacaaggaggactacaacaagttttacgaagctttctctaagaacctgaagcttggtatccacgaggactcccaaaacagaaccaagattgctgagttgctccgttaccactcaaccaagagcggtgatgaattgaccagtctcaaggactacgtgacaaggatgaaggaaggtcagaacgatatcttctacatcactggtgagagcaagaaggctgttgagaactctccattccttgagaagctcaagaagaagggtattgaagttctctacatggttgatgcgattgatgagtacgctattggtcagcttaaggaattcgagggaaagaaacttgtttctgcaaccaaggaaggtctgaaactggatgagaccgaagatgaaaagaagaagaaagaagagctcaaggagaagtttgaaggactctgcaaagtgataaaagatgttttgggagacaaggtcgagaaggttattgtttctgaccgtgttgtggactcaccttgctgtcttgtaaccggcgaatatggctggactgcaaacatggagaggatcatgaaagctcaagccttgagagacagcagcatggctggttacatgtcgagcaagaagacaatggagattaacccagagaactccatcatggatgagctgagaaagagagctgacgcagacaagaacgataagtctgtgaaggatcttgtgcttctcctctttgagaccgcccttctcacctctggtttcagccttgacgagccaaacactttcggaagcaggattcacaggatgttgaagcttggactgagtattgatgacgatgatgctgttgaagccgatgctgagatgcctccccttgaagacgatgctgatgcggaaggtagcaagatggaggaagtcgactaatttatcacacaaaagtcgactaaattattagcggttttttaagactctggttttctttttactttttcgttaaaacttctgttattttggtgatcatcttcacgaattttttctatggtttcatttgttgtgaagatatttccctgaactcggttttatgacaaagattctattatgcc

SEQ ID NO: 10903 - protein, 699 aa, Arabidopsis thaliana
MADAETFAFQAEINQLLSLIINTFYSNKEIFLRELISNSSDALDKIRFESLTDKSKLDGQPELFIHIIPDKTNNTLTIIDSGIGMTKADLVNNLGTIARSGTKEFMEALAAGADVSMIGQFGVGFYSAYLVADKVVVTTKHNDDEQYVWESQAGGSFTVTRDTSGEALGRGTKMVLYLKEDQLEYLEERRLKDLVKKHSEFISYPISLWIEKTIEKEISDDEEEEEKKDEEGKVEEVDEEKEKEEKKKKKIKEVSHEWDLVNKQKPIWMRKPEEINKEEYAAFYKSLSNDWEEHLAVKHFSVEGQLEFKAILFVPKRAPFDLFDTKKKPNNIKLYVRRVFIMDNCEDIIPEYLGFVKGIVDSEDLPLNISRETLQQNKILKVIRKNLVKKCLELFFEIAENKEDYNKFYEAFSKNLKLGIHEDSQNRTKIAELLRYHSTKSGDELTSLKDYVTRMKEGQNDIFYITGESKKAVENSPFLEKLKKKGIEVLYMVDAIDEYAIGQLKEFEGKKLVSATKEGLKLDETEDEKKKKEELKEKFEGLCKVIKDVLGDKVEKVIVSDRVVDSPCCLVTGEYGWTANMERIMKAQALRDSSMAGYMSSKKTMEINPENSIMDELRKRADADKNDKSVKDLVLLLFETALLTSGFSLDEPNTFGSRIHRMLKLGLSIDDDDAVEADAEMPPLEDDADAEGSKMEEVD

SEQ ID NO: 10904 - protein, 615 aa, Arabidopsis thaliana
MTKADLVNNLGTIARSGTKEFMEALAAGADVSMIGQFGVGFYSAYLVADKVVVTTKHNDDEQYVWESQAGGSFTVTRDTSGEALGRGTKMVLYLKEDQLEYLEERRLKDLVKKHSEFISYPISLWIEKTIEKEISDDEEEEEKKDEEGKVEEVDEEKEKEEKKKKKIKEVSHEWDLVNKQKPIWMRKPEEINKEEYAAFYKSLSNDWEEHLAVKHFSVEGQLEFKAILFVPKRAPFDLFDTKKKPNNIKLYVRRVFIMDNCEDIIPEYLGFVKGIVDSEDLPLNISRETLQQNKILKVIRKNLVKKCLELFFEIAENKEDYNKFYEAFSKNLKLGIHEDSQNRTKIAELLRYHSTKSGDELTSLKDYVTRMKEGQNDIFYITGESKKAVENSPFLEKLKKKGIEVLYMVDAIDEYAIGQLKEFEGKKLVSATKEGLKLDETEDEKKKKEELKEKFEGLCKVIKDVLGDKVEKVIVSDRVVDSPCCLVTGEYGWTANMERIMKAQALRDSSMAGYMSSKKTMEINPENSIMDELRKRADADKNDKSVKDLVLLLFETALLTSGFSLDEPNTFGSRIHRMLKLGLSIDDDDAVEADAEMPPLEDDADAEGSKMEEVD

SEQ ID NO: 10905 - protein, 594 aa, Arabidopsis thaliana
MEALAAGADVSMIGQFGVGFYSAYLVADKVVVTTKHNDDEQYVWESQAGGSFTVTRDTSGEALGRGTKMVLYLKEDQLEYLEERRLKDLVKKHSEFISYPISLWIEKTIEKEISDDEEEEEKKDEEGKVEEVDEEKEKEEKKKKKIKEVSHEWDLVNKQKPIWMRKPEEINKEEYAAFYKSLSNDWEEHLAVKHFSVEGQLEFKAILFVPKRAPFDLFDTKKKPNNIKLYVRRVFIMDNCEDIIPEYLGFVKGIVDSEDLPLNISRETLQQNKILKVIRKNLVKKCLELFFEIAENKEDYNKFYEAFSKNLKLGIHEDSQNRTKIAELLRYHSTKSGDELTSLKDYVTRMKEGQNDIFYITGESKKAVENSPFLEKLKKKGIEVLYMVDAIDEYAIGQLKEFEGKKLVSATKEGLKLDETEDEKKKKEELKEKFEGLCKVIKDVLGDKVEKVIVSDRVVDSPCCLVTGEYGWTANMERIMKAQALRDSSMAGYMSSKKTMEINPENSIMDELRKRADADKNDKSVKDLVLLLFETALLTSGFSLDEPNTFGSRIHRMLKLGLSIDDDDAVEADAEMPPLEDDADAEGSKMEEVD

SEQ ID NO: 10906 - DNA, 1616 bp, Arabidopsis thaliana
aaaaaagaagatctcactctcaccgccttcatttcctcgatctccgtcttcctccttctccgtctgtcgcagagcatcgctcgaattagggtttctgctgagagaagatgagggaaattattagcattcatatcggacaagccgggatccaagtcggaaattcctgctgggagctttactgtctcgaacatggaatccagcccgacggaatgatgccgagtgatactacagttggtgttgcacacgatgcgttcaatactttctttagcgagactggagctgggaagcatgttcctagggctgtcttcgttgatctcgagcctaccgttatcgacgaagttcgtactggtacttaccgtcaacttttccatccagagcagctcatttctgggaaagaagatgctgctaacaacttcgctagaggacattacactgttggaaaggaaattgtggatctatgtcttgaccgtgtgaggaagcttgccgacaactgtactggcttacaagggtttttggtgttcaatgctgttggtggtggaactggttctggattgggttctctgttgctagagcgtttgtctgtagattacggaaaaaagtctaagcttggttttaccatatacccttctcctcaggtttctactgctgttgtagaaccttacaacagtgttctctcaacgcattcccttcttgaacatacggatgtagctgtcctcttggataacgaagccatctatgacatttgccgcagatccctagatatcgagaggccaacctacacaaacttgaacaggttgatatcacagatcatttcatccttgacaacatctttgaggtttgatggtgccatcaacgtggatatcactgagttccagaccaatcttgtcccatatccccgtatccatttcatgctgtcatcttatgcaccagtcatctcagccgccaaggcttaccacgagcagctatcagtccctgagatcaccaatgccgtgtttgagccagcgagcatgatggcaaagtgtgacccaaggcacggaaagtacatggcatgttgtttgatgtaccgaggagatgttgttcccaaagatgttaatgctgccgttggcaccatcaagacaaagaggactgttcagtttgttgactggtgcccaactgggttcaaatgtggaatcaactaccaacctccaacagttgttccaggtggtgacctcgctaaggttcagagagctgtatgcatgatcagtaacaacacagcagttgcagaggtgttctcacggatcgaccacaagtttgatctcatgtatgcgaagagggcattcgtgcactggtacgttggtgaaggaatggaggaaggtgaattcgatgacaagaccaacgtcaaggccgcctggggtaaggtcggcgcgcacgctggcgagtatggtgcggaggccctggagaggatgttcctgtccttccccaccaccaagacctacttcccgcacttcgacctgagccacggctctgcccaggttaagggccacggcaagaaggtggccgacgcgctgaccaacgccgtggcgcacgtggacgacatgcccaacgcgctgtccgccctgagcgacctgcacgcgcac

SEQ ID NO: 10907 - protein, 503 aa, Arabidopsis thaliana
MREIISIHIGQAGIQVGNSCWELYCLEHGIQPDGMMPSDTTVGVAHDAFNTFFSETGAGKHVPRAVFVDLEPTVIDEVRTGTYRQLFHPEQLISGKEDAANNFARGHYTVGKEIVDLCLDRVRKLADNCTGLQGFLVFNAVGGGTGSGLGSLLLERLSVDYGKKSKLGFTIYPSPQVSTAVVEPYNSVLSTHSLLEHTDVAVLLDNEAIYDICRRSLDIERPTYTNLNRLISQIISSLTTSLRFDGAINVDITEFQTNLVPYPRIHFMLSSYAPVISAAKAYHEQLSVPEITNAVFEPASMMAKCDPRHGKYMACCLMYRGDVVPKDVNAAVGTIKTKRTVQFVDWCPTGFKCGINYQPPTVVPGGDLAKVQRAVCMISNNTAVAEVFSRIDHKFDLMYAKRAFVHWYVGEGMEEGEFDDKTNVKAAWGKVGAHAGEYGAEALERMFLSFPTTKTYFPHFDLSHGSAQVKGHGKKVADALTNAVAHVDDMPNALSALSDLHAH

SEQ ID NO: 10908 - protein, 469 aa, Arabidopsis thaliana
MMPSDTTVGVAHDAFNTFFSETGAGKHVPRAVFVDLEPTVIDEVRTGTYRQLFHPEQLISGKEDAANNFARGHYTVGKEIVDLCLDRVRKLADNCTGLQGFLVFNAVGGGTGSGLGSLLLERLSVDYGKKSKLGFTIYPSPQVSTAVVEPYNSVLSTHSLLEHTDVAVLLDNEAIYDICRRSLDIERPTYTNLNRLISQIISSLTTSLRFDGAINVDITEFQTNLVPYPRIHFMLSSYAPVISAAKAYHEQLSVPEITNAVFEPASMMAKCDPRHGKYMACCLMYRGDVVPKDVNAAVGTIKTKRTVQFVDWCPTGFKCGINYQPPTVVPGGDLAKVQRAVCMISNNTAVAEVFSRIDHKFDLMYAKRAFVHWYVGEGMEEGEFDDKTNVKAAWGKVGAHAGEYGAEALERMFLSFPTTKTYFPHFDLSHGSAQVKGHGKKVADALTNAVAHVDDMPNALSALSDLHAH

SEQ ID NO: 10909 - protein, 468 aa, Arabidopsis thaliana
MPSDTTVGVAHDAFNTFFSETGAGKHVPRAVFVDLEPTVIDEVRTGTYRQLFHPEQLISGKEDAANNFARGHYTVGKEIVDLCLDRVRKLADNCTGLQGFLVFNAVGGGTGSGLGSLLLERLSVDYGKKSKLGFTIYPSPQVSTAVVEPYNSVLSTHSLLEHTDVAVLLDNEAIYDICRRSLDIERPTYTNLNRLISQIISSLTTSLRFDGAINVDITEFQTNLVPYPRIHFMLSSYAPVISAAKAYHEQLSVPEITNAVFEPASMMAKCDPRHGKYMACCLMYRGDVVPKDVNAAVGTIKTKRTVQFVDWCPTGFKCGINYQPPTVVPGGDLAKVQRAVCMISNNTAVAEVFSRIDHKFDLMYAKRAFVHWYVGEGMEEGEFDDKTNVKAAWGKVGAHAGEYGAEALERMFLSFPTTKTYFPHFDLSHGSAQVKGHGKKVADALTNAVAHVDDMPNALSALSDLHAH

SEQ ID NO: 10910 - DNA, 1356 bp, Arabidopsis thaliana
ttttatttttcacactctttcagtccatcgtccgaccgagattttgtcttctcgtgagttcaaatccaaatccatggggaagatccttgtggaaatctgtatgatatcagctcgagggctccgtgtgggaattggaatcggatcctctctactgaaacaccaatggtacgccgttggttggcttgatccagaagacaaatactgcaccacaatcgatgcttcaagagcagacaatcctgtctggagaacaaagtttgctactttgctcgatgattccacgattcaggattcgaagttggctttgcaagtcgaggtttatagcagagaacccttgttcttaaggaagaggcttcatggctctgctactgtttctttgaaggagtttctgactaagtataaccaacaacagagttcttcgaaagctgtaattgaagaaactggaagctatcagcttaggaagacgaactcgagcaagcctcagggttttgtcgatgtgtcgatacgtatatctgcagagcgagaggattttgggggttttactggagattttggaggagtcatgctctcgaacaactcagattacaacacttcaggacaggattacatggctggttcatcgcagtatccatttgctccaatggaccagtcaaacccattctcagttcccccatcatataaccaccactcatcaatgcctaaccctccaatgaccaacaccaacccacaaatgcaacaaccttactatcctccaccgatgcagccaccaccaccacctatgaactcagggtacatgcctacatacatccccaaatctgtgaatgactcatcaatgcctaaccctccaatgaacaacaccaacccacaaatgcaacaaccttactatcctccaccaatgcagccagcaccaccacctatgaactcagggtacatgcctaaatacatccctaattcagagaatattacgaacattccatcgtcatcatcatctggaggagtaccaggaggggcgggaagaggatatgctaggactggcccagggtttgctgtaggagtgggagctggtgcagtagttggagctggtgcagctttatatggaagcgagtttatgtcaggaatcgacttaccttcaagcttacctcacccaagtgtccccatttccattgatcctccattttgatgcagcaacagctcgattcaatatggctgcattgtgagattatctgaaacattgtagatgattcgtatttgatatgataagacatcccagattcaagaaacatataaaatgaaggcctcgggtttcttgggaattcgattgaactgttttttttctattgttattacttttctataaag

SEQ ID NO: 10911 - protein, 391 aa, Arabidopsis thaliana
FIFHTLSVHRPTEILSSREFKSKSMGKILVEICMISARGLRVGIGIGSSLLKHQWYAVGWLDPEDKYCTTIDASRADNPVWRTKFATLLDDSTIQDSKLALQVEVYSREPLFLRKRLHGSATVSLKEFLTKYNQQQSSSKAVIEETGSYQLRKTNSSKPQGFVDVSIRISAEREDFGGFTGDFGGVMLSNNSDYNTSGQDYMAGSSQYPFAPMDQSNPFSVPPSYNHHSSMPNPPMTNTNPQMQQPYYPPPMQPPPPPMNSGYMPTYIPKSVNDSSMPNPPMNNTNPQMQQPYYPPPMQPAPPPMNSGYMPKYIPNSENITNIPSSSSSGGVPGGAGRGYARTGPGFAVGVGAGAVVGAGAALYGSEFMSGIDLPSSLPHPSVPISIDPPF

SEQ ID NO: 10912 - protein, 367 aa, Arabidopsis thaliana
MGKILVEICMISARGLRVGIGIGSSLLKHQWYAVGWLDPEDKYCTTIDASRADNPVWRTKFATLLDDSTIQDSKLALQVEVYSREPLFLRKRLHGSATVSLKEFLTKYNQQQSSSKAVIEETGSYQLRKTNSSKPQGFVDVSIRISAEREDFGGFTGDFGGVMLSNNSDYNTSGQDYMAGSSQYPFAPMDQSNPFSVPPSYNHHSSMPNPPMTNTNPQMQQPYYPPPMQPPPPPMNSGYMPTYIPKSVNDSSMPNPPMNNTNPQMQQPYYPPPMQPAPPPMNSGYMPKYIPNSENITNIPSSSSSGGVPGGAGRGYARTGPGFAVGVGAGAVVGAGAALYGSEFMSGIDLPSSLPHPSVPISIDPPF

SEQ ID NO: 10913 - protein, 358 aa, Arabidopsis thaliana
MISARGLRVGIGIGSSLLKHQWYAVGWLDPEDKYCTTIDASRADNPVWRTKFATLLDDSTIQDSKLALQVEVYSREPLFLRKRLHGSATVSLKEFLTKYNQQQSSSKAVIEETGSYQLRKTNSSKPQGFVDVSIRISAEREDFGGFTGDFGGVMLSNNSDYNTSGQDYMAGSSQYPFAPMDQSNPFSVPPSYNHHSSMPNPPMTNTNPQMQQPYYPPPMQPPPPPMNSGYMPTYIPKSVNDSSMPNPPMNNTNPQMQQPYYPPPMQPAPPPMNSGYMPKYIPNSENITNIPSSSSSGGVPGGAGRGYARTGPGFAVGVGAGAVVGAGAALYGSEFMSGIDLPSSLPHPSVPISIDPPF

SEQ ID NO: 10914 - DNA, 2196 bp, Arabidopsis thaliana
gctcttgggttgtcatcaattcgcgaatttgatacacgcacaccctaaagagagatccacgctcgtttcaaggtaacctaaattcgaacactttcgcagtttcccttcgattcgaataaatcactgttctccgtgggcaacaatgtacgccggcggcgatatgcacaggggttcacagatgccacaaccaccgatgatgcggcagtcgtcagcttcttccactaacatcaatcccgactaccaccacccatctggccccttcgaccccaatgtagacagttttggggcgaaacgaatgagaaagcatacacagagaagagctgttgattacaccagcaccgttgttagatatattcaggctcgaacatggcagcgagactcaagggataggaccactctgcaaccaaccccagctgcagcagttgatatgcttcccacagttgcctattcggataatccttcaacaagctttgctgcaaagtttgttcacgcatctctaaacaagaaccgttgttcaatcaaccgtgtattgtggacaccttcaggaagacgtcttatcacgggctcccaaagtggggagtttactctttggaatgggcaatcttttaattttgaaatgattcttcaggcacatgatcaacctattaggtcgatggtatggagccacaatgaaaattatatggtttctggtgatgatggaggcacattaaagtattggcagaacaatatgaacaatgtgaaagccaataaaactgctcacaaggaatcaattcgcgatttaagtttttgaaaacagatttgaagttctgttcgtgttctgatgatacgactgttaaagtctgggattttaccaagtgcgtagatgaaagctcattaaccggccatggttgggatgtcaagagcgttgactggcaccccacaaagtccctactagtttctggtggaaaagaccaacttgtcaaactctgggatactagatctgggagagagctttgctcactccatggtcacaaaaacatagtacttagcgtgaagtggaaccaaaatggcaattggcttttaacggcctcgaaagatcagataattaagctgtacgatataaggactatgaaggagcttcaatcctttcgtgggcacacgaaagatgtaacatctttggcgtggcatccctgccatgaagaatattttgtcagtgggagctctgacggctccatttgtcattggattgtggggcatgaaaacccgcagattgaaatcccaaatgctcatgataacagtgtttgggatcttgcatggcatcctattggatatcttctttgcagtggtagcaatgatcacacaaccaagttttggtgcagaaacaggcctgcagataatccccgagatgttcttatgcagaaccaaggctataatgaacaaggttttggtcgccaacctgataatttccaaccatctgaggcatcgccaatccctggagcatttgtgcctgggttgacacggaacgaggggactatcccaggaataggaatagcaatgccatttgatgcatcctctcaaggggatcataaacagcctcttccaggttccatggcactgggggctcctcctttgccacctggtccccacccatcgcttcttggaagtggccagcagcaagggtatcagcaacaacaacaacaccaaggtcatccccagcaaatgcttccaatgcccaatatgcatcaccatcagctaccaccatcatctcatatgccattgcaccctcatcatcttccccggcctatgcaaatgcctcctcacggtcacatgccacctccctcaatgcctatgtctcatcagatgcctggatcaatgggaatgcaaggtggcatgaatcctcagatgtcgcaaagtcattttatgggtgctccttcaggagtatttcaaggacaaccaaacagtggcggaccccaaatgtatccccaaggacgtggtggtttcaaccgtccacagatgattccaggctacaacaaccctttccaacagcagcagcagccacctttacctcctggccctccaccaaacaacaatcagcaacatcagtaggcagccgttgtattagtacattagattacaaccgcattgtctgcgggataaaacgattgaagtaaaactattatatgggattcaaatttcgtttctataaaacaaaacatt

SEQ ID NO: 10915 - protein, 325 aa, Arabidopsis thaliana
MKELQSFRGHTKDVTSLAWHPCHEEYFVSGSSDGSICHWIVGHENPQIEIPNAHDNSVWDLAWHPIGYLLCSGSNDHTTKFWCRNRPADNPRDVLMQNQGYNEQGFGRQPDNFQPSEASPIPGAFVPGLTRNEGTIPGIGIAMPFDASSQGDHKQPLPGSMALGAPPLPPGPHPSLLGSGQQQGYQQQQQHQGHPQQMLPMPNMHHHQLPPSSHMPLHPHHLPRPMQMPPHGHMPPPSMPMSHQMPGSMGMQGGMNPQMSQSHFMGAPSGVFQGQPNSGGPQMYPQGRGGFNRPQMIPGYNNPFQQQQQPPLPPGPPPNNNQQHQ

SEQ ID NO: 10916 - protein, 230 aa, Arabidopsis thaliana
MQNQGYNEQGFGRQPDNFQPSEASPIPGAFVPGLTRNEGTIPGIGIAMPFDASSQGDHKQPLPGSMALGAPPLPPGPHPSLLGSGQQQGYQQQQQHQGHPQQMLPMPNMHHHQLPPSSHMPLHPHHLPRPMQMPPHGHMPPPSMPMSHQMPGSMGMQGGMNPQMSQSHFMGAPSGVFQGQPNSGGPQMYPQGRGGFNRPQMIPGYNNPFQQQQQPPLPPGPPPNNNQQHQ

SEQ ID NO: 10917 - protein, 215 aa, Arabidopsis thaliana
MYAGGDMHRGSQMPQPPMMRQSSASSTNINPDYHHPSGPFDPNVDSFGAKRMRKHTQRRAVDYTSTVVRYIQARTWQRDSRDRTTLQPTPAAAVDMLPTVAYSDNPSTSFAAKFVHASLNKNRCSINRVLWTPSGRRLITGSQSGEFTLWNGQSFNFEMILQAHDQPIRSMVWSHNENYMVSGDDGGTLKYWQNNMNNVKANKTAHKESIRDLSF

SEQ ID NO: 10918 - DNA, 2791 bp, Arabidopsis thaliana
aaaagaaacaacactcgaaaaagttcttctttttcttccgcacatgtctgactctctcataagcgtaaatcgctctgtcaaatatctctgaccagagagacagagttgcctccacgtttcttcagacaagactcacgctcttccctttcaccacattcccttctccatttctcaatctcacttaccttctcgattcttgctccaatttcgaatcttccgagtgaaaaaagcttcaaagtttggaactttctagtgtttattaatctgggtctgctctgagtttcgtgtgtagctgcatatgagcttaaagctcgagtttttccatctgggtttggaattctagggctagtgattggagattttgggaatttaggttgattttagtaggtttgacttcaggttgcgtaatttaggttgattttgatccgatttgtggaattagggtttgtttgttcacaaagcttcaatttttggagtttaaatggatcgataacgactgtgttagaagaaagtttgctgcttcagattcgtattcgatatagaaatgagtttggttcctcctttaccgattttatcaccaccgtcgtcaaattcttcaacaactgcacctcctccgttacagactcagcccaccactccatctgctccacctccggttacaccacctccttctccgccgcaatctccgccgccggttgtatcatcatcaccaccaccaccggttgtttcgtcacctccaccgtcttcttctccaccaccgtcacctcctgtcatcacttcacctcctcccaccgttgcttcttcccctccacctcctgtggtgattgcttcccctcctccctcaactccggcgacaacaccaccagctcctccgcaaactgtctcacctccaccgcctcctgatgcttctccatcacctcccgcaccaacaacaacaaatcctcctcctaaaccttctccttcaccgccgggagaaacaccttcaccaccgggagaaacaccttcaccgcctaaaccttctccgtcaactccaactccaacaacaaccacatctcctcctcctcctccagctacctctgcttctcctccgtcttcaaatcctactgatccttctacgttagctcctcctccaactccattacctgttgttcccagagagaaaccaattgctaaaccaactggaccagcttcaaacaatggaaacaacactttgccgtctagttcaccaggtaaaagcgaagttggtactggaggtattgtagctatcggagtgattgtgggattggtttttcttagcctttttgtgatgggtgtgtggttcactcggaaacgaaagcgaaaggaccctggaacctttgttggatacacaatgcctccttccgcttattcatctcctcaaggctcagatgtagtgctcttcaactcgcgttcttcagctcctcctaaaatgagaagccattctggtagcgattacatgtatgcgtcatctgattcaggcatggttagcaaccaaagatcaaggttttcatatgatgagttatctcaagttaccagtgggttctccgagaagaatcttctcggtgaaggagggtttggctgtgtatacaaaggcgttctttctgacggaagggaagtggcagttaaacagttaaagattggtggaagccaaggggagagagagttcaaagcagaagttgaaatcatttctcgggttcatcaccgccatttggttacactagttggttattgcatctcagagcaacataggttgcttgtatatgattatgtacctaacaacactctccattatcatctacatgctccaggaagaccagttatgacttgggaaactcgggtaagggtcgctgctggtgcagctcgtggaatcgcctacttacatgaagactgtcatccccgcattattcaccgtgacataaaatcttccaacatacttcttgataacagctttgaagccttggttgcggattttggacttgcaaaaattgcacaagaactggatttaaacacacacgtctcaacgcgcgtaatgggaacctttgggtacatggctcctgaatatgcaacaagtggaaagctgtctgaaaaagcagatgtttattcgtatggggtaatactgttggagcttataactggccgtaaaccggtagatacgtctcaaccacttggtgatgagagccttgttgaatgggcaagacccttgctgggtcaagcaatcgagaacgaagaattcgacgagctagtagatccgaggctagggaaaaacttcatcccaggagagatgttcagaatggtagaagctgcggctgcatgtgtccgccactcagctgcaaaaagaccaaagatgagtcaagtggtgagagctttggacacacttgaagaagcaacggacataaccaacggaatgagaccaggacagagccaagtgtttgactcgagacaacaatctgctcagataaggatgtttcaaagaatggcttttgggagtcaagattatagttctgacttctttgatcgctcacagtcacatagtagctggggcagtcgtgaccagtccagatttgtaccttagtagtttttattgcctttgcttctttcttctttccctttaaacatgtcctcgatcttgtatattcttttgcatgatataatgtatttttgaaatatacatacatacacacataaaatttggtagtcttttgaagaaaaagaataacagatgtatttgatagatagtggtccttgctttatctaatgattgctgaaccgggtt

SEQ ID NO: 10919 - protein, 681 aa, Arabidopsis thaliana
MSLVPPLPILSPPSSNSSTTAPPPLQTQPTTPSAPPPVTPPPSPPQSPPPVVSSSPPPPVVSSPPPSSSPPPSPPVITSPPPTVASSPPPPVVIASPPPSTPATTPPAPPQTVSPPPPPDASPSPPAPTTTNPPPKPSPSPPGETPSPPGETPSPPKPSPSTPTPTTTTSPPPPPATSASPPSSNPTDPSTLAPPPTPLPVVPREKPIAKPTGPASNNGNNTLPSSSPGKSEVGTGGIVAIGVIVGLVFLSLFVMGVWFTRKRKRKDPGTFVGYTMPPSAYSSPQGSDVVLFNSRSSAPPKMRSHSGSDYMYASSDSGMVSNQRSRFSYDELSQVTSGFSEKNLLGEGGFGCVYKGVLSDGREVAVKQLKIGGSQGEREFKAEVEIISRVHHRHLVTLVGYCISEQHRLLVYDYVPNNTLHYHLHAPGRPVMTWETRVRVAAGAARGIAYLHEDCHPRIIHRDIKSSNILLDNSFEALVADFGLAKIAQELDLNTHVSTRVMGTFGYMAPEYATSGKLSEKADVYSYGVILLELITGRKPVDTSQPLGDESLVEWARPLLGQAIENEEFDELVDPRLGKNFIPGEMFRMVEAAAACVRHSAAKRPKMSQVVRALDTLEEATDITNGMRPGQSQVFDSRQQSAQIRMFQRMAFGSQDYSSDFFDRSQSHSSWGSRDQSRFVP

SEQ ID NO: 10920 - protein, 427 aa, Arabidopsis thaliana
MGVWFTRKRKRKDPGTFVGYTMPPSAYSSPQGSDVVLFNSRSSAPPKMRSHSGSDYMYASSDSGMVSNQRSRFSYDELSQVTSGFSEKNLLGEGGFGCVYKGVLSDGREVAVKQLKIGGSQGEREFKAEVEIISRVHHRHLVTLVGYCISEQHRLLVYDYVPNNTLHYHLHAPGRPVMTWETRVRVAAGAARGIAYLHEDCHPRIIHRDIKSSNILLDNSFEALVADFGLAKIAQELDLNTHVSTRVMGTFGYMAPEYATSGKLSEKADVYSYGVILLELITGRKPVDTSQPLGDESLVEWARPLLGQAIENEEFDELVDPRLGKNFIPGEMFRMVEAAAACVRHSAAKRPKMSQVVRALDTLEEATDITNGMRPGQSQVFDSRQQSAQIRMFQRMAFGSQDYSSDFFDRSQSHSSWGSRDQSRFVP

SEQ ID NO: 10921 - protein, 406 aa, Arabidopsis thaliana
MPPSAYSSPQGSDVVLFNSRSSAPPKMRSHSGSDYMYASSDSGMVSNQRSRFSYDELSQVTSGFSEKNLLGEGGFGCVYKGVLSDGREVAVKQLKIGGSQGEREFKAEVEIISRVHHRHLVTLVGYCISEQHRLLVYDYVPNNTLHYHLHAPGRPVMTWETRVRVAAGAARGIAYLHEDCHPRIIHRDIKSSNILLDNSFEALVADFGLAKIAQELDLNTHVSTRVMGTFGYMAPEYATSGKLSEKADVYSYGVILLELITGRKPVDTSQPLGDESLVEWARPLLGQAIENEEFDELVDPRLGKNFIPGEMFRMVEAAAACVRHSAAKRPKMSQVVRALDTLEEATDITNGMRPGQSQVFDSRQQSAQIRMFQRMAFGSQDYSSDFFDRSQSHSSWGSRDQSRFVP

SEQ ID NO: 10922 - DNA, 1781 bp, Arabidopsis thaliana
gatttccgaaattcttttttcttccaagaatgaagggaccatagaatcgtccaaaactgttgaaacttgaaagctttccaattttgctcatctgggtttctcgattgatcgttaaccagcaatggaggcagagaaatccaagcaaaatccgggtaagaagcccgtagaagcaacaatggagcacgtgttggtggcattacgagagaccaaggagaagagagagatcaggattcaaaaactgttcgaattcttcgacaattcgaagttagggttcttagacgatacccagatcgagaaaggtttgtcttcgcttagtattcctccaaagtataggtacgctagtgattttcttaaagtctgcgactcgaatcaagatgggcgtgtggactaccaggagtttcgtcgttacatggatgctaaagagcttgagttgtacaagatttttcaggccattgatattgaacacaatggcgacatttgtccagcggagctttgggaggctcttgataaagctggcattaaaatcaaagatgaggaacttgcttcttttatggagcatgttgataaggacaacaacggaattataacttttgaggagtggagggattttcttttgctaaaccctcatgaagctacaattgagaacatttatcatcactgggaaagagtatgcttaatagacattggagagcaagctgttataccagatggtataagtgcacacgctcaaagaagcaaattacttctcgcgggaggaatagcaggggctgtttctagaaccgcaactgcgcctctggaccgtctgaaagttgctctgcaagttcaacggacaaatttgggtgttgtcccgaccattaagaaaatatggagagaagataagttgttgggtttcttcagaggtaatgggttaaatgtagcgaaagtcgctcctgaaagcgctataaagtttgctgcttatgaaatgctgaaaccaataattgggggagcggatggtgacattggtacaagcgggaggcttttggctggtggattggctggtgcagtggctcaaacagctatttatcctatggatctcgtgaagactcggttacagacttttgtgagtgaagttgggacaccaaagctgtggaaactcacaaaggatatttggattcaagaaggaccccgagctttttacaggggtctttgtccttctctaattgggattatcccttacgcaggaattgaccttgctgcttacgaaactcttaaagacttatcaagggcacattttcttcatgacactgcggagccaggtcctttgatacaactgggatgtggaatgacttctggagctcttggagcatcgtgtgtttacccattacaggtcataagaacaagaatgcaagctgatagctcaaaaacaagcatgggccaagagtttctgaaaacgctaagaggcgaaggtctaaaaggtttttacagaggaatcttccccaacttcttcaaagtcattccttccgcaagcatttcgtaccttgtctacgaagctatgaagaaaaatcttgcccttgattaaaaaaagcaagaaacctaatgttgtgttcacagagagatacagtgaaaactccttgatggtgacgacaaaaaaaaaacttgagctttccgttttcctttttttggattcggtaaaggtcattcgagtgtagaaaatgtaacttgatctgattgattcttgattcttctttagtagtttggtgagtccataaacactcatttcttaagaaaatagtttttatgct

SEQ ID NO: 10923 - protein, 478 aa, Arabidopsis thaliana
MEAEKSKQNPGKKPVEATMEHVLVALRETKEKREIRIQKLFEFFDNSKLGFLDDTQIEKGLSSLSIPPKYRYASDFLKVCDSNQDGRVDYQEFRRYMDAKELELYKIFQAIDIEHNGDICPAELWEALDKAGIKIKDEELASFMEHVDKDNNGIITFEEWRDFLLLNPHEATIENIYHHWERVCLIDIGEQAVIPDGISAHAQRSKLLLAGGIAGAVSRTATAPLDRLKVALQVQRTNLGVVPTIKKIWREDKLLGFFRGNGLNVAKVAPESAIKFAAYEMLKPIIGGADGDIGTSGRLLAGGLAGAVAQTAIYPMDLVKTRLQTFVSEVGTPKLWKLTKDIWIQEGPRAFYRGLCPSLIGIIPYAGIDLAAYETLKDLSRAHFLHDTAEPGPLIQLGCGMTSGALGASCVYPLQVIRTRMQADSSKTSMGQEFLKTLRGEGLKGFYRGIFPNFFKVIPSASISYLVYEAMKKNLALD

SEQ ID NO: 10924 - protein, 460 aa, Arabidopsis thaliana
MEHVLVALRETKEKREIRIQKLFEFFDNSKLGFLDDTQIEKGLSSLSIPPKYRYASDFLKVCDSNQDGRVDYQEFRRYMDAKELELYKIFQAIDIEHNGDICPAELWEALDKAGIKIKDEELASFMEHVDKDNNGIITFEEWRDFLLLNPHEATIENIYHHWERVCLIDIGEQAVIPDGISAHAQRSKLLLAGGIAGAVSRTATAPLDRLKVALQVQRTNLGVVPTIKKIWREDKLLGFFRGNGLNVAKVAPESAIKFAAYEMLKPIIGGADGDIGTSGRLLAGGLAGAVAQTAIYPMDLVKTRLQTFVSEVGTPKLWKLTKDIWIQEGPRAFYRGLCPSLIGIIPYAGIDLAAYETLKDLSRAHFLHDTAEPGPLIQLGCGMTSGALGASCVYPLQVIRTRMQADSSKTSMGQEFLKTLRGEGLKGFYRGIFPNFFKVIPSASISYLVYEAMKKNLALD

SEQ ID NO: 10925 - protein, 382 aa, Arabidopsis thaliana
MDAKELELYKIFQAIDIEHNGDICPAELWEALDKAGIKIKDEELASFMEHVDKDNNGIITFEEWRDFLLLNPHEATIENIYHHWERVCLIDIGEQAVIPDGISAHAQRSKLLLAGGIAGAVSRTATAPLDRLKVALQVQRTNLGVVPTIKKIWREDKLLGFFRGNGLNVAKVAPESAIKFAAYEMLKPIIGGADGDIGTSGRLLAGGLAGAVAQTAIYPMDLVKTRLQTFVSEVGTPKLWKLTKDIWIQEGPRAFYRGLCPSLIGIIPYAGIDLAAYETLKDLSRAHFLHDTAEPGPLIQLGCGMTSGALGASCVYPLQVIRTRMQADSSKTSMGQEFLKTLRGEGLKGFYRGIFPNFFKVIPSASISYLVYEAMKKNLALD

SEQ ID NO: 10926 - DNA, 1990 bp, Arabidopsis thaliana
gatacttgcttgcgccttataggctacaggagcgagagcaacgaaagcgagaggaagaatctatcaataatttctgggtttaagctgatctctggatcttcctcaattttactttttcagctcagaaaaatttgggacttttttttgctgcattttttggttccgaattttctcctccgccttttttaatttttgagaatggatggatcaggcacaggcagtagaagtggggtagaatcgattctaccaaattacaagcttgggagaactcttggtattggttcctttggtagggtgaagatagctgagcatgcattgacaggacataaggttgctatcaagatcctcaatcgtcgcaaaatcaagaacatggagatggaggagaaagtgaggagagagatcaaaatcttgagactatttatgcatcctcacatcatccgtctctatgaggttatagagactcccacagatatttatcttgtcatggagtatgtgaactctggtgagctatttgactatattgttgagaagggtagattgcaggaggatgaggcgaggaacttttttcagcagataatatcaggagtggaatactgccatcgaaacatggtggttcacagagacctcaagcctgaaaacttgcttttggactctaaatgcaatgttaagattgctgattttggcctgagcaacataatgcgagatggtcattttttgaagacaagttgtggaagtccaaattatgccgctccagaggtaatttcgggcaagttatatgctggccctgaagtagatgtctggagctgtggtgtgatactctacgctcttctctgtgggacgcttccatttgatgatgaaaacattcccaacctttttaagaagataaagggagggatatacacattacctagccatttatctcctggtgctagagatttgatcccccggatgcttgtagttgaccccatgaaacgagtaaccatccctgagatccggcaacacccttggttccaagctcatcttccgaggtatttagctgttcctcctccagatactgtgcaacaggcaaaaaagattgacgaggagattctccaagaagttatcaatatgggatttgacagaaaccacctcatcgaatcgctccgcaaccgaacccagaatgatggcactgtgacgtactatctgatactggacaatcgtttccgtgcctctagtggttatctcggggctgagtttcaagagaccatggaaggtactccccgtatgcatcagcagaaagcgttgcttcacctgttagccatcggcttccaggactgatggaatatcaaggagttggcttgagatctcaataccctgttgagagaaaatgggctcttggacttcagtctcgggctcatccccgtgaaataatgacggaagtcctgaaagccctgcaagatttgaatgtatgttggaagaagatagggcactacaacatgaagtgcagatgggttcctaacagcagcgcagatggtatgctcagtaactcgatgcacgataacaactactttggagacgagtccagcataatagagaacgaagcagctgttaagtcgcccaatgttgtcaagtttgaaattcagttgtataaaactcgggacgacaagtatctactggatttgcagagagtacaaggtcctcagttcttgttcttggatctgtgtgctgcttttcttgctcagctccgagtcctctgaatactaaaccggacctcttcaagaataatccccacttattcctttttttttttttttcttattcgtctaagaaattatttagaaaacgtaaccctttttttcttcttctctttctttctatttctatatgcgtgctctactcaaatacctcttttaacttaaatgtaagactgagcaagagtaaaaaaaagacactttgtacataacttgtagtgcatcatgccaccaaaaaaaaaaaaaaaaaaaaaaaaaag

SEQ ID NO: 10927 - protein, 372 aa, Arabidopsis thaliana
MDGSGTGSRSGVESILPNYKLGRTLGIGSFGRVKIAEHALTGHKVAIKILNRRKIKNMEMEEKVRREIKILRLFMHPHIIRLYEVIETPTDIYLVMEYVNSGELFDYIVEKGRLQEDEARNFFQQIISGVEYCHRNMVVHRDLKPENLLLDSKCNVKIADFGLSNIMRDGHFLKTSCGSPNYAAPEVISGKLYAGPEVDVWSCGVILYALLCGTLPFDDENIPNLFKKIKGGIYTLPSHLSPGARDLIPRMLVVDPMKRVTIPEIRQHPWFQAHLPRYLAVPPPDTVQQAKKIDEEILQEVINMGFDRNHLIESLRNRTQNDGTVTYYLILDNRFRASSGYLGAEFQETMEGTPRMHQQKALLHLLAIGFQD

SEQ ID NO: 10928 - protein, 315 aa, Arabidopsis thaliana
MEMEEKVRREIKILRLFMHPHIIRLYEVIETPTDIYLVMEYVNSGELFDYIVEKGRLQEDEARNFFQQIISGVEYCHRNMVVHRDLKPENLLLDSKCNVKIADFGLSNIMRDGHFLKTSCGSPNYAAPEVISGKLYAGPEVDVWSCGVILYALLCGTLPFDDENIPNLFKKIKGGIYTLPSHLSPGARDLIPRMLVVDPMKRVTIPEIRQHPWFQAHLPRYLAVPPPDTVQQAKKIDEEILQEVINMGFDRNHLIESLRNRTQNDGTVTYYLILDNRFRASSGYLGAEFQETMEGTPRMHQQKALLHLLAIGFQD

SEQ ID NO: 10929 - protein, 313 aa, Arabidopsis thaliana
MEEKVRREIKILRLFMHPHIIRLYEVIETPTDIYLVMEYVNSGELFDYIVEKGRLQEDEARNFFQQIISGVEYCHRNMVVHRDLKPENLLLDSKCNVKIADFGLSNIMRDGHFLKTSCGSPNYAAPEVISGKLYAGPEVDVWSCGVILYALLCGTLPFDDENIPNLFKKIKGGIYTLPSHLSPGARDLIPRMLVVDPMKRVTIPEIRQHPWFQAHLPRYLAVPPPDTVQQAKKIDEEILQEVINMGFDRNHLIESLRNRTQNDGTVTYYLILDNRFRASSGYLGAEFQETMEGTPRMHQQKALLHLLAIGFQD

SEQ ID NO: 10930 - DNA, 3663 bp, Arabidopsis thaliana
aaatcaccaccaaacataaaaccgtaagaaaagtttcgatttttattttctgcgatccaaaggtctagtgatgaattgaatttggtttttgtttttataattgaagaatgaagaaataaacagttgatgggttcttcgcttcttctcttgttgtgttagtgataagcacgcctggcttctcatcattccctccaacctttctctctctaaaagacttcaattgttttatcagcttctctctctaaataaagctctcaattcaattctctctctttcacttttttttcctctgcttgcttcttctgttcatctttttgcttcgtcaaaattttgaccaaagttttgtacttttttgttgctgcaatttttgtgattagattggatctgggcttggagctgaatagcggatttgtataaggttattattagtcttctctatcgttgcggcgttcataagttggagaaagtggtaaagactgcttaagtatgtctgtttctatgagagatttagatccagctttccaaggagctggacagaaagctggtattgagatatggcgtatagagaatttcatccctaccccaattccaaaatcttctattgggaagtttttcaccggagattcttacatagtattgaagacaacggcgttaaaaactggtgcattgcgccatgatatccattactggcttggtaaagatacctctcaggatgaagccggtactgctgcagttaagacagttgaattagatgctgctctaggaggtcgtgcagtgcagtatcgggaagttcaaggccacgagactgagaaattcttgtcttattttaagccatgtatcattcctcaagaaggtggagtagcatcaggattcaagcatgtcgtagctgaagaacatattacccgcttgttcgtctgcagaggaaaacatgttgtccatgtcaaagaggttccttttgctcggagttcattaaaccatgacgatattttcattcttgacacaaagtccaagattttccaattcaatggatccaattctagtatccaagagagagcaaaagcactggaagtggttcagtacatcaaagatacttaccatgatgggacatgtgaagttgctacagttgaggatgggaaacttatggctgatgctgatagtggagaattttggggtttctttggtgggtttgctccgctacctaggaaaacagctaatgatgaagacaaaacttataattcagatatcaccagattattttgtgtcgagaagggacaggcaaatcctgttgaaggcgatacattgaagagggagatgctggatacaaacaagtgttacattcttgattgtggaattgaagtgtttgtttggatgggaagaaccacttctcttgatgatagaaaaattgcgagtaaagcagcagaagaaatgatccgttcatctgaacgaccgaaatcgcaaatgatccgcataatagaagggtttgaaacagtaccattccgatcaaagtttgaatcttggactcaagaaactaatacaaccgtgtcagaagatggtagaggcagagttgctgctcttttgcaacgacaaggagtaaatgtcagaggcctgatgaaagctgctccgcctaaagaagagcctcaggttttcatcgactgcacgggaaatctgcaggtttggcgtgtgaatggtcaggcaaagactctccttcaagctgctgatcattcaaaattctacagtggagattgctatgttttccagtattcttatcccggagaagaaaaagaagaagttcttataggaacgtggtttggcaaacaaagtgtggaggaagaaagaggttctgcagtctctatggcaagcaaaatggttgagtcaatgaaatttgtcccagcccaagctcgcatttatgaaggaaaggaaccaattcaattcttcgtgattatgcaaagctttatcgttttcaagggtggtattagcagtggatacaagaaatacatagccgagaaagaagttgatgatgatacatacaatgagaatggtgttgctctattccgaattcaagggtctggtccggaaaatatgcaagctatacaagttgacccggttgctgcatcactgaactcctcgtactattacatactacataatgattcttccgtctttacttgggctggaaatttatcaaccgcaactgaccaagaactggcggaaaggcagctagatctgattaagccaaatcaacaatctagagcacaaaaggaaggttcagaatcagaacagttctgggagttattaggaggcaaagctgaatattcgagccaaaagctcacaaaggaacccgagcgtgaccctcacttgttctcttgtacattcacaaaagaagttctcaaggtgacagagatatataactttacacaggatgacttgatgaccgaagatatatttatcatagactgtcactcagaaatctttgtctgggttggccaagaagtagtcccaaagaacaagttactagctttaactattggagagaaattcatcgagaaagattctctcctggagaagttatcccctgaagcccctatttatgtgatcatggaaggcggtgagccgtcattcttcacccggttcttcacttcttgggattcctcaaaatccgctatgcatggaaactcattccaaagaaaacttaaaattgtcaaaaatggtggaactccagtggcagataaaccaaaacgaagaactccagcttcatatggtggccgtgccagcgttcctgacaagtcgcagcagcggtcaagaagcatgtcatttagtccagacagggttcgcgtgaggggcagatctccggcgttcaatgcactcgcagcaacatttgagagccaaaatgcaagaaacctgtcaactcctcccccagtagttaggaaactctacccaagatctgttactcctgactcctcaaagtttgctcccgctcccaagtcttcagccatcgcttctcgaagtgcacttttcgaaaaaatacctccacaagaaccttcaattccaaaaccagtcaaagcgagcccgaagacacctgagtctccagcgccagaatccaattcaaaagaacaagaagagaaaaaggaaaatgacaaggaggagggatcaatgagcagccggatagaatctcttacgattcaagaagatgctaaagaaggagtcgaagacgaggaagatttaccagctcacccttatgatcgtctcaagacaacttccactgatcctgtctctgacattgatgtaacaaggagagaggcttacctttcatcagaagagttcaaggagaaatttggcatgacgaaagaagctttctacaagctgcctaaatggaaacagaacaaattcaaaatggctgttcagcttttctgagatataatccttcttcttctccatcaaaagatccgctataaggagaagatacaagggacagtgtcagtgcattttaagctgcttctgctccccatgagaagcttaatacatttttcatggcttgtttaaaaaaaacaacccagagcagttttcttttcttctatttttctttcttctccttcaaatctatctgatttgttttaatgatctgtttgcttgtttctctctatttcattctccattttttaaaag

SEQ ID NO: 10931 - protein, 974 aa, Arabidopsis thaliana
MSVSMRDLDPAFQGAGQKAGIEIWRIENFIPTPIPKSSIGKFFTGDSYIVLKTTALKTGALRHDIHYWLGKDTSQDEAGTAAVKTVELDAALGGRAVQYREVQGHETEKFLSYFKPCIIPQEGGVASGFKHVVAEEHITRLFVCRGKHVVHVKEVPFARSSLNHDDIFILDTKSKIFQFNGSNSSIQERAKALEVVQYIKDTYHDGTCEVATVEDGKLMADADSGEFWGFFGGFAPLPRKTANDEDKTYNSDITRLFCVEKGQANPVEGDTLKREMLDTNKCYILDCGIEVFVWMGRTTSLDDRKIASKAAEEMIRSSERPKSQMIRIIEGFETVPFRSKFESWTQETNTTVSEDGRGRVAALLQRQGVNVRGLMKAAPPKEEPQVFIDCTGNLQVWRVNGQAKTLLQAADHSKFYSGDCYVFQYSYPGEEKEEVLIGTWFGKQSVEEERGSAVSMASKMVESMKFVPAQARIYEGKEPIQFFVIMQSFIVFKGGISSGYKKYIAEKEVDDDTYNENGVALFRIQGSGPENMQAIQVDPVAASLNSSYYYILHNDSSVFTWAGNLSTATDQELAERQLDLIKPNQQSRAQKEGSESEQFWELLGGKAEYSSQKLTKEPERDPHLFSCTFTKEVLKVTEIYNFTQDDLMTEDIFIIDCHSEIFVWVGQEVVPKNKLLALTIGEKFIEKDSLLEKLSPEAPIYVIMEGGEPSFFTRFFTSWDSSKSAMHGNSFQRKLKIVKNGGTPVADKPKRRTPASYGGRASVPDKSQQRSRSMSFSPDRVRVRGRSPAFNALAATFESQNARNLSTPPPVVRKLYPRSVTPDSSKFAPAPKSSAIASRSALFEKIPPQEPSIPKPVKASPKTPESPAPESNSKEQEEKKENDKEEGSMSSRIESLTIQEDAKEGVEDEEDLPAHPYDRLKTTSTDPVSDIDVTRREAYLSSEEFKEKFGMTKEAFYKLPKWKQNKFKMAVQLF

SEQ ID NO: 10932 - protein, 970 aa, Arabidopsis thaliana
MRDLDPAFQGAGQKAGIEIWRIENFIPTPIPKSSIGKFFTGDSYIVLKTTALKTGALRHDIHYWLGKDTSQDEAGTAAVKTVELDAALGGRAVQYREVQGHETEKFLSYFKPCIIPQEGGVASGFKHVVAEEHITRLFVCRGKHVVHVKEVPFARSSLNHDDIFILDTKSKIFQFNGSNSSIQERAKALEVVQYIKDTYHDGTCEVATVEDGKLMADADSGEFWGFFGGFAPLPRKTANDEDKTYNSDITRLFCVEKGQANPVEGDTLKREMLDTNKCYILDCGIEVFVWMGRTTSLDDRKIASKAAEEMIRSSERPKSQMIRIIEGFETVPFRSKFESWTQETNTTVSEDGRGRVAALLQRQGVNVRGLMKAAPPKEEPQVFIDCTGNLQVWRVNGQAKTLLQAADHSKFYSGDCYVFQYSYPGEEKEEVLIGTWFGKQSVEEERGSAVSMASKMVESMKFVPAQARIYEGKEPIQFFVIMQSFIVFKGGISSGYKKYIAEKEVDDDTYNENGVALFRIQGSGPENMQAIQVDPVAASLNSSYYYILHNDSSVFTWAGNLSTATDQELAERQLDLIKPNQQSRAQKEGSESEQFWELLGGKAEYSSQKLTKEPERDPHLFSCTFTKEVLKVTEIYNFTQDDLMTEDIFIIDCHSEIFVWVGQEVVPKNKLLALTIGEKFIEKDSLLEKLSPEAPIYVIMEGGEPSFFTRFFTSWDSSKSAMHGNSFQRKLKIVKNGGTPVADKPKRRTPASYGGRASVPDKSQQRSRSMSFSPDRVRVRGRSPAFNALAATFESQNARNLSTPPPVVRKLYPRSVTPDSSKFAPAPKSSAIASRSALFEKIPPQEPSIPKPVKASPKTPESPAPESNSKEQEEKKENDKEEGSMSSRIESLTIQEDAKEGVEDEEDLPAHPYDRLKTTSTDPVSDIDVTRREAYLSSEEFKEKFGMTKEAFYKLPKWKQNKFKMAVQLF

SEQ ID NO: 10933 - protein, 756 aa, Arabidopsis thaliana
MADADSGEFWGFFGGFAPLPRKTANDEDKTYNSDITRLFCVEKGQANPVEGDTLKREMLDTNKCYILDCGIEVFVWMGRTTSLDDRKIASKAAEEMIRSSERPKSQMIRIIEGFETVPFRSKFESWTQETNTTVSEDGRGRVAALLQRQGVNVRGLMKAAPPKEEPQVFIDCTGNLQVWRVNGQAKTLLQAADHSKFYSGDCYVFQYSYPGEEKEEVLIGTWFGKQSVEEERGSAVSMASKMVESMKFVPAQARIYEGKEPIQFFVIMQSFIVFKGGISSGYKKYIAEKEVDDDTYNENGVALFRIQGSGPENMQAIQVDPVAASLNSSYYYILHNDSSVFTWAGNLSTATDQELAERQLDLIKPNQQSRAQKEGSESEQFWELLGGKAEYSSQKLTKEPERDPHLFSCTFTKEVLKVTEIYNFTQDDLMTEDIFIIDCHSEIFVWVGQEVVPKNKLLALTIGEKFIEKDSLLEKLSPEAPIYVIMEGGEPSFFTRFFTSWDSSKSAMHGNSFQRKLKIVKNGGTPVADKPKRRTPASYGGRASVPDKSQQRSRSMSFSPDRVRVRGRSPAFNALAATFESQNARNLSTPPPVVRKLYPRSVTPDSSKFAPAPKSSAIASRSALFEKIPPQEPSIPKPVKASPKTPESPAPESNSKEQEEKKENDKEEGSMSSRIESLTIQEDAKEGVEDEEDLPAHPYDRLKTTSTDPVSDIDVTRREAYLSSEEFKEKFGMTKEAFYKLPKWKQNKFKMAVQLF

SEQ ID NO: 10934 - DNA, 2916 bp, Arabidopsis thaliana
gacttttgaagctgtaataatattcttgaatctattcctttctttctctttctcatgtttaatcggtgaaggctttactctgtttctttcatcatgtttcaatcaaaagccttaactttttctttagctctttccattacaagagacctctagcttcatactttttataaaaattctctctttttctcagtttaatctcaagaaatggtttcaagatcgtattcaaatctgttggagttagcttcaggagactcaccaacgtttggacgcatgaaccgacaaatcccacgaatcatggccgttgctggaatcatgtcaaacatcgataatgactctaaagacactgatctgtctcctaaagatcgtatcatcattgtagccaatgaattacctatacgagctcagagaagggttgatggtaatggtagtggtagtagtagtagtagtacttgttgtagcaaaggttggaacttttcttgggatgagaattcacttcttctccaattgaaagatgggttaggagatgaagctattgaagttatctatgttggttgtttgaaagaagagattcctcttaatgagcaagaagaagtgtatcagattcttcttgagagtttcaagtgtgtgcctacgtttttgcctttggatttgtacactagatactaccatggattctgtaagcaacagctttggcctttgtttcattacatgttgccactttctcctgatcttggaggtaggtttgataggactttgtggcaagcttatgtctctgtgaacaagatttttgctgatagaattatggaggtgattaatcctgaggatgattttgtgtggatacatgattatcatttgatggttttgcctactttcttgaggaagaggtttaacagagtcaagcttggtttcttccttcatagtccatttccatcgtctgagatttacaaaactttgcctattcgtgaagagcttcttcgggctttgctaaactcggatttgatagggttccatacttttgactacgctaggcatttcttgtcttgttgtagtcgaatgcttggtcttacttatgaatctaagagaggatacattggacttgagtattatggtagaaccgtgagtatcaaaattctacctgttggaatccacatgggtcagcttcagtcggttttgagcttacccgagactgaaaggaaagtcggggaacttattgaacggtatggtcgaaaaggcaggacgatgctgcttggtgtggatgatatggacattttcaaagggattactttaaagctgttggctatggagcagctgcttatgcaacatcctgaatggcaagggaaggttgtgttggtgcagatagctaatccggcgagagggaaagggaaagatgttaaagagatgcaagctgagacgtattcaactgttaagcggattaatgaaacgtttgggagacccggttacgatcctatagtattgatcgatgcaccgttgaagttctatgaaagggttgcttattacgtagtagctgagtgttgtttggtgacagcggttagggatgggatgaatcttataccttatgagtacatagtttctcgtcaaggaaatgagaaactggacaaaattctgaagctggaggcgaataatcgtaacaagaaaagcatgctggtggtttctgagtttattggttgctctccatcgctaagcggagccattcgtgttaatccatggaatgttgatgcagtagctgatgcaatggatagtgcccttgaagtagctgaaccggagaagcagctaagacatgagaagcattacaagtatgtgagcacacatgatgttggctattgggctcgtagcttcctccaagatcttgagaggagttgtggtgagcatggacgaaggaggtgttggggaattgggtttggtctcagtttcagagttgtggcactagaccagagcttcaggaagctgtcaatggaacacatagtatcagcttataagaggacaaagacacgggctatccttttagactatgatgatactttaatgccacaaggctcgatcgataaaaggccttcatcgaagtcaatcgacaaattgaacaccttgtgtagggacaagggcaatctggtgttcattgttagtgctaaaagccgagaaactctatcggactggtttagtccttgtgagaagcttggtattgctgctgaacatggctattttctgaggctaaggaaggcagtagagtgggaaaactgtgtggcagcagtagattgttcttggaagcaaattgccgagcctgtgatggaactctacaccgagacaaccgatggctcaacaattgaagacaaggagactgctcttgtttggagttatgaggatgctgaccctgattttggctcatgtcaagctaaggaacttctagatcatcttgaaagtgtccttgccaatgaacctgtaacagtgaaacgaggacagaactatgttgaggtcaagccacagggcgtgagcaagggacttatagcgagaaggatgctttcgatgatgcaagaaagaggaacacttcctgagtttgttctatgtattggagatgaccggtctgacgaagacatgtttgaggtgatctgcagttccactgaaggcccttcgattgccccaagagctgagattttcgcttgtactgtcggtcaaaagcctagcaaggccaagtattacctggatgacactactgagattgtcaggttaatgcatggtttagcttctgttacagaccagatcactcctgtttaaacaatcacagagaaagtatcagagactagagatcttatgtttgtatatctaccacggaaaattgtaacaaagagagatcttatgtttgttgacaatcttagaatatatgagtaaggctttacatcctac

SEQ ID NO: 10935 - protein, 860 aa, Arabidopsis thaliana
MVSRSYSNLLELASGDSPTFGRMNRQIPRIMAVAGIMSNIDNDSKDTDLSPKDRIIIVANELPIRAQRRVDGNGSGSSSSSTCCSKGWNFSWDENSLLLQLKDGLGDEAIEVIYVGCLKEEIPLNEQEEVYQILLESFKCVPTFLPLDLYTRYYHGFCKQQLWPLFHYMLPLSPDLGGRFDRTLWQAYVSVNKIFADRIMEVINPEDDFVWIHDYHLMVLPTFLRKRFNRVKLGFFLHSPFPSSEIYKTLPIREELLRALLNSDLIGFHTFDYARHFLSCCSRMLGLTYESKRGYIGLEYYGRTVSIKILPVGIHMGQLQSVLSLPETERKVGELIERYGRKGRTMLLGVDDMDIFKGITLKLLAMEQLLMQHPEWQGKVVLVQIANPARGKGKDVKEMQAETYSTVKRINETFGRPGYDPIVLIDAPLKFYERVAYYVVAECCLVTAVRDGMNLIPYEYIVSRQGNEKLDKILKLEANNRNKKSMLVVSEFIGCSPSLSGAIRVNPWNVDAVADAMDSALEVAEPEKQLRHEKHYKYVSTHDVGYWARSFLQDLERSCGEHGRRRCWGIGFGLSFRVVALDQSFRKLSMEHIVSAYKRTKTRAILLDYDDTLMPQGSIDKRPSSKSIDKLNTLCRDKGNLVFIVSAKSRETLSDWFSPCEKLGIAAEHGYFLRLRKAVEWENCVAAVDCSWKQIAEPVMELYTETTDGSTIEDKETALVWSYEDADPDFGSCQAKELLDHLESVLANEPVTVKRGQNYVEVKPQGVSKGLIARRMLSMMQERGTLPEFVLCIGDDRSDEDMFEVICSSTEGPSIAPRAEIFACTVGQKPSKAKYYLDDTTEIVRLMHGLASVTDQITPV

SEQ ID NO: 10936 - protein, 838 aa, Arabidopsis thaliana
MNRQIPRIMAVAGIMSNIDNDSKDTDLSPKDRIIIVANELPIRAQRRVDGNGSGSSSSSTCCSKGWNFSWDENSLLLQLKDGLGDEAIEVIYVGCLKEEIPLNEQEEVYQILLESFKCVPTFLPLDLYTRYYHGFCKQQLWPLFHYMLPLSPDLGGRFDRTLWQAYVSVNKIFADRIMEVINPEDDFVWIHDYHLMVLPTFLRKRFNRVKLGFFLHSPFPSSEIYKTLPIREELLRALLNSDLIGFHTFDYARHFLSCCSRMLGLTYESKRGYIGLEYYGRTVSIKILPVGIHMGQLQSVLSLPETERKVGELIERYGRKGRTMLLGVDDMDIFKGITLKLLAMEQLLMQHPEWQGKVVLVQIANPARGKGKDVKEMQAETYSTVKRINETFGRPGYDPIVLIDAPLKFYERVAYYVVAECCLVTAVRDGMNLIPYEYIVSRQGNEKLDKILKLEANNRNKKSMLVVSEFIGCSPSLSGAIRVNPWNVDAVADAMDSALEVAEPEKQLRHEKHYKYVSTHDVGYWARSFLQDLERSCGEHGRRRCWGIGFGLSFRVVALDQSFRKLSMEHIVSAYKRTKTRAILLDYDDTLMPQGSIDKRPSSKSIDKLNTLCRDKGNLVFIVSAKSRETLSDWFSPCEKLGIAAEHGYFLRLRKAVEWENCVAAVDCSWKQIAEPVMELYTETTDGSTIEDKETALVWSYEDADPDFGSCQAKELLDHLESVLANEPVTVKRGQNYVEVKPQGVSKGLIARRMLSMMQERGTLPEFVLCIGDDRSDEDMFEVICSSTEGPSIAPRAEIFACTVGQKPSKAKYYLDDTTEIVRLMHGLASVTDQITPV

SEQ ID NO: 10937 - protein, 830 aa, Arabidopsis thaliana
MAVAGIMSNIDNDSKDTDLSPKDRIIIVANELPIRAQRRVDGNGSGSSSSSTCCSKGWNFSWDENSLLLQLKDGLGDEAIEVIYVGCLKEEIPLNEQEEVYQILLESFKCVPTFLPLDLYTRYYHGFCKQQLWPLFHYMLPLSPDLGGRFDRTLWQAYVSVNKIFADRIMEVINPEDDFVWIHDYHLMVLPTFLRKRFNRVKLGFFLHSPFPSSEIYKTLPIREELLRALLNSDLIGFHTFDYARHFLSCCSRMLGLTYESKRGYIGLEYYGRTVSIKILPVGIHMGQLQSVLSLPETERKVGELIERYGRKGRTMLLGVDDMDIFKGITLKLLAMEQLLMQHPEWQGKVVLVQIANPARGKGKDVKEMQAETYSTVKRINETFGRPGYDPIVLIDAPLKFYERVAYYVVAECCLVTAVRDGMNLIPYEYIVSRQGNEKLDKILKLEANNRNKKSMLVVSEFIGCSPSLSGAIRVNPWNVDAVADAMDSALEVAEPEKQLRHEKHYKYVSTHDVGYWARSFLQDLERSCGEHGRRRCWGIGFGLSFRVVALDQSFRKLSMEHIVSAYKRTKTRAILLDYDDTLMPQGSIDKRPSSKSIDKLNTLCRDKGNLVFIVSAKSRETLSDWFSPCEKLGIAAEHGYFLRLRKAVEWENCVAAVDCSWKQIAEPVMELYTETTDGSTIEDKETALVWSYEDADPDFGSCQAKELLDHLESVLANEPVTVKRGQNYVEVKPQGVSKGLIARRMLSMMQERGTLPEFVLCIGDDRSDEDMFEVICSSTEGPSIAPRAEIFACTVGQKPSKAKYYLDDTTEIVRLMHGLASVTDQITPV

SEQ ID NO: 10938 - DNA, 2493 bp, Arabidopsis thaliana
ggtcctttcgcaaacccagggaaggggaaggtgaataagctctgcaaaatccctcccttcccttcttcttcttctacaagatttcaccatttctccatcctaaaccataacaacagagatatagagaagatgaagcactacagtcacggaattgatggtttacgaagcggtctttcaccttccgctaaacctttcgcaatcggttcttcttcttctcctgccttctctctcaaatctgaacacgaagattctatttggggtgattatactttagacctttcctttttatcctctgatgatcagagaagtggtctcgatgatgatgattcgttatctaacttgtctcgcgatgttgagactaataaagaaggattggttttagaggagaagatagctagttctggaaaggttttggtaaaccctaatccaagtttctcgaaattgcctgaggtattgatgaagtcctcagatgttgttggtgatgcgaagttgggtttgtcctgtgtctctgagaagtcttctacggagtctgacctagatgagtctgaggaagattctccttgttggaaaggaatgctttctcataagagtctggcttctggtactaaatctatgacttccaggcgttctactgatgatcttagtgggtttcgtaagttgaatcctttggcacctcatttataccatctagttctaagaagaaacttgaaacggatggggagaaatgtgaagagactagttcttcgtcgttgaagaagtctttgtcctcgacttttccgtcgtcgtctggagaatttgatttaactgaccctcctcttgaagatggaagaaatgatgcagcagaaaagacaagcatcttgacccacaatgcagatgaaattctcggttttgtaactagtgatagtgtttccaagactgtgagcatgttggattctagaaatgaattccaaccatctaaaaggttggatcctttggcccctgtctttgttccctctagtgcaaaactaggtccttctgttcatgagaagctaggagattttgtggtaaatgcatattcaacttctgctcttgcttcttcacatgttaagtcgctagataagggcaaggtagtgacatcttctggagaagttggccacagttttaagagtcaatatggtggtcatgattttggttcgacatcttcatacggtccttggatagaatctgaggttgggattactgagtatgcaaaactaggaagcagcaacaaatctcaaggtcagcggagattgaatccattggcccgtcagttctctcttgcagatgctaaacaaaagccatatggctatggtaaaaaccaagctgcagatgatttatcgctagtggtgaatactagcggtttatacattccagctcgttatagggaggaccataatgtagtagatgcagacttagcacaatcctcagtaaatgtggagcgttttcttcccaacatgtcacatggcggttcttcacttataactccaaaggcagacagtaactttgggtctactaagtggattgcggtggagccaaaccctacattttcagtaaagggtaatagagattttaagcatcatcttccatttcatgttgtagaaactgcagcgagttcatctacaagcgatatgaaagctttacctggcccatctccaaaaatggatgtgaagaaactacttacaacgatgcatgggctgtcagagttactaacacttgcacatggttcagaatcttcagattcaccgaatgcggaagagcttgatctcattaacagtactgtacagaatctcaatttgtacatccaaaacaacagtcaggaacatgctgggaatcaaagcgttgcacaatacaattcatatgatctaaagctgttacctaacaagagtaagctatcgattagagaccatcagtttccaacggcaaacaatatgactgtcgaccttgatgtgaaaaggaaggataagtactctgtggtttcaagggagactgtcccaggttctcgttcgtatcaatatggtgcaaccgaagataacggctttggtcaggttgtgcctacaaatggttaccaacagcatcaaggtgtggagcagattaaccaaaatgcactgttctataaaagcttatggctgaaggctgaagcagacaggtgtttgatggtctacgagacttctctttcgaacccatatccttgaagatattagaaaggttggcatgtaaaatatcaaagaacagcctcaagatctccaatttctggatggagactagataaggcatacaaatcattttcctaagaagtggctgacacatgactaattgtgcagaaagatgaaaacctgggaaatgtttggacgtggagcctattgattgctgaagattgtaatgttttcttgttatggtcctgactctttgattaagagatatataaacaaaccactgttactcttttgttaactactacgtcatcacacttttgtt

SEQ ID NO: 10939 - protein, 428 aa, Arabidopsis thaliana
MLDSRNEFQPSKRLDPLAPVFVPSSAKLGPSVHEKLGDFVVNAYSTSALASSHVKSLDKGKVVTSSGEVGHSFKSQYGGHDFGSTSSYGPWIESEVGITEYAKLGSSNKSQGQRRLNPLARQFSLADAKQKPYGYGKNQAADDLSLVVNTSGLYIPARYREDHNVVDADLAQSSVNVERFLPNMSHGGSSLITPKADSNFGSTKWIAVEPNPTFSVKGNRDFKHHLPFHVVETAASSSTSDMKALPGPSPKMDVKKLLTTMHGLSELLTLAHGSESSDSPNAEELDLINSTVQNLNLYIQNNSQEHAGNQSVAQYNSYDLKLLPNKSKLSIRDHQFPTANNMTVDLDVKRKDKYSVVSRETVPGSRSYQYGATEDNGFGQVVPTNGYQQHQGVEQINQNALFYKSLWLKAEADRCLMVYETSLSNPYP

SEQ ID NO: 10940 - protein, 250 aa, Arabidopsis thaliana
GPFANPGKGKVNKLCKIPPFPSSSSTRFHHFSILNHNNRDIEKMKHYSHGIDGLRSGLSPSAKPFAIGSSSSPAFSLKSEHEDSIWGDYTLDLSFLSSDDQRSGLDDDDSLSNLSRDVETNKEGLVLEEKIASSGKVLVNPNPSFSKLPEVLMKSSDVVGDAKLGLSCVSEKSSTESDLDESEEDSPCWKGMLSHKSLASGTKSMTSRRSTDDLSGFRKLNPLAPHLYHLVLRRNLKRMGRNVKRLVLRR

SEQ ID NO: 10941 - protein, 245 aa, Arabidopsis thaliana
MSHGGSSLITPKADSNFGSTKWIAVEPNPTFSVKGNRDFKHHLPFHVVETAASSSTSDMKALPGPSPKMDVKKLLTTMHGLSELLTLAHGSESSDSPNAEELDLINSTVQNLNLYIQNNSQEHAGNQSVAQYNSYDLKLLPNKSKLSIRDHQFPTANNMTVDLDVKRKDKYSVVSRETVPGSRSYQYGATEDNGFGQVVPTNGYQQHQGVEQINQNALFYKSLWLKAEADRCLMVYETSLSNPYP

SEQ ID NO: 10942 - DNA, 2482 bp, Arabidopsis thaliana
gaagtaagtaaccaaaaacgcttctaatctttcgtttacaacaaatatctctctctctctcgctctctctttcttcttcttcatcttctttcatggctgttactggctgggcaatcacaatctgaattctttcttcctccttgtctctctgattttcgccgagttttgggggctcttgttgttacacgatgagtctggtggttggtcagtctctgggtttaactctagtcggtgatggtctttcgttacgcaattccaaaataaatgtcggaaaatcaaagtttttctcggtaaatcggaggagattggcgcgtgcggccctggtacaagctaggcctaaggaagacggagcggcggcaagtccttccccatcgtcgagaccggcgtcagttgtgcagtaccgacgagctgatctcgcggatgatcttcaagccgaggcacgagctttgggtcgtgctattgatgcttctatttactctccggagctcatcgccaggaaacatggctctcagcctttcaaggctttgcggagaagtttggagatattgggagctttgggtggtttcgctttgaaattggggattgaccagaagcagggcaacttagagaagaacatgaagaagagagcaatcgagctccggcggatcttcactcgtctcggacctacttttgttaaattgggtcaaggtttgtccacccgacccgacctctgtccacccgattaccttgaagaacttgcagagcttcaggatgctttgccaaccttccctgatgcagaggcatttgcttgcattgagagagagttggatttgtcgctagagaccattttctcgtctgtatctcctgagccaatcgcagcagctagtcttggccaggtttacaaagctcagctgaggtattcaggtcaggttgttgctgtcaaagttcaacgccctgggatcgaagaagccattggccttgatttttaccttattagaggagttgggaaactcattaacaagtatgtagacttcatcactaccgatgtccttacccttatcgatgagttcgcctgcagagtttatcaggagctaaactatgtccaggaggcccaaaatgccagaaggtttaaaaaattgtatgcagataaagcagatgttcttgtgcctgatatattctgggattacacgagccgcaaggtgctaacaatggaatgggttgagggaactaaactgaatgagcaacttgccattgagagtcagggattgaaggttctggatctcgtgaatacaggaatccagtgtagcctaaggcaactcttggagtatggctttttccatgctgaccctcatcctggtaatctcttggcaacacctgatggaaaacttgcctttctagactttggcatgatgagtgagacaccagaggaagctagatttgctatcataggccatgttgtccatttagtgaaccgagattatgaagccatggcacgagattactatgctctgaagttcttgtcccctgatgtggatgttactcctatcataccagctctcagagacttctttgacgatgcacttaattataccgtgagcgagctcaatttcaaaactttggttgatggtctaggtgctgtcttctaccagtatccatttaatgtcccgccctactatgctttgattttgaggtcgcttactgtgcttgaaggtttggcactctacgcagatcctaatttcaaagtactagctgcttcatacccatattttgccaaaaggcttctcactgatccaaacccgtatctaagagatgcccttatcgagctactattcaaagacggaaaatttaggtggaatagactcgagaaccttctacaacagggaagtaaagatagagacttctcagcaaaggatgctctacaaccagttttgaagcttttgctggatccaaatggcgaagaacttcgattgttagtaattaaagaagctgtacgagtcagtgaagcaattgcgctgggcactgttgttgatacatacaattcccttcctgagtttctgagatctcttgtcttcaatggaaatgggaatggccctcttacaatgagtaccgcggaacttcaaagtacgcttgagcttcgggatcaggtctccagaatctggggccttcttcaatcttcagaaagctttgatcctgctattttgcaaccaatactacaggtgttacaacaaccagaggcacgaagacttggaggacgtgttgcaggcggtgtaggccaacgtcttgcagctcggtttctgcaacaacttcttcgagccacaacaccatcttctgcaccatcccaataggtcctcttttcttctcagtgaaatggtaaattgtatattaaggcgagacactcgcaaaccacagaattgtttcatgttacagtaatatagtatcattctttctctttgtattgtactagtgaaaaaggaccaaagtataaccaatgagaaatacctcc

SEQ ID NO: 10943 - protein, 711 aa, Arabidopsis thaliana
MSLVVGQSLGLTLVGDGLSLRNSKINVGKSKFFSVNRRRLARAALVQARPKEDGAAASPSPSSRPASVVQYRRADLADDLQAEARALGRAIDASIYSPELIARKHGSQPFKALRRSLEILGALGGFALKLGIDQKQGNLEKNMKKRAIELRRIFTRLGPTFVKLGQGLSTRPDLCPPDYLEELAELQDALPTFPDAEAFACIERELDLSLETIFSSVSPEPIAAASLGQVYKAQLRYSGQVVAVKVQRPGIEEAIGLDFYLIRGVGKLINKYVDFITTDVLTLIDEFACRVYQELNYVQEAQNARRFKKLYADKADVLVPDIFWDYTSRKVLTMEWVEGTKLNEQLAIESQGLKVLDLVNTGIQCSLRQLLEYGFFHADPHPGNLLATPDGKLAFLDFGMMSETPEEARFAIIGHVVHLVNRDYEAMARDYYALKFLSPDVDVTPIIPALRDFFDDALNYTVSELNFKTLVDGLGAVFYQYPFNVPPYYALILRSLTVLEGLALYADPNFKVLAASYPYFAKRLLTDPNPYLRDALIELLFKDGKFRWNRLENLLQQGSKDRDFSAKDALQPVLKLLLDPNGEELRLLVIKEAVRVSEAIALGTVVDTYNSLPEFLRSLVFNGNGNGPLTMSTAELQSTLELRDQVSRIWGLLQSSESFDPAILQPILQVLQQPEARRLGGRVAGGVGQRLAARFLQQLLRATTPSSAPSQ

SEQ ID NO: 10944 - protein, 569 aa, Arabidopsis thaliana
MKKRAIELRRIFTRLGPTFVKLGQGLSTRPDLCPPDYLEELAELQDALPTFPDAEAFACIERELDLSLETIFSSVSPEPIAAASLGQVYKAQLRYSGQVVAVKVQRPGIEEAIGLDFYLIRGVGKLINKYVDFITTDVLTLIDEFACRVYQELNYVQEAQNARRFKKLYADKADVLVPDIFWDYTSRKVLTMEWVEGTKLNEQLAIESQGLKVLDLVNTGIQCSLRQLLEYGFFHADPHPGNLLATPDGKLAFLDFGMMSETPEEARFAIIGHVVHLVNRDYEAMARDYYALKFLSPDVDVTPIIPALRDFFDDALNYTVSELNFKTLVDGLGAVFYQYPFNVPPYYALILRSLTVLEGLALYADPNFKVLAASYPYFAKRLLTDPNPYLRDALIELLFKDGKFRWNRLENLLQQGSKDRDFSAKDALQPVLKLLLDPNGEELRLLVIKEAVRVSEAIALGTVVDTYNSLPEFLRSLVFNGNGNGPLTMSTAELQSTLELRDQVSRIWGLLQSSESFDPAILQPILQVLQQPEARRLGGRVAGGVGQRLAARFLQQLLRATTPSSAPSQ

SEQ ID NO: 10945 - protein, 378 aa, Arabidopsis thaliana
MEWVEGTKLNEQLAIESQGLKVLDLVNTGIQCSLRQLLEYGFFHADPHPGNLLATPDGKLAFLDFGMMSETPEEARFAIIGHVVHLVNRDYEAMARDYYALKFLSPDVDVTPIIPALRDFFDDALNYTVSELNFKTLVDGLGAVFYQYPFNVPPYYALILRSLTVLEGLALYADPNFKVLAASYPYFAKRLLTDPNPYLRDALIELLFKDGKFRWNRLENLLQQGSKDRDFSAKDALQPVLKLLLDPNGEELRLLVIKEAVRVSEAIALGTVVDTYNSLPEFLRSLVFNGNGNGPLTMSTAELQSTLELRDQVSRIWGLLQSSESFDPAILQPILQVLQQPEARRLGGRVAGGVGQRLAARFLQQLLRATTPSSAPSQ

SEQ ID NO: 10946 - DNA, 3060 bp, Arabidopsis thaliana
gggctggcttaggtttaaatttaaaggctttaaaaagcttcttcctctcttccgttctgacgactgaaatcttcttcaccggcgaaatcgaaaagttttccagcaagaaattgaagatgttgcagagcaaagttttcaataagaaaaccagaggaggaagaatccaaaagcaagtaagagaggtttatctacgagatgacatatactgtggagctttctcttgcaagtcttgtgattcttcagctgctcgtttgtcttcctctaagataatcgttgttgataccaacgtcgttcttcaccaaattgatttgttggaaaataaggctatagacactgttgttgttctgtctgtggtgttggacgaagttaagaacaggaatagatcggtttacaatagaatcagacttctctgcagcaatccagcgagacaattctatgttttctccaatcatgtccacaaggatacttatgtgcaagccatggagaaagagagtgcaaatgaccacaacgatagagctattcgcgtcgctactctatggtaccagaagcatctaggggatacatctcaggtgttgcttgtaactaatgatagggaaaataaacggaaggccactgaagagggaatatctgcggagacaattgaggcttatgttaaatcacttggacaacctgaattgctggatctgcttgcccaaccaaccaatgaagacataactatggaagatgcagatgattctagaccttcgaagaggaaacttatataccaagagcataagcccatgactgagattactgctggcttacaccgtggaatatatcatcaaggaaaactccgggtcaatcgtttcaatccttacgaagcttatgttggaagcgagagcattggtgaagagataattatctatgggcgcagcaacatgaacagggcttttgatggtgatattgttgcagtcgaactcttgcctcgggatcaatggcaagatgagaaggcattatctatagctgaagaagatgatgaagaggatgatactgttcatttggctcccgacaatgttgatgatgctcctagaacctcaaatttatcccatgaaacttctggggataaaaatgcagcccctgttcgtccatcaggccgtgtagtcggtgttatccgtagaaattggcactcctattgtggatctcttgaaccgatgtcactacctgctggtagtggtggaacggcacatgctttatttgtctctaaagatcgcagaattcccaagatccgcattaatactcgacagctgcagaaccttttggatatgaggatagtagtggcagttgattcctgggaccgtcaatctcgatatccttctggtcattacgtacgaccaatcggcaaaataggtgacaaggaaactgaaacagaggttgtgttgatagagaatgatgttgactactcgccgttctcttctcaagttctggcatgcttgccacccttaccttggtctgtatcctctgaagacgtatccaatcctgttaggcaagacttacgacatttgcttgtctttagtgtggaccctccgggttgcaaggatattgatgatgcattgcactgtacatcgcttccaaacgggaactttgaacttggagtccacattgctgatgtaacgaattttgttcaccctggtactcctttggatgatgaggcatcaaaaagaggcacatctgtctaccttgttgagcgccgtattgacatgcttcccaaacctttaactgaagatatttgctctcttagagctgatgtggaaaggcttgcattctcggttatttgggaaatgagccctgacgctgagattatctcaacgagattcacaaagagtattatcaagtcttctgcagcattgtcctatattgaagctcaggctcggatggatgacagccgattgacagactccctgactacagatctgaggaatatgaataccttggcaaagataatgaggcaaaggcgtatcgataggggagccttaactcttgcttctgcggaagtcaaatttgatattgatccggagaatcatgatcctcttaacattggtatgtatcagattctcgaagcaaaccaaatggttgaggaattcatgcttgctgcaaatgtttccgtcgctggacagatcctgaaactattcccttcttgttcactattaaggcgtcatcctactccaacaagagaaatgcttgaaccactactgcgtactgctgcagctattgggcttaccttagatgtctcttcatctaaagctttggctgattcactggaccgagctgtgggtgaggatccatatttcaacaagttgatcaggatattggcaactaggtgcatgacgcaggctgtgtacttctgtagtggggatctcagtcctcccgaatatcatcattatgggcttgcagcacccctgtatactcattttacatcccctatccgtagatatgccgatgtctttgtgcacaggttacttgctgcgtcattaggaatatacaagcttccaacggtgttccaagacagacctcaacttactagtgttgctgataatttgaactatcgacataggaatgcccagatggcaggtcgagcttcagtagagctgtacgttctcatttacttcagaacccgacccacagatgaagaggcgagagttgtgaagataagatccaatggttttatagtatttgtccccaagtatggaatcgaaggccctgtttatttaacaggaaagggagagaaaggagctggtgattggtatgttgatgaggagaagcaaaagattgttaagatggatggaagtttatcttacagtgtcttgcaaacagtgaagatccacatggaggtagtagagcctcagcctaaccgaccgaaactccaactcactctcttgtaaaactcttaaaccttgtagtttcactttcccttgtgtggcacggaccgattgtcaacagctttcctctgtgttcattatcgaagtcaaagacattgtgtcgtcaattcattatctatagatggatgccaattttgggaggtgc

SEQ ID NO: 10947 - protein, 971 aa, Arabidopsis thaliana
AGLGLNLKALKSFFLSSVLTTEIFFTGEIEKFSSKKLKMLQSKVFNKKTRGGRIQKQVREVYLRDDIYCGAFSCKSCDSSAARLSSSKIIVVDTNVVLHQIDLLENKAIDTVVVLSVVLDEVKNRNRSVYNRIRLLCSNPARQFYVFSNHVHKDTYVQAMEKESANDHNDRAIRVATLWYQKHLGDTSQVLLVTNDRENKRKATEEGISAETIEAYVKSLGQPELLDLLAQPTNEDITMEDADDSRPSKRKLIYQEHKPMTEITAGLHRGIYHQGKLRVNRFNPYEAYVGSESIGEEIIIYGRSNMNRAFDGDIVAVELLPRDQWQDEKALSIAEEDDEEDDTVHLAPDNVDDAPRTSNLSHETSGDKNAAPVRPSGRVVGVIRRNWHSYCGSLEPMSLPAGSGGTAHALFVSKDRRIPKIRINTRQLQNLLDMRIVVAVDSWDRQSRYPSGHYVRPIGKIGDKETETEVVLIENDVDYSPFSSQVLACLPPLPWSVSSEDVSNPVRQDLRHLLVFSVDPPGCKDIDDALHCTSLPNGNFELGVHIADVTNFVHPGTPLDDEASKRGTSVYLVERRIDMLPKPLTEDICSLRADVERLAFSVIWEMSPDAEIISTRFTKSIIKSSAALSYIEAQARMDDSRLTDSLTTDLRNMNTLAKIMRQRRIDRGALTLASAEVKFDIDPENHDPLNIGMYQILEANQMVEEFMLAANVSVAGQILKLFPSCSLLRRHPTPTREMLEPLLRTAAAIGLTLDVSSSKALADSLDRAVGEDPYFNKLIRILATRCMTQAVYFCSGDLSPPEYHHYGLAAPLYTHFTSPIRRYADVFVHRLLAASLGIYKLPTVFQDRPQLTSVADNLNYRHRNAQMAGRASVELYVLIYFRTRPTDEEARVVKIRSNGFIVFVPKYGIEGPVYLTGKGEKGAGDWYVDEEKQKIVKMDGSLSYSVLQTVKIHMEVVEPQPNRPKLQLTLL

SEQ ID NO: 10948 - protein, 933 aa, Arabidopsis thaliana
MLQSKVFNKKTRGGRIQKQVREVYLRDDIYCGAFSCKSCDSSAARLSSSKIIVVDTNVVLHQIDLLENKAIDTVVVLSVVLDEVKNRNRSVYNRIRLLCSNPARQFYVFSNHVHKDTYVQAMEKESANDHNDRAIRVATLWYQKHLGDTSQVLLVTNDRENKRKATEEGISAETIEAYVKSLGQPELLDLLAQPTNEDITMEDADDSRPSKRKLIYQEHKPMTEITAGLHRGIYHQGKLRVNRFNPYEAYVGSESIGEEIIIYGRSNMNRAFDGDIVAVELLPRDQWQDEKALSIAEEDDEEDDTVHLAPDNVDDAPRTSNLSHETSGDKNAAPVRPSGRVVGVIRRNWHSYCGSLEPMSLPAGSGGTAHALFVSKDRRIPKIRINTRQLQNLLDMRIVVAVDSWDRQSRYPSGHYVRPIGKIGDKETETEVVLIENDVDYSPFSSQVLACLPPLPWSVSSEDVSNPVRQDLRHLLVFSVDPPGCKDIDDALHCTSLPNGNFELGVHIADVTNFVHPGTPLDDEASKRGTSVYLVERRIDMLPKPLTEDICSLRADVERLAFSVIWEMSPDAEIISTRFTKSIIKSSAALSYIEAQARMDDSRLTDSLTTDLRNMNTLAKIMRQRRIDRGALTLASAEVKFDIDPENHDPLNIGMYQILEANQMVEEFMLAANVSVAGQILKLFPSCSLLRRHPTPTREMLEPLLRTAAAIGLTLDVSSSKALADSLDRAVGEDPYFNKLIRILATRCMTQAVYFCSGDLSPPEYHHYGLAAPLYTHFTSPIRRYADVFVHRLLAASLGIYKLPTVFQDRPQLTSVADNLNYRHRNAQMAGRASVELYVLIYFRTRPTDEEARVVKIRSNGFIVFVPKYGIEGPVYLTGKGEKGAGDWYVDEEKQKIVKMDGSLSYSVLQTVKIHMEVVEPQPNRPKLQLTLL

SEQ ID NO: 10949 - protein, 812 aa, Arabidopsis thaliana
MEKESANDHNDRAIRVATLWYQKHLGDTSQVLLVTNDRENKRKATEEGISAETIEAYVKSLGQPELLDLLAQPTNEDITMEDADDSRPSKRKLIYQEHKPMTEITAGLHRGIYHQGKLRVNRFNPYEAYVGSESIGEEIIIYGRSNMNRAFDGDIVAVELLPRDQWQDEKALSIAEEDDEEDDTVHLAPDNVDDAPRTSNLSHETSGDKNAAPVRPSGRVVGVIRRNWHSYCGSLEPMSLPAGSGGTAHALFVSKDRRIPKIRINTRQLQNLLDMRIVVAVDSWDRQSRYPSGHYVRPIGKIGDKETETEVVLIENDVDYSPFSSQVLACLPPLPWSVSSEDVSNPVRQDLRHLLVFSVDPPGCKDIDDALHCTSLPNGNFELGVHIADVTNFVHPGTPLDDEASKRGTSVYLVERRIDMLPKPLTEDICSLRADVERLAFSVIWEMSPDAEIISTRFTKSIIKSSAALSYIEAQARMDDSRLTDSLTTDLRNMNTLAKIMRQRRIDRGALTLASAEVKFDIDPENHDPLNIGMYQILEANQMVEEFMLAANVSVAGQILKLFPSCSLLRRHPTPTREMLEPLLRTAAAIGLTLDVSSSKALADSLDRAVGEDPYFNKLIRILATRCMTQAVYFCSGDLSPPEYHHYGLAAPLYTHFTSPIRRYADVFVHRLLAASLGIYKLPTVFQDRPQLTSVADNLNYRHRNAQMAGRASVELYVLIYFRTRPTDEEARVVKIRSNGFIVFVPKYGIEGPVYLTGKGEKGAGDWYVDEEKQKIVKMDGSLSYSVLQTVKIHMEVVEPQPNRPKLQLTLL

SEQ ID NO: 10950 - DNA, 1153 bp, Arabidopsis thaliana
aaacacattcgtcttcttctttctctctttctctttggtattttttttgcttactgttgaagaaaatttaaacaaaggcttctcttgatttttgaaccaatcatctttacttcatctgagggtttctgatttgggtctgattcaaaactctctcatccgttcactacaaagttgatagatcgatcgattgattttatggattgttatgctgaagagcttgttgtgcctaattatcaagaatcatcatcagagacatacccatctactggtatgtggggtggatggagcatgagctcccctgaagcagctgagaaatgtttcgattacgatggtttcaatggagaaggaatgatgtatagtcagatgagtatgaggactagtgaagaagaagaagagtctaaaagatcaaaggctttctatggtgcttcttcacttcacgatttcgaaggcatcgaacagatggatgatatgttcttaagttcaattttggaggatgttccagaggatgatggagatgttcaccgcgcgaccagtagcaataacagtgtcggttcttcttctatgtatggtggtggtagggaagtccctatgttccattgtcatgacatgtctttcaaggaggaagctccatttacaatctcggatctgtctgaagagaacatgttagattcaaactatggggatgaactgtcttctgaagaattcgtgttgcaggatctacaaagggcttcacaaaagttgactgatgagacacgcaaatgtttccgggatactttttaccgacttgcaaggagctcacaagataaatctgattcagtcagccccaactcggaagagctgcttatgcaaacgtctagatatgattatggtgatggaaacaggtttagtagagaggaagagatagaatctgaaacgaattcaatcgatagagctgtcgcaaacctcacattcaacaaaatggaatccaacataagcaattttcctctgtcggaaagagtacagtagctgccgctgatcaagatcaaccattggcccctcatcaacttcctatgaagtcttctgttaccatatgtgtataaatgtgtgtatatatagttgacttaatgttgcaagcttcagttttgatctgtcaaaagaatctggtccccttttt

SEQ ID NO: 10951 - protein, 269 aa, Arabidopsis thaliana
MDCYAEELVVPNYQESSSETYPSTGMWGGWSMSSPEAAEKCFDYDGFNGEGMMYSQMSMRTSEEEEESKRSKAFYGASSLHDFEGIEQMDDMFLSSILEDVPEDDGDVHRATSSNNSVGSSSMYGGGREVPMFHCHDMSFKEEAPFTISDLSEENMLDSNYGDELSSEEFVLQDLQRASQKLTDETRKCFRDTFYRLARSSQDKSDSVSPNSEELLMQTSRYDYGDGNRFSREEEIESETNSIDRAVANLTFNKMESNISNFPLSERVQ

SEQ ID NO: 10952 - protein, 244 aa, Arabidopsis thaliana
MWGGWSMSSPEAAEKCFDYDGFNGEGMMYSQMSMRTSEEEEESKRSKAFYGASSLHDFEGIEQMDDMFLSSILEDVPEDDGDVHRATSSNNSVGSSSMYGGGREVPMFHCHDMSFKEEAPFTISDLSEENMLDSNYGDELSSEEFVLQDLQRASQKLTDETRKCFRDTFYRLARSSQDKSDSVSPNSEELLMQTSRYDYGDGNRFSREEEIESETNSIDRAVANLTFNKMESNISNFPLSERVQ

SEQ ID NO: 10953 - protein, 238 aa, Arabidopsis thaliana
MSSPEAAEKCFDYDGFNGEGMMYSQMSMRTSEEEEESKRSKAFYGASSLHDFEGIEQMDDMFLSSILEDVPEDDGDVHRATSSNNSVGSSSMYGGGREVPMFHCHDMSFKEEAPFTISDLSEENMLDSNYGDELSSEEFVLQDLQRASQKLTDETRKCFRDTFYRLARSSQDKSDSVSPNSEELLMQTSRYDYGDGNRFSREEEIESETNSIDRAVANLTFNKMESNISNFPLSERVQ

SEQ ID NO: 10954 - DNA, 2894 bp, Arabidopsis thaliana
gaatgaaggaagaagattcaaaaaaaataagaggataggaatctatttggtcgcttttgcttcctcctattctggggagaatttgggatcttggagttgaatccgttgtgagaagaaggatctttttgagcttgtgtactgtgtcctctcagttgattcatcgcagagagaagaggtcctgtcatgtctatgagttttgtattcatctgaaaggtcttactggaatgacttatcaaaggggagagtctttggttcctgtcttgatttccaacttggtgggggcataggccaaataatgcaaacctaaaatccttgtttcttccagaatcttgtgagctttttaatctctccaacaaagtacaatttctctgaggattgtgttattacacagagaaaacaaaaagagggtccaagaaaatctcttgcattctcttctcctctctctggtattggtatcttcaaatgagtcgactacagaagcgagggaaacaggaaaagcctgttgtatctgatggagctcaaaaggttattgttgccgttaaagcatctagggagattccaaagactgccttgatttgggctttgactcatgttgttcagcctggggattgcattacccttattgttgttgtcccttctcacaactccggacgaaaactttggggtttcaataagagtttccctatgtttgctggggattgtgcaagtggtcatcggaaatcacattctgaagcactaccggagattaaaagtgatctcactgacacttgttcccaaatgattctccagcttcatgatgtctatgacccgaataagataaatgtcaagattaagattgtttctggatcaccctgtggagcagttgctgctgagtcgaagaaagcgcaagcgaactgggtagtaatggacaaacacctcaagcaggaagagaaacggtgtatggatgaattgcaatgcaacattgtggtgatgaagcgttcgcaggcaaaagttctacgcttaaaccttgttggatctcctaagaaagatgctggaaaagagtgtcccttaccatctggaccagaagcagcatctgagaaacactcaaagaacactaaaggattgttagatgctgaaagaggactacctgtcactcctactagcagccctgagctggggacaccgttcacaagtacagaagccgggacttcatctgtgtcgagctccgacctgggaacttcacctttcttcacattgggaatgaacggatacatgaagaaggatggagcattggtgatcaaggagaatgatggtcttgatgattctggctctgaaacagagagtgaaaaccaatcattagcgtcaacgagtatgagattccagccatggatatcagaatatattggcacccatcgccactcatcccaggaggccgaagaaagcttattatggaaaaatgatgacagggcacaaatatccactacaaaggctttgcttgaaaagttctctaaacttgatgttgaagttgggttgtcgtctagtcgaaggatggatttagagtttagtggaaacgtaagagatgcaatatcactctctcgaagtgctcctcctggtccacctcctctctgttcaatttgccagcacaaggcgccaatatttgggaaacccccaaggctgtttacatacgctgaattagagcttgcaacgggtgggttttcacaggctaacttcttggctgagggtggttatggatctgttcatcggggtgtgctaccagaaggccaggtagttgcagtaaagcaacacaaattggccagttctcaaggagatgtagagttttgctccgaagtggaagttctcagctgtgctcagcacagaaacgtcgttatgctaattggtttctgcattgaagacagcagacggctcttggtctatgaatacatttgcaatggttcacttgactctcatctatacggtcgtcaaaaggaaactctggaatggccagcacggcaaaagattgctgttggagctgcaagaggtcttcggtatcttcacgaagagtgcagagttggctgtattgtccacagagacatgcgtcctaacaacatcctcatcactcatgataatgagccactggttggagattttggtctagcaagatggcagcctgatggggaaatgggtgtagatacacgagtgataggaaccttcggctatctagctcccgaatatgctcaaagcgggcaaatcacagaaaaagctgatgtctactcgttcggggttgttctagttgagctagtcactggccgcaaagccattgatatcaccaggccgaaaggccagcaatgcctgactgaatgggcacgtcctctactggaagaatatgcgatagatgaacttatcgatccgaggcttgggaaccgttttgtagaaagtgaggtcatttgtatgcttcatgcagcttcgttgtgcatacgtagagatccacatttgaggccacgcatgtctcaggtgttgcgtatactggaaggagatatgataatggatggaaactacgcatcaactccaggttcagaggcaggcaaccgaagcgggaggttctgggcggatcattacagcggtcagctaacgaatgatggctcggataggttcagtgaaaggctgtctgttgaaacgccaagactagctttgagggagagggaaagaagccagaggtttgaactaaaccataacaagcaatactaatcacactactttgctttatgataagtttagttgatagggtatttagtaaattcctctgttttaagtgatgtggtcaagctggcaacacagctttttttgtttgtatagtggggtaagatgcaaaaacagttgctaaatatgttatcaaggaatttaaaattgtttttggt

SEQ ID NO: 10955 - protein, 753 aa, Arabidopsis thaliana
MSRLQKRGKQEKPVVSDGAQKVIVAVKASREIPKTALIWALTHVVQPGDCITLIVVVPSHNSGRKLWGFNKSFPMFAGDCASGHRKSHSEALPEIKSDLTDTCSQMILQLHDVYDPNKINVKIKIVSGSPCGAVAAESKKAQANWVVMDKHLKQEEKRCMDELQCNIVVMKRSQAKVLRLNLVGSPKKDAGKECPLPSGPEAASEKHSKNTKGLLDAERGLPVTPTSSPELGTPFTSTEAGTSSVSSSDLGTSPFFTLGMNGYMKKDGALVIKENDGLDDSGSETESENQSLASTSMRFQPWISEYIGTHRHSSQEAEESLLWKNDDRAQISTTKALLEKFSKLDVEVGLSSSRRMDLEFSGNVRDAISLSRSAPPGPPPLCSICQHKAPIFGKPPRLFTYAELELATGGFSQANFLAEGGYGSVHRGVLPEGQVVAVKQHKLASSQGDVEFCSEVEVLSCAQHRNVVMLIGFCIEDSRRLLVYEYICNGSLDSHLYGRQKETLEWPARQKIAVGAARGLRYLHEECRVGCIVHRDMRPNNILITHDNEPLVGDFGLARWQPDGEMGVDTRVIGTFGYLAPEYAQSGQITEKADVYSFGVVLVELVTGRKAIDITRPKGQQCLTEWARPLLEEYAIDELIDPRLGNRFVESEVICMLHAASLCIRRDPHLRPRMSQVLRILEGDMIMDGNYASTPGSEAGNRSGRFWADHYSGQLTNDGSDRFSERLSVETPRLALRERERSQRFELNHNKQY

SEQ ID NO: 10956 - protein, 679 aa, Arabidopsis thaliana
MFAGDCASGHRKSHSEALPEIKSDLTDTCSQMILQLHDVYDPNKINVKIKIVSGSPCGAVAAESKKAQANWVVMDKHLKQEEKRCMDELQCNIVVMKRSQAKVLRLNLVGSPKKDAGKECPLPSGPEAASEKHSKNTKGLLDAERGLPVTPTSSPELGTPFTSTEAGTSSVSSSDLGTSPFFTLGMNGYMKKDGALVIKENDGLDDSGSETESENQSLASTSMRFQPWISEYIGTHRHSSQEAEESLLWKNDDRAQISTTKALLEKFSKLDVEVGLSSSRRMDLEFSGNVRDAISLSRSAPPGPPPLCSICQHKAPIFGKPPRLFTYAELELATGGFSQANFLAEGGYGSVHRGVLPEGQVVAVKQHKLASSQGDVEFCSEVEVLSCAQHRNVVMLIGFCIEDSRRLLVYEYICNGSLDSHLYGRQKETLEWPARQKIAVGAARGLRYLHEECRVGCIVHRDMRPNNILITHDNEPLVGDFGLARWQPDGEMGVDTRVIGTFGYLAPEYAQSGQITEKADVYSFGVVLVELVTGRKAIDITRPKGQQCLTEWARPLLEEYAIDELIDPRLGNRFVESEVICMLHAASLCIRRDPHLRPRMSQVLRILEGDMIMDGNYASTPGSEAGNRSGRFWADHYSGQLTNDGSDRFSERLSVETPRLALRERERSQRFELNHNKQY

SEQ ID NO: 10957 - protein, 648 aa, Arabidopsis thaliana
MILQLHDVYDPNKINVKIKIVSGSPCGAVAAESKKAQANWVVMDKHLKQEEKRCMDELQCNIVVMKRSQAKVLRLNLVGSPKKDAGKECPLPSGPEAASEKHSKNTKGLLDAERGLPVTPTSSPELGTPFTSTEAGTSSVSSSDLGTSPFFTLGMNGYMKKDGALVIKENDGLDDSGSETESENQSLASTSMRFQPWISEYIGTHRHSSQEAEESLLWKNDDRAQISTTKALLEKFSKLDVEVGLSSSRRMDLEFSGNVRDAISLSRSAPPGPPPLCSICQHKAPIFGKPPRLFTYAELELATGGFSQANFLAEGGYGSVHRGVLPEGQVVAVKQHKLASSQGDVEFCSEVEVLSCAQHRNVVMLIGFCIEDSRRLLVYEYICNGSLDSHLYGRQKETLEWPARQKIAVGAARGLRYLHEECRVGCIVHRDMRPNNILITHDNEPLVGDFGLARWQPDGEMGVDTRVIGTFGYLAPEYAQSGQITEKADVYSFGVVLVELVTGRKAIDITRPKGQQCLTEWARPLLEEYAIDELIDPRLGNRFVESEVICMLHAASLCIRRDPHLRPRMSQVLRILEGDMIMDGNYASTPGSEAGNRSGRFWADHYSGQLTNDGSDRFSERLSVETPRLALRERERSQRFELNHNKQY

SEQ ID NO: 10958 - DNA, 2850 bp, Arabidopsis thaliana
gacagaggaggagcacatcatcgtgttcttcttcgactcggcgattccaaaaaaggacgcttgcttcatcgcaggcgtcgctgtatcactctccggccgagttctttcacgttttcttcgaaggaatgcaaaactatggtgattgattaaatcgtgtgacaatcgaaaagttgaggaattgcaaggattcgagatagagtctaaaaatggagcaccaagaccttacagattcgagaaaggatcctctttgcatttctcaattgaaaatttcttcttcttctctcgacccattgcctcatgccaacatggcagaggatttaacaaagagtcgtaggcattcacctataaaagtggaagggagtgaagaaacttggggagtagaagatgatgatgaccttactgaccctatttttgataccattgagggcaatggacattcagatccaacaagctgcttcgatgctgatttaagtgagtacaaaaagaaggccacagtaatcgttgaggaatactttggcaccaatgatgttgtctctgttgttaatgaactaaaggagcttggaatggctgagtaccgttattattttgtcaagaagttagtctccatggctatggatagacatgacaaagagaaagaaatggctgcttttctcctctctaccctttatgccgacgtcattgatcccccagaagtttacagaggtttcaacaaactggtcgcttctgctgatgatttatctgttgatattcccgatgcagttgatgttcttgctgtctttgtggctcgggcaattgttgacgacattcttcctcctgcgtttctcaagaagcaaatgaaattgctgccagataactccaaaggtgttgaggttttgagaaaggctgagaagagctatctagcgactccgcttcatgctgaagttgttgagaagagatggggagggactgataattggactgctgaggatgtgaaagctagaattaacgacttgttgaaagagtatgtcatgagtggagacaaaaaagaagcttttagatgcatcaaaggattgaaagttcctttctttcatcatgagattgtcaaacgagcactgatcatggcaatggaaaggcgaaaagctcaagtcaggctgctagatctgttgaaagaaacgattgaggttggtctcataaactccactcaggtgacaaaagggtttagcagaatcattgattcaatcgaagatttgtctcttgacataccagacgcacgccgtattttacagtctttcatctctaaagcggcttctgaaggatggttatgtgcttcttctctgaaatcactctctgctgatgcaggagaaaagttacttgaaaactccagcgccaatgtttttaaagacaaggcgaagtcgatcatccgagagtatttcctttcaggtgacacttcagaggtcgtacattgtctagacaccgaattgaatgcatcttcgagtcagctacgcgcaatctttgtcaaatatctgataactctagcaatggacaggaagaaaagagagaaggagatggcttgtgtgctcgtctctactcttggtttccctcccaaagatgtcagaagcgcattctcgatgctcatactcgtgccgagagagccactagtccccccccccccatcttctcgggtaaacagaatcaactagttttgtttttcctctttcaaaaatgcatttctcttcgtcttcaacatcgtccacttggacaatcttaatcacattgggatgtcttatgcttcatgcatctttgtccgctgctcaactcacccctaccttctacgataggtcatgtcctaatgtcactaacatcgtacgagaaaccattgtaaatgagttaaggtcggaccctcgtatcgctgcgagcatccttcgtcttcacttccacgactgctatgttaatggttgtgacgcatccatcttgttagacaacacgacatcatttcgaacagagaaagatgcgtttggaaacgcaaattcggctcggggatttcctgtgattgatagaatgaaagctgcggtggagagggcatgcccaagaaccgtttcatgcgcagatatgctcaccattgctgctcaacaatctgtcactttggcaggaggtccttcttggagggttcctttgggaaggagagacagtttacaagcattcctggaactcgctaatgcaaatcttccagctccattctttacacttccacaacttaaagccagcttcagaaatgttggtctcgatcgtccttctgatctcgttgctctctccggtggtcacacatttggtaaaaatcaatgtcagtttattcttgacagattatacaatttcagcaacacaggtttacccgaccctaccctcaatactacttacctccaaactcttcgtggactatgcccccttaatggcaatcgaagtgccttggtagattttgatctacgtacgcctacggttttcgacaacaaatactacgtgaatctcaaagagcgaaaaggtcttatccagagcgaccaagagttgttctctagccccaatgccactgacacaatccccttggtgagagcatatgctgatggcacacaaacatttttcaatgcatttgtggaggcgatgaataggatgggaaacattacaccaactacaggaactcaaggacaaatcagattgaactgtagagtggtgaactccaactctctgctccatgatgtggtggatatcgttgactttgttagctctatgtgagaattgtttacccaatatgtggctacaagaatacatatatattaatgaataaaactctcaagacgtttacttgagaacatttatttt

SEQ ID NO: 10959 - protein, 490 aa, Arabidopsis thaliana
MEHQDLTDSRKDPLCISQLKISSSSLDPLPHANMAEDLTKSRRHSPIKVEGSEETWGVEDDDDLTDPIFDTIEGNGHSDPTSCFDADLSEYKKKATVIVEEYFGTNDVVSVVNELKELGMAEYRYYFVKKLVSMAMDRHDKEKEMAAFLLSTLYADVIDPPEVYRGFNKLVASADDLSVDIPDAVDVLAVFVARAIVDDILPPAFLKKQMKLLPDNSKGVEVLRKAEKSYLATPLHAEVVEKRWGGTDNWTAEDVKARINDLLKEYVMSGDKKEAFRCIKGLKVPFFHHEIVKRALIMAMERRKAQVRLLDLLKETIEVGLINSTQVTKGFSRIIDSIEDLSLDIPDARRILQSFISKAASEGWLCASSLKSLSADAGEKLLENSSANVFKDKAKSIIREYFLSGDTSEVVHCLDTELNASSSQLRAIFVKYLITLAMDRKKREKEMACVLVSTLGFPPKDVRSAFSMLILVPREPLVPPPPSSRVNRIN

SEQ ID NO: 10960 - protein, 457 aa, Arabidopsis thaliana
MAEDLTKSRRHSPIKVEGSEETWGVEDDDDLTDPIFDTIEGNGHSDPTSCFDADLSEYKKKATVIVEEYFGTNDVVSVVNELKELGMAEYRYYFVKKLVSMAMDRHDKEKEMAAFLLSTLYADVIDPPEVYRGFNKLVASADDLSVDIPDAVDVLAVFVARAIVDDILPPAFLKKQMKLLPDNSKGVEVLRKAEKSYLATPLHAEVVEKRWGGTDNWTAEDVKARINDLLKEYVMSGDKKEAFRCIKGLKVPFFHHEIVKRALIMAMERRKAQVRLLDLLKETIEVGLINSTQVTKGFSRIIDSIEDLSLDIPDARRILQSFISKAASEGWLCASSLKSLSADAGEKLLENSSANVFKDKAKSIIREYFLSGDTSEVVHCLDTELNASSSQLRAIFVKYLITLAMDRKKREKEMACVLVSTLGFPPKDVRSAFSMLILVPREPLVPPPPSSRVNRIN

SEQ ID NO: 10961 - protein, 371 aa, Arabidopsis thaliana
MAEYRYYFVKKLVSMAMDRHDKEKEMAAFLLSTLYADVIDPPEVYRGFNKLVASADDLSVDIPDAVDVLAVFVARAIVDDILPPAFLKKQMKLLPDNSKGVEVLRKAEKSYLATPLHAEVVEKRWGGTDNWTAEDVKARINDLLKEYVMSGDKKEAFRCIKGLKVPFFHHEIVKRALIMAMERRKAQVRLLDLLKETIEVGLINSTQVTKGFSRIIDSIEDLSLDIPDARRILQSFISKAASEGWLCASSLKSLSADAGEKLLENSSANVFKDKAKSIIREYFLSGDTSEVVHCLDTELNASSSQLRAIFVKYLITLAMDRKKREKEMACVLVSTLGFPPKDVRSAFSMLILVPREPLVPPPPSSRVNRIN

SEQ ID NO: 10962 - DNA, 1740 bp, Arabidopsis thaliana
atcaaaaaattatttacctaaaaacatgagttcactacaatgacccgtaccgaaccaaaccggagccggagctccaattccgattccgataagaattccggtaacgtcggcggaggtagaaccaccgggatgagggttattgttccgttacaaggtgtggtacaaggtcgtggtggtttattcttaggctctgtgattccttgtgctttcttctactttcttcagttttacctaaaacgaaatcgtaaaaacgacgaatcagataattccggtgaacaaaactcctcagcttcttcttcttcttctcctaattcgggtttaccggatcccacccggtcacaatccgctggtcatctcacggagcttactggtttacctcgttctctctctcgtattctcctctcgccgagaaattccggtggagctgtttcggtttcgggtcgggttaattgtgtactcaaaggtggagattcttcgccttactacgttggtcaaaaacgggtcgaggatgatccgtatgatgagttgggtaacccggacggagttatccaacttggtttagctcaaaacaacaagttgagtttggatgattgggttttagagaatccaaaagaagcaatttcagatggattgagtattagtggcattgcttcttatgagccttctgatggacttttggaactgaaaatggctgtggcaggatttatgactgaagctaccaaaaactcggtgacttttgatccatcacagttagtgttaacttctggtgcatcatctgctattgagattctttccttctgcttagctgattcgggaaacgccttccttgttccaactccgtgttctcccggatatgatagggatgttaaatggcgaacaggagttgacattatacacgttccatgtagaagtgcggataatttcaatatgtcgatggtcgtgcttgatcgagcattctatcaagctaagaaacgaggtgtaagaatccgcggcattataatctcgaatccttcaaatcccatgggaagcctactgagcagagagaatctctatgcgcttttggactttgcccgtgagaggaacattcatattatatcaaacgaaatctttgctgggtcagtccacggagaagaaggagagtttgttagcatggctgaaatagttgacacggaagagaatatcgacagggaaagagttcatatcgtgtatgacctttcgaaagacttgtctttcccggggcttagatccgctgctatctactcgttcaacgagagtgttttatccgcttcaagaaagctcacgacgctctcacctgtctcatctccaacccaacatttgctgatatccgcaatctccaatccaaaaaatgttcagagatttgtgaaaaccaacaggcagagattgcagagtatctacacggagctcgtggaggggttgaaagagttagggatcgagtgcacaaaaagcaatggagggttctactgttgggctgatatgcgaggattgatttcatcttacagcgaaaaaggcgagattgagctgtggaacaagctcttgaacattggcaagatcaatgtcataccaggatcttgttgtcactgtatcgaaccaggatggttccgtatctgtttcagtaatttgtctgagagagatgtgccagtagttatgaaccgcattagaaaagtttgtgaaacatgtaaatctcaaaattgattacaatttgattatttggtttattcc

SEQ ID NO: 10963 - protein, 557 aa, Arabidopsis thaliana
MTRTEPNRSRSSNSDSDKNSGNVGGGRTTGMRVIVPLQGVVQGRGGLFLGSVIPCAFFYFLQFYLKRNRKNDESDNSGEQNSSASSSSSPNSGLPDPTRSQSAGHLTELTGLPRSLSRILLSPRNSGGAVSVSGRVNCVLKGGDSSPYYVGQKRVEDDPYDELGNPDGVIQLGLAQNNKLSLDDWVLENPKEAISDGLSISGIASYEPSDGLLELKMAVAGFMTEATKNSVTFDPSQLVLTSGASSAIEILSFCLADSGNAFLVPTPCSPGYDRDVKWRTGVDIIHVPCRSADNFNMSMVVLDRAFYQAKKRGVRIRGIIISNPSNPMGSLLSRENLYALLDFARERNIHIISNEIFAGSVHGEEGEFVSMAEIVDTEENIDRERVHIVYDLSKDLSFPGLRSAAIYSFNESVLSASRKLTTLSPVSSPTQHLLISAISNPKNVQRFVKTNRQRLQSIYTELVEGLKELGIECTKSNGGFYCWADMRGLISSYSEKGEIELWNKLLNIGKINVIPGSCCHCIEPGWFRICFSNLSERDVPVVMNRIRKVCETCKSQN

SEQ ID NO: 10964 - protein, 527 aa, Arabidopsis thaliana
MRVIVPLQGVVQGRGGLFLGSVIPCAFFYFLQFYLKRNRKNDESDNSGEQNSSASSSSSPNSGLPDPTRSQSAGHLTELTGLPRSLSRILLSPRNSGGAVSVSGRVNCVLKGGDSSPYYVGQKRVEDDPYDELGNPDGVIQLGLAQNNKLSLDDWVLENPKEAISDGLSISGIASYEPSDGLLELKMAVAGFMTEATKNSVTFDPSQLVLTSGASSAIEILSFCLADSGNAFLVPTPCSPGYDRDVKWRTGVDIIHVPCRSADNFNMSMVVLDRAFYQAKKRGVRIRGIIISNPSNPMGSLLSRENLYALLDFARERNIHIISNEIFAGSVHGEEGEFVSMAEIVDTEENIDRERVHIVYDLSKDLSFPGLRSAAIYSFNESVLSASRKLTTLSPVSSPTQHLLISAISNPKNVQRFVKTNRQRLQSIYTELVEGLKELGIECTKSNGGFYCWADMRGLISSYSEKGEIELWNKLLNIGKINVIPGSCCHCIEPGWFRICFSNLSERDVPVVMNRIRKVCETCKSQN

SEQ ID NO: 10965 - protein, 341 aa, Arabidopsis thaliana
MAVAGFMTEATKNSVTFDPSQLVLTSGASSAIEILSFCLADSGNAFLVPTPCSPGYDRDVKWRTGVDIIHVPCRSADNFNMSMVVLDRAFYQAKKRGVRIRGIIISNPSNPMGSLLSRENLYALLDFARERNIHIISNEIFAGSVHGEEGEFVSMAEIVDTEENIDRERVHIVYDLSKDLSFPGLRSAAIYSFNESVLSASRKLTTLSPVSSPTQHLLISAISNPKNVQRFVKTNRQRLQSIYTELVEGLKELGIECTKSNGGFYCWADMRGLISSYSEKGEIELWNKLLNIGKINVIPGSCCHCIEPGWFRICFSNLSERDVPVVMNRIRKVCETCKSQN

SEQ ID NO: 10966 - DNA, 2157 bp, Arabidopsis thaliana
gcaccaggtccccccccccccctctctgatcttttttcccccaaaaatggcgcgtgacatccaactcccctgcgacggcgacggcgtatgcatgcgatgcaaatccaaccctccgcctgaagaatctctcacttgcggtacgtgcgttactccgtggcacgtgtcctgtctctcttcacctcccaaaaccctagcttccactctacagtggcattgtcctgattgctccggcgaaatcgatcctcttcctgtttccggcggtgctactggtttcgaatctgctgggtcagatcttgtagctgcgattcgtgcgattgaggctgatgagtcgttgagtactgaagagaaagctaagaagaggcaacggttactgagtggtaaaggtgttgaggaggatgatgaagaagagaagaggaagaagaaggggaaagggaagaatccgaatctggatgtgttatgtgctcttggagataacttgatgtgttctttctgtatgcagttgcctgagagacctgtgacgaaaccatgtgggcacaacgcttgcttgaaatgttttgagaaatggatggggcagggaaagagaacttgtggtaaatgccgcagcataattcctgaaaaaatggctaagaatccccgtatcaactcgtctcttgttgctgccattcgattagcaaaagtctctaaaagtgctgctacgagtacttcaaaggtctttcatttcatcagcaaccaagaccgaccagataaagcatttacaaccgagcgtgcaaagaaaactggcaaggcaaacgctgctagtggaaagatttatgttacaataccaccagatcattttggtcctattccagctgaaaatgaccctgtcaggaaccaaggtcttttggttggagaatcctgggaggatagactcgagtgtaggcagtggggagctcatttcccacatgttgctggcattgctggacaatctacttatggagctcaatctgtagcactctctggaggttataaggatgatgaggatcatggagaatggtttctatacacaggaagtgggggtagagatctcagtggcaacaaaaggactaacaaagagcagtcttttgaccaaaagtttgagaagtctaatgcagcattaaaactcagctgcaaattggggtatcctgttcgagttgtcaggtctcacaaggagaagcgttctgcatacgcccctgaggagggagtgagatatgatggggtttataggattgagaagtgctggcgcaaagttggagtacagggttcttttaaggtctgtcgttacctgttcgttagatgtgacaatgagccagctccatggaccagtgatgagcatggagatcgtccaagacctatccctaatattccagagcttaatatggccaccgacctgtttgagagaaaagaaactccatcatgggattttgatgaaggtgagggttgttggaaatggatgaagccgccacctgcaagtaaaaagtcagtgaatgttttggctcctgaggagaggaaaaatttgaagaaagccataaaggcggcacactcaaataccatgagggcaagacttctgaaagaatttaagtgccagatctgtcagcaagtgttgactcttcctgtgacaacaccctgtgctcataacttctgcaaggcttgcttagaagccaaatttgctgggaaaactcttgtgagagagagaagcacaggtggacggacactacgcgcaaggaagaatgtcctgaactgcccttgctgcccaacggacatatctgattttctgcagaaccctcaggtcaacagagaagtagcggaggtgatagagaagctaaagaaccaggaagaagacaacgcagagcttgaagatgaagatgaaggtgaaggctcaggtaccacccctgaagaagatgatgagcaaccgaagaaaaggatcaagttggacacagacgcaacagtttctgcgaccatcaggtgaagttggtaccaaagaactctttagtaaaaaaaactctagtgccttattttgtacgcaatatttttggaacgtacctattgcgatgtgttattttggattctacaacaactaagttcttaatatggaacgtaatctatggtactctggtttttaatttttctcttattttggtg

SEQ ID NO: 10967 - protein, 660 aa, Arabidopsis thaliana
HQVPPPPSLIFFPPKMARDIQLPCDGDGVCMRCKSNPPPEESLTCGTCVTPWHVSCLSSPPKTLASTLQWHCPDCSGEIDPLPVSGGATGFESAGSDLVAAIRAIEADESLSTEEKAKKRQRLLSGKGVEEDDEEEKRKKKGKGKNPNLDVLCALGDNLMCSFCMQLPERPVTKPCGHNACLKCFEKWMGQGKRTCGKCRSIIPEKMAKNPRINSSLVAAIRLAKVSKSAATSTSKVFHFISNQDRPDKAFTTERAKKTGKANAASGKIYVTIPPDHFGPIPAENDPVRNQGLLVGESWEDRLECRQWGAHFPHVAGIAGQSTYGAQSVALSGGYKDDEDHGEWFLYTGSGGRDLSGNKRTNKEQSFDQKFEKSNAALKLSCKLGYPVRVVRSHKEKRSAYAPEEGVRYDGVYRIEKCWRKVGVQGSFKVCRYLFVRCDNEPAPWTSDEHGDRPRPIPNIPELNMATDLFERKETPSWDFDEGEGCWKWMKPPPASKKSVNVLAPEERKNLKKAIKAAHSNTMRARLLKEFKCQICQQVLTLPVTTPCAHNFCKACLEAKFAGKTLVRERSTGGRTLRARKNVLNCPCCPTDISDFLQNPQVNREVAEVIEKLKNQEEDNAELEDEDEGEGSGTTPEEDDEQPKKRIKLDTDATVSATIR

SEQ ID NO: 10968 - protein, 645 aa, Arabidopsis thaliana
MARDIQLPCDGDGVCMRCKSNPPPEESLTCGTCVTPWHVSCLSSPPKTLASTLQWHCPDCSGEIDPLPVSGGATGFESAGSDLVAAIRAIEADESLSTEEKAKKRQRLLSGKGVEEDDEEEKRKKKGKGKNPNLDVLCALGDNLMCSFCMQLPERPVTKPCGHNACLKCFEKWMGQGKRTCGKCRSIIPEKMAKNPRINSSLVAAIRLAKVSKSAATSTSKVFHFISNQDRPDKAFTTERAKKTGKANAASGKIYVTIPPDHFGPIPAENDPVRNQGLLVGESWEDRLECRQWGAHFPHVAGIAGQSTYGAQSVALSGGYKDDEDHGEWFLYTGSGGRDLSGNKRTNKEQSFDQKFEKSNAALKLSCKLGYPVRVVRSHKEKRSAYAPEEGVRYDGVYRIEKCWRKVGVQGSFKVCRYLFVRCDNEPAPWTSDEHGDRPRPIPNIPELNMATDLFERKETPSWDFDEGEGCWKWMKPPPASKKSVNVLAPEERKNLKKAIKAAHSNTMRARLLKEFKCQICQQVLTLPVTTPCAHNFCKACLEAKFAGKTLVRERSTGGRTLRARKNVLNCPCCPTDISDFLQNPQVNREVAEVIEKLKNQEEDNAELEDEDEGEGSGTTPEEDDEQPKKRIKLDTDATVSATIR

SEQ ID NO: 10969 - protein, 630 aa, Arabidopsis thaliana
MRCKSNPPPEESLTCGTCVTPWHVSCLSSPPKTLASTLQWHCPDCSGEIDPLPVSGGATGFESAGSDLVAAIRAIEADESLSTEEKAKKRQRLLSGKGVEEDDEEEKRKKKGKGKNPNLDVLCALGDNLMCSFCMQLPERPVTKPCGHNACLKCFEKWMGQGKRTCGKCRSIIPEKMAKNPRINSSLVAAIRLAKVSKSAATSTSKVFHFISNQDRPDKAFTTERAKKTGKANAASGKIYVTIPPDHFGPIPAENDPVRNQGLLVGESWEDRLECRQWGAHFPHVAGIAGQSTYGAQSVALSGGYKDDEDHGEWFLYTGSGGRDLSGNKRTNKEQSFDQKFEKSNAALKLSCKLGYPVRVVRSHKEKRSAYAPEEGVRYDGVYRIEKCWRKVGVQGSFKVCRYLFVRCDNEPAPWTSDEHGDRPRPIPNIPELNMATDLFERKETPSWDFDEGEGCWKWMKPPPASKKSVNVLAPEERKNLKKAIKAAHSNTMRARLLKEFKCQICQQVLTLPVTTPCAHNFCKACLEAKFAGKTLVRERSTGGRTLRARKNVLNCPCCPTDISDFLQNPQVNREVAEVIEKLKNQEEDNAELEDEDEGEGSGTTPEEDDEQPKKRIKLDTDATVSATIR

SEQ ID NO: 10970 - DNA, 1563 bp, Arabidopsis thaliana
gacacacactcttctctctcttcttcttcctcctctgtactctctctttctcacataaccagagcctctctctctctctctgtttctcttcagtctctgtgtatacccctttctctcctcctctgtccctctctctagcggcggactgatgcacatacctttgtattctccgccgtaactaacttacataatggggtgcatgttctctcacctcgccgccaaattcgccttcttcccaccctctcctcccacttaccacctcaccaaaacccccgacggcaaactctccgccgtatcctccgcttcctcctcctcctccacttttccctccgccggagacccatctctcgacgtcaaagtagtaaagacaagacgcggcaacaaagtcacagctttttaccttagaaaccctaacgcaagactcacacttctctactctcatggaaatgctgcagatttgggacaactcttcgatctctttgttcaactcaaagtcaatctccgagtcaatctcatggggtatgattattcaggctatggagcttctactggtaagccgagtgagtacgatacatatgcagatatagaggcggcgtatgagtgtttgcagacggattatggggtagggcaagaagatttgatcttgtatggtcaatctgttggcagcggtccaacgctgcaccttgcctctaagcttccacggcttagaggtgtcgttcttcatagcggcattctctctggtcttcgtgttctatgtcatgtcaagttcaagttttgttgtgacatttattcgaacgtaaacaagatcaagaaggtgaaatgcccggttcttgtcatacacggaacagaggatgatgtggtgaattggttacacggaaacaggctttggaaaatggcaaaggaaccgtatgaaccgctctggattaaaggcggtggacattgcaaccttgagatatatccggactacattagacacctataccggtttatacaagacatggaaaatacaaccactaagtctcgtctcaaaacgatttggcaagaaatccgtcggcgagatgaatccacaggatgttgttgttccggactgtgcagacctagctgcagttgtcccaaacctcggtgtcccaaacctagttgcagttgcggctgcggttgtggcgactgcggttgtttcaagtgttcgtgtccgactttgaagggatgtttctcttgctgcaagaaaccgagctgtgttagtagttgttgctgtcccacgttcaaatgcagcagctgctttgggaagccaaaatgtccgaaatgctcttgttggaaatgtctaaaatgccccgacaccgagtgttgccggagtagttgttgttgttccggttgttttagctggttgtgttgctgcggtggagggaggaggaaagagggggagaggagaggatctactacgttggagaagagtgaagggtgatattggtaatttgtatagattttgttcaaagatttggtaaaaaacattagaagattcatggaaagaaactgagattttgaagctaaaagttcatttattattcc

SEQ ID NO: 10971 - protein, 422 aa, Arabidopsis thaliana
MGCMFSHLAAKFAFFPPSPPTYHLTKTPDGKLSAVSSASSSSSTFPSAGDPSLDVKVVKTRRGNKVTAFYLRNPNARLTLLYSHGNAADLGQLFDLFVQLKVNLRVNLMGYDYSGYGASTGKPSEYDTYADIEAAYECLQTDYGVGQEDLILYGQSVGSGPTLHLASKLPRLRGVVLHSGILSGLRVLCHVKFKFCCDIYSNVNKIKKVKCPVLVIHGTEDDVVNWLHGNRLWKMAKEPYEPLWIKGGGHCNLEIYPDYIRHLYRFIQDMENTTTKSRLKTIWQEIRRRDESTGCCCSGLCRPSCSCPKPRCPKPSCSCGCGCGDCGCFKCSCPTLKGCFSCCKKPSCVSSCCCPTFKCSSCFGKPKCPKCSCWKCLKCPDTECCRSSCCCSGCFSWLCCCGGGRRKEGERRGSTTLEKSEG

SEQ ID NO: 10972 - protein, 419 aa, Arabidopsis thaliana
MFSHLAAKFAFFPPSPPTYHLTKTPDGKLSAVSSASSSSSTFPSAGDPSLDVKVVKTRRGNKVTAFYLRNPNARLTLLYSHGNAADLGQLFDLFVQLKVNLRVNLMGYDYSGYGASTGKPSEYDTYADIEAAYECLQTDYGVGQEDLILYGQSVGSGPTLHLASKLPRLRGVVLHSGILSGLRVLCHVKFKFCCDIYSNVNKIKKVKCPVLVIHGTEDDVVNWLHGNRLWKMAKEPYEPLWIKGGGHCNLEIYPDYIRHLYRFIQDMENTTTKSRLKTIWQEIRRRDESTGCCCSGLCRPSCSCPKPRCPKPSCSCGCGCGDCGCFKCSCPTLKGCFSCCKKPSCVSSCCCPTFKCSSCFGKPKCPKCSCWKCLKCPDTECCRSSCCCSGCFSWLCCCGGGRRKEGERRGSTTLEKSEG

SEQ ID NO: 10973 - protein, 314 aa, Arabidopsis thaliana
MGYDYSGYGASTGKPSEYDTYADIEAAYECLQTDYGVGQEDLILYGQSVGSGPTLHLASKLPRLRGVVLHSGILSGLRVLCHVKFKFCCDIYSNVNKIKKVKCPVLVIHGTEDDVVNWLHGNRLWKMAKEPYEPLWIKGGGHCNLEIYPDYIRHLYRFIQDMENTTTKSRLKTIWQEIRRRDESTGCCCSGLCRPSCSCPKPRCPKPSCSCGCGCGDCGCFKCSCPTLKGCFSCCKKPSCVSSCCCPTFKCSSCFGKPKCPKCSCWKCLKCPDTECCRSSCCCSGCFSWLCCCGGGRRKEGERRGSTTLEKSEG

SEQ ID NO: 10974 - DNA, 1833 bp, Arabidopsis thaliana
gaaagataatgttcattgattgggtggtcgtgtaagtaagagtcgtcagcgagttttctactccgagagtaatggagccatctcaacgcaacaccaatccgccgtcgttttcagattccactatcccggttgattccgatggtcgagccaccgtcttccgaccattctctctctcctcgccacactcacgagcctttcacctagcttggctctcactcttctcatgcttcttctccaccttctccatccctcctctggtccccgtcatctcctccgacctcaacctctctgcctccaccgtatccgccgccggaatcgcttccttcgctggctccatcttctctcgcctcgctatgggaccactctgtgatctcatcggaccacgtacttcctcagcgattctctcttttctcaccgctcctgtaatcctctccgcctcactcgtctcctctccgacgtccttcatcctcgtccgtttcttcgtcggcttctcgctcgctaatttcgtagccaatcaatactggatgtcctccatgttctccggtaacgtcattggtctcgctaacggtgtctcagccggttgggctaacgtcggcgccggtatctctcagctccttatgcctctcatatactccaccatagccgaattccttccacgcgccgtcgcctggcgcgtgtccttcgtatttcccgccatttttcaggttacaacggccgtcctcgttctcctctacggccaagatactccccacggtaacagaaaaaactcgaaccagaacaaactcacaattcctgaagaagaagaagtactagtagttgaagaagacgaacgttccagtttcgtcgagatcctaatcggcggacttggaaattacagagcgtggatcttagcgctgctctacggatactcgtacggcgtcgagctaacgacggacaacgtgatcgccggatatttctacgagagatttggagtgaatctggaggcggcggggacgatcgcggcgagtttcgggatatcgaacattgcgtcgcgaccggcgggagggatgatatcggatgcgctggggaagagattcggtatgagagggaggctgtgggggctatggatcgtgcaatcggtggctgggttgttgtgcgtgttactcggacgagtcaactcgctctggggatcaatcctcgtcatgtgggtcttctctgttttcgttcaagctgcttctggccttgtatttggcgtggtccctttcgtctccaagcgatctttaggagtggtggcgggaattacgggaagcggcggtacggttggtgcggtggtgacgcagtttctgttgttttccggtgatgatgttcgaaaacagagaagcatttcacttatgggtttgatgacttttgtgtttgctctttctgttacatcaatttactttccacaatggggtggaatgtgttgtgggccttcgtcatcttccgaagaagaagatatttctcggggactccttgtagaagacgaagatgaagaaggtaaagtggttagtggtagtctacgtcccgtttgttgatgccgcatttgaactgctggcccatttggccaaagcaaaagcaatagcaaaacattagtatactactaataaggacgaatttgctgttatcaagttaaagagtctatcaatttttttaaatatatatatgttcttgtttgtgttgaaattctccttccataaacaacactagagctgacaacattgcaaaacaagacataattagtttgtatcctttttgtatctcttgtaacaatataggcaaagtgactctgacaaatcacaattgttttgatgagct

SEQ ID NO: 10975 - protein, 493 aa, Arabidopsis thaliana
MEPSQRNTNPPSFSDSTIPVDSDGRATVFRPFSLSSPHSRAFHLAWLSLFSCFFSTFSIPPLVPVISSDLNLSASTVSAAGIASFAGSIFSRLAMGPLCDLIGPRTSSAILSFLTAPVILSASLVSSPTSFILVRFFVGFSLANFVANQYWMSSMFSGNVIGLANGVSAGWANVGAGISQLLMPLIYSTIAEFLPRAVAWRVSFVFPAIFQVTTAVLVLLYGQDTPHGNRKNSNQNKLTIPEEEEVLVVEEDERSSFVEILIGGLGNYRAWILALLYGYSYGVELTTDNVIAGYFYERFGVNLEAAGTIAASFGISNIASRPAGGMISDALGKRFGMRGRLWGLWIVQSVAGLLCVLLGRVNSLWGSILVMWVFSVFVQAASGLVFGVVPFVSKRSLGVVAGITGSGGTVGAVVTQFLLFSGDDVRKQRSISLMGLMTFVFALSVTSIYFPQWGGMCCGPSSSSEEEDISRGLLVEDEDEEGKVVSGSLRPVC

SEQ ID NO: 10976 - protein, 399 aa, Arabidopsis thaliana
MGPLCDLIGPRTSSAILSFLTAPVILSASLVSSPTSFILVRFFVGFSLANFVANQYWMSSMFSGNVIGLANGVSAGWANVGAGISQLLMPLIYSTIAEFLPRAVAWRVSFVFPAIFQVTTAVLVLLYGQDTPHGNRKNSNQNKLTIPEEEEVLVVEEDERSSFVEILIGGLGNYRAWILALLYGYSYGVELTTDNVIAGYFYERFGVNLEAAGTIAASFGISNIASRPAGGMISDALGKRFGMRGRLWGLWIVQSVAGLLCVLLGRVNSLWGSILVMWVFSVFVQAASGLVFGVVPFVSKRSLGVVAGITGSGGTVGAVVTQFLLFSGDDVRKQRSISLMGLMTFVFALSVTSIYFPQWGGMCCGPSSSSEEEDISRGLLVEDEDEEGKVVSGSLRPVC

SEQ ID NO: 10977 - protein, 342 aa, Arabidopsis thaliana
MSSMFSGNVIGLANGVSAGWANVGAGISQLLMPLIYSTIAEFLPRAVAWRVSFVFPAIFQVTTAVLVLLYGQDTPHGNRKNSNQNKLTIPEEEEVLVVEEDERSSFVEILIGGLGNYRAWILALLYGYSYGVELTTDNVIAGYFYERFGVNLEAAGTIAASFGISNIASRPAGGMISDALGKRFGMRGRLWGLWIVQSVAGLLCVLLGRVNSLWGSILVMWVFSVFVQAASGLVFGVVPFVSKRSLGVVAGITGSGGTVGAVVTQFLLFSGDDVRKQRSISLMGLMTFVFALSVTSIYFPQWGGMCCGPSSSSEEEDISRGLLVEDEDEEGKVVSGSLRPVC

SEQ ID NO: 10978 - DNA, 2301 bp, Arabidopsis thaliana
gggccaaaccatttctcttattcatgtcctctgcagatctcattcttcttcagatcttgaagaaggaacgccacaacagaaacagcaaatggagaagatagctaaagatctctttgtatccttccactgctattgttcccgtaaagagataaattgtcgagacattttgctggaagacgcagacaaagttcgagccattaccgaatatgtttcatcttctgcaattgagaacttagtcgttggatctgcatcacgtaatggcttcatgagaagattcaagacggatttgccaacaacagtgtcaaaatcagctccagatttctgcaatgtttatgtcatttcaaaaggcaaaattgcttcagtacgaaatgcatcacgtcctgctccttaccaaaattcgatgcagcaatgtgaaattgacaatcatcacccacatactcctgacaaagcaccaaagtaccatgaccatcccaattctgcaggtagtacaccatctagaccgcgcaaatcagttgaagcagatagatcgccgttggtgaaaaggaagccatatggggacttctatgattcagatagtgacctttcgtttatcagtccgtcttctcatcgtgactctgacatttccttcatcagctcaggaagaccaagcgttgagcggtcttcctttagccttgattttcctgaatctgcaaggacttcaagaatgtcaacgagctcagagcaaagcattggctcaaatcgtttgggaattaagttcagtgatcctggtttccttaacgaatcctctacattctctgaagagagtggtagaacatcctcctattcatctcagagcttggatgatgttgaagctgaaatgaagaggctgcgtctagagctgaaacaaaccatggatatgtatagcacagcttgtaaagaagctttaagcgctagacaacaggcaacggagctgcaaaagctgagaaccgaagaggagagacggttggaagaagcaaaaagttcagaggaagcagcaatgtcaatagtggaaaaggagagagctaaagccaaagcagcgttggaagctgctgaagctgcaaagagattagcagaagtggaatctaaaagaaggttgactgcagagatgaagacaatgaaggaatcagattcattctctcgcggatttgttcggtataggaaatacacggttgaagaaatcgaagaagctacttcaaattttgcagagtctcaaaaggtaggagaaggaggctatggtcctgtctttagaggctttcttgatcacacaagtgttgctgttaaagttctacgcccagacgcagctcaagggagatcacagtttcagaaagaggttgaagtgttaagctgcataaggcatccaaacatggtgcttcttcttggagcttgtccagaatttgggattcttgtttatgaatacatggccaaaggaagtttagaagaccggcttttcatgcgaggaaacacaccgccgattacctggcagctacgtttcagaatcgctgctgagatcgccacgggactcctcttcctccaccagaccaaacctgaaccaattgtccacagagaccttaaaccaggaaatgttctgctcgattacaactatgtgagcaagatcagtgatgtcgggctagcgagattagtccctgcagtagcggaaaacgttacacagtacagagtcacttcagctgcaggaactttctgttacattgatcctgagtaccaacaaacaggaatgttgggtgtgaagtcagatgtttattctcttggaatcatgcttttgcagatcttaaccgcaaaacagccaatgggtttggcttattacgttgaacaagcgatcgaagaagggactcttaaggatatgcttgatccagcagtaccggactggcctatagaagaagctctatctttagcaaagctttcgcttcaatgcgcggaactaagaagaaaagatagacctgacctcgggaaagagatattgcctgagctcaatcggttaagagagataggtgaagagagtttagagagtgtgttttatgcaggaaatcaaggaaagtctccaaacactagccaagtctcgattccggaatctccagctgcagactctcaatcctagttttgatatgagggaagcaaatgtgctctaacactcaatttgcaggagttataaacaaaagcagagcaagtttctttgctgattagtgtatagcattagaggaatttggtattctgttaaataatcagttatgtaaccgcctttttgttaggcccataacggttttgaac

SEQ ID NO: 10979 - protein, 709 aa, Arabidopsis thaliana
GQTISLIHVLCRSHSSSDLEEGTPQQKQQMEKIAKDLFVSFHCYCSRKEINCRDILLEDADKVRAITEYVSSSAIENLVVGSASRNGFMRRFKTDLPTTVSKSAPDFCNVYVISKGKIASVRNASRPAPYQNSMQQCEIDNHHPHTPDKAPKYHDHPNSAGSTPSRPRKSVEADRSPLVKRKPYGDFYDSDSDLSFISPSSHRDSDISFISSGRPSVERSSFSLDFPESARTSRMSTSSEQSIGSNRLGIKFSDPGFLNESSTFSEESGRTSSYSSQSLDDVEAEMKRLRLELKQTMDMYSTACKEALSARQQATELQKLRTEEERRLEEAKSSEEAAMSIVEKERAKAKAALEAAEAAKRLAEVESKRRLTAEMKTMKESDSFSRGFVRYRKYTVEEIEEATSNFAESQKVGEGGYGPVFRGFLDHTSVAVKVLRPDAAQGRSQFQKEVEVLSCIRHPNMVLLLGACPEFGILVYEYMAKGSLEDRLFMRGNTPPITWQLRFRIAAEIATGLLFLHQTKPEPIVHRDLKPGNVLLDYNYVSKISDVGLARLVPAVAENVTQYRVTSAAGTFCYIDPEYQQTGMLGVKSDVYSLGIMLLQILTAKQPMGLAYYVEQAIEEGTLKDMLDPAVPDWPIEEALSLAKLSLQCAELRRKDRPDLGKEILPELNRLREIGEESLESVFYAGNQGKSPNTSQVSIPESPAADSQS

SEQ ID NO: 10980 - protein, 680 aa, Arabidopsis thaliana
MEKIAKDLFVSFHCYCSRKEINCRDILLEDADKVRAITEYVSSSAIENLVVGSASRNGFMRRFKTDLPTTVSKSAPDFCNVYVISKGKIASVRNASRPAPYQNSMQQCEIDNHHPHTPDKAPKYHDHPNSAGSTPSRPRKSVEADRSPLVKRKPYGDFYDSDSDLSFISPSSHRDSDISFISSGRPSVERSSFSLDFPESARTSRMSTSSEQSIGSNRLGIKFSDPGFLNESSTFSEESGRTSSYSSQSLDDVEAEMKRLRLELKQTMDMYSTACKEALSARQQATELQKLRTEEERRLEEAKSSEEAAMSIVEKERAKAKAALEAAEAAKRLAEVESKRRLTAEMKTMKESDSFSRGFVRYRKYTVEEIEEATSNFAESQKVGEGGYGPVFRGFLDHTSVAVKVLRPDAAQGRSQFQKEVEVLSCIRHPNMVLLLGACPEFGILVYEYMAKGSLEDRLFMRGNTPPITWQLRFRIAAEIATGLLFLHQTKPEPIVHRDLKPGNVLLDYNYVSKISDVGLARLVPAVAENVTQYRVTSAAGTFCYIDPEYQQTGMLGVKSDVYSLGIMLLQILTAKQPMGLAYYVEQAIEEGTLKDMLDPAVPDWPIEEALSLAKLSLQCAELRRKDRPDLGKEILPELNRLREIGEESLESVFYAGNQGKSPNTSQVSIPESPAADSQS

SEQ ID NO: 10981 - protein, 621 aa, Arabidopsis thaliana
MRRFKTDLPTTVSKSAPDFCNVYVISKGKIASVRNASRPAPYQNSMQQCEIDNHHPHTPDKAPKYHDHPNSAGSTPSRPRKSVEADRSPLVKRKPYGDFYDSDSDLSFISPSSHRDSDISFISSGRPSVERSSFSLDFPESARTSRMSTSSEQSIGSNRLGIKFSDPGFLNESSTFSEESGRTSSYSSQSLDDVEAEMKRLRLELKQTMDMYSTACKEALSARQQATELQKLRTEEERRLEEAKSSEEAAMSIVEKERAKAKAALEAAEAAKRLAEVESKRRLTAEMKTMKESDSFSRGFVRYRKYTVEEIEEATSNFAESQKVGEGGYGPVFRGFLDHTSVAVKVLRPDAAQGRSQFQKEVEVLSCIRHPNMVLLLGACPEFGILVYEYMAKGSLEDRLFMRGNTPPITWQLRFRIAAEIATGLLFLHQTKPEPIVHRDLKPGNVLLDYNYVSKISDVGLARLVPAVAENVTQYRVTSAAGTFCYIDPEYQQTGMLGVKSDVYSLGIMLLQILTAKQPMGLAYYVEQAIEEGTLKDMLDPAVPDWPIEEALSLAKLSLQCAELRRKDRPDLGKEILPELNRLREIGEESLESVFYAGNQGKSPNTSQVSIPESPAADSQS

SEQ ID NO: 10982 - DNA, 2838 bp, Arabidopsis thaliana
gagattgtagaagaacaagctcctctcaccatttcttcttcttcttctctctaaaagaaaagagacttcaccgattcttttttattattccttcccagattttctcgggaaattaattcttttcctcctctttcttctcacttgttgttgttccttaacactctcttcctagatctactattaactgatttcatttcacgactaaaccatcgaagtcttcggcaagatatggatttgtttctgttctattaaacttgtttcaatcgagaagtaaaaaagaatccgattccacagatggaactatgtgctgtggatcagaccgattaaaccagatcgtgtcatcaagatcttcgttgccaatttctttcgaggaagataacaatcttgttaccaacacagacatgaatcacataacagtcgaaacagaggatacgtttgcgagcttgcttgagcttgcagctaacaacgatgttgaaggtgtaaggctatctatcgagagagacccttcttgtgtagacgaagctggtctctggtacggtcgtcaaaaaggttctaaagctatggtcaacgattacaggactccgttgatggttgctgctacttacggaagcattgatgtgatcaagcttattgtttctttgactgatgctgacgtgaaccgtgcttgcgggaatgatcagaccactgcgttacactgcgctgcttctggaggagctgtgaatgctatccaagttgttaagctgcttcttgcagctggagctgatttgaatctgttggatgctgaaggtcaacgagctggtgatgttattgttgttcctcctaagcttgaaggcgtgaagctgatgcttcaggagcttctttctgctgatggatcatctactgcggagcggaatctacgggttgtgacaaatgttccgaatagaagctcatctccgtgtcattctcctactggagagaatggtggatcagggtctggttcaccgctcggctctccttttaagctgaaatctactgaattcaagaaagagtatccggttgatccgtctttgccagatatcaagaacagtatctacgcgactgatgagtttagaatgtattccttcaaggtccggccttgctctcgtgcttattcacatgattggactgagtgtccttttgttcacccgggtgaaaacgcgaggaggagagacccgaggaagttccattacagctgcgttccttgcccggattttaggaaaggagcttgtaggagaggagatatgtgtgagtatgcgcacggtgtgtttgaatgctggcttcatccggctcagtacaggacccgtctttgcaaagatggaacaggctgtgctcggcgggtttgtttctttgcgcatacacccgaggagcttcgacctttgtacgcatcaactggttcagcggttccttcgcctagatcgaatgctgattatgcagctgctttgagtctccttcctggttctccatcaggagtctctgtcatgtccccgctttccccatcagcagcggggaacggaatgtctcattcgaatatggcttggccacaaccaaatgtccctgcgttgcacttaccaggaagcaatctacagtcaagcaggctaaggtcttctctcaatgcaagggatatcccgacggatgagttcaatatgttagcggattacgagcagcagcaactcctcaacgagtattccaatgctctgagccgttctggtcggatgaaatcaatgcctccttcgaatcttgaagatcttttctcagcagaaggctcttcatctccccggttcactgattccgctttagcttccgcggtgttctcgcctacacacaagtcagctgtcttcaaccagttccaacaacagcaacagcaacagcagcagcagagcatgttgtctccaatcaacacaagcttttcttcaccaaagagcgttgaccactcattgttttcaggtggaggaagaatgtctcctcggaatgttgttgaaccaatatcacccatgagtgctcgggtttccatgttggctcagtgcgtgaagcaacaacaacagcaacagcagcagcagcagcagcagcaacatcagttccgtagccttagctccagagagctcagaacaaactctagcccaatcgttggttcaccggtaaacaacaacacatggtcatcaaaatggggatcttcaaatggtcaaccggattggggaatgagctcagaagcacttggtaagttgagatcttcgtcatcgtttgatggtgatgagcctgatgtgtcatgggtccagtcactggtgaaggagactccagcagaagccaaagagaaagcagcaacatcttcctcaggggaacacgtgatgaagcagccaaatccggttgaaccggtaatggatcatgctgggctagaagcttggattgagcaaatgcagctcgatcagcttgtggctcagcagaattgagagacctaaccaaagaatcacatgttcttgtctggtctctctatgtggtagataaaaacctcttttttacaggtggtggtggtagaagggtaacaagattaacaaagaagagaagagaagaaagaagatttctttgtttttggtcaattaattttcacaaaaaacagttttttttttttttatttagagaagagaagggaacaatacaagaaaaaggcttatgggaagaaaggagatgaaacaaaaccttcttggttttctttctcccattttcaatttttttttagggatttctttctcccattatcattattattattgttattaatattattattttttatatttttattgttatgactatcgtttgttatag

SEQ ID NO: 10983 - protein, 719 aa, Arabidopsis thaliana
MCCGSDRLNQIVSSRSSLPISFEEDNNLVTNTDMNHITVETEDTFASLLELAANNDVEGVRLSIERDPSCVDEAGLWYGRQKGSKAMVNDYRTPLMVAATYGSIDVIKLIVSLTDADVNRACGNDQTTALHCAASGGAVNAIQVVKLLLAAGADLNLLDAEGQRAGDVIVVPPKLEGVKLMLQELLSADGSSTAERNLRVVTNVPNRSSSPCHSPTGENGGSGSGSPLGSPFKLKSTEFKKEYPVDPSLPDIKNSIYATDEFRMYSFKVRPCSRAYSHDWTECPFVHPGENARRRDPRKFHYSCVPCPDFRKGACRRGDMCEYAHGVFECWLHPAQYRTRLCKDGTGCARRVCFFAHTPEELRPLYASTGSAVPSPRSNADYAAALSLLPGSPSGVSVMSPLSPSAAGNGMSHSNMAWPQPNVPALHLPGSNLQSSRLRSSLNARDIPTDEFNMLADYEQQQLLNEYSNALSRSGRMKSMPPSNLEDLFSAEGSSSPRFTDSALASAVFSPTHKSAVFNQFQQQQQQQQQQSMLSPINTSFSSPKSVDHSLFSGGGRMSPRNVVEPISPMSARVSMLAQCVKQQQQQQQQQQQQQHQFRSLSSRELRTNSSPIVGSPVNNNTWSSKWGSSNGQPDWGMSSEALGKLRSSSSFDGDEPDVSWVQSLVKETPAEAKEKAATSSSGEHVMKQPNPVEPVMDHAGLEAWIEQMQLDQLVAQQN

SEQ ID NO: 10984 - protein, 686 aa, Arabidopsis thaliana
MNHITVETEDTFASLLELAANNDVEGVRLSIERDPSCVDEAGLWYGRQKGSKAMVNDYRTPLMVAATYGSIDVIKLIVSLTDADVNRACGNDQTTALHCAASGGAVNAIQVVKLLLAAGADLNLLDAEGQRAGDVIVVPPKLEGVKLMLQELLSADGSSTAERNLRVVTNVPNRSSSPCHSPTGENGGSGSGSPLGSPFKLKSTEFKKEYPVDPSLPDIKNSIYATDEFRMYSFKVRPCSRAYSHDWTECPFVHPGENARRRDPRKFHYSCVPCPDFRKGACRRGDMCEYAHGVFECWLHPAQYRTRLCKDGTGCARRVCFFAHTPEELRPLYASTGSAVPSPRSNADYAAALSLLPGSPSGVSVMSPLSPSAAGNGMSHSNMAWPQPNVPALHLPGSNLQSSRLRSSLNARDIPTDEFNMLADYEQQQLLNEYSNALSRSGRMKSMPPSNLEDLFSAEGSSSPRFTDSALASAVFSPTHKSAVFNQFQQQQQQQQQQSMLSPINTSFSSPKSVDHSLFSGGGRMSPRNVVEPISPMSARVSMLAQCVKQQQQQQQQQQQQQHQFRSLSSRELRTNSSPIVGSPVNNNTWSSKWGSSNGQPDWGMSSEALGKLRSSSSFDGDEPDVSWVQSLVKETPAEAKEKAATSSSGEHVMKQPNPVEPVMDHAGLEAWIEQMQLDQLVAQQN

SEQ ID NO: 10985 - protein, 633 aa, Arabidopsis thaliana
MVNDYRTPLMVAATYGSIDVIKLIVSLTDADVNRACGNDQTTALHCAASGGAVNAIQVVKLLLAAGADLNLLDAEGQRAGDVIVVPPKLEGVKLMLQELLSADGSSTAERNLRVVTNVPNRSSSPCHSPTGENGGSGSGSPLGSPFKLKSTEFKKEYPVDPSLPDIKNSIYATDEFRMYSFKVRPCSRAYSHDWTECPFVHPGENARRRDPRKFHYSCVPCPDFRKGACRRGDMCEYAHGVFECWLHPAQYRTRLCKDGTGCARRVCFFAHTPEELRPLYASTGSAVPSPRSNADYAAALSLLPGSPSGVSVMSPLSPSAAGNGMSHSNMAWPQPNVPALHLPGSNLQSSRLRSSLNARDIPTDEFNMLADYEQQQLLNEYSNALSRSGRMKSMPPSNLEDLFSAEGSSSPRFTDSALASAVFSPTHKSAVFNQFQQQQQQQQQQSMLSPINTSFSSPKSVDHSLFSGGGRMSPRNVVEPISPMSARVSMLAQCVKQQQQQQQQQQQQQHQFRSLSSRELRTNSSPIVGSPVNNNTWSSKWGSSNGQPDWGMSSEALGKLRSSSSFDGDEPDVSWVQSLVKETPAEAKEKAATSSSGEHVMKQPNPVEPVMDHAGLEAWIEQMQLDQLVAQQN

SEQ ID NO: 10986 - DNA, 1810 bp, Arabidopsis thaliana
tcactagtccccccccccccccccaaatccatggggttcttcgcttcacaatcccaacgcacctctctctctatctctcacttcttctccttcctctccctcttcaccaatgccacgtaaccctagattctgcttcttcctcttccttctttttcactcctctgttttcttctccatcccctgtttttccatagacgaacagggtctagctctcctctcatggaaatctcagttgaacatctccggagacgctttatcttcttggaaagcctccgaatcgaatccttgtcaatgggtgggaatcaaatgcaacgaaagaggtcaagtctcggagatacaactccaagtcatggattttcaaggtccgttaccggcgacgaatctccgacagataaagtctctgactttgctcagcttaacctccgtgaatctcactggttcaatccctaaggagcttggagacttgtcggagctagaagttcttgatttagctgataattctctctctggtgaaatccctgtggatatcttcaagctcaagaaactaaagattctgtctctcaacacaaataatctcgaaggtgtgattccatcggagttagggaatctcgttaacctcatcgagctcactctcttcgacaataaactcgccggagagattcctagaaccatcggagaactcaagaatctagaaatcttccgtgcaggtggtaacaagaatctcagaggagagcttccttgggagattggtaactgcgagagtcctgtgactttaggtctcgccgaaacaagtctctccggtagacttccggcgtcgatcggaaacctgaaaaaggttcagacaatagctctttacacgtcactcttgtctggtccaatccctgatgagattggaaactgcacagagcttcaaaacctctacttgtaccaaaactcaatctctggatcgattcctgtatcaatgggacgtctcaagaagcttcaaagtcttctcttatggcaaaacaatctcgtcggaaagatccctaccgagctaggcacctgtccggagcttttcctcgtcgatttatcggaaaatctcctcacaggaaacatcccaagaagcttcggaaaccttccaaatctccaagagcttcagctaagtgttaaccagctctccggtacaatccctgaagaactcgcgaattgcacgaagttgacgcatttagagatcgataacaaccaaatctccggcgagattccgccgttgatcgggaaattaacaagcttgacgatgttctttgcgtggcagaatcagttaaccggaataattccagagtctctttctcaatgtcaagagcttcaagcgattgatctctcctacaacaatctctctggttcgatacctaatggaatctttgagattcgaaacctcacgaagcttcttcttctctctaactacttatctggattcataccaccggatattagaaactgcacgaatctttaccggttaagactcaacggtaacagacttgcggggaatattccggcggagattgggaatctgaaaaatctcaacttcatcgatataagtgagaatcgtctcatcggaaacattcctccggagatctccggttgtacaagtctcgaattcgtcgatctacattcaaacggtttaaccggtggtttacccggtacacttccgaagagcttacaattcattgattaatccgataattcattaaccggttctctaccaaccggaatcggatcgttaaccgaactcacgaagctcaatctcgctaagaatcgtttctccggcgaaatc

SEQ ID NO: 10987 - protein, 533 aa, Arabidopsis thaliana
MPRNPRFCFFLFLLFHSSVFFSIPCFSIDEQGLALLSWKSQLNISGDALSSWKASESNPCQWVGIKCNERGQVSEIQLQVMDFQGPLPATNLRQIKSLTLLSLTSVNLTGSIPKELGDLSELEVLDLADNSLSGEIPVDIFKLKKLKILSLNTNNLEGVIPSELGNLVNLIELTLFDNKLAGEIPRTIGELKNLEIFRAGGNKNLRGELPWEIGNCESPVTLGLAETSLSGRLPASIGNLKKVQTIALYTSLLSGPIPDEIGNCTELQNLYLYQNSISGSIPVSMGRLKKLQSLLLWQNNLVGKIPTELGTCPELFLVDLSENLLTGNIPRSFGNLPNLQELQLSVNQLSGTIPEELANCTKLTHLEIDNNQISGEIPPLIGKLTSLTMFFAWQNQLTGIIPESLSQCQELQAIDLSYNNLSGSIPNGIFEIRNLTKLLLLSNYLSGFIPPDIRNCTNLYRLRLNGNRLAGNIPAEIGNLKNLNFIDISENRLIGNIPPEISGCTSLEFVDLHSNGLTGGLPGTLPKSLQFID

SEQ ID NO: 10988 - protein, 453 aa, Arabidopsis thaliana
MDFQGPLPATNLRQIKSLTLLSLTSVNLTGSIPKELGDLSELEVLDLADNSLSGEIPVDIFKLKKLKILSLNTNNLEGVIPSELGNLVNLIELTLFDNKLAGEIPRTIGELKNLEIFRAGGNKNLRGELPWEIGNCESPVTLGLAETSLSGRLPASIGNLKKVQTIALYTSLLSGPIPDEIGNCTELQNLYLYQNSISGSIPVSMGRLKKLQSLLLWQNNLVGKIPTELGTCPELFLVDLSENLLTGNIPRSFGNLPNLQELQLSVNQLSGTIPEELANCTKLTHLEIDNNQISGEIPPLIGKLTSLTMFFAWQNQLTGIIPESLSQCQELQAIDLSYNNLSGSIPNGIFEIRNLTKLLLLSNYLSGFIPPDIRNCTNLYRLRLNGNRLAGNIPAEIGNLKNLNFIDISENRLIGNIPPEISGCTSLEFVDLHSNGLTGGLPGTLPKSLQFID

SEQ ID NO: 10989 - DNA, 1475 bp, Arabidopsis thaliana
ggactgtccctgtggaagatataattttacatgtccgaattccggagaagaaaaagatgaagtgattgattaaattgaaatcgatcacatcaaccatctctttctctcgcctgcaaagttatctccttttcaaaccgaacgaatcaattcgggaatcttcatctttctacgtgttttctcagctatgtatctctgggttcgacttcagtaaaagcttcaccagccatggatttcgttaggggtttttggaggaagcatagaaggaaggtcttggtgacggctggttgtttgggaagtgggtatttactctacaaactatacaattcccatactcgtaggcttgctgatttggaacgagaactcgctcacgagcgtgaaaatgacgaaatcatcaaaacccaaatgaaagcacatttcgagagtattcagatgattgtggattcgaccacactgcctcacgcaatgcagtttttgagtatccgtatcagcgaggagatcgatgtctctcatgttatggacagactgaaccaagggaaaggaatgctgagtccacctgagaaacttcagctctgggatgagctcaagattttgagtttcacgaggatggttttgtctctgtggtctgtgacaatgcttagcttatacattagggttcaagtcaacattttaggcagacatttgtatgttgacaccgctcgagctcttggcagctctcatttacttgaagaggtagatctcattgatagagatgatgaacagaagtttttgtcgagtgctgattttcttgtcaccaatgcaatgccaagtttgatttcagatatgcagggttcagccgaggaagtccttaaaggaaagcagttaaaggatgtaattaccacaagagttcttcaagaaaccgtgatgcagattgtagatgtgtttatgagcactggaagcccacatcactgggttgattatttaatgatgcctcaagacacaaagctttcaagaaccacaagtgactcttctgatgaagctgtgtccaagtttcatcaactcatggttgagactcgagaagtactcatcagcactgaattcacaaatatagtcgaaatttcgctcaagtgcttcacggatgcgttggtagaggaaatggaaacgcagactgaagcaggcggtttggctacagggaaaccattggcaaaggtcttaccacagattgagaagacaatgaatgtgattacagctgaaccaagcaagaaccggttcttacaaatcatcagagatctgcctgaagttaaactcttttttactcttttatacgctaatatgccgcaatagcaacttttgtttgttctcttagaaattccccaaagtgttttgctatatgctttctttgtaggggggtcttttagcttgaaagaaatgcaggaattttcgtgttttgagcttgtagaaccaaagttgatttcatttatttgttttgattagaaaag

SEQ ID NO: 10990 - protein, 364 aa, Arabidopsis thaliana
MDFVRGFWRKHRRKVLVTAGCLGSGYLLYKLYNSHTRRLADLERELAHERENDEIIKTQMKAHFESIQMIVDSTTLPHAMQFLSIRISEEIDVSHVMDRLNQGKGMLSPPEKLQLWDELKILSFTRMVLSLWSVTMLSLYIRVQVNILGRHLYVDTARALGSSHLLEEVDLIDRDDEQKFLSSADFLVTNAMPSLISDMQGSAEEVLKGKQLKDVITTRVLQETVMQIVDVFMSTGSPHHWVDYLMMPQDTKLSRTTSDSSDEAVSKFHQLMVETREVLISTEFTNIVEISLKCFTDALVEEMETQTEAGGLATGKPLAKVLPQIEKTMNVITAEPSKNRFLQIIRDLPEVKLFFTLLYANMPQ

SEQ ID NO: 10991 - protein, 305 aa, Arabidopsis thaliana
MKAHFESIQMIVDSTTLPHAMQFLSIRISEEIDVSHVMDRLNQGKGMLSPPEKLQLWDELKILSFTRMVLSLWSVTMLSLYIRVQVNILGRHLYVDTARALGSSHLLEEVDLIDRDDEQKFLSSADFLVTNAMPSLISDMQGSAEEVLKGKQLKDVITTRVLQETVMQIVDVFMSTGSPHHWVDYLMMPQDTKLSRTTSDSSDEAVSKFHQLMVETREVLISTEFTNIVEISLKCFTDALVEEMETQTEAGGLATGKPLAKVLPQIEKTMNVITAEPSKNRFLQIIRDLPEVKLFFTLLYANMPQ

SEQ ID NO: 10992 - protein, 296 aa, Arabidopsis thaliana
MIVDSTTLPHAMQFLSIRISEEIDVSHVMDRLNQGKGMLSPPEKLQLWDELKILSFTRMVLSLWSVTMLSLYIRVQVNILGRHLYVDTARALGSSHLLEEVDLIDRDDEQKFLSSADFLVTNAMPSLISDMQGSAEEVLKGKQLKDVITTRVLQETVMQIVDVFMSTGSPHHWVDYLMMPQDTKLSRTTSDSSDEAVSKFHQLMVETREVLISTEFTNIVEISLKCFTDALVEEMETQTEAGGLATGKPLAKVLPQIEKTMNVITAEPSKNRFLQIIRDLPEVKLFFTLLYANMPQ

SEQ ID NO: 10993 - DNA, 1491 bp, Arabidopsis thaliana
tcttcatacaacattttagctttactttttctctttactcttctctctctctttctctttctctttctctttcactcgttctctctcactcactctcttcacacacagatccaagatggcctcttcaatggctagcaatgatttccagctccctccacgtttcttcactgttttcgtctcccatttcagctcagagttcatggtgatcccagtttcctactacgatcacattccacatcgtttccccaagactgtgattctccgaggacctggtggatgctcctggaaggtagcgacggagataaaggatgatgaagtgcttttttcacaaggatggcccaaatttgttcgggataatactcttaacgatggagactttttgacctttgcctataatggagctcacatattcgaggtcagtatctttcgcggctacgacgcatgtaaagagattagcgaagtcactgaattggaagaggaagaagaagacagtgttatatctctgagcagtgaagacacagacactggtgctaaatctgagatgaagaatacagtcccggaaggcagagacaaaggaaagtcaaaagtggaagttgtggaggattctgatgacgatgaggaggaggatagtgtttattctgaaagcagtgaagaaacagagacagacactgattctgaattcaaggtggccaagccaacaataccaaaaagccagaagaaaggaaagaagaaagaacaagttgtggagtcctctgatgacgaggaagacgaagaggaggacagtgacagtgattacattgaaacgtttggtcaattggatattgaagagaattccatcagtgaggaggacagttcttatgctcctgataaagaagacacagccactgcctcttttgtcaaaccaaaggttgcaaataaggttgctaatctgaagaggaaagaggcggcaaagaagaggaagaaagtcgatcccatgatcaagaatcctgagagatacctcgatgatcctaagaatatccatttcgagacaaacgtgaagaataggttatacgagctgttggttcatgcacaactggtgaaagactattgcttgaggtttggagactatgttaactacatcgacaggttcgggaaactaagtgctaaaacagccaaatggaaggatcagcgtgtttgtatcaaaagatggatgcgcatatgcaagaggaacaagttgaagaaagaagaccgcattttgtgtgagctcttgcgcaagggaactttcgtttacgcaatcaaactccatgtcatccgcggtaaggatctgtagacgctagcagtatgagtagaggaagagatttggctacttaattatctctctgatttccatcttgttgtgtgatcaagcaaacttatgtgtttcattattgtctacttcagattgtatgaccttctctcttgttctctcatgaatctatttctgaatacaatatctaatctttgagctaaaag

SEQ ID NO: 10994 - protein, 397 aa, Arabidopsis thaliana
MASSMASNDFQLPPRFFTVFVSHFSSEFMVIPVSYYDHIPHRFPKTVILRGPGGCSWKVATEIKDDEVLFSQGWPKFVRDNTLNDGDFLTFAYNGAHIFEVSIFRGYDACKEISEVTELEEEEEDSVISLSSEDTDTGAKSEMKNTVPEGRDKGKSKVEVVEDSDDDEEEDSVYSESSEETETDTDSEFKVAKPTIPKSQKKGKKKEQVVESSDDEEDEEEDSDSDYIETFGQLDIEENSISEEDSSYAPDKEDTATASFVKPKVANKVANLKRKEAAKKRKKVDPMIKNPERYLDDPKNIHFETNVKNRLYELLVHAQLVKDYCLRFGDYVNYIDRFGKLSAKTAKWKDQRVCIKRWMRICKRNKLKKEDRILCELLRKGTFVYAIKLHVIRGKDL

SEQ ID NO: 10995 - protein, 393 aa, Arabidopsis thaliana
MASNDFQLPPRFFTVFVSHFSSEFMVIPVSYYDHIPHRFPKTVILRGPGGCSWKVATEIKDDEVLFSQGWPKFVRDNTLNDGDFLTFAYNGAHIFEVSIFRGYDACKEISEVTELEEEEEDSVISLSSEDTDTGAKSEMKNTVPEGRDKGKSKVEVVEDSDDDEEEDSVYSESSEETETDTDSEFKVAKPTIPKSQKKGKKKEQVVESSDDEEDEEEDSDSDYIETFGQLDIEENSISEEDSSYAPDKEDTATASFVKPKVANKVANLKRKEAAKKRKKVDPMIKNPERYLDDPKNIHFETNVKNRLYELLVHAQLVKDYCLRFGDYVNYIDRFGKLSAKTAKWKDQRVCIKRWMRICKRNKLKKEDRILCELLRKGTFVYAIKLHVIRGKDL

SEQ ID NO: 10996 - protein, 369 aa, Arabidopsis thaliana
MVIPVSYYDHIPHRFPKTVILRGPGGCSWKVATEIKDDEVLFSQGWPKFVRDNTLNDGDFLTFAYNGAHIFEVSIFRGYDACKEISEVTELEEEEEDSVISLSSEDTDTGAKSEMKNTVPEGRDKGKSKVEVVEDSDDDEEEDSVYSESSEETETDTDSEFKVAKPTIPKSQKKGKKKEQVVESSDDEEDEEEDSDSDYIETFGQLDIEENSISEEDSSYAPDKEDTATASFVKPKVANKVANLKRKEAAKKRKKVDPMIKNPERYLDDPKNIHFETNVKNRLYELLVHAQLVKDYCLRFGDYVNYIDRFGKLSAKTAKWKDQRVCIKRWMRICKRNKLKKEDRILCELLRKGTFVYAIKLHVIRGKDL

SEQ ID NO: 10997 - DNA, 1629 bp, Arabidopsis thaliana
aaaaccccctggtctggaggaaatagtaccagctaagctcgcagctcaaagctcagtgtttaataattgtatagcttttttggtgaacgaagagtcagatcggcgagcctgagatgggttggggttcggtgttgctattactggcggtggctcttctttgtcagagggcaagttcaatcggagctaactggggcacacaggcgtcgcacccacttccaccggacatagttgtgcggatgctaagagagaatggtattcagaaagtaaagctctttgacgccgaatacgacactctcagagctttgggcaaatccggaatcgaagtcatggttggtattcccaatgagatgcttgcgactctcgcctctagcctgaaagctgctgagaaatgggttgctaaaaatgtctctactcacatctccaccgacaacgtcaacatcagatatgtggctgttgggaatgaacctttcttgtctacttataatgggagctatctgagtactactttccctgcgttgaggaacatccaaattgcaattataaaggctggccttcagaaccaagtgaaggtcacttgtcccttgaacgctgatgtctatgacagctccaccacttttccttctggaggggacttcagggccaatatccgtgacctcatgatcactatcgtcaagttcttgagcgaaaatggcggtcctttcactgttaacatctacccttacatcagtctttacaccaaccccgatttcccagttgattacgccttctttgacggcaatgcacagcccctgaacgatggtgggactttttattacaacatgtttgatgcaaattacgacaccctagtccacgcgttggagaagaatgggtttggtaacatgcctatcattattggggaaattggttggcctactgatggagacagtaatgcgaatttggactacgctaagaagttcaaccaaggctttatggctcacatctcaggggggaaagggactccgaggagacctggccctatcgatgcatacctgttcagcttgatagacgaggacgccaagagtgttcagccaggatactttgagcgacactgggggatattcacatttgacggcttaccaaaatatgccttgaacctagggacaacgaacacaggagctctgatccaggccaaaggggtacgctacctagagaggaagtggtgtgtgatgaagccaaatgtgaggttggatgatccgcaggtagctccagccgtgagctacgcgtgtagccttggggactgtactagtcttggggttgggacgtcctgtgctaatcttgacgggaaacaaaacatatcgtatgcattcaacagttattatcagatacaggatcagcttgatacagcttgtaagttcccaaacatatcagaggtgaccaagacagatccatctactggaacttgcagatttccgattatgatagaaccttactacggtggggcagcccgggaacacgggttctttttcccactactgatggtggcagccatcgcagtctctattttttgatggtttcttcttgtcaatttgtaattctgtgtgatggcttgaactatttttttttcttcttgaattctgatttctcttcctt

SEQ ID NO: 10998 - protein, 477 aa, Arabidopsis thaliana
MGWGSVLLLLAVALLCQRASSIGANWGTQASHPLPPDIVVRMLRENGIQKVKLFDAEYDTLRALGKSGIEVMVGIPNEMLATLASSLKAAEKWVAKNVSTHISTDNVNIRYVAVGNEPFLSTYNGSYLSTTFPALRNIQIAIIKAGLQNQVKVTCPLNADVYDSSTTFPSGGDFRANIRDLMITIVKFLSENGGPFTVNIYPYISLYTNPDFPVDYAFFDGNAQPLNDGGTFYYNMFDANYDTLVHALEKNGFGNMPIIIGEIGWPTDGDSNANLDYAKKFNQGFMAHISGGKGTPRRPGPIDAYLFSLIDEDAKSVQPGYFERHWGIFTFDGLPKYALNLGTTNTGALIQAKGVRYLERKWCVMKPNVRLDDPQVAPAVSYACSLGDCTSLGVGTSCANLDGKQNISYAFNSYYQIQDQLDTACKFPNISEVTKTDPSTGTCRFPIMIEPYYGGAAREHGFFFPLLMVAAIAVSIF

SEQ ID NO: 10999 - protein, 436 aa, Arabidopsis thaliana
MLRENGIQKVKLFDAEYDTLRALGKSGIEVMVGIPNEMLATLASSLKAAEKWVAKNVSTHISTDNVNIRYVAVGNEPFLSTYNGSYLSTTFPALRNIQIAIIKAGLQNQVKVTCPLNADVYDSSTTFPSGGDFRANIRDLMITIVKFLSENGGPFTVNIYPYISLYTNPDFPVDYAFFDGNAQPLNDGGTFYYNMFDANYDTLVHALEKNGFGNMPIIIGEIGWPTDGDSNANLDYAKKFNQGFMAHISGGKGTPRRPGPIDAYLFSLIDEDAKSVQPGYFERHWGIFTFDGLPKYALNLGTTNTGALIQAKGVRYLERKWCVMKPNVRLDDPQVAPAVSYACSLGDCTSLGVGTSCANLDGKQNISYAFNSYYQIQDQLDTACKFPNISEVTKTDPSTGTCRFPIMIEPYYGGAAREHGFFFPLLMVAAIAVSIF

SEQ ID NO: 11000 - protein, 406 aa, Arabidopsis thaliana
MVGIPNEMLATLASSLKAAEKWVAKNVSTHISTDNVNIRYVAVGNEPFLSTYNGSYLSTTFPALRNIQIAIIKAGLQNQVKVTCPLNADVYDSSTTFPSGGDFRANIRDLMITIVKFLSENGGPFTVNIYPYISLYTNPDFPVDYAFFDGNAQPLNDGGTFYYNMFDANYDTLVHALEKNGFGNMPIIIGEIGWPTDGDSNANLDYAKKFNQGFMAHISGGKGTPRRPGPIDAYLFSLIDEDAKSVQPGYFERHWGIFTFDGLPKYALNLGTTNTGALIQAKGVRYLERKWCVMKPNVRLDDPQVAPAVSYACSLGDCTSLGVGTSCANLDGKQNISYAFNSYYQIQDQLDTACKFPNISEVTKTDPSTGTCRFPIMIEPYYGGAAREHGFFFPLLMVAAIAVSIF

SEQ ID NO: 11001 - DNA, 1381 bp, Arabidopsis thaliana
gaacacactctgagtcttgaaggtcaacaacgtcgagaataatggcatcatctctttgtgcttcttctgccatcgctgccatttcttctccaagtttcttgggtggtaagaaactgaggctgaagaagaagttgactgttccagctggtttttttttttttttttttggacgaaaatgttgcatcaatatatatagttcttaaacgagaataaaatttccaaatgagacataaaagcattatccatctctagcttaatacaacaagcgaagagataaaaacaaaacccagtaaataagtcttaatacacaggtactactgtccacagttcctctatgaggctggggctttttgtttcttgggcatgcggtaaccaccaacaacacaggcatggtcacgctcaaacggctcgagagtcacctgttctgctggtttaaactgctcttgttgcaacttcttcacctcgctctggaagactgcttctgctgcaactgtagagtcgatacagttggccttgattgagataacaaagtgtccaccagttttgaggaaaaatgaggcattcagggccaagattcttgcctgatctggctgagcaacatcagagaatatgacatcaaccatgcccacgagcattctgtacttagccggatgtctagcatcttcaatgattggaataacgttagttctcttcttggccatgttcaccaaatctctaccacttctatgagaaaactcaacagcataaacacatccctcagggccaacgaggtcagaaacatgagagacagtggtcccagaagcagcacccaagtaaagaactttggcaccaggtttgatccaaatgttgtcgacaccaccaagaattgcagcagctaacttagatctaaacggattccaaactctgtattcaaccttagttccatcttcattctgaacagagattctcttctcattgtaaacagcttcaccaggaaccaaattcttagtgacaagagcatcttctttacctttagcaataaacactcccgcatgtctgtgaggctcaacaatcactttgcttcctcctttcattcctccacgaggtggtcctccacgaccacgaggcgcaccacgtcctctgccgcgaggcccactacggcctctgtcaccactacggcctcctccaaagcttcttccacctccaaaacctcttccaccaccatctcttccacctctgaatcctccaccaccacgtcctcctgtaactgggggtctcatatttgcttgtctaaaagtgaagaactaaagacgagaaccgaaaaaaaacgagggcaaaggagagagatgtgcggtggtggctcgggggggggggggggggggggactagtgagagaactagt

SEQ ID NO: 11002 - protein, 116 aa, Arabidopsis thaliana
MSVRLNNHFASSFHSSTRWSSTTTRRTTSSAARPTTASVTTTASSKASSTSKTSSTTISSTSESSTTTSSCNWGSHICLSKSEELKTRTEKKRGQRREMCGGGSGGGGGGGLVREL

SEQ ID NO: 11003 - protein, 75 aa, Arabidopsis thaliana
MSSIFNDWNNVSSLLGHVHQISTTSMRKLNSINTSLRANEVRNMRDSGPRSSTQVKNFGTRFDPNVVDTTKNCSS

SEQ ID NO: 11004 - DNA, 2271 bp, Arabidopsis thaliana
agagcccaacattggattcctcttctttgaccattcctctctacctgaataacccgttaatctctctctgtccctttcttcttcttttttcaagaacaataaaaaaatgtctcaagattctgcaactactactccgccgccacctttaacctccgacgtttcaatgccttccggtgaggaagatgagccaaagcatgtaacattggaagaagaagcaccggtgacttcggagacaaatctgaagctacctttaatgccggagctagaggagtcaaatcatacggcggaggtagtttcagagaaggtgacgccggagacgatgactttggagtcagaaggtctcaaccacgcggcggaggattcaaagcagacacatgaagtaacgccggaggcagagactttgaagctagaggttctcaaccacacggcggaggattcagagcagacacatgaagtgacgccggagacagagacagtgaagtcagagtttctcaaccacgtggcggaggattcagagcagacacatgaagtgacgccggagacagagactgtgaagtcagaggttctcaaccatgcggcggaggattcagagcagccacgtggagtgacgccgacgccggagacagaaacttctgagccaaacacgtcattgcttgtaacttccgagacagaagagcctaaccatgcggcggaggattattcagagacagagccatcacagaaactaatgttggagcagaggagaaagtacatggaagtagaagattggacagagccagaactaccagatgaagcggtgttagaagctgcagcgtcagtccctgagccaaagcaaccagagcctcagacaccaccaccaccaccatctactactacttccactgttgcatctagatctttagccgaaatgatgaacagagaagaagcagaagcagaagagaaacaaaagattcagattcctcgtagtctcggttcattcaaagaagaaacaaacaaaatctccgatctttcagaaacagagttaaacgcacttcaagagcttcgtcaccttcttcaagtatcacaagattcaagcaaaacctctatatggggtgtgccatttctcaaagacgacagaaccgacgtcgttttgttaaagtttctaagagcaagagactttaaacctcaagaagcttactcaatgctaaacaagacactccaatggagaatcgacttcaacatcgaagagcttctagacgaaaacctcggtgacgatttagacaaagttgtgttcatgcaaggacaagacaaggagaatcatcctgtctgtttcaatgtctacggtgagtttcagaacaaagatctttatcagaaaacgttttcagatgaagagaagagagaacggttcttgagatggaggattcagtttcttgaaaagagtatcaggaatcttgattttgtagctggtggtgtttccacgatatgtcaagtaaatgatcttaagaattctccaggacctggtaagactgagcttaggttagctactaagcaagctcttcatcttcttcaagacaattaccctgagtttgtctctaaacagatattcatcaatgttccatggtggtaccttgcgttctataggattattagtccttttatgtcacaaagatcaaagagcaaactagttttcgcaggtccttcaagatctgcagaaacccttctcaggtacatatcacccgaacatgtcccggttcagtatggtggactaagtgtggataattgcgagtgtaactcggatttcacacacgatgatatcgctaccgagatcactattaaaccaactactaaacaaaccgtcgagattattgtttacgagaaatgtacaatcgtgtgggagataagagtagtgggatgggaggtttcgtatggagcggagtttgtgccggagaacaaagaaggttatacagtgatcattcagaaaccgaggaagatgactgcgaaaaatgaactggtggtgtctcatagcttcaaagttggagaagttggcaggattttgctaactgttgataacccgacttcaaccaagaaaatgcttatctacaggttcaaggttaagcctttagcttgtgagtaacaaaagtgcgcatctttcttcgagtgtttcttagtttagaacttgatcatatgattgttgattgtgttttgtttttctctcttttaccgacttatatgtttgtgtggttctgtttgctaaattcttttgttttatattgtattttgctcttatttttt

SEQ ID NO: 11005 - protein, 668 aa, Arabidopsis thaliana
MSQDSATTTPPPPLTSDVSMPSGEEDEPKHVTLEEEAPVTSETNLKLPLMPELEESNHTAEVVSEKVTPETMTLESEGLNHAAEDSKQTHEVTPEAETLKLEVLNHTAEDSEQTHEVTPETETVKSEFLNHVAEDSEQTHEVTPETETVKSEVLNHAAEDSEQPRGVTPTPETETSEPNTSLLVTSETEEPNHAAEDYSETEPSQKLMLEQRRKYMEVEDWTEPELPDEAVLEAAASVPEPKQPEPQTPPPPPSTTTSTVASRSLAEMMNREEAEAEEKQKIQIPRSLGSFKEETNKISDLSETELNALQELRHLLQVSQDSSKTSIWGVPFLKDDRTDVVLLKFLRARDFKPQEAYSMLNKTLQWRIDFNIEELLDENLGDDLDKVVFMQGQDKENHPVCFNVYGEFQNKDLYQKTFSDEEKRERFLRWRIQFLEKSIRNLDFVAGGVSTICQVNDLKNSPGPGKTELRLATKQALHLLQDNYPEFVSKQIFINVPWWYLAFYRIISPFMSQRSKSKLVFAGPSRSAETLLRYISPEHVPVQYGGLSVDNCECNSDFTHDDIATEITIKPTTKQTVEIIVYEKCTIVWEIRVVGWEVSYGAEFVPENKEGYTVIIQKPRKMTAKNELVVSHSFKVGEVGRILLTVDNPTSTKKMLIYRFKVKPLACE

SEQ ID NO: 11006 - protein, 649 aa, Arabidopsis thaliana
MPSGEEDEPKHVTLEEEAPVTSETNLKLPLMPELEESNHTAEVVSEKVTPETMTLESEGLNHAAEDSKQTHEVTPEAETLKLEVLNHTAEDSEQTHEVTPETETVKSEFLNHVAEDSEQTHEVTPETETVKSEVLNHAAEDSEQPRGVTPTPETETSEPNTSLLVTSETEEPNHAAEDYSETEPSQKLMLEQRRKYMEVEDWTEPELPDEAVLEAAASVPEPKQPEPQTPPPPPSTTTSTVASRSLAEMMNREEAEAEEKQKIQIPRSLGSFKEETNKISDLSETELNALQELRHLLQVSQDSSKTSIWGVPFLKDDRTDVVLLKFLRARDFKPQEAYSMLNKTLQWRIDFNIEELLDENLGDDLDKVVFMQGQDKENHPVCFNVYGEFQNKDLYQKTFSDEEKRERFLRWRIQFLEKSIRNLDFVAGGVSTICQVNDLKNSPGPGKTELRLATKQALHLLQDNYPEFVSKQIFINVPWWYLAFYRIISPFMSQRSKSKLVFAGPSRSAETLLRYISPEHVPVQYGGLSVDNCECNSDFTHDDIATEITIKPTTKQTVEIIVYEKCTIVWEIRVVGWEVSYGAEFVPENKEGYTVIIQKPRKMTAKNELVVSHSFKVGEVGRILLTVDNPTSTKKMLIYRFKVKPLACE

SEQ ID NO: 11007 - protein, 619 aa, Arabidopsis thaliana
MPELEESNHTAEVVSEKVTPETMTLESEGLNHAAEDSKQTHEVTPEAETLKLEVLNHTAEDSEQTHEVTPETETVKSEFLNHVAEDSEQTHEVTPETETVKSEVLNHAAEDSEQPRGVTPTPETETSEPNTSLLVTSETEEPNHAAEDYSETEPSQKLMLEQRRKYMEVEDWTEPELPDEAVLEAAASVPEPKQPEPQTPPPPPSTTTSTVASRSLAEMMNREEAEAEEKQKIQIPRSLGSFKEETNKISDLSETELNALQELRHLLQVSQDSSKTSIWGVPFLKDDRTDVVLLKFLRARDFKPQEAYSMLNKTLQWRIDFNIEELLDENLGDDLDKVVFMQGQDKENHPVCFNVYGEFQNKDLYQKTFSDEEKRERFLRWRIQFLEKSIRNLDFVAGGVSTICQVNDLKNSPGPGKTELRLATKQALHLLQDNYPEFVSKQIFINVPWWYLAFYRIISPFMSQRSKSKLVFAGPSRSAETLLRYISPEHVPVQYGGLSVDNCECNSDFTHDDIATEITIKPTTKQTVEIIVYEKCTIVWEIRVVGWEVSYGAEFVPENKEGYTVIIQKPRKMTAKNELVVSHSFKVGEVGRILLTVDNPTSTKKMLIYRFKVKPLACE

SEQ ID NO: 11008 - DNA, 1915 bp, Arabidopsis thaliana
tctcctcttcacacctctctctcgccgacgacgctacaaccatggcgtctctcgctctctccggctcctgctctctcgctttccctctcaaatctcgatctctctctctccctcgtcctccttcttcctctctcaatttgacgaaacctctccgatctctcgattctcgcttctccttactcaaatctccacttcccgtctctttacgccggagatcatcaactctcgttaaagcctcttccaccgtcgcttcagcttcctcttctccaactcctcctttggttccagctccggttccatggcaaggagctgccattaagcctcttctcgcttcgatcgctactggtttgattctatggttcgttccagtccccgaaggtgtcactcgcaacgcgtggcaattactcgcgatcttcctcgccaccatcgtcgggatcatcactcagccgcttcctctcggtgctgttgctctaatgggattaggagcttccgttctcaccaaaaccctaacgttcgccgccgcgttctccgctttcggagatccaatcccgtggctcatcgctcttgccttcttcttcgctcgcggtttcatcaaaaccggtctcggtaaccgtgtagcttaccagttcgttagactcttcagtagctcctcccttggtctcggttacagtctcgtcttcagtgaagctcttttagctccggcgattccttctgtctcggctcgtgccggtggaatctttctcccgttggtgaaatctctctgtgttgcttgtgggagtaacgttggggatggaacagagcaccgtcttggctcgtggttgatgcttacttgtttccagacttctgtgatctcttcttctatgttcttgacggctatggctgcgaatcctttgagtgctaatttggcgtttaacacgattaagcagacgattggatggactgattgggctaaagctgcgattgtaccaggacttgtgtctttgattgttgttccgtttcttttgtatctcatctatcctcctacggtgaagagcagtcctgatgctcctaagctggctcaggaaaagcttgacaagatgggacctatgtctaagaacgaattgattatggctgccactttattcctcacggttggtctctggatctttggagctaagttgggtgtagatgctgtgactgcagccattcttggattatcagtccttcttgtgacaggtgttgtgacatggaaagagtgcttagctgagtcggtcgcatgggacacactcacctggttcgctgctctcattgcgatggctggttatcttaacaaatatggtctcattgagtggttcagccagaccgtagtcaagtttgtgggaggattgggtttgtcatggcagctatcttttggaatcctcgtcctcttgtatttctacactcactacttctttgctagtggagctgcccacattggtgctatgttcactgcctttttatcggtttcaaccgctctaggcactccaccttactttgcagccttggttcttgcgttcctttccaacctgatgggaggattgacccattatggtatcgggtctgcgcctatcttctacggagctaactacgtgccgctggctaaatggtggggctatggattcctgatttcaatagtcaacattctcatctggcttggtgtaggtggtgcctggtggaagttcattggcttgtggtgaggaccaccatacaccaatcttcccattcttttccttacttatatatataatctcttagaacggctttgagattcagatttgagaaggattgaaatcagggttataaggattgagcagagtttttctgcaatttttattctcactcacacacattttgaagtgtaagcaatcttaacttgcgtcaattttgtttgatttct

SEQ ID NO: 11009 - protein, 570 aa, Arabidopsis thaliana
SSSHLSLADDATTMASLALSGSCSLAFPLKSRSLSLPRPPSSSLNLTKPLRSLDSRFSLLKSPLPVSLRRRSSTLVKASSTVASASSSPTPPLVPAPVPWQGAAIKPLLASIATGLILWFVPVPEGVTRNAWQLLAIFLATIVGIITQPLPLGAVALMGLGASVLTKTLTFAAAFSAFGDPIPWLIALAFFFARGFIKTGLGNRVAYQFVRLFSSSSLGLGYSLVFSEALLAPAIPSVSARAGGIFLPLVKSLCVACGSNVGDGTEHRLGSWLMLTCFQTSVISSSMFLTAMAANPLSANLAFNTIKQTIGWTDWAKAAIVPGLVSLIVVPFLLYLIYPPTVKSSPDAPKLAQEKLDKMGPMSKNELIMAATLFLTVGLWIFGAKLGVDAVTAAILGLSVLLVTGVVTWKECLAESVAWDTLTWFAALIAMAGYLNKYGLIEWFSQTVVKFVGGLGLSWQLSFGILVLLYFYTHYFFASGAAHIGAMFTAFLSVSTALGTPPYFAALVLAFLSNLMGGLTHYGIGSAPIFYGANYVPLAKWWGYGFLISIVNILIWLGVGGAWWKFIGLW

SEQ ID NO: 11010 - protein, 557 aa, Arabidopsis thaliana
MASLALSGSCSLAFPLKSRSLSLPRPPSSSLNLTKPLRSLDSRFSLLKSPLPVSLRRRSSTLVKASSTVASASSSPTPPLVPAPVPWQGAAIKPLLASIATGLILWFVPVPEGVTRNAWQLLAIFLATIVGIITQPLPLGAVALMGLGASVLTKTLTFAAAFSAFGDPIPWLIALAFFFARGFIKTGLGNRVAYQFVRLFSSSSLGLGYSLVFSEALLAPAIPSVSARAGGIFLPLVKSLCVACGSNVGDGTEHRLGSWLMLTCFQTSVISSSMFLTAMAANPLSANLAFNTIKQTIGWTDWAKAAIVPGLVSLIVVPFLLYLIYPPTVKSSPDAPKLAQEKLDKMGPMSKNELIMAATLFLTVGLWIFGAKLGVDAVTAAILGLSVLLVTGVVTWKECLAESVAWDTLTWFAALIAMAGYLNKYGLIEWFSQTVVKFVGGLGLSWQLSFGILVLLYFYTHYFFASGAAHIGAMFTAFLSVSTALGTPPYFAALVLAFLSNLMGGLTHYGIGSAPIFYGANYVPLAKWWGYGFLISIVNILIWLGVGGAWWKFIGLW

SEQ ID NO: 11011 - protein, 413 aa, Arabidopsis thaliana
MGLGASVLTKTLTFAAAFSAFGDPIPWLIALAFFFARGFIKTGLGNRVAYQFVRLFSSSSLGLGYSLVFSEALLAPAIPSVSARAGGIFLPLVKSLCVACGSNVGDGTEHRLGSWLMLTCFQTSVISSSMFLTAMAANPLSANLAFNTIKQTIGWTDWAKAAIVPGLVSLIVVPFLLYLIYPPTVKSSPDAPKLAQEKLDKMGPMSKNELIMAATLFLTVGLWIFGAKLGVDAVTAAILGLSVLLVTGVVTWKECLAESVAWDTLTWFAALIAMAGYLNKYGLIEWFSQTVVKFVGGLGLSWQLSFGILVLLYFYTHYFFASGAAHIGAMFTAFLSVSTALGTPPYFAALVLAFLSNLMGGLTHYGIGSAPIFYGANYVPLAKWWGYGFLISIVNILIWLGVGGAWWKFIGLW

SEQ ID NO: 11012 - DNA, 2197 bp, Arabidopsis thaliana
gtctttctcttcttctgccaaattccacagatggctgcttcatcggcttgtcttctcggaaatggattatctgtctacacaaccaaacagaggttccaaaagcttgggcttgataggacatctaaagttacagttgtgaaggcttctttggatgagaagaaacatgaagggagaagaggtttctttaaactcttactaggaaacgctgctgctggagttggtttgcttgcaagtggaaacgctaatgcagacgaacaaggacaaggggtttcttcgtctagaatgtcttattctaggttcctagagtatttagacaagggaagggttgagaaagtagatttgtatgagaatgggactatagctattgtggaggccgtttctcctgagttgggtaaccggattcagcgtgtacgtgtgcagctacctggattgagtcaggagcttctccagaagttgagggctaagaatattgatttcgcagcacataatgctcaggaggaccaaggttctccaatactcaacttgattgggaatcttgcattccctgttattttgattggcggtttgttccttctctcgagaagatcctctggtggaatgggtggccctggtggtcctggcttcccactccaaattggtcagtcgaaagcaaagtttcagatggaaccaaacactggtgtaacttttgatgatgttgctggagtcgatgaagccaagcaagatttcatggaagtggtggagtttctgaagaagcctgagaggttcactgcggttggtgcccggatcccaaaaggtgttcttcttgttggtcctcctggtaccgggaaaaccctgttggcaaaagccattgctggtgaagctggtgtgcccttcttttccatctcgggttctgagtttgttgagatgtttgtcggtgttggtgcatcaagggtccgcgatcttttcaaaaaagccaaagaaaatgctccatgcattgttttcgtggatgaaatagatgctgttggtaggcaaagaggaactggaattggtggaggtaatgatgaaagagaacagacccttaatcagctcctgactgagatggatggttttgagggtaacactggtgttatcgtagttgctgcaaccaacagagccgacattcttgactccgctttgctaagaccagggcgttttgaccggcaggtatctgttgacgttccagacgttaagggaagaacagatatactcaaggttcactcggggaataagaaatttgaaagcggtgtttcacttgaagtaatagccatgagaacacctggatttagcggagctgatcttgcaaacctcttgaacgaggctgccatattggccggccgccgtggaaagactgcaatatcatcaaaagagattgatgactcaattgatagaattgtagctggcatggaaggaacagtcatgacagatgggaagagcaaaagcttggttgcttaccatgaagttggccatgccatatgtggaacattgactccagggcatgatgctgttcaaaaggtcacgttgataccacgaggccaggctagaggtctgacttggttcattccctcagatgacccaactctaatctccaaacagcaactctttgcaagaattgttggtggactcggtggtagagctgccgaagaagtcatctttggtgagtctgaggtgactactggtgcagttagtgacttgcaacagatcaccggtttggctaagcagatggtgacaacatttgggatgtctgaaatcggaccatggtcgctaatggattcatcggagcaaagcgatgtcattatgaggatgatggcaagaaactcaatgtctgagaagcttgcaaatgatattgatacagcggtgaagacattatcagacaaagcgtacgagatagctttgagccagattagaaacaatcgtgaagccatggacaagattgttgaaatacttcttgagaaagagactatgtcaggcgatgaattccgagcaatcctatctgaattcacagaaatcccacctgaaaaccgtgttgcttcttcaacatccacatcaacaccaacaccagcgtctgtctgagtaagagacctttgaatctctgtgtatattatcttgagatacttccccatactgtgtaacagcacatcttaatttccctagttggagtatatatgtatacgaattcgat

SEQ ID NO: 11013 - protein, 695 aa, Arabidopsis thaliana
VFLFFCQIPQMAASSACLLGNGLSVYTTKQRFQKLGLDRTSKVTVVKASLDEKKHEGRRGFFKLLLGNAAAGVGLLASGNANADEQGQGVSSSRMSYSRFLEYLDKGRVEKVDLYENGTIAIVEAVSPELGNRIQRVRVQLPGLSQELLQKLRAKNIDFAAHNAQEDQGSPILNLIGNLAFPVILIGGLFLLSRRSSGGMGGPGGPGFPLQIGQSKAKFQMEPNTGVTFDDVAGVDEAKQDFMEVVEFLKKPERFTAVGARIPKGVLLVGPPGTGKTLLAKAIAGEAGVPFFSISGSEFVEMFVGVGASRVRDLFKKAKENAPCIVFVDEIDAVGRQRGTGIGGGNDEREQTLNQLLTEMDGFEGNTGVIVVAATNRADILDSALLRPGRFDRQVSVDVPDVKGRTDILKVHSGNKKFESGVSLEVIAMRTPGFSGADLANLLNEAAILAGRRGKTAISSKEIDDSIDRIVAGMEGTVMTDGKSKSLVAYHEVGHAICGTLTPGHDAVQKVTLIPRGQARGLTWFIPSDDPTLISKQQLFARIVGGLGGRAAEEVIFGESEVTTGAVSDLQQITGLAKQMVTTFGMSEIGPWSLMDSSEQSDVIMRMMARNSMSEKLANDIDTAVKTLSDKAYEIALSQIRNNREAMDKIVEILLEKETMSGDEFRAILSEFTEIPPENRVASSTSTSTPTPASV

SEQ ID NO: 11014 - protein, 685 aa, Arabidopsis thaliana
MAASSACLLGNGLSVYTTKQRFQKLGLDRTSKVTVVKASLDEKKHEGRRGFFKLLLGNAAAGVGLLASGNANADEQGQGVSSSRMSYSRFLEYLDKGRVEKVDLYENGTIAIVEAVSPELGNRIQRVRVQLPGLSQELLQKLRAKNIDFAAHNAQEDQGSPILNLIGNLAFPVILIGGLFLLSRRSSGGMGGPGGPGFPLQIGQSKAKFQMEPNTGVTFDDVAGVDEAKQDFMEVVEFLKKPERFTAVGARIPKGVLLVGPPGTGKTLLAKAIAGEAGVPFFSISGSEFVEMFVGVGASRVRDLFKKAKENAPCIVFVDEIDAVGRQRGTGIGGGNDEREQTLNQLLTEMDGFEGNTGVIVVAATNRADILDSALLRPGRFDRQVSVDVPDVKGRTDILKVHSGNKKFESGVSLEVIAMRTPGFSGADLANLLNEAAILAGRRGKTAISSKEIDDSIDRIVAGMEGTVMTDGKSKSLVAYHEVGHAICGTLTPGHDAVQKVTLIPRGQARGLTWFIPSDDPTLISKQQLFARIVGGLGGRAAEEVIFGESEVTTGAVSDLQQITGLAKQMVTTFGMSEIGPWSLMDSSEQSDVIMRMMARNSMSEKLANDIDTAVKTLSDKAYEIALSQIRNNREAMDKIVEILLEKETMSGDEFRAILSEFTEIPPENRVASSTSTSTPTPASV

SEQ ID NO: 11015 - protein, 601 aa, Arabidopsis thaliana
MSYSRFLEYLDKGRVEKVDLYENGTIAIVEAVSPELGNRIQRVRVQLPGLSQELLQKLRAKNIDFAAHNAQEDQGSPILNLIGNLAFPVILIGGLFLLSRRSSGGMGGPGGPGFPLQIGQSKAKFQMEPNTGVTFDDVAGVDEAKQDFMEVVEFLKKPERFTAVGARIPKGVLLVGPPGTGKTLLAKAIAGEAGVPFFSISGSEFVEMFVGVGASRVRDLFKKAKENAPCIVFVDEIDAVGRQRGTGIGGGNDEREQTLNQLLTEMDGFEGNTGVIVVAATNRADILDSALLRPGRFDRQVSVDVPDVKGRTDILKVHSGNKKFESGVSLEVIAMRTPGFSGADLANLLNEAAILAGRRGKTAISSKEIDDSIDRIVAGMEGTVMTDGKSKSLVAYHEVGHAICGTLTPGHDAVQKVTLIPRGQARGLTWFIPSDDPTLISKQQLFARIVGGLGGRAAEEVIFGESEVTTGAVSDLQQITGLAKQMVTTFGMSEIGPWSLMDSSEQSDVIMRMMARNSMSEKLANDIDTAVKTLSDKAYEIALSQIRNNREAMDKIVEILLEKETMSGDEFRAILSEFTEIPPENRVASSTSTSTPTPASV

SEQ ID NO: 11016 - DNA, 2044 bp, Arabidopsis thaliana
aattcatggtttcaatttcttcttcttctcctttttcaaaaatttgtcacctccgagatcagatctgatcgtcggaattgagatggcgaggaataaacttgtaagtggtagtcatgggatatggaaatatttcaacccagcgttttatctccgaagaccaagacgtcttgctttgctcatcatcctcttcgtctctgtttcaatggttgtttgggatcgtcaatctctttcccgagactaccagtttgaagtttccaagttaaatgaagaagttttgcggttgcagcagatgttggaagagataaagagcgtcactgaggatgtgtctgtcaatagtttgaaggatgttcaggaagatccagttgatgctcagcgaatgcagagagttaaagaggcaatggttcatgcttggagttcatatgaaaagtatgcctggggacaagatgagcttcagccccagacaaaggatggtgttgacagctttggtggcctgggtgcaactatgatagatgcattagacacactctatataatgggtctagatgagcagtttcagaaagccagagagtgggtagcaagctcattagatttcgacaaggattatgctgccagtatgtttgagacaaccataagagtggtaggagggcttctcagtgcgtatgatctttctggggataaaattttccttgaaaaggctatggatattgcagacagattattgcctgcataggacactcaatcgggtataccatataatattatcaacttgaagcatggaaatgctcacaatcctacatgggcggggggagacagtattcttgcagattctggtactgcgcagcttgaatttattgccctttcccagaggacaggggacccaaaatatcagcaaaaggtagaaaaggttatttcagtgctaaataagaacttccctgctgatggtttacttccgatatatataaatcccgatacagctaatccatcgcagtctacaataacatttggtgccatgggagacagcttttacgaatatttgctcaaagtttgggtgtttgggaacaaaacttcagcagtgaaacactatagagatatgtgggagaagtcaatgaatggtctgctaagcttggttaagaaatcaacaccttcgtcgtttacatatatctgtgagaagagtggaaattctttgatcgataagatggatgaattggcatgctttgctcctggaatgttggctttaggagcatctgggtatagtgatcctgctgaaggaaagaagtttctcacactcgctgaagagcttgcgtggacatgttataacttttaccaatctactccaacaaaactggctggggagaattatttcttcaactctgggagtgacatgagtgttggaacgtcgtggaacatcttgagaccagaaactgtcgaatcactgttttacctctggcggttaactggaaacaagacatatggggagtggggatggaatatatttgaagcatttgagaagaactcgcgcatagagtctggatatgttggtttgaaggatgttaatacaggcgttaaggacaacaagatgcaaagtttcttccttgcagagacactcaagtatctctatctactcttctcgccgacaacagtcatttctttagacgagtgggtattcaacaccgaagctcatccacttaagattaagtctcgaagcgatcaggtaaatctcaaacaatccagcaaagtactactacgaaaaccggcatttagaatacgccagaggcattatggtcggataacaaagaagtaaaactccctggagaggtcacagtgtgattcgtaggaggggctctatggatatatcttaacagagcaattggatttagcttggctattcaaagacccttttatttaagaaaccatttttggaaagatttcaagatatagactattgttgtactagttgggatcagaacccaaacaggttcaccacagtttacaccttgtgttttgtatccttactccttagattataaattaagagtattatctt

SEQ ID NO: 11017 - protein, 263 aa, Arabidopsis thaliana
MGDSFYEYLLKVWVFGNKTSAVKHYRDMWEKSMNGLLSLVKKSTPSSFTYICEKSGNSLIDKMDELACFAPGMLALGASGYSDPAEGKKFLTLAEELAWTCYNFYQSTPTKLAGENYFFNSGSDMSVGTSWNILRPETVESLFYLWRLTGNKTYGEWGWNIFEAFEKNSRIESGYVGLKDVNTGVKDNKMQSFFLAETLKYLYLLFSPTTVISLDEWVFNTEAHPLKIKSRSDQVNLKQSSKVLLRKPAFRIRQRHYGRITKK

SEQ ID NO: 11018 - protein, 242 aa, Arabidopsis thaliana
IHGFNFFFFSFFKNLSPPRSDLIVGIEMARNKLVSGSHGIWKYFNPAFYLRRPRRLALLIILFVSVSMVVWDRQSLSRDYQFEVSKLNEEVLRLQQMLEEIKSVTEDVSVNSLKDVQEDPVDAQRMQRVKEAMVHAWSSYEKYAWGQDELQPQTKDGVDSFGGLGATMIDALDTLYIMGLDEQFQKAREWVASSLDFDKDYAASMFETTIRVVGGLLSAYDLSGDKIFLEKAMDIADRLLPA

SEQ ID NO: 11019 - protein, 236 aa, Arabidopsis thaliana
MWEKSMNGLLSLVKKSTPSSFTYICEKSGNSLIDKMDELACFAPGMLALGASGYSDPAEGKKFLTLAEELAWTCYNFYQSTPTKLAGENYFFNSGSDMSVGTSWNILRPETVESLFYLWRLTGNKTYGEWGWNIFEAFEKNSRIESGYVGLKDVNTGVKDNKMQSFFLAETLKYLYLLFSPTTVISLDEWVFNTEAHPLKIKSRSDQVNLKQSSKVLLRKPAFRIRQRHYGRITKK

SEQ ID NO: 11020 - protein, 215 aa, Arabidopsis thaliana
MARNKLVSGSHGIWKYFNPAFYLRRPRRLALLIILFVSVSMVVWDRQSLSRDYQFEVSKLNEEVLRLQQMLEEIKSVTEDVSVNSLKDVQEDPVDAQRMQRVKEAMVHAWSSYEKYAWGQDELQPQTKDGVDSFGGLGATMIDALDTLYIMGLDEQFQKAREWVASSLDFDKDYAASMFETTIRVVGGLLSAYDLSGDKIFLEKAMDIADRLLPA

SEQ ID NO: 11021 - DNA, 1704 bp, Arabidopsis thaliana
attttccctctcttctcttccgtctttctcgttctgtttctgattgttcgtgtaaaaccctagaatgacgatgacagctttgaacagggaggtcgaaactcagtcactgaaaaaactcagtctaaaatctgttagacgagctcgtgaaattttctcccccgtccatggccaatttcctcagcctgatcctgaaagcaaaagaattcggctctgccataagattcaagttgcatttggaggcgtagaacctgcaagtaagcctacacgtattgctgaccataacagtgaaaagacggctccattgaaagcccttgcgcttccaggtccaaaagggtccaaggaacttcgaaaaagcgcaacagagaaagctttagttgttggtccaactttaccgccaagagacttgaacaatactggtaatccaggcaaaagcacggccattcttcctgcatctggatcattttccgaaagaaatctgtcaactgctgctttaatggagagaatgcctagtagatggccccgtccagagtggcatgcaccatggaagaattacagggtgctccagggacacttgggttgggtcagatctgttgcgtttgacccaagcaatgaatggttttgcactggttcagctgatcgtaccatcaagatatgggatgtagcgactggagttctgaaactcacacttactggacatatagggcaagtacgaggcctcgctgtaagcaatagacatacctatatgttttctgctggtgatgacaagcaagtcaaatgctgggaccttgagcagaataaggttattcgatcttatcatggtcatttgcatggcgtttactgtttagctcttcatcctactcttgatgttgtactaaccggagggcgagactctgtctgcagggtatgggatatccgtacgaagatgcaaatttttgtactcccacatgacagcgatgttttttccgttttggcccgcccaactgatccacaagttattacagggtctcatgactcaaccatcaaattttgggacctccgatatggcaaatcgatggcaaccataacgaatcataagaagactgtccgagcaatggctctccatccgaaagagaatgattttgtttctgcatcagctgacaacatcaagaagtttagccttcctaagggagagttttgccacaacatgctttctctacagagagacataattaacgcagtggctgtgaatgaggatggcgtaatggtcactggaggtgataaaggtggcttatggttctgggactggaagagtggtcacaatttccaacgggcagaaactattgtacagcctggttcgctggagagtgaagcaggtatatatgcagcgtgttacgatcagacgggttcaaggctggtaacgtgtgagggagacaaaacaataaagatgtggaaggaagacgaggatgcaactcctgaaactcatcctctcaacttcaaacctcccaaagagatcagacgcttctgaggtttccctctcttacaagttacacctctctaatatcaaactcgaagccagaaaaaaaaaatcactaatctcactctggattaaaaaaaaccttggttatgctatataatttcttcttcaagatagatatggaaaaaaaacagcattgtagtttcttattaattattgtagttttacatgaaaaaagacactattttcgg

SEQ ID NO: 11022 - protein, 479 aa, Arabidopsis thaliana
MTMTALNREVETQSLKKLSLKSVRRAREIFSPVHGQFPQPDPESKRIRLCHKIQVAFGGVEPASKPTRIADHNSEKTAPLKALALPGPKGSKELRKSATEKALVVGPTLPPRDLNNTGNPGKSTAILPASGSFSERNLSTAALMERMPSRWPRPEWHAPWKNYRVLQGHLGWVRSVAFDPSNEWFCTGSADRTIKIWDVATGVLKLTLTGHIGQVRGLAVSNRHTYMFSAGDDKQVKCWDLEQNKVIRSYHGHLHGVYCLALHPTLDVVLTGGRDSVCRVWDIRTKMQIFVLPHDSDVFSVLARPTDPQVITGSHDSTIKFWDLRYGKSMATITNHKKTVRAMALHPKENDFVSASADNIKKFSLPKGEFCHNMLSLQRDIINAVAVNEDGVMVTGGDKGGLWFWDWKSGHNFQRAETIVQPGSLESEAGIYAACYDQTGSRLVTCEGDKTIKMWKEDEDATPETHPLNFKPPKEIRRF

SEQ ID NO: 11023 - protein, 477 aa, Arabidopsis thaliana
MTALNREVETQSLKKLSLKSVRRAREIFSPVHGQFPQPDPESKRIRLCHKIQVAFGGVEPASKPTRIADHNSEKTAPLKALALPGPKGSKELRKSATEKALVVGPTLPPRDLNNTGNPGKSTAILPASGSFSERNLSTAALMERMPSRWPRPEWHAPWKNYRVLQGHLGWVRSVAFDPSNEWFCTGSADRTIKIWDVATGVLKLTLTGHIGQVRGLAVSNRHTYMFSAGDDKQVKCWDLEQNKVIRSYHGHLHGVYCLALHPTLDVVLTGGRDSVCRVWDIRTKMQIFVLPHDSDVFSVLARPTDPQVITGSHDSTIKFWDLRYGKSMATITNHKKTVRAMALHPKENDFVSASADNIKKFSLPKGEFCHNMLSLQRDIINAVAVNEDGVMVTGGDKGGLWFWDWKSGHNFQRAETIVQPGSLESEAGIYAACYDQTGSRLVTCEGDKTIKMWKEDEDATPETHPLNFKPPKEIRRF

SEQ ID NO: 11024 - protein, 336 aa, Arabidopsis thaliana
MERMPSRWPRPEWHAPWKNYRVLQGHLGWVRSVAFDPSNEWFCTGSADRTIKIWDVATGVLKLTLTGHIGQVRGLAVSNRHTYMFSAGDDKQVKCWDLEQNKVIRSYHGHLHGVYCLALHPTLDVVLTGGRDSVCRVWDIRTKMQIFVLPHDSDVFSVLARPTDPQVITGSHDSTIKFWDLRYGKSMATITNHKKTVRAMALHPKENDFVSASADNIKKFSLPKGEFCHNMLSLQRDIINAVAVNEDGVMVTGGDKGGLWFWDWKSGHNFQRAETIVQPGSLESEAGIYAACYDQTGSRLVTCEGDKTIKMWKEDEDATPETHPLNFKPPKEIRRF

SEQ ID NO: 11025 - DNA, 1301 bp, Arabidopsis thaliana
aattctcatgaattccatcttgtcaagcgtccttcctgctcccgaagatcctgttctcagtgtaatttttgcttgtagagatgatcctagtccggttaagttgaatttgagcgcaggtacctatcgaactgaggaaggaaagcctcttgttcttgatgttgtgagaagagcagagcaacagttagccaacgacctgtctagggacaaggaatatcttcccctcaatggacttcctgaatttaataaattaagtaccaagctcatcttaggtgatgatagtcctgcattgaaagagaatagagttgttacaacccaatgtttgtctggtactggttctttgagagttggagctgagtttctagcagcacacaacaaagaatgtgtcattttcgttccaaacccaacttgggggaaccatccccgtatttttactttggcgggtttgtctgtcgagtatttccgttactatgatccgaagagccgaggactcgatttcaaaggcatgctcgaggatcttggcgctgcacctcctggagctatagtggtacttcaagcttgtgcgcataaccccacaggagttgacccaacaatcgcacaatgggaacagattcgacgactagtgagatcgaaaagcttattacctttctttgatagtgcatatcagggttttgctagtggtagccttgacgcagatgcacaagcggttcgtatgtttgttgccgatggaggtgaatgtttgatagctcaaagttatgccaaaaatatgggcctttatggcgagcgtattggctctcttacgatcgtatgcacatcagaagatgtcgctaagaaagttgagaaccaagtgctacttgttgtgaggcctatgtatcttacaccacctattcatggtgcatctattgttgccacaattctaaaaaacagtgatatgtacaatgactggaccattgagctgaaaggaatggctgaccgcataattagcatgcgtcaacagttatatgcagctctagaagctagaggaacacctggtgattggagtcacattattaaacatattgggatgtttacttttaccggattgagtgaggagcaagttcgcttgatggccaaagaatatcacatttacatgacttatgatgggaggataagcatggcaagtctaagttcgacgacagtgcctcaactcgctgatgctatacatgctgttgttactcgcatcgcctaactaaatttgtgattctgttcttttgttgttttatgaacacaattggagaataaaactgcgttcttggtttacattt

SEQ ID NO: 11026 - protein, 407 aa, Arabidopsis thaliana
ILMNSILSSVLPAPEDPVLSVIFACRDDPSPVKLNLSAGTYRTEEGKPLVLDVVRRAEQQLANDLSRDKEYLPLNGLPEFNKLSTKLILGDDSPALKENRVVTTQCLSGTGSLRVGAEFLAAHNKECVIFVPNPTWGNHPRIFTLAGLSVEYFRYYDPKSRGLDFKGMLEDLGAAPPGAIVVLQACAHNPTGVDPTIAQWEQIRRLVRSKSLLPFFDSAYQGFASGSLDADAQAVRMFVADGGECLIAQSYAKNMGLYGERIGSLTIVCTSEDVAKKVENQVLLVVRPMYLTPPIHGASIVATILKNSDMYNDWTIELKGMADRIISMRQQLYAALEARGTPGDWSHIIKHIGMFTFTGLSEEQVRLMAKEYHIYMTYDGRISMASLSSTTVPQLADAIHAVVTRIA

SEQ ID NO: 11027 - protein, 405 aa, Arabidopsis thaliana
MNSILSSVLPAPEDPVLSVIFACRDDPSPVKLNLSAGTYRTEEGKPLVLDVVRRAEQQLANDLSRDKEYLPLNGLPEFNKLSTKLILGDDSPALKENRVVTTQCLSGTGSLRVGAEFLAAHNKECVIFVPNPTWGNHPRIFTLAGLSVEYFRYYDPKSRGLDFKGMLEDLGAAPPGAIVVLQACAHNPTGVDPTIAQWEQIRRLVRSKSLLPFFDSAYQGFASGSLDADAQAVRMFVADGGECLIAQSYAKNMGLYGERIGSLTIVCTSEDVAKKVENQVLLVVRPMYLTPPIHGASIVATILKNSDMYNDWTIELKGMADRIISMRQQLYAALEARGTPGDWSHIIKHIGMFTFTGLSEEQVRLMAKEYHIYMTYDGRISMASLSSTTVPQLADAIHAVVTRIA

SEQ ID NO: 11028 - protein, 240 aa, Arabidopsis thaliana
MLEDLGAAPPGAIVVLQACAHNPTGVDPTIAQWEQIRRLVRSKSLLPFFDSAYQGFASGSLDADAQAVRMFVADGGECLIAQSYAKNMGLYGERIGSLTIVCTSEDVAKKVENQVLLVVRPMYLTPPIHGASIVATILKNSDMYNDWTIELKGMADRIISMRQQLYAALEARGTPGDWSHIIKHIGMFTFTGLSEEQVRLMAKEYHIYMTYDGRISMASLSSTTVPQLADAIHAVVTRIA

SEQ ID NO: 11029 - DNA, 1680 bp, Arabidopsis thaliana
aaagggcaggaggcacacaagtcttccaaacggaggagccaccggcgttgttagctttctctttggctgattccttcttcttcttctctaattcttttccttggtttcagagtataataatccccagcttctttgatcctctctctctctctcttcctctgttacatgatggctacgacggcgagtagtgccgctaattctgcatctcgcttctccattgattcctctatctcgcgatcacgtcacggcgattcctctccctggttgttaccttctgattcccatgatcatccgactctttccctctcccaggacgatcccttctcagcgccttcggtctccccgcccaccggaaataactcttccgactacgacaatgctgataagaagcctcctcctgtctggaacatgccttcttctaatagctcctccgatgtcggccctgtcatgggcgccgccgaatcctggcctgctctctctctttctgctcgctcttcttccatcaagtctccctctttggatgcttccaaaccttttcctgatggatcatcgtcatcaataccgcctccccaggctacttccaacaccagcaccaatgccaatgcaggctcgagtgtttctgctacctcatctgaaaacagtgctgttaataatagccagaggaaaccttttagacggaataacaacacatcatcttccagtaccagtagtaacgtctccaatgctgcgcctttaaacaccagagatcagaatcacagccaaaggggtggtggctcttttggttcagggaatttccgtaattctcagaggaatcgcaacagcagctcttaccctcgtggggaaggtcttcaccatggaaacaggcgcaattatgagcatggcaaccaaagcggcttttctcaccgtaactatagtgggagagacatgcacttgcaaccgcagaggggtgttgggatgattagaccgcagatgctgatggggccaccatcttttcctgccagtagtgcgcaatatatggcagcgcctcaattaggttcatatggtggccccattatctacccagattatgcacagcatgtctttatgccacatccatctccagatccgatgggtttagttggacccttcccacttcaacccatgtattttcgcaattttgatgccatcttgtacaataagatattgacacaagtagaatattatttcagcgctgataacctgagcagagatgaacatttacgggatcagatgaatgatgaaggttgggttcctgttagagtaatagcagcattcaggagacttgcggaactgaccaataacatccagactatattggaagcactgagaagttcagaagtcgtggaaattcagggtgaaacattaaggaggcgaggagattgggacaagtatttattgcctcgtgagccttcaaggtccggtccagctgcgggggctagcaacaatgcctcactggtgtctcaaattgagagcatgactctatcagagaggagcagagagggagtgtaagagagatgctactaagagagagaaagaaagatgtgtttgcaagcctatctctcttcctttccttttttgtgttttgtcgagaattggatatgaactgattgatactcagtctcataagaaaaaaaacaataatatgctgctcaactttttttg

SEQ ID NO: 11030 - protein, 453 aa, Arabidopsis thaliana
MMATTASSAANSASRFSIDSSISRSRHGDSSPWLLPSDSHDHPTLSLSQDDPFSAPSVSPPTGNNSSDYDNADKKPPPVWNMPSSNSSSDVGPVMGAAESWPALSLSARSSSIKSPSLDASKPFPDGSSSSIPPPQATSNTSTNANAGSSVSATSSENSAVNNSQRKPFRRNNNTSSSSTSSNVSNAAPLNTRDQNHSQRGGGSFGSGNFRNSQRNRNSSSYPRGEGLHHGNRRNYEHGNQSGFSHRNYSGRDMHLQPQRGVGMIRPQMLMGPPSFPASSAQYMAAPQLGSYGGPIIYPDYAQHVFMPHPSPDPMGLVGPFPLQPMYFRNFDAILYNKILTQVEYYFSADNLSRDEHLRDQMNDEGWVPVRVIAAFRRLAELTNNIQTILEALRSSEVVEIQGETLRRRGDWDKYLLPREPSRSGPAAGASNNASLVSQIESMTLSERSREGV

SEQ ID NO: 11031 - protein, 452 aa, Arabidopsis thaliana
MATTASSAANSASRFSIDSSISRSRHGDSSPWLLPSDSHDHPTLSLSQDDPFSAPSVSPPTGNNSSDYDNADKKPPPVWNMPSSNSSSDVGPVMGAAESWPALSLSARSSSIKSPSLDASKPFPDGSSSSIPPPQATSNTSTNANAGSSVSATSSENSAVNNSQRKPFRRNNNTSSSSTSSNVSNAAPLNTRDQNHSQRGGGSFGSGNFRNSQRNRNSSSYPRGEGLHHGNRRNYEHGNQSGFSHRNYSGRDMHLQPQRGVGMIRPQMLMGPPSFPASSAQYMAAPQLGSYGGPIIYPDYAQHVFMPHPSPDPMGLVGPFPLQPMYFRNFDAILYNKILTQVEYYFSADNLSRDEHLRDQMNDEGWVPVRVIAAFRRLAELTNNIQTILEALRSSEVVEIQGETLRRRGDWDKYLLPREPSRSGPAAGASNNASLVSQIESMTLSERSREGV

SEQ ID NO: 11032 - protein, 372 aa, Arabidopsis thaliana
MPSSNSSSDVGPVMGAAESWPALSLSARSSSIKSPSLDASKPFPDGSSSSIPPPQATSNTSTNANAGSSVSATSSENSAVNNSQRKPFRRNNNTSSSSTSSNVSNAAPLNTRDQNHSQRGGGSFGSGNFRNSQRNRNSSSYPRGEGLHHGNRRNYEHGNQSGFSHRNYSGRDMHLQPQRGVGMIRPQMLMGPPSFPASSAQYMAAPQLGSYGGPIIYPDYAQHVFMPHPSPDPMGLVGPFPLQPMYFRNFDAILYNKILTQVEYYFSADNLSRDEHLRDQMNDEGWVPVRVIAAFRRLAELTNNIQTILEALRSSEVVEIQGETLRRRGDWDKYLLPREPSRSGPAAGASNNASLVSQIESMTLSERSREGV

SEQ ID NO: 11033 - DNA, 1151 bp, Arabidopsis thaliana
gaaaaaacatttttttggtaaaggactaatctttttgtttgcatcggccatctctaaccttacgattgtgtgttcttgctttgagcgaaaccctagaatcggtcttaacccatttgagcagagatgctgcgagtagcaggaaggaggcttttttctgtttcgcagagatcatcgacggtgacctccttcgtcctttcccgtgaccataccctttccgatggaggcaactcctcttccgcttctagatctgtcccctctgcagatctctcatctttcaattcttaccaccggagcgttataagaggttttgcttctcaagttattactcagggaaatgagataggttttggttcggaagtcccagccacagtcgaagctgtcaaaacacctaactcaaagattgtctatgacgaccataaccatgagcgttacccacctggtgaccctagcaagcgggcattcgcctattttgtcttgtcgggtggaaggtttgtttatgcctctgttctccgcctgcttgttctgaagcttattgtgagcatgtctgcaagtaaagatgtccttgcccttgcatccctcgaggttgacctagggagcatagaaccaggaactaccgtgacagtcaagtggcgtggaaagcccgtcttcatcaggcgaagaacagaagatgacatcaagctggccaatagtgtggatgttggatccctgagggacccacaagaagactcggttagagtcaagaatccagaatggttgatcgtggttggagtatgcactcatttggggtgcatccccttgcctaatgctggtgattatggtggttggttttgtccgtgtcacggatcacattacgatatatctggaagaattaggaaaggtcctgcaccatacaacctggaagtaccgacctacagcttcttggaagagaataaattactcattggttaatgaataaagcacaacagtccgagtgtcatggtctggatgatcttaaatctgtttttgtttttatattttccggcattttagcgtgcaagttcgctttcctcacactttgggctcagcaaaaattggcttgttttgctgaataatacaaacttgtcattgtatgacttagtatctgtctcatctggtgaaaatacattgttcat

SEQ ID NO: 11034 - protein, 274 aa, Arabidopsis thaliana
MLRVAGRRLFSVSQRSSTVTSFVLSRDHTLSDGGNSSSASRSVPSADLSSFNSYHRSVIRGFASQVITQGNEIGFGSEVPATVEAVKTPNSKIVYDDHNHERYPPGDPSKRAFAYFVLSGGRFVYASVLRLLVLKLIVSMSASKDVLALASLEVDLGSIEPGTTVTVKWRGKPVFIRRRTEDDIKLANSVDVGSLRDPQEDSVRVKNPEWLIVVGVCTHLGCIPLPNAGDYGGWFCPCHGSHYDISGRIRKGPAPYNLEVPTYSFLEENKLLIG

SEQ ID NO: 11035 - DNA, 2375 bp, Arabidopsis thaliana
ggtcgacttttttttttttttttgccctaaatcgttcgagaaacccaaaatccaatcccttgtctaattcatcgatgcccaaaccaaaattgaaaactttatcctcaagagattaggaaaatctcattcattatgttaaaaatcccttttggggattatatttatcagagaaaaagattcgaattgagtgtcttcatgatttgggcaaagctaatctgatcttgcggagacaacaacaaaaattgtctgttttttttaccaattcgtaacggaaagtgttcaaagttccaatctttggatcctccgagcaaaatctctatcttttcaatggcggatcatcaagaagacgaagatttgaaattggctcttaagatgagtatgcaatacaatcctcctgagccaaaacggagcaaacccattgaagaagaagaaactggatccggatctcaatctggtggtgaatcaccggaggcgaaatctcgtcggttgcagagagagcttatggctgctgctgctgagaagcgtatggttttgtttcctaagagtccttctcctgttaacaaagctagggttttgccaattagtgttgttggtggtgataaggatgaggaagttgtgggatcttgtttggggaaggagttgtctgtggaagagtctgatcagttgttttcgattgtgtttgggaatgaggtttcgaaaagtgttcttgctcaatggactaatcaaggcataagatttagccctgatcctgaaactactataggattagtgcagcatgaaggtgggccctgcggtgttttagcagcactacaagcatttgttcttaaataccttctttactttccgggtgacagagtagcttccccatgtatgggtgtctggacattatctaaagatcgtcatgttgtgtctgactccttctcttctgtaactgaagaagcaaaaacaaaggcccttgtcagaagtatgtgtgagattctatttatgtgtggagacaacaaccgcgctgtaatagcaagtttcactaattttgaggattccagtagtaatcaaaaagatgaggcaatggctggtgggctccccattgaatctgcttcagatttgcagaagatcttaaggttcgagacattcacaactcaagccagtgcccaaaataagctagaaggcacaataactgcttttcagagtcgcatgggtgctttgctgttcctaatttctgctttactctcccgaggactggattcagttcaagccgacagggatgatccaaacctccccctagtaactgcaccatttggacatgcctcccaggaaattgtaaacctgctgctgtgtggagaagcggttcctaatgtatttgatggacggatggatcttggaggcggcatgtttctgaaaggcatatctaagaatgtagatgtgggcttcctcacgttgctcgagtctctcaacttctgcaaagtcggtcagaatctcaaatgtcccaaatggccaatatgggttattggcagtgagtctcattacaccgtcttgtttgcacttgacccatccgtccaagaagaaaacgaacttgagctgagagagtctcagataagaagagctttcgatgcaagagaccaaagcggaggaggaggtttcataactgtggaggcctttcaccaagttgctcaggaaacaaacattagactcccaatcaagaagctcgacgacatctgcgccacgggtttcatcgtgtggagcgagttatggcaagttatcttggaactagaccaaaatttgggagggataaaagatgcaacaggactgatgggaaagaaagtgtttgatatctatcacttcaacggaattgccaagtccgatataaacggtggtggtcaagcaatggctgtggaaggtgggatggttcctatgcagaggccaaggctgacaaaactaaacgtatcggttcctccaaaatggacaccagaagagtacatgacatgtgcactgccgccgagcagctctgagaaagactcagaagtgaatcagccaaaaccggtccaacatgcaccactggtggattgtatcagaactcggtggtcgcgtgccgcttgtagctggtctggagatcctccaagtatagtctgaagaatgttgtattatgagaaagcttgagcgtttattctggctcattggattctaaagaaagaaaacggaaactgctgatctgatttggcggttaacacgcgtctgaactttctttgcgttgtccgtttttttcatgttgtgtattgatgtagaatttttgttatctattattgaacattattgagacaaatgaatatttcaattgttggataaaattgctttcaataacattgatcatattctgattt

SEQ ID NO: 11036 - protein, 599 aa, Arabidopsis thaliana
MADHQEDEDLKLALKMSMQYNPPEPKRSKPIEEEETGSGSQSGGESPEAKSRRLQRELMAAAAEKRMVLFPKSPSPVNKARVLPISVVGGDKDEEVVGSCLGKELSVEESDQLFSIVFGNEVSKSVLAQWTNQGIRFSPDPETTIGLVQHEGGPCGVLAALQAFVLKYLLYFPGDRVASPCMGVWTLSKDRHVVSDSFSSVTEEAKTKALVRSMCEILFMCGDNNRAVIASFTNFEDSSSNQKDEAMAGGLPIESASDLQKILRFETFTTQASAQNKLEGTITAFQSRMGALLFLISALLSRGLDSVQADRDDPNLPLVTAPFGHASQEIVNLLLCGEAVPNVFDGRMDLGGGMFLKGISKNVDVGFLTLLESLNFCKVGQNLKCPKWPIWVIGSESHYTVLFALDPSVQEENELELRESQIRRAFDARDQSGGGGFITVEAFHQVAQETNIRLPIKKLDDICATGFIVWSELWQVILELDQNLGGIKDATGLMGKKVFDIYHFNGIAKSDINGGGQAMAVEGGMVPMQRPRLTKLNVSVPPKWTPEEYMTCALPPSSSEKDSEVNQPKPVQHAPLVDCIRTRWSRAACSWSGDPPSIV

SEQ ID NO: 11037 - protein, 584 aa, Arabidopsis thaliana
MSMQYNPPEPKRSKPIEEEETGSGSQSGGESPEAKSRRLQRELMAAAAEKRMVLFPKSPSPVNKARVLPISVVGGDKDEEVVGSCLGKELSVEESDQLFSIVFGNEVSKSVLAQWTNQGIRFSPDPETTIGLVQHEGGPCGVLAALQAFVLKYLLYFPGDRVASPCMGVWTLSKDRHVVSDSFSSVTEEAKTKALVRSMCEILFMCGDNNRAVIASFTNFEDSSSNQKDEAMAGGLPIESASDLQKILRFETFTTQASAQNKLEGTITAFQSRMGALLFLISALLSRGLDSVQADRDDPNLPLVTAPFGHASQEIVNLLLCGEAVPNVFDGRMDLGGGMFLKGISKNVDVGFLTLLESLNFCKVGQNLKCPKWPIWVIGSESHYTVLFALDPSVQEENELELRESQIRRAFDARDQSGGGGFITVEAFHQVAQETNIRLPIKKLDDICATGFIVWSELWQVILELDQNLGGIKDATGLMGKKVFDIYHFNGIAKSDINGGGQAMAVEGGMVPMQRPRLTKLNVSVPPKWTPEEYMTCALPPSSSEKDSEVNQPKPVQHAPLVDCIRTRWSRAACSWSGDPPSIV

SEQ ID NO: 11038 - protein, 582 aa, Arabidopsis thaliana
MQYNPPEPKRSKPIEEEETGSGSQSGGESPEAKSRRLQRELMAAAAEKRMVLFPKSPSPVNKARVLPISVVGGDKDEEVVGSCLGKELSVEESDQLFSIVFGNEVSKSVLAQWTNQGIRFSPDPETTIGLVQHEGGPCGVLAALQAFVLKYLLYFPGDRVASPCMGVWTLSKDRHVVSDSFSSVTEEAKTKALVRSMCEILFMCGDNNRAVIASFTNFEDSSSNQKDEAMAGGLPIESASDLQKILRFETFTTQASAQNKLEGTITAFQSRMGALLFLISALLSRGLDSVQADRDDPNLPLVTAPFGHASQEIVNLLLCGEAVPNVFDGRMDLGGGMFLKGISKNVDVGFLTLLESLNFCKVGQNLKCPKWPIWVIGSESHYTVLFALDPSVQEENELELRESQIRRAFDARDQSGGGGFITVEAFHQVAQETNIRLPIKKLDDICATGFIVWSELWQVILELDQNLGGIKDATGLMGKKVFDIYHFNGIAKSDINGGGQAMAVEGGMVPMQRPRLTKLNVSVPPKWTPEEYMTCALPPSSSEKDSEVNQPKPVQHAPLVDCIRTRWSRAACSWSGDPPSIV

SEQ ID NO: 11039 - DNA, 2269 bp, Arabidopsis thaliana
gaggcttggcatcggttaatcggagcttctttcctctcaagtgaagtgtctggatcttcgtcgctcaacgcaaatccctctccggttcatgtaaatttccaacttatttttgtgctcgaattttggttaaaggggcaaatttcacacttttacggagtatggaagcagcgtttgtcttctgggctgttgaattgcgattcattgtgtatgcccaacaatggtttaattgggaggttccaatgattttttgtgcttttttcttacttaatataatcactgttgatgtttcttctgtgtccttgtatcgccacagtggataagcagcctggggaagatgagcattgtacctaaggaaacggttgaggtaatagctcaaagtattgggattaccaacttgttacctgaagctgctcttatgcttgctcctgatgttgagtatcgtgtccgagagatcatgcaggaagctatcaaatgcatgcgtcactcaaagagaacgactttaacagcttcggatgtagatggtgctctcaacttaaggaacgttgagccgatatatggatttgcctcaggagggccatttcgttttagaaaagctattggacatcgcgatttgttctacactgatgacagagaagtggatttcaaagatgtgatcgaagccccgctgccaaaagctccccttgatactgaaattgtttgtcactggctggctattgaaggagtgcaaccagctataccagaaaatgctcctttagaagtcattagagcacctgcagaaaccaaaatccatgaacaaaaagacggacctcttattgacgttaggctaccagtgaagcatgtactatctagggaacttcagttatacttccaaaagattgctgaacttgcaatgagcaagtcaaatcctcctctgtataaagaagcattagtgagcttggcctcagactcaggacttcatcctctagttccatattttacaaatttcattgctgatgaggtttcaaatggcttaaatgacttccgactcctgtttaatctaatgcacattgttagaagtcttctacagaatcctcacatacacatagaaccttatctgcaccagttgatgccatctgttgtaacatgccttgtatcaagaaagcttggaaatagatttgctgacaaccactgggaactcagagattttgcggcaaatctggtttcactgatatgtaaaaggtatggaaccgtttatataactcttcagtctcgtcttaccagaactttagtcaatgcactgctggacccaaagaaggctttgactcacactatggtgcgattcaaggattagcagctttggggcacactgttgtacgccttcttattctatcaaatctcgaaccatatctaagtcttctcgaacctgaattgaatgctgagaagcaaaaaaatcagatgaagatctacgaagcttggcgtgtatatggagccttgctgcgtgctgcaggcttgtgtatacatggccggcttaaaatcttcccacctttaccatctccgtcaccaagttttctccataagggaaagggaaagggaaagataatcagtactgatccccacaagcggaagctgagtgtagattcttcagaaaaccaatcaccgcagaaaagattgataaccatggatgggccagatggtgtacattcacaagatcaatctggctcagctccaatgcaagtagataatccagtggaaaatgacaatccgccacaaaactctgttcagccatcctaccagaacaagcctctgatgctaacgaatctgaaagcagaaatggaaaggtgaaagaaagcggcaggagtcgggctattaccatgaaagcaatccttgatcagatatggaaagatgatcttgattccggacggctattggtgaaactgcacgaactctatggtgataggattcttccctttatcccttctacagagatgtcagtattcctctaaccaataagagagaaggaggcttggagagattaaagcgccgtctggttggcatacataaactcatttagatccgtgccattgttctcaggtcaactctttagatcttctttttaagcttgagggatttcaaagtccttaggagcctgcagagtgggttgagttgaattgaaccggttgcaatgtatatattaagagaattttaatgattccgtagtggacttatttgtttactctcaaatgtaatccatgaaataatttctcttcaaatctgtatgatctagattgcc

SEQ ID NO: 11040 - protein, 331 aa, Arabidopsis thaliana
MSIVPKETVEVIAQSIGITNLLPEAALMLAPDVEYRVREIMQEAIKCMRHSKRTTLTASDVDGALNLRNVEPIYGFASGGPFRFRKAIGHRDLFYTDDREVDFKDVIEAPLPKAPLDTEIVCHWLAIEGVQPAIPENAPLEVIRAPAETKIHEQKDGPLIDVRLPVKHVLSRELQLYFQKIAELAMSKSNPPLYKEALVSLASDSGLHPLVPYFTNFIADEVSNGLNDFRLLFNLMHIVRSLLQNPHIHIEPYLHQLMPSVVTCLVSRKLGNRFADNHWELRDFAANLVSLICKRYGTVYITLQSRLTRTLVNALLDPKKALTHTMVRFKD

SEQ ID NO: 11041 - protein, 304 aa, Arabidopsis thaliana
MLAPDVEYRVREIMQEAIKCMRHSKRTTLTASDVDGALNLRNVEPIYGFASGGPFRFRKAIGHRDLFYTDDREVDFKDVIEAPLPKAPLDTEIVCHWLAIEGVQPAIPENAPLEVIRAPAETKIHEQKDGPLIDVRLPVKHVLSRELQLYFQKIAELAMSKSNPPLYKEALVSLASDSGLHPLVPYFTNFIADEVSNGLNDFRLLFNLMHIVRSLLQNPHIHIEPYLHQLMPSVVTCLVSRKLGNRFADNHWELRDFAANLVSLICKRYGTVYITLQSRLTRTLVNALLDPKKALTHTMVRFKD

SEQ ID NO: 11042 - protein, 291 aa, Arabidopsis thaliana
MQEAIKCMRHSKRTTLTASDVDGALNLRNVEPIYGFASGGPFRFRKAIGHRDLFYTDDREVDFKDVIEAPLPKAPLDTEIVCHWLAIEGVQPAIPENAPLEVIRAPAETKIHEQKDGPLIDVRLPVKHVLSRELQLYFQKIAELAMSKSNPPLYKEALVSLASDSGLHPLVPYFTNFIADEVSNGLNDFRLLFNLMHIVRSLLQNPHIHIEPYLHQLMPSVVTCLVSRKLGNRFADNHWELRDFAANLVSLICKRYGTVYITLQSRLTRTLVNALLDPKKALTHTMVRFKD

SEQ ID NO: 11043 - DNA, 1383 bp, Arabidopsis thaliana
aatctctctttctttctctctgatgaaaagctaacggaaaatggggaaatacataagaaagagcaaaatcgacggagctggagctggagctggtggtggaggtggaggcggaggtggaggtgaatcctctattgctttaatggatgttgtttcaccttcttcctcttcttcacttggtgttttaactcgagctaaatctctagctcttcaacaacaacaacaacgctgtcttcttcaaaaaccctcttctccttcttcgttaccaccgacttctgcttctcctaatccaccgtcaaagcagaagatgaagaagaagcagcagcagatgaacgattgtggttcgtatcttcagctacggagtcgtcggcttcagaagaaaccaccaattgttgtgattcgttctactaaacggaggaaacagcaacggaggaatgagacatgcggaagaaaccctaaccctaggagtaatttggattcgattcgtggtgatgggtctaggtctgattctgtttctgaaagtgttgtctttggtaaagacaaggatttgatttctgaaatcaataaagatccaacctttggccaaaatttcttcgaccttgaagaagaacacactcaaaggaccacaagggaatccacaccatgcagtttgataagaaggcctgaaatcatgacaaccccgggatcgtctacaaagcttaacatttgtgtaagtgaaagcaaccagagagaagacagtttgtcacgcagccatcgtcgccgaccaactacacctgaaatggacgagtttttctcgggtgctgaagaagaacaacagaagcaattcattgagaagtacaactttgatcctgtgaacgaacaaccactaccaggacggtttgaatggacgaaggtagatgattagaaacaacaaaaaaatggggggttaatagttaatacagaatatattaacattttcctgctaattatcggtttgatcttattaccatcatccgttttcttaactttttcaacatgtaaagagcttaggagaaaaaacccatgtagtgtttttaaattggtgtctgtaacataagtggctgaaaagggtttgtgtaacagaacttgataccaatcctttttaagcctatacagatcaccttagtagtagtactaaagccataagagaaggtttttagaagtaacccaaagtctgtttagggtttagcgtttagggtttagagttctttcggtttaagggtcagtgttttcttttatgaattccggtacagggggactctgcattctcttaaaactctttgtcctgtaaccattttaaaaaatctatccttttatgtgtatacatgtactgatctcaaactcttttcaataaagacttatccttct

SEQ ID NO: 11044 - protein, 286 aa, Arabidopsis thaliana
MGKYIRKSKIDGAGAGAGGGGGGGGGGESSIALMDVVSPSSSSSLGVLTRAKSLALQQQQQRCLLQKPSSPSSLPPTSASPNPPSKQKMKKKQQQMNDCGSYLQLRSRRLQKKPPIVVIRSTKRRKQQRRNETCGRNPNPRSNLDSIRGDGSRSDSVSESVVFGKDKDLISEINKDPTFGQNFFDLEEEHTQRTTRESTPCSLIRRPEIMTTPGSSTKLNICVSESNQREDSLSRSHRRRPTTPEMDEFFSGAEEEQQKQFIEKYNFDPVNEQPLPGRFEWTKVDD

SEQ ID NO: 11045 - protein, 253 aa, Arabidopsis thaliana
MDVVSPSSSSSLGVLTRAKSLALQQQQQRCLLQKPSSPSSLPPTSASPNPPSKQKMKKKQQQMNDCGSYLQLRSRRLQKKPPIVVIRSTKRRKQQRRNETCGRNPNPRSNLDSIRGDGSRSDSVSESVVFGKDKDLISEINKDPTFGQNFFDLEEEHTQRTTRESTPCSLIRRPEIMTTPGSSTKLNICVSESNQREDSLSRSHRRRPTTPEMDEFFSGAEEEQQKQFIEKYNFDPVNEQPLPGRFEWTKVDD

SEQ ID NO: 11046 - protein, 198 aa, Arabidopsis thaliana
MKKKQQQMNDCGSYLQLRSRRLQKKPPIVVIRSTKRRKQQRRNETCGRNPNPRSNLDSIRGDGSRSDSVSESVVFGKDKDLISEINKDPTFGQNFFDLEEEHTQRTTRESTPCSLIRRPEIMTTPGSSTKLNICVSESNQREDSLSRSHRRRPTTPEMDEFFSGAEEEQQKQFIEKYNFDPVNEQPLPGRFEWTKVDD

SEQ ID NO: 11047 - DNA, 1985 bp, Arabidopsis thaliana
ctcactagtcccccccccccccccccgctgacaaccagacgcgccagggtttcaggcttccacgaatctccccgccgccctcaattcccctcggcgccgccgcctcctcccctcgcttcggtcctcggttagttaaccatccaggttctgtcaagatgtctgatagccatgagactgacaggaacattgagatttggaaaattaagaaactgatcaaggcattggaatcagccagaggcaatggcacaagcatgatctctctaatcatgcctccacgtgatcaggttgctcgagtggataagatgttaggtgatgaatatggtactgcttcgaacatcaagagtagagttaatcgtcaatctgtgttggctgccatcacctcagctcagcagaggttgaagctctacaacaaagtgcctcctaacggattggttctgtacactggaactattgttactgaagacggaaaggaaaagaaagttactattgattttgagccattcaagcctatcaatgtgtcactctacctttgtgacaacaagttccacactgaggctttaaatgagctcttggaatctgatgacaagtttgggttcattgttatggatggtaatggtactctttttggcacactaagtggcaatacccgtgaagtgcttcacaaattcactgttgacctcccaaagaagcatggtagaggagggcagtctgctctgcgttttgctcggcttcggatggagaaacgccataactatgtccgcaaaacagctgaacttgctacccagtttttcatcaatccagctactagtcagcctaatgttgcaggattgattcttgccggttctgcagattttaagactgagctgagccaatctgacatgtttgatcagcgactccaagccaagatacttaatgtggtagatgtttcgtatggtggcgagaacggtttcaaccaagctattgaattatctgctgagattctagcaaatgtgaaattcattcaaaaaagaagttaattggcaagtattttgaagagatcagtcaggatactgggaaatatgtctttggtgttgatgacactctgaaggctcttgaaatgggtgctgtcgagaccctgattgtgtgggaaaatctggatatcaacagatatgtgatcaagaacagtactactggggaaattattataaaacatctgaacaaagagcaggaagctgaccagagcaatttccgtgacccatctaccaatactgatctcgaagttcaggaaaaaatgtctctcctggaatggtttgccaatgaatacaagaagtttggttgctcgctggagtttgtgaccaacaagtctcaggagggatcccagttctgtagaggatttggtggcattggtggcatgttgcgctaccagctggatatccgttcttttgatgagctttctgatgatgacgatgtgtatgaagactctgactagcaatcagccaatctcatgccagtgctggcccatggaaggacgcaacagctcgacctcgccatacctacgcaggagcacacgaaaagcaactatccaaggattaatgggcatgggccagcgtcatcctcttcaagaggagcttaagactaagatgattttgagtcacaatcatgggagtaacgtgacaagaagataccctactatatcacaattattccagtaatgcgtcgagaagataccgttgtttaagtgcacaaaccaatacagtgacgtgccaagaagttaccgtattttaaggatgtttaattttcagtattcgtcggggtagtactgtgtcagaaacttatttgtacctaaaaaggccaaatattgccgttgccttggtgctttatgctatgttatcgtcttttgtgagtctgtgtgctaaggttgttgcttaatgctttgtgaatcgcaagctgctactcttgcagtttttgcaacgacgaagctatgatatggagtacaattctgtgtc

SEQ ID NO: 11048 - protein, 286 aa, Arabidopsis thaliana
MSDSHETDRNIEIWKIKKLIKALESARGNGTSMISLIMPPRDQVARVDKMLGDEYGTASNIKSRVNRQSVLAAITSAQQRLKLYNKVPPNGLVLYTGTIVTEDGKEKKVTIDFEPFKPINVSLYLCDNKFHTEALNELLESDDKFGFIVMDGNGTLFGTLSGNTREVLHKFTVDLPKKHGRGGQSALRFARLRMEKRHNYVRKTAELATQFFINPATSQPNVAGLILAGSADFKTELSQSDMFDQRLQAKILNVVDVSYGGENGFNQAIELSAEILANVKFIQKRS

SEQ ID NO: 11049 - protein, 254 aa, Arabidopsis thaliana
MISLIMPPRDQVARVDKMLGDEYGTASNIKSRVNRQSVLAAITSAQQRLKLYNKVPPNGLVLYTGTIVTEDGKEKKVTIDFEPFKPINVSLYLCDNKFHTEALNELLESDDKFGFIVMDGNGTLFGTLSGNTREVLHKFTVDLPKKHGRGGQSALRFARLRMEKRHNYVRKTAELATQFFINPATSQPNVAGLILAGSADFKTELSQSDMFDQRLQAKILNVVDVSYGGENGFNQAIELSAEILANVKFIQKRS

SEQ ID NO: 11050 - protein, 249 aa, Arabidopsis thaliana
MPPRDQVARVDKMLGDEYGTASNIKSRVNRQSVLAAITSAQQRLKLYNKVPPNGLVLYTGTIVTEDGKEKKVTIDFEPFKPINVSLYLCDNKFHTEALNELLESDDKFGFIVMDGNGTLFGTLSGNTREVLHKFTVDLPKKHGRGGQSALRFARLRMEKRHNYVRKTAELATQFFINPATSQPNVAGLILAGSADFKTELSQSDMFDQRLQAKILNVVDVSYGGENGFNQAIELSAEILANVKFIQKRS

SEQ ID NO: 11051 - DNA, 1767 bp, Arabidopsis thaliana
ggttcagagaagatcgtttactctttcctcaatttcgaacaaagttttcgaattttccaactctctctagtgaatttagggttctgatttcgacattagtgtaaagatttgttttttatccgaggggtgcgattgtgtagtcaaagcagatcaaatgtcggcatcaacggtgtcgatcaccgctaatacggcggcagcgactagacggacgccgattcttgccggagaaaaaaaatcaaactttgattaccctcaaagcgaatcgcttgcgaacggtggtgttggggaagccggtggtacgagtagagatctgagccgcggtgaagctacccttgatcgatctcagggacaagatttgggtcctgtgaagagaaggtctgtttccgctgcgacggggactaataccaccgctacgcagcgccggacgcggaaggttgcgactcctaagtctgagaaagcgcggtggaagacagtggtgaggatatttgcgaagcagcttggtgcgcttttgatcattgttgggttaattcaattgacgaggaagatgattctcaaggcttcttctccgtcctctccgatttcttcttatgaaacggagatggcgttttcgggattggaaagccgaattgcggaagtagatggtcttgttaaggctacgacgaattcgatgcaggttcaagttgaattgcttgataagaaaatggagagggaagcaaaagtgcttaggcaagaaatcgagaggaaagcttctgcatttcagagtgagttgaagaagatagaatctagaactgagtcactagagaagtctgtagatgaagtaaatgctaaaccttgggtgacgaaagatgagttagagaggatttatgaggaactgaagaaggggaatgttgatgattctgcttttagtgagattagcattgatgaattgagggcttatgctcgtgatattatggagaaagagattgaaaagcatgctgctgatggccttggccgagttgattatgcattggcttctggtggtgcttttgtgatggagcattcagatccttatcttgttggtaaagggagtagctggtttgcgactaccatgcggcgcgctcatacgaatgcggttaagatgttatctccgagcttcggtgagcctggacaatgttttcctctgaaaggtagcgagggctatgtgcaaatcaggctgagaggaccaatcataccagaggctttcacattggagcatgtagctaagagtgtagcctacgacagatcgagtgctccaaaagattgccgtgtatcaggatccctgcaaggaccggaatcctcagcggagacagagaacatgcaacttctaacagagttcacttacgacctagacaggtcgaacgcacaaacattcaacatcttagagtcatcaagctctggtctaatcgatactgtcaggctagacttcacctcgaaccacggaagcgactcgcacacttgcatctaccggttcagggttcatgggcgtgcgccagacccggttcctgttgtgggaacgaatcttgatcaggactcttcacctgaaagtgaataaaacctcttctgttttgtaacattccttcatccacatctcttttgttgcctgtgttttttatggaaagaaaaagaaagcatcagattctgtgattagactagtagagagttgtttgatttgattatgtcttctttgtgttaccttttggtttatttggttgcagaatacataaatcaagaaatccaatttatactgtt

SEQ ID NO: 11052 - protein, 471 aa, Arabidopsis thaliana
MSASTVSITANTAAATRRTPILAGEKKSNFDYPQSESLANGGVGEAGGTSRDLSRGEATLDRSQGQDLGPVKRRSVSAATGTNTTATQRRTRKVATPKSEKARWKTVVRIFAKQLGALLIIVGLIQLTRKMILKASSPSSPISSYETEMAFSGLESRIAEVDGLVKATTNSMQVQVELLDKKMEREAKVLRQEIERKASAFQSELKKIESRTESLEKSVDEVNAKPWVTKDELERIYEELKKGNVDDSAFSEISIDELRAYARDIMEKEIEKHAADGLGRVDYALASGGAFVMEHSDPYLVGKGSSWFATTMRRAHTNAVKMLSPSFGEPGQCFPLKGSEGYVQIRLRGPIIPEAFTLEHVAKSVAYDRSSAPKDCRVSGSLQGPESSAETENMQLLTEFTYDLDRSNAQTFNILESSSSGLIDTVRLDFTSNHGSDSHTCIYRFRVHGRAPDPVPVVGTNLDQDSSPESE

SEQ ID NO: 11053 - protein, 341 aa, Arabidopsis thaliana
MILKASSPSSPISSYETEMAFSGLESRIAEVDGLVKATTNSMQVQVELLDKKMEREAKVLRQEIERKASAFQSELKKIESRTESLEKSVDEVNAKPWVTKDELERIYEELKKGNVDDSAFSEISIDELRAYARDIMEKEIEKHAADGLGRVDYALASGGAFVMEHSDPYLVGKGSSWFATTMRRAHTNAVKMLSPSFGEPGQCFPLKGSEGYVQIRLRGPIIPEAFTLEHVAKSVAYDRSSAPKDCRVSGSLQGPESSAETENMQLLTEFTYDLDRSNAQTFNILESSSSGLIDTVRLDFTSNHGSDSHTCIYRFRVHGRAPDPVPVVGTNLDQDSSPESE

SEQ ID NO: 11054 - protein, 323 aa, Arabidopsis thaliana
MAFSGLESRIAEVDGLVKATTNSMQVQVELLDKKMEREAKVLRQEIERKASAFQSELKKIESRTESLEKSVDEVNAKPWVTKDELERIYEELKKGNVDDSAFSEISIDELRAYARDIMEKEIEKHAADGLGRVDYALASGGAFVMEHSDPYLVGKGSSWFATTMRRAHTNAVKMLSPSFGEPGQCFPLKGSEGYVQIRLRGPIIPEAFTLEHVAKSVAYDRSSAPKDCRVSGSLQGPESSAETENMQLLTEFTYDLDRSNAQTFNILESSSSGLIDTVRLDFTSNHGSDSHTCIYRFRVHGRAPDPVPVVGTNLDQDSSPESE

SEQ ID NO: 11055 - DNA, 1650 bp, Arabidopsis thaliana
accgtcgaactaaatcctagggcacaggtgaaatcgccgagtgacgtctagccaccgcaccgcctccttctccggttatctcgctactaatcagactattccacagctatgtcacaggtagacagcagaaattcatcagcagccaagcgtgctagaactgacggggggcgtagagaagatgattggatctgcccaagttgtggcaatgtcaacttttcattcaggacaacttgcaatatgcgtaattgcactcagcctagacctgcagatcataatggagtaagttattttgtgttgcaatatcgaatatatgtctttctgctttgaaacagttttgtgtgcaaaacagtcattgacttcttggcgggtttagtagatagagctctttgaggcaaatgtatagagacttaggatggtgagtagttttgattaggattttcaggtgtttgttatgaaaataaggaatgaagtggaagattagccttagtgctttgtccagtctattggcttttgtacttagattttgtttaaggaaatagaagagattctttcaaatctagaacccgtttgtttgttatcttccaacaagagcagcaatacgaagattaccagtgggtattcagtttaaacaattatctacttagtttttgatgacctatttgttgcacgtctgtaacagaagtctgctcccaaacctatgcaacatcaacaaggtttctcatcacccggggcatacttaggatctgggggtccccctccagtatatatgggcgggtcaccatatggatctcctctctttaatggatcgtctatgcctccttatgacgtcccattttctgggggttcgccttaccattttaactataatagccgaatgcctgccggagctcattacagaccattacatatgtctggaccaccaccataccatggcggatctatgatgggaagtggtggtatgtatggaatgcctccaccaatagacaggtatggccttggtatggcaatgggtcctggttctgccgctgccatgatgccaagaccaaggttttacccagatgaaaaatcacaaaagagagattcaactcgcgataatgattggacatgtccgaattgtggtaatgtaaacttctcattcagaactgtatgtaacatgaggaagtgcaacactccaaagcctggttctcagggtggaagctcagataaaatatccaaacaaaatgcaccggaagggagctggaagtgtgataactgtggaaatataaactacccattcaggagcaaatgcaacaggcaaaactgtggagctgataagcctggggatcggtcgaatggatctccgtcccgtgcaccagaagagaacgatcagtgagtcgtagacatgtttgggggttgagaagggtgagtctaatccagcgggtgtcgtaatgtcagtcaatgtctcgtcaggtcaggtcgtccatgttgctgcggtcgtcagtcaagttgcttctatgcatttgtctctttacttcccttgcgtggttgtggattgtattaataatgcaaaattgtttatttactttgtcgtcctcgtggatcttgtcttgctatagaatcctcctccaggtccatactgttttacatcctaatcttaagtaagttggcact

SEQ ID NO: 11056 - protein, 224 aa, Arabidopsis thaliana
MQHQQGFSSPGAYLGSGGPPPVYMGGSPYGSPLFNGSSMPPYDVPFSGGSPYHFNYNSRMPAGAHYRPLHMSGPPPYHGGSMMGSGGMYGMPPPIDRYGLGMAMGPGSAAAMMPRPRFYPDEKSQKRDSTRDNDWTCPNCGNVNFSFRTVCNMRKCNTPKPGSQGGSSDKISKQNAPEGSWKCDNCGNINYPFRSKCNRQNCGADKPGDRSNGSPSRAPEENDQ

SEQ ID NO: 11057 - protein, 201 aa, Arabidopsis thaliana
MGGSPYGSPLFNGSSMPPYDVPFSGGSPYHFNYNSRMPAGAHYRPLHMSGPPPYHGGSMMGSGGMYGMPPPIDRYGLGMAMGPGSAAAMMPRPRFYPDEKSQKRDSTRDNDWTCPNCGNVNFSFRTVCNMRKCNTPKPGSQGGSSDKISKQNAPEGSWKCDNCGNINYPFRSKCNRQNCGADKPGDRSNGSPSRAPEENDQ

SEQ ID NO: 11058 - protein, 186 aa, Arabidopsis thaliana
MPPYDVPFSGGSPYHFNYNSRMPAGAHYRPLHMSGPPPYHGGSMMGSGGMYGMPPPIDRYGLGMAMGPGSAAAMMPRPRFYPDEKSQKRDSTRDNDWTCPNCGNVNFSFRTVCNMRKCNTPKPGSQGGSSDKISKQNAPEGSWKCDNCGNINYPFRSKCNRQNCGADKPGDRSNGSPSRAPEENDQ

SEQ ID NO: 11059 - DNA, 1358 bp, Arabidopsis thaliana
acgaaccccactcggtcggtcactcccagtctccatctcccactacggcactaccccatccccggtgcggcgccaccttcccggcttccccttccggccttccccctctcgtcacttatggtgcccagccgctcgctgcgcaactactagcgcaccgtcccctcctcagccatggccgcggcgtcgttcgcccgcgccttatgtctccacatgctcctcctcttcctcgtggttggctcggcgcgctgcaagacggtgaagagagacgtgaaagcattgaatgagatcaaatcttcactaggctggagagttgtatactcatgggtcggtgatgatccttgtgggcatggtgatctacccccctggtctggtgtgacatgttctcagcaaggggattacagagttgtgacggaactggaagtctatgctgtatcaatagttggccctttcccaacagcagtaactaacctgttggatctaagaagattggatctccacaataacaagttgacaggaccaattcccccacagattggacggttgaaacatctcaggatattgaacctgaggtggaataagcttcaagatgtgcttccacctgaaattggtgaactgaagaaactgacacacttgtatttgagcttcaacaacttcaaaggcgagattccagtggagcttgcaaacctgccagaactccgttacctttatcttcacgagaaccgcttcaccgggcgaatcccccctgaacttggaacgctaaagaacctacgtcacctcgacgtgggcaacaaccacctgacaggcactctcagggattttatcggcaacgggaacggcttcccgtccctgagaaatctataccttaacaacaatgagctgactggtgtgctgccagaccagattgcaaacctgacaaaccttgagattctgcacttgtccaataacaagatgatcgggtcgatatcgcctaagctagttcacgttccaaggctgatctacttgtacttggacaataacaacttcattgggaggataccggaagggttgtacaggcatccatttctgaaggagctgtacatcgaaggaaaccacttcagaccaggaaccagatcgaagggaacgcacaaggtgctggaactgcctgacgccgacattctagtctagcaagctcgtttgggggacctgaggtcttggcgtcctgcagtagtagactgctgccgctgccggtaccaggatcacttctgtctgtcgctgtactattccgtggcaaaactacagttgagaaaaaaaaagtctcttgcaaaaaaaaagaggcaaaaaaaaaaagtgaatagtagaggccacggtcaaaaaaaaag

SEQ ID NO: 11060 - protein, 330 aa, Arabidopsis thaliana
MAAASFARALCLHMLLLFLVVGSARCKTVKRDVKALNEIKSSLGWRVVYSWVGDDPCGHGDLPPWSGVTCSQQGDYRVVTELEVYAVSIVGPFPTAVTNLLDLRRLDLHNNKLTGPIPPQIGRLKHLRILNLRWNKLQDVLPPEIGELKKLTHLYLSFNNFKGEIPVELANLPELRYLYLHENRFTGRIPPELGTLKNLRHLDVGNNHLTGTLRDFIGNGNGFPSLRNLYLNNNELTGVLPDQIANLTNLEILHLSNNKMIGSISPKLVHVPRLIYLYLDNNNFIGRIPEGLYRHPFLKELYIEGNHFRPGTRSKGTHKVLELPDADILV

SEQ ID NO: 11061 - protein, 317 aa, Arabidopsis thaliana
MLLLFLVVGSARCKTVKRDVKALNEIKSSLGWRVVYSWVGDDPCGHGDLPPWSGVTCSQQGDYRVVTELEVYAVSIVGPFPTAVTNLLDLRRLDLHNNKLTGPIPPQIGRLKHLRILNLRWNKLQDVLPPEIGELKKLTHLYLSFNNFKGEIPVELANLPELRYLYLHENRFTGRIPPELGTLKNLRHLDVGNNHLTGTLRDFIGNGNGFPSLRNLYLNNNELTGVLPDQIANLTNLEILHLSNNKMIGSISPKLVHVPRLIYLYLDNNNFIGRIPEGLYRHPFLKELYIEGNHFRPGTRSKGTHKVLELPDADILV

SEQ ID NO: 11062 - DNA, 1703 bp, Arabidopsis thaliana
ggtcggacttgtaaattttcgctcagcgatctgcttccaatggcgatctacttcattctctatacacttctcacgatcatcttcgccgtatctctgagtttatttctttccgtgatcaatgcaagaaagagcagaaaacgtgcggtgggattcttccatccgtacacgaacgacggtggcggcggcgagagagtgctctggtgcgccgttaaagccattcaagaggaaaatcccgatcttgactgtgtcatcttcaccggagatcatgactcttcttctgatagcttagctcgtcgcgccgttgatcgattcggtgttcaccttcagtctcctcctaaggtgattcatctaaacaaaaggaaatggattgaagagagtacttacccacattttacaatgataggtcagagtcttggttcggtttacttagcgtgggaagcattacgcatgttcactcctttgtatttccttgacactagtggatatgcgtttacatatcctcttgctcggatctttggttgcaaagttgtttgctatactcattatccaactattagtttggatatgatttctcgtgttcgtcagaggaactctatgtataacaatgatgcttccattgctaagagcaattggttatctacttgcaaattagtctattacagagcttttagctggatgtatgggatggttgggtcatgtactcatttagctatggttaactcttcgtggactaagtcccatatcgaagtgctttggagaattccagaacggattacacgggtctacccgccctgtgatacttcaggacttcaggcgtttcctcttgaacgatcatctgatcctcctaaaatcatatcagttgctcaatttcgtcctgagaaggctcatatgcttcagcttgaggccttttcactagccttagagaagctagatgcagacgtccctagacccaagctccaatttgtgggaagttgtaggaacaattcagatgaagaacgtctgcagaaattgaaagacagagcagaagaactaaaagtagatggagacgtgcaattctataaaaatgccatgtacagagaactagtggaactgttaggaaatgcagttgcaggactgcatgggatgatagatgaacactttggtataagtgttgttgagtacatggctgctggtgcaatcccaatagctcacaactcagctggacctaaaatggacattgtgttggaagaagacggacaaaaaaccgggtttcttgctgagactgtggaggaatacgctgaagcgatccttgagattgtgaagatgaatgaaacagagaggcttaaaatggctgaatctgctagaaaacgagcggcaaggttctctgaacaacggttttgtgaggacttcaaaactgcgattcgacccattttcacaggtcctcttaaatgacagttcttaaaccctcaaaacctgcttactgcactagcttttaaacgcacaagacaagctaggttataccttttatcctctctttatagattttttttttaattctggttaaaggtctgacgtagacgttgtaagaaacagtttggtcaaaagaaacgagtaagatcttcctatttctagttgactgttggggaaaactgacaccaacatttgctttcaaacgttttcgatttgtccgaatgcattttattatgagaaacttggtgttattc

SEQ ID NO: 11063 - protein, 476 aa, Arabidopsis thaliana
GRTCKFSLSDLLPMAIYFILYTLLTIIFAVSLSLFLSVINARKSRKRAVGFFHPYTNDGGGGERVLWCAVKAIQEENPDLDCVIFTGDHDSSSDSLARRAVDRFGVHLQSPPKVIHLNKRKWIEESTYPHFTMIGQSLGSVYLAWEALRMFTPLYFLDTSGYAFTYPLARIFGCKVVCYTHYPTISLDMISRVRQRNSMYNNDASIAKSNWLSTCKLVYYRAFSWMYGMVGSCTHLAMVNSSWTKSHIEVLWRIPERITRVYPPCDTSGLQAFPLERSSDPPKIISVAQFRPEKAHMLQLEAFSLALEKLDADVPRPKLQFVGSCRNNSDEERLQKLKDRAEELKVDGDVQFYKNAMYRELVELLGNAVAGLHGMIDEHFGISVVEYMAAGAIPIAHNSAGPKMDIVLEEDGQKTGFLAETVEEYAEAILEIVKMNETERLKMAESARKRAARFSEQRFCEDFKTAIRPIFTGPLK

SEQ ID NO: 11064 - protein, 463 aa, Arabidopsis thaliana
MAIYFILYTLLTIIFAVSLSLFLSVINARKSRKRAVGFFHPYTNDGGGGERVLWCAVKAIQEENPDLDCVIFTGDHDSSSDSLARRAVDRFGVHLQSPPKVIHLNKRKWIEESTYPHFTMIGQSLGSVYLAWEALRMFTPLYFLDTSGYAFTYPLARIFGCKVVCYTHYPTISLDMISRVRQRNSMYNNDASIAKSNWLSTCKLVYYRAFSWMYGMVGSCTHLAMVNSSWTKSHIEVLWRIPERITRVYPPCDTSGLQAFPLERSSDPPKIISVAQFRPEKAHMLQLEAFSLALEKLDADVPRPKLQFVGSCRNNSDEERLQKLKDRAEELKVDGDVQFYKNAMYRELVELLGNAVAGLHGMIDEHFGISVVEYMAAGAIPIAHNSAGPKMDIVLEEDGQKTGFLAETVEEYAEAILEIVKMNETERLKMAESARKRAARFSEQRFCEDFKTAIRPIFTGPLK

SEQ ID NO: 11065 - protein, 344 aa, Arabidopsis thaliana
MIGQSLGSVYLAWEALRMFTPLYFLDTSGYAFTYPLARIFGCKVVCYTHYPTISLDMISRVRQRNSMYNNDASIAKSNWLSTCKLVYYRAFSWMYGMVGSCTHLAMVNSSWTKSHIEVLWRIPERITRVYPPCDTSGLQAFPLERSSDPPKIISVAQFRPEKAHMLQLEAFSLALEKLDADVPRPKLQFVGSCRNNSDEERLQKLKDRAEELKVDGDVQFYKNAMYRELVELLGNAVAGLHGMIDEHFGISVVEYMAAGAIPIAHNSAGPKMDIVLEEDGQKTGFLAETVEEYAEAILEIVKMNETERLKMAESARKRAARFSEQRFCEDFKTAIRPIFTGPLK

SEQ ID NO: 11066 - DNA, 2345 bp, Arabidopsis thaliana
ggagcctgtctgtgtaatgaaaatccacttgacgacctaaacaacaacaacgactccggcgagtgtatgtatctttcactttctcactaaccaaccagacgacaaaagaaaattattcatcttagctaagctcgattagtttctggcggaaacggttttgtggataattgttagcatattccgatcttgccctcccccgagagagagaggccaatcaatcaatcaatcaatcatctcttacaaagctacgtgtgacctagcattctccagattgttgtttatagcctcttcttagatttacgatttgtgagcttgtgaagatttcttggtagaattagagttctctgtttcgagatcgagatgaataataataataataatagaggaagatttccaccggggattggtgcggcgggtcctggtccggatcctaattttcagtcacggaatccgaatccacctcagcctcaacagtaccttcagtcacggactccgtttccacagcaacctcagcctcagcctcctcagtatctccagtctcaatctgatgctcagcagtacgttcagcgaggttatccccagcagattcaacagcaacagcaactgcagcagcagcaacaacaacaacagcagcagcaagaacaacaatggtcacgacgggctcagcttcctggtgatccaagttacatagatgaggtcgaaaaaacggttcaatctgaagctattagcgattctaataatgaagactggaaagcaaccttaaagctgccaccacgagataatcgttaccagacagaggatgtgactgccactaaaggaaatgaatttgaagattactttttgaagagggatctgcttaggggaatatatgagaagggttttgaaaaaccatctcctattcaggaagaaagcattcccattgctttgactggtagtgatattcttgctagagccaaaaatggtactgggaagactggtgccttctgcattcctacccttgagaaaattgatccagagaacaatgtcattcaagccgtaattctagttccaacccgagagctcgcccttcagacatcccaggtttgcaaggagctttccaaatatttgaaaattgaggttatggtcaccactggcggtaccagtctgagggatgatatcatgcgattgtatcaacctgtccatttactggttggaactcctggaagaatattagatcttgccaaaaagggtgtgtgtgttttgaaagattgtgccatgcttgtaatggatgaggccgacaagcttttgtctgtagaatttcaaccttctatagaggagttgatacagttcttgccagagagccggcagattttgatgttttcagctacatttcctgtcactgtgaagtctttcaaggatcggtatctcaagaagccttacattatcaatctcatggatcagctcacacttatgggtgttacccaatattatgcttttgttgaagagagacagaaggtgcactgccttaacacgctattctctaagctccaaataaaccaatccattatcttttgcaactctgttaatcgtgttgagctgttggccaagaaaattacagaacttggttactcatgcttctatatccatgcaaagatggttcaagaccatcggaacagggttttccatgatttccgcaatggtgcatgcagaaatcttgtttgcactgatttgtttacacgtgggattgacattcaagctgtgaatgtggtgataaatttcgattttcctaggacttctgagtcgtatctacatagggtaggcagatcaggacgatttggacaccttgggttggctgtgaatttggtaacttatgaggaccgcttcaaaatgtatcagacagagcaagaacttggaactgaaatcaagcccataccttcacttatcgacaaggcaatctactgtcagtaacttctacctggtgtacattctctacccggcaaggcattgatggactaaccggtgtagtgaggaggcaaatcattcagctttggcagccactagctcgttctagagatgaaggcaacacatagagtactgtactgaggcaagaagagacagtataggtggttgatggcgatggaagcggttgattgtgtctaaacctttaaagcagtaccggcttgatttggtttgaattgaagacttcttctgctgcatgatatgaaccttaaagttgtcttctctcatctctaattttcatgttcttagaaaccttttcaccttttcattttcatgttctctcatcttgaagacttgagaggaatttccgagtagtgagatcaaaccgaagaagacattttaacttc

SEQ ID NO: 11067 - protein, 528 aa, Arabidopsis thaliana
MNNNNNNRGRFPPGIGAAGPGPDPNFQSRNPNPPQPQQYLQSRTPFPQQPQPQPPQYLQSQSDAQQYVQRGYPQQIQQQQQLQQQQQQQQQQQEQQWSRRAQLPGDPSYIDEVEKTVQSEAISDSNNEDWKATLKLPPRDNRYQTEDVTATKGNEFEDYFLKRDLLRGIYEKGFEKPSPIQEESIPIALTGSDILARAKNGTGKTGAFCIPTLEKIDPENNVIQAVILVPTRELALQTSQVCKELSKYLKIEVMVTTGGTSLRDDIMRLYQPVHLLVGTPGRILDLAKKGVCVLKDCAMLVMDEADKLLSVEFQPSIEELIQFLPESRQILMFSATFPVTVKSFKDRYLKKPYIINLMDQLTLMGVTQYYAFVEERQKVHCLNTLFSKLQINQSIIFCNSVNRVELLAKKITELGYSCFYIHAKMVQDHRNRVFHDFRNGACRNLVCTDLFTRGIDIQAVNVVINFDFPRTSESYLHRVGRSGRFGHLGLAVNLVTYEDRFKMYQTEQELGTEIKPIPSLIDKAIYCQ

SEQ ID NO: 11068 - protein, 275 aa, Arabidopsis thaliana
MVTTGGTSLRDDIMRLYQPVHLLVGTPGRILDLAKKGVCVLKDCAMLVMDEADKLLSVEFQPSIEELIQFLPESRQILMFSATFPVTVKSFKDRYLKKPYIINLMDQLTLMGVTQYYAFVEERQKVHCLNTLFSKLQINQSIIFCNSVNRVELLAKKITELGYSCFYIHAKMVQDHRNRVFHDFRNGACRNLVCTDLFTRGIDIQAVNVVINFDFPRTSESYLHRVGRSGRFGHLGLAVNLVTYEDRFKMYQTEQELGTEIKPIPSLIDKAIYCQ

SEQ ID NO: 11069 - DNA, 2423 bp, Arabidopsis thaliana
gctgtttctcattcgacaaaaaaacctctaatctcatgtctatgtcttgtctttagatactatcttactctctcttcgagaacttatgtctttagaacggtcggagttcgtcgacggtgttgcggcacggagtctcagtgagatctcagaagttgacgccgtgagaattggaggtgatattatatcttcagcgagacgtctcatcgcacttttaaggtccgtaggagattgtcaatggcttcatcatccacccgttattgctgaagctattagaaggtatgatgagctatggatgccgttgatttctgatctaacggttggtttaaagccaccgatgattttgcctcctcttgatgttgaatgggtttggttttgtcactgtttgaatccagtgagttatagtgattactgtgaaaggagattctcaaaacttatagggaagcctgcgatttacgacgaagagaacgaggattacgcggttttacaatgcgaaaagatctggagtttacgatatcctttagagagttttgagaacagagctgatcctgattcacttgagactgtttctttagttaatgaagatattaaaagtctagtgaagaagcagatgtttctttgggagaagttttcagctccttacatgtctgaaaccgtttacttgatcgctgctcggttacgttacaaagggtttttgttgatactacacaagtttaaggatgaggtttctagtcttattccagcttctgatatacttcttatgtggcttacgcatcagagctacccgacagtatataaagatgatgttgatgaaatgttggaggagatgacgagaaaggtggtacaagttggagaaaaggtagagaaaacagaagtggaaacaacaaaagaactgtgggatagatacttcaatcaaccatatgagaaagcaggcggtgagttgtcgataatagcgaatgagtctggtttaagtaacaacacaatgttttattggcctgtctctgatatggatgttaacactgcgtataagtccattcgacctagatttgtcttggaattatgtatatttttaaggttgaatccaaaggcagagcagaatgagtcgatagatcggagttttctacggttgagagttgctagatgtcataggaagctgcagctggataagaaaatgactgatttgtctagcgaagcgtcgtggcaaaaagcgtggcatctttactgtgagtttggaacactagggtttattttggaatcacattgtgaccgttctcgtggaatttgttttaaaagcggaaaaccagaagggatgatagagtttccgtggaatgatctgttaagagcgcattctctagcgtctggtaggtttcttggtaagcaagtgagtgtgtttgcttcagttacacctccagttcaagcgccctacttgctgagatttgtaccggatcgagttaccgatgattcaggtgctatgatatctgattcagttcaaagaacaaacaacttccgacctcaagaaggaagatggcttactcggaccgtgcttgatcacgctggacgggaatgcttcgttatccgtattcgagttgggaagggagtgtttaaacgtggaggtgaagttccatccccggtgaaatcagaggagcggatcacagaggttcgagtaggttcttggtcttatgtcgagggttcaatcggtaaagctccagcgaaggtggttggaaccgtgacgcctaaggaaccaatggaggactgggaggcagcatgggaattttctactggtgatgaattgtgcatccgttgggactcattaggaactatctcagaacttcgtttatattcaagaaaccccggttcgctggttcggctattaactggacggagaatgcaatataaaggagaagatgaagaagacgacgagggttttttaacagttgttagatcaacagaagaagatccaactgaaaaagcaactgctctgatcgactggaagcatcaagccgtggaatttcttcctgaggaagacgcggttttcgtcttgttattgtcggtatcgattctaaggagtgttacacataaaagaagagaagatgttggtaaattgttggtgcggaagaggataacagaagctaccggtgaacgggattggggatcggttattgtcgatgcttcgtcaacaaatgtatcttcttcttccagtccatacgtagaaccgtggtatcgaaactccggtaaggttatggcaatggaggagaaagcacaagttgcacgatatccatatcctgttatgagctattctaacgttgatggtggtgataatttgtacaaacatgtaatattcgggtgaaacttcaaaaagattgcataattattagtcagatggatggtgtaaccaaaagtaatacgatgcttgggatgtcttaatc

SEQ ID NO: 11070 - protein, 752 aa, Arabidopsis thaliana
MSLERSEFVDGVAARSLSEISEVDAVRIGGDIISSARRLIALLRSVGDCQWLHHPPVIAEAIRRYDELWMPLISDLTVGLKPPMILPPLDVEWVWFCHCLNPVSYSDYCERRFSKLIGKPAIYDEENEDYAVLQCEKIWSLRYPLESFENRADPDSLETVSLVNEDIKSLVKKQMFLWEKFSAPYMSETVYLIAARLRYKGFLLILHKFKDEVSSLIPASDILLMWLTHQSYPTVYKDDVDEMLEEMTRKVVQVGEKVEKTEVETTKELWDRYFNQPYEKAGGELSIIANESGLSNNTMFYWPVSDMDVNTAYKSIRPRFVLELCIFLRLNPKAEQNESIDRSFLRLRVARCHRKLQLDKKMTDLSSEASWQKAWHLYCEFGTLGFILESHCDRSRGICFKSGKPEGMIEFPWNDLLRAHSLASGRFLGKQVSVFASVTPPVQAPYLLRFVPDRVTDDSGAMISDSVQRTNNFRPQEGRWLTRTVLDHAGRECFVIRIRVGKGVFKRGGEVPSPVKSEERITEVRVGSWSYVEGSIGKAPAKVVGTVTPKEPMEDWEAAWEFSTGDELCIRWDSLGTISELRLYSRNPGSLVRLLTGRRMQYKGEDEEDDEGFLTVVRSTEEDPTEKATALIDWKHQAVEFLPEEDAVFVLLLSVSILRSVTHKRREDVGKLLVRKRITEATGERDWGSVIVDASSTNVSSSSSPYVEPWYRNSGKVMAMEEKAQVARYPYPVMSYSNVDGGDNLYKHVIFG

SEQ ID NO: 11071 - protein, 683 aa, Arabidopsis thaliana
MPLISDLTVGLKPPMILPPLDVEWVWFCHCLNPVSYSDYCERRFSKLIGKPAIYDEENEDYAVLQCEKIWSLRYPLESFENRADPDSLETVSLVNEDIKSLVKKQMFLWEKFSAPYMSETVYLIAARLRYKGFLLILHKFKDEVSSLIPASDILLMWLTHQSYPTVYKDDVDEMLEEMTRKVVQVGEKVEKTEVETTKELWDRYFNQPYEKAGGELSIIANESGLSNNTMFYWPVSDMDVNTAYKSIRPRFVLELCIFLRLNPKAEQNESIDRSFLRLRVARCHRKLQLDKKMTDLSSEASWQKAWHLYCEFGTLGFILESHCDRSRGICFKSGKPEGMIEFPWNDLLRAHSLASGRFLGKQVSVFASVTPPVQAPYLLRFVPDRVTDDSGAMISDSVQRTNNFRPQEGRWLTRTVLDHAGRECFVIRIRVGKGVFKRGGEVPSPVKSEERITEVRVGSWSYVEGSIGKAPAKVVGTVTPKEPMEDWEAAWEFSTGDELCIRWDSLGTISELRLYSRNPGSLVRLLTGRRMQYKGEDEEDDEGFLTVVRSTEEDPTEKATALIDWKHQAVEFLPEEDAVFVLLLSVSILRSVTHKRREDVGKLLVRKRITEATGERDWGSVIVDASSTNVSSSSSPYVEPWYRNSGKVMAMEEKAQVARYPYPVMSYSNVDGGDNLYKHVIFG

SEQ ID NO: 11072 - protein, 669 aa, Arabidopsis thaliana
MILPPLDVEWVWFCHCLNPVSYSDYCERRFSKLIGKPAIYDEENEDYAVLQCEKIWSLRYPLESFENRADPDSLETVSLVNEDIKSLVKKQMFLWEKFSAPYMSETVYLIAARLRYKGFLLILHKFKDEVSSLIPASDILLMWLTHQSYPTVYKDDVDEMLEEMTRKVVQVGEKVEKTEVETTKELWDRYFNQPYEKAGGELSIIANESGLSNNTMFYWPVSDMDVNTAYKSIRPRFVLELCIFLRLNPKAEQNESIDRSFLRLRVARCHRKLQLDKKMTDLSSEASWQKAWHLYCEFGTLGFILESHCDRSRGICFKSGKPEGMIEFPWNDLLRAHSLASGRFLGKQVSVFASVTPPVQAPYLLRFVPDRVTDDSGAMISDSVQRTNNFRPQEGRWLTRTVLDHAGRECFVIRIRVGKGVFKRGGEVPSPVKSEERITEVRVGSWSYVEGSIGKAPAKVVGTVTPKEPMEDWEAAWEFSTGDELCIRWDSLGTISELRLYSRNPGSLVRLLTGRRMQYKGEDEEDDEGFLTVVRSTEEDPTEKATALIDWKHQAVEFLPEEDAVFVLLLSVSILRSVTHKRREDVGKLLVRKRITEATGERDWGSVIVDASSTNVSSSSSPYVEPWYRNSGKVMAMEEKAQVARYPYPVMSYSNVDGGDNLYKHVIFG

SEQ ID NO: 11073 - DNA, 1786 bp, Arabidopsis thaliana
aaattttagcgtaaagacaatctcttgaaggagaaaaggaaaacaatctctctttctgtgacctttcgcaacttgtcaaagcaccacgaccttctctctacggagttgagatcaatccccccaaatctcggtgtggttcctctagggtttttgatcggaatcggaatcgataatctaaccggcatgaggccaatcctattgccggatccacccagtctatctaccggcgtccctgatattttcgaacaaggcggttcccataacgtcgtcagacgcgccgtcgtcatcggaaacggtttccctggctccgagaatcagtgtatcggtctcgttcgtgcgctcggcttatctgataatcaccttctcaaccgagtgacaaggcctaaaggaggactaaatgagtggctgcactggctcccagttggttttcacaagaagttggactttatcctcaggcatatttacctctactccagattgatgcttggatccaaacaaagtaaatacatctcatctgtaccctcagagaatggtggtaatgtaggtttggcctctattctagaggctgatgtgaagggcattgtaaatttggcccgtcagacctatgaaaaggatggcccgttgatcgtgattgcatgtggaagagatactatttctattgctagctcgataagacgtttggcttctgaaaacgtcttcgttgttcagatacaacatcctagatcacatttaaataggtttgacatggtgatcacgcctcgtcacgactactatcctctaacactcgaagcgcaggagcaggtccctagatttatgcgtagttggataactccacgtgaacctcctcaggatcatgtagtcttgactactggagctctacaccagatcgattatgcctcactccgtaaagcagctagtgcctggcatgatgaatttgctgctcttccgaagcctttagttgtggttaacatcggctggcctagaagtaactgtcggtatggagcagacctcgcaaaacagctaacagactcccttcttaatgtccttgctacctgtggaagtgtcagaattactctttcctacaaaacccctgcaaaggtttcaagagtaatcttcaaagaacttggagataaccccaaagtttacatatggaatggccaagaaccaaatccttacatggggcatctagcttggggtgatgcttttgtggtgacagcagattcagtcagtctgataagcgaagcttgtagcaccgggaaaccagtgtacgttgttggagccgatcactgtaaatggaagattgcagaattccaaaagtctttgagggagcgaggagttgtccgctcatttacaggtttcgaagatatgtcggaaagttggagttatccgccattgaatgacacagcagaggcagctacgagaatacggcgtgaattggctgcacgtggatggagtttacggtcttgaattatatactcttctttgctgtaccacttatttgcggaatcacattttgtccaaagctggagaaacagaagcctaagagaatcggatgttgtgcagaaagaaagaatagttgaagatatcatttaaaaagggtcattttactctagcttgccctaaaattttgctgataatgttttaccaataggccaaatactaaaaaaaatctctgttacttaatcggagaggcctttgtgagataaaagaaagcggaaaggttttttttaatctttttaacgtttgtattgttttgtcgacgagatttgaccgtttgagtgtgtat

SEQ ID NO: 11074 - protein, 427 aa, Arabidopsis thaliana
MRPILLPDPPSLSTGVPDIFEQGGSHNVVRRAVVIGNGFPGSENQCIGLVRALGLSDNHLLNRVTRPKGGLNEWLHWLPVGFHKKLDFILRHIYLYSRLMLGSKQSKYISSVPSENGGNVGLASILEADVKGIVNLARQTYEKDGPLIVIACGRDTISIASSIRRLASENVFVVQIQHPRSHLNRFDMVITPRHDYYPLTLEAQEQVPRFMRSWITPREPPQDHVVLTTGALHQIDYASLRKAASAWHDEFAALPKPLVVVNIGWPRSNCRYGADLAKQLTDSLLNVLATCGSVRITLSYKTPAKVSRVIFKELGDNPKVYIWNGQEPNPYMGHLAWGDAFVVTADSVSLISEACSTGKPVYVVGADHCKWKIAEFQKSLRERGVVRSFTGFEDMSESWSYPPLNDTAEAATRIRRELAARGWSLRS

SEQ ID NO: 11075 - protein, 328 aa, Arabidopsis thaliana
MLGSKQSKYISSVPSENGGNVGLASILEADVKGIVNLARQTYEKDGPLIVIACGRDTISIASSIRRLASENVFVVQIQHPRSHLNRFDMVITPRHDYYPLTLEAQEQVPRFMRSWITPREPPQDHVVLTTGALHQIDYASLRKAASAWHDEFAALPKPLVVVNIGWPRSNCRYGADLAKQLTDSLLNVLATCGSVRITLSYKTPAKVSRVIFKELGDNPKVYIWNGQEPNPYMGHLAWGDAFVVTADSVSLISEACSTGKPVYVVGADHCKWKIAEFQKSLRERGVVRSFTGFEDMSESWSYPPLNDTAEAATRIRRELAARGWSLRS

SEQ ID NO: 11076 - protein, 240 aa, Arabidopsis thaliana
MVITPRHDYYPLTLEAQEQVPRFMRSWITPREPPQDHVVLTTGALHQIDYASLRKAASAWHDEFAALPKPLVVVNIGWPRSNCRYGADLAKQLTDSLLNVLATCGSVRITLSYKTPAKVSRVIFKELGDNPKVYIWNGQEPNPYMGHLAWGDAFVVTADSVSLISEACSTGKPVYVVGADHCKWKIAEFQKSLRERGVVRSFTGFEDMSESWSYPPLNDTAEAATRIRRELAARGWSLRS

SEQ ID NO: 11077 - DNA, 1157 bp, Arabidopsis thaliana
gaacaaagcaaacggctcatttctcagaaacaactcaaacatgggttccttcgacttgcctcacagttcatcgttcaagggagaaagtgaaatatttcttcggaatgtgttcgagaatatattgaaaacgtacctaaggaagaacccgacggcgaagacaatatgggaactggttcagtcgttggacaacgaaaagatctgctacgaccacttcactttcaggacactaaaggtcgatggttatggaatagactccttgtcgagttttttcatggcttatggatataaaattggtggtggacttgattttcccaagaagaaactacgagttctttggttttctccacctgatgttcacgttcctaatgatggtcacggtctaggcaacggccctttgccgcgacttgttatagctgaggttcttgtggacgaactaagccctgaatcacaggggataataaggaagtatttgaaacaagaaggtggcaagcaagcggttctttctagtactttggggtctttaatatgggagaagcctacatggaccgacttcaagcagcttgccaaagaaagcgaatttgcggcatggacgcttatccacggctacacaatgaatcatcttgcttttgcggttcatcgattcaaacatcgtttcagtgacatcaaattcgtcaaacagcatcttgaggaaaagggattcaaactcaacagtgacggagaaatcctcaaagtgagtcaagatggtctactatttcaagtttcatcgatctcggaaaggcttccggtaacatttgcagatggagtaactgaaacaatcccagcttcatacattgaattcactcagcgtcaagttcttccagagttcaaagatgtgccgcttgatgagatcaaagaatttcatagacgtgaagcttttgaactcgataacgccaaccacgtaatggaaagcacccgtttcacaactaaattctagaaccagacttgtcttgctcgacttagtatatgccaaatttgtgtaactatatatacttgtgtgtgtttgtgtgcaatcttttcatatatatgcatgtgtgtatttgcgatatctttatgttgttattttactgtgaagggacaatgtaagcatatgttatctctcatgatggtttttgttgatt

SEQ ID NO: 11078 - protein, 323 aa, Arabidopsis thaliana
NKANGSFLRNNSNMGSFDLPHSSSFKGESEIFLRNVFENILKTYLRKNPTAKTIWELVQSLDNEKICYDHFTFRTLKVDGYGIDSLSSFFMAYGYKIGGGLDFPKKKLRVLWFSPPDVHVPNDGHGLGNGPLPRLVIAEVLVDELSPESQGIIRKYLKQEGGKQAVLSSTLGSLIWEKPTWTDFKQLAKESEFAAWTLIHGYTMNHLAFAVHRFKHRFSDIKFVKQHLEEKGFKLNSDGEILKVSQDGLLFQVSSISERLPVTFADGVTETIPASYIEFTQRQVLPEFKDVPLDEIKEFHRREAFELDNANHVMESTRFTTKF

SEQ ID NO: 11079 - protein, 310 aa, Arabidopsis thaliana
MGSFDLPHSSSFKGESEIFLRNVFENILKTYLRKNPTAKTIWELVQSLDNEKICYDHFTFRTLKVDGYGIDSLSSFFMAYGYKIGGGLDFPKKKLRVLWFSPPDVHVPNDGHGLGNGPLPRLVIAEVLVDELSPESQGIIRKYLKQEGGKQAVLSSTLGSLIWEKPTWTDFKQLAKESEFAAWTLIHGYTMNHLAFAVHRFKHRFSDIKFVKQHLEEKGFKLNSDGEILKVSQDGLLFQVSSISERLPVTFADGVTETIPASYIEFTQRQVLPEFKDVPLDEIKEFHRREAFELDNANHVMESTRFTTKF

SEQ ID NO: 11080 - protein, 233 aa, Arabidopsis thaliana
MAYGYKIGGGLDFPKKKLRVLWFSPPDVHVPNDGHGLGNGPLPRLVIAEVLVDELSPESQGIIRKYLKQEGGKQAVLSSTLGSLIWEKPTWTDFKQLAKESEFAAWTLIHGYTMNHLAFAVHRFKHRFSDIKFVKQHLEEKGFKLNSDGEILKVSQDGLLFQVSSISERLPVTFADGVTETIPASYIEFTQRQVLPEFKDVPLDEIKEFHRREAFELDNANHVMESTRFTTKF

SEQ ID NO: 11081 - DNA, 2247 bp, Arabidopsis thaliana
aaccgtccgttgtgtcctgtttataaagttttgctttttttattttctccattgatgggtcttttctttcttctctctctcgtgtttctttcatggggttaagactagtgtttaccgcgtgaaggtttttttttctttctattttctttcatttcctctccttctacttcttcttctccagttctcatctgggttcttcaatggcgagtgttgaaggtgatgatgatttcggaagttcttcgtcaaggtcttatcaagatcaactatacacagagctatggaaagtttgtgcaggtccattagtggaagttcctcgtgctcaagagagagttttctacttccctcagggtcacatggaacaacttgtggcgtcaactaatcaaggaatcaattcagaagaaatacctgtttttgatcttcctccaaagatactttgtcgagttcttgatgtcactttaaaggcggagcatgaaacagatgaggtttacgctcagatcacattacaaccagaggaagatcaaagtgaaccaacaagtcttgatccacctattgttggaccaactaagcaagagtttcattcgtttgttaagattttaacggcttcagatacaagcactcatggtggattctctgttcttcgtaaacacgccactgaatgcttgccttctttggatatgacacaagctactcctactcaagaacttgtgactagagatcttcatggctttgaatggaggtttaagcatatattcagaggacaaccacggaggcatttgcttactacgggttggagtacatttgtatcctcgaaaagacttgtagctggagatgcttttgtgttcttgaggggtgagaatggggatttacgggttggagtgagacgattagctcggcatcaaagcacaatgcctacttcggttatttcaagtcagagcatgcatttgggagttcttgctacagcttctcatgctgtgcgtacaacaacaatctttgttgtcttttacaagcctaggataagccaattcatagttggggtgaacaagtatatggaagctataaagcatggattttctctcggtacccgattcagaatgaggtttgaaggagaagagtctcctgagagaatatttactggtacgattgtgggaagtggagatctatcttcacaatggccagcttctaaatggaggtcattgcaggtacaatgggatgagccaacaacagttcagagaccagataaagtctcaccatgggagatagagcctttcttggcaacttccccaatttcaactcctgctcaacaaccacaatcgaaatgcaagcggtcaagacccatcgagccatcagttaaaacaccagccccacctagtttcttgtacagcctccctcagagccaagattccattaatgcatcccttaaactgtttcaagatccatcacttgagagaatttcaggtggatactcctcaaacaacagcttcaaacccgagactcctcctcctccaacgaattgtagctataggttgtttggatttgatctcacaagcaattctcctgctccaatccctcaagacaagcaaccgatggatacttgtggagctgccaagtgtcaagaacccatcactccaacctcaatgagtgagcagaagaagcaacaaacatcaagaagtcgaactaaagtgcaaatgcaaggcattgcggttggtcgtgcggttgatttaacactgttgaaatcttacgatgaactgattgatgagcttgaggagatgtttgagattcaaggacagcttcttgcccgagacaaatggatcgttgtcttcactgatgatgaaggagatatgatgcttgctggtgatgatccgtggaatgagttttgcaagatggcaaagaagatatttatatattcgagcgatgaggttaagaaaatgacaacgaaactgaagatttcttcgtcgttagagaatgaggaatatggtaatgaatcattcgaaaatcgtagtagggggtgagagttttagctgttaattaaggttaattcggcgacgtcgttttagtgcgtaagtgtctaaagactttttttttagtctgtgtatataaagtcttgtcctctttttcatgtcaatttttcaagttggcgatttaatatttcggttttgggacagtggttgatggggcggttttacatcttttatgtgtatgtacttgttccataaccattcaattttcaaaaccaagtacattcaaaag

SEQ ID NO: 11082 - protein, 602 aa, Arabidopsis thaliana
MASVEGDDDFGSSSSRSYQDQLYTELWKVCAGPLVEVPRAQERVFYFPQGHMEQLVASTNQGINSEEIPVFDLPPKILCRVLDVTLKAEHETDEVYAQITLQPEEDQSEPTSLDPPIVGPTKQEFHSFVKILTASDTSTHGGFSVLRKHATECLPSLDMTQATPTQELVTRDLHGFEWRFKHIFRGQPRRHLLTTGWSTFVSSKRLVAGDAFVFLRGENGDLRVGVRRLARHQSTMPTSVISSQSMHLGVLATASHAVRTTTIFVVFYKPRISQFIVGVNKYMEAIKHGFSLGTRFRMRFEGEESPERIFTGTIVGSGDLSSQWPASKWRSLQVQWDEPTTVQRPDKVSPWEIEPFLATSPISTPAQQPQSKCKRSRPIEPSVKTPAPPSFLYSLPQSQDSINASLKLFQDPSLERISGGYSSNNSFKPETPPPPTNCSYRLFGFDLTSNSPAPIPQDKQPMDTCGAAKCQEPITPTSMSEQKKQQTSRSRTKVQMQGIAVGRAVDLTLLKSYDELIDELEEMFEIQGQLLARDKWIVVFTDDEGDMMLAGDDPWNEFCKMAKKIFIYSSDEVKKMTTKLKISSSLENEEYGNESFENRSRG

SEQ ID NO: 11083 - protein, 551 aa, Arabidopsis thaliana
MEQLVASTNQGINSEEIPVFDLPPKILCRVLDVTLKAEHETDEVYAQITLQPEEDQSEPTSLDPPIVGPTKQEFHSFVKILTASDTSTHGGFSVLRKHATECLPSLDMTQATPTQELVTRDLHGFEWRFKHIFRGQPRRHLLTTGWSTFVSSKRLVAGDAFVFLRGENGDLRVGVRRLARHQSTMPTSVISSQSMHLGVLATASHAVRTTTIFVVFYKPRISQFIVGVNKYMEAIKHGFSLGTRFRMRFEGEESPERIFTGTIVGSGDLSSQWPASKWRSLQVQWDEPTTVQRPDKVSPWEIEPFLATSPISTPAQQPQSKCKRSRPIEPSVKTPAPPSFLYSLPQSQDSINASLKLFQDPSLERISGGYSSNNSFKPETPPPPTNCSYRLFGFDLTSNSPAPIPQDKQPMDTCGAAKCQEPITPTSMSEQKKQQTSRSRTKVQMQGIAVGRAVDLTLLKSYDELIDELEEMFEIQGQLLARDKWIVVFTDDEGDMMLAGDDPWNEFCKMAKKIFIYSSDEVKKMTTKLKISSSLENEEYGNESFENRSRG

SEQ ID NO: 11084 - protein, 444 aa, Arabidopsis thaliana
MTQATPTQELVTRDLHGFEWRFKHIFRGQPRRHLLTTGWSTFVSSKRLVAGDAFVFLRGENGDLRVGVRRLARHQSTMPTSVISSQSMHLGVLATASHAVRTTTIFVVFYKPRISQFIVGVNKYMEAIKHGFSLGTRFRMRFEGEESPERIFTGTIVGSGDLSSQWPASKWRSLQVQWDEPTTVQRPDKVSPWEIEPFLATSPISTPAQQPQSKCKRSRPIEPSVKTPAPPSFLYSLPQSQDSINASLKLFQDPSLERISGGYSSNNSFKPETPPPPTNCSYRLFGFDLTSNSPAPIPQDKQPMDTCGAAKCQEPITPTSMSEQKKQQTSRSRTKVQMQGIAVGRAVDLTLLKSYDELIDELEEMFEIQGQLLARDKWIVVFTDDEGDMMLAGDDPWNEFCKMAKKIFIYSSDEVKKMTTKLKISSSLENEEYGNESFENRSRG

SEQ ID NO: 11085 - DNA, 2998 bp, Arabidopsis thaliana
gagtcagaacgcaaccaaataaagaaagctctcaaactcagtcttgaagcatcaactttatatctaccatctcatcaactaactaattctttttaaaatggctttagctaatgagataatgggttctcgtctaatcttcgagagatcatcatcacttgcgtctccgtttcaatcgcgtttctccatcaagaagaggacacagagaacacagttctccatcaacccttttgatccgagacctatgagagccgttaactcaagcggcgttgtagcggccatcagcgaggatttggttaaaacgctgcgtattagcactgtcggtagaaaacaagagaagcaggaagaagaggagaagtcggtgaagtttaaggtgagagcagttgcgacggtgaggaacaaaaacaaagaggattttaaagaaactttggttaagcatttggatgcttttactgataaaatcggtagaaacgttgtcttggagcttattagtacccaagttgatccaaaaacgaatgagccaaagaagagtaaagcggcagttttgaaagattggtcaaagaaatcaaattcaaaggcggaaagagtccattacacggccgagttcacggtggattcagcctttggttccccaggagccatcaccgtgaccaacaaacaccaaaaagagttctttcttgagagcatcaccatcgagggtttcgcatgtggccctgttcacttcccctgcaactcttgggtccaatctcaaaaagaccatccatccaaacgaattctcttcactaatcagccttacttgccgagcgagacaccgtccggtctaagaacattaagggagaaagaattggagaatctaagaggaaatggtaaaggagaaagaaaattatcagacagaatctacgattatgatgtgtacaacgacataggaaatccggacatatcacgtgaactagcccgtcccacacttggtggccgtgaatttccttaccctagacgctgtcgaaccggccggtcttcaaccgacaccgatatgatgtctgagaggcgggtggagaaaccattaccgatgtatgtaccaagagatgagcagttcgaggagtctaagcagaacacttttgctgcatgtagacttaaggcggttttacataaccttataccttcactaaaagctagcattttggctgaggacttagctaactttggtgagatcgatagtctttacaaagaaggcttgcttctcaagttagggtttcaagatgatatgttcaagaaattccctttaccgaagatcgtcactaccctccaaaaatcaagcgagggcttgcttagatacgacactcctaaaatagtttcaaaggataaatacgcatggcttcgcgatgacgagttcgcacgccaagctatagctgggatcaacccggtcaacatagaacgagtcacgtcttatccaccggtcagcaatcttgaccctgaaatctacggaccaggtcttcactccgctctcacggaagaccacatcatcggtcaacttgatggcttaaccgtacaacaagcgttagagatgaaccgtttgtttatggtggactaccatgacatatacttaccgtttctagatagaatcaacgcgcttgatggacgcaaggcttacgcgactcgaaccatattgttcttgacccgactcggtacactcaagcctatcgccatcgagctaagcctcccttctcaatcaagctcaaaccaaaagtccaagcgcgtggtcacacctccagtagacgcaacctccaactggatgtggcagctagccaaggcccacgttgggtccaatgacgctggtgtccaccagcttgtgaatcattggttacgtactcatgcgtgtttggaaccgtttatattagctgctcatagacaattaagcgcaatgcatccgatattcaaattattagaccctcacatgaggtacactttggagatcaatgccgtggcacgacagactttgattagtgcggacggtgtgatcgagtcgtgcttcactgctggtcaatacggtctagagattagttccgctgcgtataagaacaaatggcggtttgatatggaaggtctccctgctgatctcatccgaagggggatggctgttccagacccaacacaaccacatgggcttaaattacttgttgaagactacccatacgccaacgacggtctcttattatggtccgcaatccaaacttgggtccgaacctacgtggaacgttattacgcaaactcgaacctaatccaaaccgatactgagctccaagcctggtactctgagtcaatcaacgtaggtcacgctgatcaccgcgacgccgagtggtggccgaagctttccaccgtcgaagatctcgtctccgtcatcaccaccatcatctggctcgcctccgcacaacacgcggcactcaacttcggacaatatccttacggtggctacgtcccgaaccgaccaccgctaatgcgtcggttgattcccgacgagtcagatcccgagttcacgagttttatcgaagatcctcaaaagtattttttctcgtcgatgccgagtttattgcaaacgacgaagtttatggcggtggttgatacattgtcgacacattcgccggatgaggagtatatcggagagagacaacaaccgtcgatatggactggagatgctgagatcgtagatgcgttttatggattctcggcggaaatcggacggatagagaaggagattgacaagaggaatcgtgatcctagctgtaggaatcgctgtggcgcgggagtgttaccgtatgagttgatggctccgagttctgaaccgggtgttacgtgtagaggagtgcctaatagtgtatctatttagaattattcaatttttcaaagtatagagaattttataagtatataattagattttgacgcagtatggtttatttgccgatattgtaaaattcttacaaggattttattatgttgatttttt

SEQ ID NO: 11086 - protein, 926 aa, Arabidopsis thaliana
MALANEIMGSRLIFERSSSLASPFQSRFSIKKRTQRTQFSINPFDPRPMRAVNSSGVVAAISEDLVKTLRISTVGRKQEKQEEEEKSVKFKVRAVATVRNKNKEDFKETLVKHLDAFTDKIGRNVVLELISTQVDPKTNEPKKSKAAVLKDWSKKSNSKAERVHYTAEFTVDSAFGSPGAITVTNKHQKEFFLESITIEGFACGPVHFPCNSWVQSQKDHPSKRILFTNQPYLPSETPSGLRTLREKELENLRGNGKGERKLSDRIYDYDVYNDIGNPDISRELARPTLGGREFPYPRRCRTGRSSTDTDMMSERRVEKPLPMYVPRDEQFEESKQNTFAACRLKAVLHNLIPSLKASILAEDLANFGEIDSLYKEGLLLKLGFQDDMFKKFPLPKIVTTLQKSSEGLLRYDTPKIVSKDKYAWLRDDEFARQAIAGINPVNIERVTSYPPVSNLDPEIYGPGLHSALTEDHIIGQLDGLTVQQALEMNRLFMVDYHDIYLPFLDRINALDGRKAYATRTILFLTRLGTLKPIAIELSLPSQSSSNQKSKRVVTPPVDATSNWMWQLAKAHVGSNDAGVHQLVNHWLRTHACLEPFILAAHRQLSAMHPIFKLLDPHMRYTLEINAVARQTLISADGVIESCFTAGQYGLEISSAAYKNKWRFDMEGLPADLIRRGMAVPDPTQPHGLKLLVEDYPYANDGLLLWSAIQTWVRTYVERYYANSNLIQTDTELQAWYSESINVGHADHRDAEWWPKLSTVEDLVSVITTIIWLASAQHAALNFGQYPYGGYVPNRPPLMRRLIPDESDPEFTSFIEDPQKYFFSSMPSLLQTTKFMAVVDTLSTHSPDEEYIGERQQPSIWTGDAEIVDAFYGFSAEIGRIEKEIDKRNRDPSCRNRCGAGVLPYELMAPSSEPGVTCRGVPNSVSI

SEQ ID NO: 11087 - protein, 919 aa, Arabidopsis thaliana
MGSRLIFERSSSLASPFQSRFSIKKRTQRTQFSINPFDPRPMRAVNSSGVVAAISEDLVKTLRISTVGRKQEKQEEEEKSVKFKVRAVATVRNKNKEDFKETLVKHLDAFTDKIGRNVVLELISTQVDPKTNEPKKSKAAVLKDWSKKSNSKAERVHYTAEFTVDSAFGSPGAITVTNKHQKEFFLESITIEGFACGPVHFPCNSWVQSQKDHPSKRILFTNQPYLPSETPSGLRTLREKELENLRGNGKGERKLSDRIYDYDVYNDIGNPDISRELARPTLGGREFPYPRRCRTGRSSTDTDMMSERRVEKPLPMYVPRDEQFEESKQNTFAACRLKAVLHNLIPSLKASILAEDLANFGEIDSLYKEGLLLKLGFQDDMFKKFPLPKIVTTLQKSSEGLLRYDTPKIVSKDKYAWLRDDEFARQAIAGINPVNIERVTSYPPVSNLDPEIYGPGLHSALTEDHIIGQLDGLTVQQALEMNRLFMVDYHDIYLPFLDRINALDGRKAYATRTILFLTRLGTLKPIAIELSLPSQSSSNQKSKRVVTPPVDATSNWMWQLAKAHVGSNDAGVHQLVNHWLRTHACLEPFILAAHRQLSAMHPIFKLLDPHMRYTLEINAVARQTLISADGVIESCFTAGQYGLEISSAAYKNKWRFDMEGLPADLIRRGMAVPDPTQPHGLKLLVEDYPYANDGLLLWSAIQTWVRTYVERYYANSNLIQTDTELQAWYSESINVGHADHRDAEWWPKLSTVEDLVSVITTIIWLASAQHAALNFGQYPYGGYVPNRPPLMRRLIPDESDPEFTSFIEDPQKYFFSSMPSLLQTTKFMAVVDTLSTHSPDEEYIGERQQPSIWTGDAEIVDAFYGFSAEIGRIEKEIDKRNRDPSCRNRCGAGVLPYELMAPSSEPGVTCRGVPNSVSI

SEQ ID NO: 11088 - protein, 878 aa, Arabidopsis thaliana
MRAVNSSGVVAAISEDLVKTLRISTVGRKQEKQEEEEKSVKFKVRAVATVRNKNKEDFKETLVKHLDAFTDKIGRNVVLELISTQVDPKTNEPKKSKAAVLKDWSKKSNSKAERVHYTAEFTVDSAFGSPGAITVTNKHQKEFFLESITIEGFACGPVHFPCNSWVQSQKDHPSKRILFTNQPYLPSETPSGLRTLREKELENLRGNGKGERKLSDRIYDYDVYNDIGNPDISRELARPTLGGREFPYPRRCRTGRSSTDTDMMSERRVEKPLPMYVPRDEQFEESKQNTFAACRLKAVLHNLIPSLKASILAEDLANFGEIDSLYKEGLLLKLGFQDDMFKKFPLPKIVTTLQKSSEGLLRYDTPKIVSKDKYAWLRDDEFARQAIAGINPVNIERVTSYPPVSNLDPEIYGPGLHSALTEDHIIGQLDGLTVQQALEMNRLFMVDYHDIYLPFLDRINALDGRKAYATRTILFLTRLGTLKPIAIELSLPSQSSSNQKSKRVVTPPVDATSNWMWQLAKAHVGSNDAGVHQLVNHWLRTHACLEPFILAAHRQLSAMHPIFKLLDPHMRYTLEINAVARQTLISADGVIESCFTAGQYGLEISSAAYKNKWRFDMEGLPADLIRRGMAVPDPTQPHGLKLLVEDYPYANDGLLLWSAIQTWVRTYVERYYANSNLIQTDTELQAWYSESINVGHADHRDAEWWPKLSTVEDLVSVITTIIWLASAQHAALNFGQYPYGGYVPNRPPLMRRLIPDESDPEFTSFIEDPQKYFFSSMPSLLQTTKFMAVVDTLSTHSPDEEYIGERQQPSIWTGDAEIVDAFYGFSAEIGRIEKEIDKRNRDPSCRNRCGAGVLPYELMAPSSEPGVTCRGVPNSVSI

SEQ ID NO: 11089 - DNA, 1887 bp, Arabidopsis thaliana
gaagatagtcgtcactttagtcgcagcaccaccaccaatttcgaatttagcatttctgaattccgactctgagaatcggcggttaccgggaaatatgtcggagactgatagagagcgtccgttattagcatcggaggagagagcttatgaagaaaccgagaaagttctcatagtcggaatcgacgaagaagaagacgctgattacgacgatgaccccggaaactctcctaaattctcatggaagaagctttggctattcactggacctggttttctgatgagtatcgctttcctcgatccaggtaatctcgagagcgatcttcaagctggagccatcgctggttactctttgatttggctattgatgtgggctacggcgattgggcttctgattcaacttctatctgcccgtctcggtgtggcgacgggtagacatctggcggagttgtgtcgagaagagtatccgacttgggcaaggatggtgctttggatatggcggagattgctttgatcggagctgatattcaggaagttattggtagtgctatagctatcaagatcttgtctaatggattggttcctctttgggctggtgttgttatcactgctcttgattgtttcatctttctatttttggagaattatggaataaggaaactagaagctgtgtttgctattttgattgcaacaatggctcttgcatttgcttggatgtttggtcagacgaaacccagtggaactgagctccttgttggagcattggtccctaagcttagctccaggactatcaaacaagctgttggtattgtgggatgtattatcatgccacacaatgtgttcttgcattcagcacttgtgcaatccagagaagtcgatccgaaaaagagattccgggtcaaagaagctctcaagtactactccattgaatccactggtgctcttgcggtttctttcattatcaacgtctttgtgaccacggtgtttgccaagtcgttttacgggacagagatagcggacaccatcggtcttgcaaatgctggacagtacttacaggacaaatacgggggtgggtttttcccgatactgtatatatgggcgattggagtcttagctgctggtcagagtagtaccatcacaggtacgtacgccggacagtttataatgggagggttcttgaatctcaagatgaagaaatgggttagagccttgatcacaagaagctgtgcaatcataccaacaatgatcgtggcgcttgtctttgattcatcggattctatgcttgatgagctcaacgaatggctaaacgttcttcaatcggttcagatccctttcgctgtgatcccactcctttgcttggtctccaatgagcaaatcatgggcagtttcaaaattcaacctttagtccaaacaatctcatggatagtagctgctcttgtgatagccattaatgggtatctaatggtggatttcttctcaggagctgcaacgaatttgattttgcttgtgccagtgatcatattcgcaattgcttatgttgtgtttgtactttaccttatctcacgaggactcacgtacactccttggcaactagtggcttcttcacataaagaaccacagagggatgatgagtgagtaaaggaaaagcaaagagaccttttcattgaagaataagaataagagagattgctctttttagtgaaacaaacaatagaaagttgagtttcagtatggtaacaaaacaatgtcctgatgtatttgtattatagtgttttaaggtttttagagtatagctttggaagaatccgaatcgtatcgtttgtgtaaaacttccggcgtttcttagaattttggcagaaataaaacgtaaacatgaagttccttcttcag

SEQ ID NO: 11090 - protein, 379 aa, Arabidopsis thaliana
MAEIALIGADIQEVIGSAIAIKILSNGLVPLWAGVVITALDCFIFLFLENYGIRKLEAVFAILIATMALAFAWMFGQTKPSGTELLVGALVPKLSSRTIKQAVGIVGCIIMPHNVFLHSALVQSREVDPKKRFRVKEALKYYSIESTGALAVSFIINVFVTTVFAKSFYGTEIADTIGLANAGQYLQDKYGGGFFPILYIWAIGVLAAGQSSTITGTYAGQFIMGGFLNLKMKKWVRALITRSCAIIPTMIVALVFDSSDSMLDELNEWLNVLQSVQIPFAVIPLLCLVSNEQIMGSFKIQPLVQTISWIVAALVIAINGYLMVDFFSGAATNLILLVPVIIFAIAYVVFVLYLISRGLTYTPWQLVASSHKEPQRDDE

SEQ ID NO: 11091 - protein, 313 aa, Arabidopsis thaliana
MALAFAWMFGQTKPSGTELLVGALVPKLSSRTIKQAVGIVGCIIMPHNVFLHSALVQSREVDPKKRFRVKEALKYYSIESTGALAVSFIINVFVTTVFAKSFYGTEIADTIGLANAGQYLQDKYGGGFFPILYIWAIGVLAAGQSSTITGTYAGQFIMGGFLNLKMKKWVRALITRSCAIIPTMIVALVFDSSDSMLDELNEWLNVLQSVQIPFAVIPLLCLVSNEQIMGSFKIQPLVQTISWIVAALVIAINGYLMVDFFSGAATNLILLVPVIIFAIAYVVFVLYLISRGLTYTPWQLVASSHKEPQRDDE

SEQ ID NO: 11092 - protein, 306 aa, Arabidopsis thaliana
MFGQTKPSGTELLVGALVPKLSSRTIKQAVGIVGCIIMPHNVFLHSALVQSREVDPKKRFRVKEALKYYSIESTGALAVSFIINVFVTTVFAKSFYGTEIADTIGLANAGQYLQDKYGGGFFPILYIWAIGVLAAGQSSTITGTYAGQFIMGGFLNLKMKKWVRALITRSCAIIPTMIVALVFDSSDSMLDELNEWLNVLQSVQIPFAVIPLLCLVSNEQIMGSFKIQPLVQTISWIVAALVIAINGYLMVDFFSGAATNLILLVPVIIFAIAYVVFVLYLISRGLTYTPWQLVASSHKEPQRDDE

SEQ ID NO: 11093 - DNA, 2477 bp, Arabidopsis thaliana
aaattcaagaaaaaaaaaaagtggcgcctctgcaatttcaattttcaaatcctattttttctctcgcttcccggagaacggaaccctaatttctcgacgcagacatgattttgagaactccgcagccgaagaggctcaggtccgacgccggagaaagccccgtccccaccggcgctactggttccggcaatcagcttgtcatctacgaagattctcctcttcctgctcctgctcctgctccgctgcaatcatctcatgatcattcggcagatcaacacctttgcacctatcaatgccgccaaatggttaaagctgatgttctagatgccttaagcaaagcagagaaacaagttgaagaatctcaaaccaaattactgactcttaatgccaacttcaccgaagcagatgctgaaagaaagcattttcgagataagttcctatactcagagcaagaacttgctgctgccaaagcgcgtgagaagatgcttcaggagcagttacttatggagatcaacaattctcaagagcggtataccaaagaactacaatcttgccgtgaactggaggtaaaacttcaaaatgaaatgaaccttcgaaagaaagcggagtcttttgctgcaacagctgaggaaaaagctaaacttttggaggataaactgactcagctatctggaagtgtcgacagggagaagaaacgtctcaacaatgatattgctcaactgggtaaagaggcaaagctttctgtgtctaggattggtgcagatcttgaaaggatgcaatgtagggcacaaaatgcagagacggaatcaaatcttttaagatcgcagcttgagcatcttaaactgaaatttgacgagtgtttgcaagaaaagactgaagtagacaagaagctgtcgtcattcacttcggaggcagcatcttcttcagataacagtgtattggttaaacatcttcaggaagaacttaaacgctatgaagctgaagtgcgagaagctagaaagttaaaatcacggcatttagatgcggagttgttgaatgtgaacttattagaagaacaaagccgtagggagagggcagagtcagagttatcaaaatttcatgacttgcagctaagcatggaaaagttggagaatgaattgtcctcttggaagtcattgctaaatgacattcctggtgtgtcctgtcctgatgacatagttatgagattctcggtgctacagaatgaggtggttcaaagcactatgaagattggggaagcaagtacccgtattaaacaactggaggagacgctggaggctatacaacttggcagacagaatgctgtaagtgaggctgcattagcgaaagagaaatctgaggctctcaaaacagacgtgaagagaattgaagtaatgctcactttggtcacggaggagaaagaacaatagaaagctgttgttaatgaattaaggaagtcaaacagtgaaggatctgtgtctggagccgcagatggagcccttattcaggggtttgaatcttctcttgcaaagaaggagaactatattaaggatttagagcaggatctaaatcaactgaaggatgtcaataatcgtcaacgtactgaaatagaacttctaaatgagaaactagttgatgaagcaaggaggaataagtcgctggaaagggatagtgatcgtcttcgctctgagatctctttactggagtcaaagctgggtcatggtgattattctgccgcaaatacaagggttttgcgcatggtgaatactcttggtgttgaaaacgaggcaaaacaaacaatagaggctttacaagctgagttacagaagacaaaagaaagacttcaagctgttgaagaattaaagagccagtctggagatgctgggaagctagttgactctcatataactggaaagattgctcaactaaaagagcaaattgctacgcttgaaaaacgtgaagagaggtacaaaactgtttttgctgatagaatttccgtgtttagaagggcttgttgtgagctttttggttataagattgtaatggacgaacatcagcgtcccaatggaatcccagtgactcggtttactctccagtctatatatgctcaaagtgatgatgaaaaactcgagtttgaatacgagtcaggaaacaccagtattctaaacaatgagtatgcctctcagggcgacatagcgaagcagatagaaatattcatcaggaaattcaactcgattccagcttttacagccaacttaacgatggaatcattcaaccgtcggactctatattgagagcactgcgtccttatttccaactctgtgttttgtatatttctaaagcctgctgaatagaaactgaaactcgaaagccgcagcttagaacactggccttatctatatctacctctggttcgttatgtctgctacaattgtggtgtcagtaactctattttggtatgaaagaaactggtttcgatt

SEQ ID NO: 11094 - protein, 440 aa, Arabidopsis thaliana
MILRTPQPKRLRSDAGESPVPTGATGSGNQLVIYEDSPLPAPAPAPLQSSHDHSADQHLCTYQCRQMVKADVLDALSKAEKQVEESQTKLLTLNANFTEADAERKHFRDKFLYSEQELAAAKAREKMLQEQLLMEINNSQERYTKELQSCRELEVKLQNEMNLRKKAESFAATAEEKAKLLEDKLTQLSGSVDREKKRLNNDIAQLGKEAKLSVSRIGADLERMQCRAQNAETESNLLRSQLEHLKLKFDECLQEKTEVDKKLSSFTSEAASSSDNSVLVKHLQEELKRYEAEVREARKLKSRHLDAELLNVNLLEEQSRRERAESELSKFHDLQLSMEKLENELSSWKSLLNDIPGVSCPDDIVMRFSVLQNEVVQSTMKIGEASTRIKQLEETLEAIQLGRQNAVSEAALAKEKSEALKTDVKRIEVMLTLVTEEKEQ

SEQ ID NO: 11095 - protein, 374 aa, Arabidopsis thaliana
MVKADVLDALSKAEKQVEESQTKLLTLNANFTEADAERKHFRDKFLYSEQELAAAKAREKMLQEQLLMEINNSQERYTKELQSCRELEVKLQNEMNLRKKAESFAATAEEKAKLLEDKLTQLSGSVDREKKRLNNDIAQLGKEAKLSVSRIGADLERMQCRAQNAETESNLLRSQLEHLKLKFDECLQEKTEVDKKLSSFTSEAASSSDNSVLVKHLQEELKRYEAEVREARKLKSRHLDAELLNVNLLEEQSRRERAESELSKFHDLQLSMEKLENELSSWKSLLNDIPGVSCPDDIVMRFSVLQNEVVQSTMKIGEASTRIKQLEETLEAIQLGRQNAVSEAALAKEKSEALKTDVKRIEVMLTLVTEEKEQ

SEQ ID NO: 11096 - protein, 314 aa, Arabidopsis thaliana
MLQEQLLMEINNSQERYTKELQSCRELEVKLQNEMNLRKKAESFAATAEEKAKLLEDKLTQLSGSVDREKKRLNNDIAQLGKEAKLSVSRIGADLERMQCRAQNAETESNLLRSQLEHLKLKFDECLQEKTEVDKKLSSFTSEAASSSDNSVLVKHLQEELKRYEAEVREARKLKSRHLDAELLNVNLLEEQSRRERAESELSKFHDLQLSMEKLENELSSWKSLLNDIPGVSCPDDIVMRFSVLQNEVVQSTMKIGEASTRIKQLEETLEAIQLGRQNAVSEAALAKEKSEALKTDVKRIEVMLTLVTEEKEQ

SEQ ID NO: 11097 - DNA, 1857 bp, Arabidopsis thaliana
ggggtttggtttgtttctcaaggaaaaatttcaactttctttcttatttcagtaaacgagagatatgttttcaatctcaatctgattctttctcgcagcggctaattctagtgtcgctaatagggtctctgtttcttcaaatttagttctttaaattcactacgaagatttttgttatggcgagtagaaagctggttcgagatttactgatcacaaagcagcctcttctccagcaattggtgcaccaacggagagtgggcgcaagactaggtcttcttcagggaaatgggtttgcgagtcatcgacggtttagtgttttcagtgagttctcgaagaagattagaggagaagctgatagcaatcctgaatttcaaaagacagtgaaggagttcaaggaaagagcagaggagttgcaaggtgttaaagaggacttgaaagttagaacgaaacaaactactgagaagttgtataaacaaggtcaaggcgtctggacggaggctgaatctgtggccaaaaaggtctcttcaagtgtgaaagacaagttctcagcagctacagaagaggtcaaggagtcattcaagctcggtaaggaggagagtgcagagtcagcaagttcatcaggcacaggaaccactgaaggagaaaaacagcagcagcaatctggttctacggaggagcaagatacattttttggaaaattcaagtccagcatttcttcaccaaaactatctgaggcgtttcacaagcctcttgactttgcaaagaagggacttgacattgtaaaggatgaattgcgtggaaacccatctaaaaggaagcacctggagtatacacctccgccgccatttacaggtgagagaagtacgagaacggagatggtaattatgccaacaaaacagtctaagtggcaaaaaaagtgggaatcattaagagaaaagatgcaaggctatcctgtatttaaacgtctaagcgggatgagtgagccagttgtcaacaagagccaagagattgcagaagatgtgagggaaaagtgggaaaccagtgataatccgattgttcacaagattcaggacatgaatgagaggatctttgaggaaacaggttctgcatcgacttacaaggagatccgccgccgagatccatcattctccttgccggactttgttgcagaaattcaggaagccatcagaccggtcttgaatgcatatagtaagggagatgctaagaccttgaagaagtattgcagcaaggaattgattgaacggtgtacggcagagcacagagctttcacgagtcaaggttattttttcgatcacaagcttctgcatgtatctgaagttgatattcaagagacaaagatgatgggaactactccagtaatcatcgtcaggttccaaacgcaagaaatcttctgcgtccgtgatcagaatggaaaaatcaaagaaggaggccaggacacaatacacacagtgtactacgactgggctatgcaacaagtggatgcagctgagttaggggaagatgcgatttatcccatttggaggctcagagagatgttgagagcgggtgttcaagctctcatttaattcttcatcatcttttaacttataataagctaagccctctctctttgcaatgtaccattatttactcaaaatcttgttcactcgagattttttttttttcgttttcttctctctggaaggagtgggttcccatgtttcaggggaataagttttgacaaatatataaatacatctcaagtctttttcaagtttagcgaagtttgttgttttgtttgtatcccttaaagggtaatgactcctttcgttagaaaataagagaactagatttggt

SEQ ID NO: 11098 - protein, 469 aa, Arabidopsis thaliana
MASRKLVRDLLITKQPLLQQLVHQRRVGARLGLLQGNGFASHRRFSVFSEFSKKIRGEADSNPEFQKTVKEFKERAEELQGVKEDLKVRTKQTTEKLYKQGQGVWTEAESVAKKVSSSVKDKFSAATEEVKESFKLGKEESAESASSSGTGTTEGEKQQQQSGSTEEQDTFFGKFKSSISSPKLSEAFHKPLDFAKKGLDIVKDELRGNPSKRKHLEYTPPPPFTGERSTRTEMVIMPTKQSKWQKKWESLREKMQGYPVFKRLSGMSEPVVNKSQEIAEDVREKWETSDNPIVHKIQDMNERIFEETGSASTYKEIRRRDPSFSLPDFVAEIQEAIRPVLNAYSKGDAKTLKKYCSKELIERCTAEHRAFTSQGYFFDHKLLHVSEVDIQETKMMGTTPVIIVRFQTQEIFCVRDQNGKIKEGGQDTIHTVYYDWAMQQVDAAELGEDAIYPIWRLREMLRAGVQALI

SEQ ID NO: 11099 - protein, 236 aa, Arabidopsis thaliana
MVIMPTKQSKWQKKWESLREKMQGYPVFKRLSGMSEPVVNKSQEIAEDVREKWETSDNPIVHKIQDMNERIFEETGSASTYKEIRRRDPSFSLPDFVAEIQEAIRPVLNAYSKGDAKTLKKYCSKELIERCTAEHRAFTSQGYFFDHKLLHVSEVDIQETKMMGTTPVIIVRFQTQEIFCVRDQNGKIKEGGQDTIHTVYYDWAMQQVDAAELGEDAIYPIWRLREMLRAGVQALI

SEQ ID NO: 11100 - DNA, 2205 bp, Arabidopsis thaliana
gatagattgaagcgtatactctaatttgaccaatctagggtttctagtcacttgaagcttctcttaaaaaacctgtctcactcctcgtcaacctcttcctctcccgctgtcgccaagattgaatcttttttcagttgtggcttcaccggataataaggaattcagtaagagataagttcatcctgacaacatggagaccaagaatgagaattctgatgtttcacgggcagaggagtttaaaagtcaggccaacgaagcttttaaaggtcacaaatactccagtgctattgatctatatacaaaagctattgaactcaacagcaacaacgctgtgtattgggcaaatcgtgcatttgctcacacaaaactggaggaatatggcagtgcaatacaggatgcatcgaaggccattgaagttgattcaagatactataagggctattacaggcgtggtgctgcgtatcttgccatgggaaaatttaaggatgccttgaaggacttccaacaggtaaaaaggctttctcctaatgaccctgatgccacaagaaagctaaaggaatgtgagaaagcagtgatgaaactcaaatttgaagaagcaatctctgtgccagtatctgaaaggcgttcagtagctgagtccattgacttccatacaatagggaacaaacccagatcatcatccatgcccaccaaaacggctttagcagcagttgttgcagcagtaatggtggtggcggtccggggatttgccacaactgagatactcatggtgatggtttcggtggtattagggacattttggtggggtagcttcagtgaggttgagccacaatattctggtgctagaattgagggagaggaagttaccttagattttgtgaaaacgatgatggaggattttaagaaccaaaaaacattgcataaacggtatgcctatcaaatcgtcttacagactaggcaaatcttgctagcactgccttctcttgttgatataagtgttccacatggcaaacatatcactgtttgcggtgacgttcatggtcagttctacgatcttctcaatatctttgagcttaatggcctcccttcggaggagaacccatacctatttaatggcgactttgtggacagaggctcattctccgttgagatcatcctcactttgtttgctttcaagtgcatgtgcccatcatccatatatctagccagaggaaaccatgaaagcaagagcatgaacaaaatttatggttttgagggtgaggttcggtccaagttgagtgaaaaattcgtggatctctttgctgaagttttctgttacctcccgttggctcatgttataaatgggaaggtcttcgtggtacatggaggtcttttcagtgttgacggcgtgaaactctcagacatcagagccattgacagattctgtgagccaccagaggaaggactaatgtgtgaactattgtggagtgatcctcaacctctccctggaagaggcccaagcaagcgaggagttggtctatcatttggtggagatgtgacaaagaggtttttgcaagataacaatttagatttgttggtccggtcacatgaagtaaaagatgaaggttatgaggttgaacatgacggtaaactcataactgtcttctctgcgccaaattactgtgatcagatgggtaataagggagccttcattcgttttgaagctcctgatatgaagccaaacattgttacattctcagcagtgcctcatccggatgtgaagcctatggcatatgcaaacaactttctcaggatgttcaactaaccagcaaaaagcttcttctactcaaaatgctattctaaagactcaagaccagaagtggttcagaaacataatgatataagtttttttttccctttatcttctgcagttttttcatgttgttccagaaaagggaggccatgataattaaaggtacagtatccggatttgatcgttttttttcttcttccttcttttctgataaagattttcactcttcctttaagcttatccagcaacttttgtcccttttgtcttatgttgtaagagggggtaatgtatcattcttattttagatgaaaatcttgtgattactcaacaaaagagtgaccaaatgaccccccaaaactttgtacttaaaatggtttcttgaatcaaaaatcaaaaggtgtttctttaaagcc

SEQ ID NO: 11101 - protein, 537 aa, Arabidopsis thaliana
METKNENSDVSRAEEFKSQANEAFKGHKYSSAIDLYTKAIELNSNNAVYWANRAFAHTKLEEYGSAIQDASKAIEVDSRYYKGYYRRGAAYLAMGKFKDALKDFQQVKRLSPNDPDATRKLKECEKAVMKLKFEEAISVPVSERRSVAESIDFHTIGNKPRSSSMPTKTALAAVVAAVMVVAVRGFATTEILMVMVSVVLGTFWWGSFSEVEPQYSGARIEGEEVTLDFVKTMMEDFKNQKTLHKRYAYQIVLQTRQILLALPSLVDISVPHGKHITVCGDVHGQFYDLLNIFELNGLPSEENPYLFNGDFVDRGSFSVEIILTLFAFKCMCPSSIYLARGNHESKSMNKIYGFEGEVRSKLSEKFVDLFAEVFCYLPLAHVINGKVFVVHGGLFSVDGVKLSDIRAIDRFCEPPEEGLMCELLWSDPQPLPGRGPSKRGVGLSFGGDVTKRFLQDNNLDLLVRSHEVKDEGYEVEHDGKLITVFSAPNYCDQMGNKGAFIRFEAPDMKPNIVTFSAVPHPDVKPMAYANNFLRMFN

SEQ ID NO: 11102 - protein, 444 aa, Arabidopsis thaliana
MGKFKDALKDFQQVKRLSPNDPDATRKLKECEKAVMKLKFEEAISVPVSERRSVAESIDFHTIGNKPRSSSMPTKTALAAVVAAVMVVAVRGFATTEILMVMVSVVLGTFWWGSFSEVEPQYSGARIEGEEVTLDFVKTMMEDFKNQKTLHKRYAYQIVLQTRQILLALPSLVDISVPHGKHITVCGDVHGQFYDLLNIFELNGLPSEENPYLFNGDFVDRGSFSVEIILTLFAFKCMCPSSIYLARGNHESKSMNKIYGFEGEVRSKLSEKFVDLFAEVFCYLPLAHVINGKVFVVHGGLFSVDGVKLSDIRAIDRFCEPPEEGLMCELLWSDPQPLPGRGPSKRGVGLSFGGDVTKRFLQDNNLDLLVRSHEVKDEGYEVEHDGKLITVFSAPNYCDQMGNKGAFIRFEAPDMKPNIVTFSAVPHPDVKPMAYANNFLRMFN

SEQ ID NO: 11103 - protein, 409 aa, Arabidopsis thaliana
MKLKFEEAISVPVSERRSVAESIDFHTIGNKPRSSSMPTKTALAAVVAAVMVVAVRGFATTEILMVMVSVVLGTFWWGSFSEVEPQYSGARIEGEEVTLDFVKTMMEDFKNQKTLHKRYAYQIVLQTRQILLALPSLVDISVPHGKHITVCGDVHGQFYDLLNIFELNGLPSEENPYLFNGDFVDRGSFSVEIILTLFAFKCMCPSSIYLARGNHESKSMNKIYGFEGEVRSKLSEKFVDLFAEVFCYLPLAHVINGKVFVVHGGLFSVDGVKLSDIRAIDRFCEPPEEGLMCELLWSDPQPLPGRGPSKRGVGLSFGGDVTKRFLQDNNLDLLVRSHEVKDEGYEVEHDGKLITVFSAPNYCDQMGNKGAFIRFEAPDMKPNIVTFSAVPHPDVKPMAYANNFLRMFN

SEQ ID NO: 11104 - DNA, 1657 bp, Arabidopsis thaliana
gagaagagcatttagaaaacaaaagcggaataagaaacaagattgaagaaagaagtcggagaagacagtagaagaaactgatacgaggagaacttactctcaactttaatggcagacgctggagataatcagagaagaagcgatgaaaaagagtcgatatcaactgaagaaacgaaggagaatgaagacttgggatctggaagaaacgacacaggtcatcatgtatacaacgagggacacgaagaggtactagagtatctgaaacaagagagactgaaagatgctgatatgcagaggaaaaggcatgaaacagagtcgaaatccattgagggcacaactcctgatattaggctgagtgattcagggaaagggtctgatgagagaactgataaaatacagaaagcagactcagtttacaaacgctctaacgctgacacgcgagtgagtctaccacaacagagacgactgaaagatgtggtggaggcgcatagggtacgccgtgaaacagagtcaagattatggcaccaagagagggtaaaacaactaacttcttacacagtatcttttgtttgatttacgtgttcctttgattttgattctcaggatagatctctggtttggggaggaagtgaacccaggatgagatttgatgaaagtactcagggttggagagatagtgactatgaatccaaatggaggtttcatgagagaactccggattgggattggagagatagtgaatccagaatgagatctcatgaaagaactcaggataggagagaaagtgaatcccaaggggtatttgatgagagaacagagaggagacaagaaccagtgcgatggcccggtgaagagtgttggtgtctgcggtgtcgaaacggaggaagttgccgttacaatcatcctactcaacttccacaggagcttccggtgaggaatcgtttgcagatttgcaggtattttctgaggggatattgtaagttcggctcagtttgtggatttcaacacataagggacagggatgttgcagaacctatgtatgagaattggagttttgatgtgagaactccaattctcattagaggttctatcctctgcttttcaagttctctgcggcaacagagattacaggggatgcgagagaatcagaacgtggattctcgaatgcatgatccaagacgccatgatacagagttgagactcgaacgagagaagatggtaaacagagaacttgaaaagcagaggatagaacctctaatcggtccactagtgaggcgatacatgcaagcaaagagagataaagaagttgaacagagagagagagctagcattgagagccagaggatagtggctcaagagaatctgcgacaacagagattgcaggggatgcgagagaatcagaacgtggatgctcatgatcaagagaaaactcaggaactcggtttcaaaggaaaagagggagatggagtttaagaggaaacggagttacgagaccaccaaagagaactctcaagatgatttcttttaccgcaagaaactgatgtgtttttcctttgaacgcaaataataagttcattttgataaactgatcgtttcggaatcaattgtgttattgattgattaaacgaatgatgaaacttttaatgcaaaatattcg

SEQ ID NO: 11105 - protein, 277 aa, Arabidopsis thaliana
MRFDESTQGWRDSDYESKWRFHERTPDWDWRDSESRMRSHERTQDRRESESQGVFDERTERRQEPVRWPGEECWCLRCRNGGSCRYNHPTQLPQELPVRNRLQICRYFLRGYCKFGSVCGFQHIRDRDVAEPMYENWSFDVRTPILIRGSILCFSSSLRQQRLQGMRENQNVDSRMHDPRRHDTELRLEREKMVNRELEKQRIEPLIGPLVRRYMQAKRDKEVEQRERASIESQRIVAQENLRQQRLQGMRENQNVDAHDQEKTQELGFKGKEGDGV

SEQ ID NO: 11106 - protein, 241 aa, Arabidopsis thaliana
MRSHERTQDRRESESQGVFDERTERRQEPVRWPGEECWCLRCRNGGSCRYNHPTQLPQELPVRNRLQICRYFLRGYCKFGSVCGFQHIRDRDVAEPMYENWSFDVRTPILIRGSILCFSSSLRQQRLQGMRENQNVDSRMHDPRRHDTELRLEREKMVNRELEKQRIEPLIGPLVRRYMQAKRDKEVEQRERASIESQRIVAQENLRQQRLQGMRENQNVDAHDQEKTQELGFKGKEGDGV

SEQ ID NO: 11107 - protein, 154 aa, Arabidopsis thaliana
MADAGDNQRRSDEKESISTEETKENEDLGSGRNDTGHHVYNEGHEEVLEYLKQERLKDADMQRKRHETESKSIEGTTPDIRLSDSGKGSDERTDKIQKADSVYKRSNADTRVSLPQQRRLKDVVEAHRVRRETESRLWHQERVKQLTSYTVSFV

SEQ ID NO: 11108 - DNA, 1760 bp, Arabidopsis thaliana
tccttgcgttctttgctttgtgctcagacaaaaccaatggctttgtctcaaggaatgcaaattcactcttacattatcaagtggggtttcctggcagatcttacggtttgcaactctctgcttaccatgtacaccttctgctcagacttgtattgttgttttaatttatttgaagatttcagaaacaacgcagattctgtttcttggaatactattctgacggcttgtttgcaacacgaacagccagtagagatgttgagattgtttaagctgatgcttgtgtctgaatgtgagccagatcacataactatgggtaatctgttgcggggttgtgtggaaatctcatctctaaagttgggaagccaagtccattgctatagtttgaaaaccgggttggcgcctgagcaatttataaaaaatggactgattgatatgtatgccaagtgtggatcactggggcaagcgagaaggatttttgattcaatggataacagagatgtagtttcgtggagcaccttgatagttggatatgcacagtctggatttggagaggaagctctcatattgttcaaggaaatgaaaagtgcgggcatagagccaaatcatgtaacttttgtcggtgttcttactgcctgtagtcatgttgggctggtggaagaaggcttgaaactgtatgcgaccatgcaaactgaacacgggatttcaccaacaaaagagcactgctcttgcgtggtggacttactggctcgtgctggccgtttaaatgaagctgagagttttatcgatgaaatgaagttggaacctgatgttgtcgtgtggaagactctactgtctgcatgtaaaacccaaggaaatgttcatctcgcccaaaaggctgctgaaaatattctgaaaatcgatcctttcaactctacagctcatgtattgctctgcagcatgcatgcttcttctggaaattgggaaaatgctgcattgttgaggagctcaatgaaaaagcatgatgttaaaaaaattccaggacagagctggatcgaagttgaggacaaaattcatatattctttgctgaggatatttttcatccagagagggacgatatatatacagtcctgcacaacatctggtcgcagatgctagatgagtgtaatccgcaacacaagaaaagactccagtttatccatgaaaccggataaacaagcatttaagttccatctgagagaagcacagaaaaatgccattgtggctactctatatcttgccttttccttttctgcagtctgttgtcatgagattgacgcagcgtacatagttgccagcgtgtctattaaataaggcatttgatgaggatgaacaggttaccacattgggttgctacagacaagcgggatgggcaacaaatgcagtgctatacaaactacgaaaagaggatacatctcaacttatctgatgagtacaacaaatttgagttaagatgatttgaagaaggccatgaagcaaaactatctgctgggtatgaacatgtaaaagctccagactccttgagtctcgtagaagtgacgacgcaacttctttcttcttatatgtctagaaatggatcaaacactggactaagaatccggaaatcgtatcgcaaaacgaatcaaaatgatgaaagttttagtctcttatacatctgtgattattgagctaataaaacaacttgatacgaaacaatcatgggacgtcaatgatagtttagttgatggatctgtttgtaaaaatc

SEQ ID NO: 11109 - protein, 396 aa, Arabidopsis thaliana
SLRSLLCAQTKPMALSQGMQIHSYIIKWGFLADLTVCNSLLTMYTFCSDLYCCFNLFEDFRNNADSVSWNTILTACLQHEQPVEMLRLFKLMLVSECEPDHITMGNLLRGCVEISSLKLGSQVHCYSLKTGLAPEQFIKNGLIDMYAKCGSLGQARRIFDSMDNRDVVSWSTLIVGYAQSGFGEEALILFKEMKSAGIEPNHVTFVGVLTACSHVGLVEEGLKLYATMQTEHGISPTKEHCSCVVDLLARAGRLNEAESFIDEMKLEPDVVVWKTLLSACKTQGNVHLAQKAAENILKIDPFNSTAHVLLCSMHASSGNWENAALLRSSMKKHDVKKIPGQSWIEVEDKIHIFFAEDIFHPERDDIYTVLHNIWSQMLDECNPQHKKRLQFIHETG

SEQ ID NO: 11110 - protein, 384 aa, Arabidopsis thaliana
MALSQGMQIHSYIIKWGFLADLTVCNSLLTMYTFCSDLYCCFNLFEDFRNNADSVSWNTILTACLQHEQPVEMLRLFKLMLVSECEPDHITMGNLLRGCVEISSLKLGSQVHCYSLKTGLAPEQFIKNGLIDMYAKCGSLGQARRIFDSMDNRDVVSWSTLIVGYAQSGFGEEALILFKEMKSAGIEPNHVTFVGVLTACSHVGLVEEGLKLYATMQTEHGISPTKEHCSCVVDLLARAGRLNEAESFIDEMKLEPDVVVWKTLLSACKTQGNVHLAQKAAENILKIDPFNSTAHVLLCSMHASSGNWENAALLRSSMKKHDVKKIPGQSWIEVEDKIHIFFAEDIFHPERDDIYTVLHNIWSQMLDECNPQHKKRLQFIHETG

SEQ ID NO: 11111 - protein, 378 aa, Arabidopsis thaliana
MQIHSYIIKWGFLADLTVCNSLLTMYTFCSDLYCCFNLFEDFRNNADSVSWNTILTACLQHEQPVEMLRLFKLMLVSECEPDHITMGNLLRGCVEISSLKLGSQVHCYSLKTGLAPEQFIKNGLIDMYAKCGSLGQARRIFDSMDNRDVVSWSTLIVGYAQSGFGEEALILFKEMKSAGIEPNHVTFVGVLTACSHVGLVEEGLKLYATMQTEHGISPTKEHCSCVVDLLARAGRLNEAESFIDEMKLEPDVVVWKTLLSACKTQGNVHLAQKAAENILKIDPFNSTAHVLLCSMHASSGNWENAALLRSSMKKHDVKKIPGQSWIEVEDKIHIFFAEDIFHPERDDIYTVLHNIWSQMLDECNPQHKKRLQFIHETG

SEQ ID NO: 11112 - DNA, 1357 bp, Arabidopsis thaliana
aagagcagatcctcagctcgttgaagacttggagaagcatctttatgtaaatgccgctttagagcgtttggagcagagaaaattgtactggaatgagcataagctctctatttacagcaaagtgtgcacaacggctagaaatcagactcaatcattgtcacctcctgatgtttctcgagttggttatcaagcacccagctggggccatggagcgccagatagcggctccaatgatcaagataaatcaactgaagattcttcagcggataagtcagatggagaatctcaatcaagtttggaaaagggttgtgataatgatcttggtcatcctctagaagatcaagacgcaccgtcgtcttcctcatgcaatggaagtaaaggtttcctgtctcaccaaattgacaccaaagacctgaaggacaacgacgcgtacaacttttatcagtctgttgatggtcagcacattatccttcacactttgaatgtgaagtgccttctgcatcactatggaagctatgactttcttccaccaagattgagtggaaagatactggaaatggaaaccattacccaatcagaagcgataaggagacgctaccgctttttaagtcatttttctttatcaactacacttcagatatgtgagattgatatgaaggaatccttgcctcctgatgcatttgctccatttatacatgaaattaagaagcgtgagaagcagcggaaagaacgtgcttggaaggatcgaaaaaataaaatcaaagctgaagtagctgcagctgcagagcttgtaccattgatggccagttttgggcagtcgtcttctagtgatgactttcccccattttccttggatgactttgaagctctgggaaactctgccccaatatcatcaagccctccaaacattggagagagaagttccttctcacatgtgacaaggctcggtttcgcagctggtcacgactccccaaacctgaataacgagccaacaaacgttcaaagcagcagcagcagcagtgaagtctcaaacgcaaccacaggtgcaagaaacacaaacataacatccttcgcgagtgtagcttcaagaacaacaacaccaatggcaccaaccgtcaaagagcccggtaagagagggaagaaacagagccgagtacttctatcgacaactagtgtacgccgttactgaaaaggcctatggatttgtgtatgtataataatcttttcatctaagaaaaactgaataaagaaagaaccagagattatggtgagtgagtaagtgtaaaactcaaacttgggctttgtttctttttgcaacccatgtgactgataatgaaggtgtctctcattactactc

SEQ ID NO: 11113 - protein, 395 aa, Arabidopsis thaliana
RADPQLVEDLEKHLYVNAALERLEQRKLYWNEHKLSIYSKVCTTARNQTQSLSPPDVSRVGYQAPSWGHGAPDSGSNDQDKSTEDSSADKSDGESQSSLEKGCDNDLGHPLEDQDAPSSSSCNGSKGFLSHQIDTKDLKDNDAYNFYQSVDGQHIILHTLNVKCLLHHYGSYDFLPPRLSGKILEMETITQSEAIRRRYRFLSHFSLSTTLQICEIDMKESLPPDAFAPFIHEIKKREKQRKERAWKDRKNKIKAEVAAAAELVPLMASFGQSSSSDDFPPFSLDDFEALGNSAPISSSPPNIGERSSFSHVTRLGFAAGHDSPNLNNEPTNVQSSSSSSEVSNATTGARNTNITSFASVASRTTTPMAPTVKEPGKRGKKQSRVLLSTTSVRRY

SEQ ID NO: 11114 - protein, 210 aa, Arabidopsis thaliana
METITQSEAIRRRYRFLSHFSLSTTLQICEIDMKESLPPDAFAPFIHEIKKREKQRKERAWKDRKNKIKAEVAAAAELVPLMASFGQSSSSDDFPPFSLDDFEALGNSAPISSSPPNIGERSSFSHVTRLGFAAGHDSPNLNNEPTNVQSSSSSSEVSNATTGARNTNITSFASVASRTTTPMAPTVKEPGKRGKKQSRVLLSTTSVRRY

SEQ ID NO: 11115 - DNA, 2230 bp, Arabidopsis thaliana
gaacccttttcgcttcgccgttttgaaacctcagaaaagagaaaaacctctcaaaaaccctaatttgctttcttcttcttcgccgcgacgcctgactctctgtcgctcttctcttccgccaccgtctaactgattcacctcctgggcaagctgaagaaagttgtactttgaagcctgcttctccttcgattagtctgggaaagatgaatttggtgaatattaaagatgtattgacttctttcagtcctgcactagattatctcgctcttagcaccggagatggccgtatcaagatttgggatactgtcaagggtcaggtccaaacagagtttgctgatattgcatctacagaggagaccaacatatataccaaagttggaaaaggtcacctttcagtcgattatacttgcatgaaatggttgtctctggagaaaaagaagaagaggaaacttggaacttccgtattggtattaggaactggtggaggagatgttttagcacttgatgtggcttctggtcagctgaaatggagaataagtgactgtcatcccggtggtgttaatgctgtttcatcttcagcaaaggcatcttgcatatacagcggcggggcagatgggatggtttgtcagatcgatccccacagtggaaatctgatcagaaagttcaaagcttcaacaaaaacagtttcttctttatgtgtttcaccagatggaaaaatattagtcactgcatctgctcagttgaagacttttaactgctctgatctcaagaagatacagaagtttactggtcatcctggggttgtgcgttgtgtggcttttaccgaggatgggaagtatgtcctctcatccgcagtcggggaaagatatattgcagtttggaaaacagatggtgcaaagaagcagtcagctagctgtgttcttgccttagagcaccctcctgtcttcgtggatagttggggtgaaacaaatgaaaaagggttatacgttttagcaatttcagaaataggtgtctgttatttttggtatgggtcaaatgttgaggaactatgcaatgcaacgcctacaaaagtcgcattagcaactggagattcttccctcaaacctcacaagagctcattgcctttaatctttgctgccaaattacaaggcattttgaagcctggttctgcacatgcatttattgcatccggattgcttgtgaaaccttcattccagaaaatggtgttgcagtttggcactgacttggtgctgaatgcctctaaggatgggatccttctccctatcactcagtcagtttccaagtccagcaagaggcaaggcgtgcagaataaagttacaacattagaccgtgcacatgccgaggatgctttgctgccaatcgcaagagttgctgatctgcacgagaaaaagagtgtacaactacactcatctgataaggatacttatatggttgaccaaagtcatgctgatcatgtagaaacatttagcatggaggataagttgagatcgttagggatactgggaggtacagatgaacaaaaaaatctttcctatgcttcaataattgatggaactgatctcgaggcttatctaccaccaaagaagttaaagtctgctgttttgtcaatggaaccctccactgcattcaagactctagaagctttggctgctatgtggcagacaagggcttgtggtgggaggcatcttcttccatggatatacagcataatggtgaatcatagtcattacatcatgtcccaagaaccaaaaatccagcagcttcttaatacattggttaagattaccaagtcccgaggaacggctcttcaacagttactacagttatctgggcgcttacaacttgttacagctcagatcaataaagctgcaggaagtcaaacgcaaataacagcccatgatcaagagattgatgaaagtgaggatgaggaagaagatgtagaagaccatttctatggtgagaatgataatgaatccgatttaagcagtgacgatggaaaagataaagatgattccttgatggagatgtaagctaatgagcgaagcgtagagaaaggagcttggcctcttcttctcacgttttttttggtcttagtgattcctattatcttgtattagaatttgtatttttgatccaaagcgggaattttttcactcatttcttgtcttctatgcgttgcacggaattatatctgtgttcctttaaaaag

SEQ ID NO: 11116 - protein, 615 aa, Arabidopsis thaliana
MNLVNIKDVLTSFSPALDYLALSTGDGRIKIWDTVKGQVQTEFADIASTEETNIYTKVGKGHLSVDYTCMKWLSLEKKKKRKLGTSVLVLGTGGGDVLALDVASGQLKWRISDCHPGGVNAVSSSAKASCIYSGGADGMVCQIDPHSGNLIRKFKASTKTVSSLCVSPDGKILVTASAQLKTFNCSDLKKIQKFTGHPGVVRCVAFTEDGKYVLSSAVGERYIAVWKTDGAKKQSASCVLALEHPPVFVDSWGETNEKGLYVLAISEIGVCYFWYGSNVEELCNATPTKVALATGDSSLKPHKSSLPLIFAAKLQGILKPGSAHAFIASGLLVKPSFQKMVLQFGTDLVLNASKDGILLPITQSVSKSSKRQGVQNKVTTLDRAHAEDALLPIARVADLHEKKSVQLHSSDKDTYMVDQSHADHVETFSMEDKLRSLGILGGTDEQKNLSYASIIDGTDLEAYLPPKKLKSAVLSMEPSTAFKTLEALAAMWQTRACGGRHLLPWIYSIMVNHSHYIMSQEPKIQQLLNTLVKITKSRGTALQQLLQLSGRLQLVTAQINKAAGSQTQITAHDQEIDESEDEEEDVEDHFYGENDNESDLSSDDGKDKDDSLMEM

SEQ ID NO: 11117 - protein, 546 aa, Arabidopsis thaliana
MKWLSLEKKKKRKLGTSVLVLGTGGGDVLALDVASGQLKWRISDCHPGGVNAVSSSAKASCIYSGGADGMVCQIDPHSGNLIRKFKASTKTVSSLCVSPDGKILVTASAQLKTFNCSDLKKIQKFTGHPGVVRCVAFTEDGKYVLSSAVGERYIAVWKTDGAKKQSASCVLALEHPPVFVDSWGETNEKGLYVLAISEIGVCYFWYGSNVEELCNATPTKVALATGDSSLKPHKSSLPLIFAAKLQGILKPGSAHAFIASGLLVKPSFQKMVLQFGTDLVLNASKDGILLPITQSVSKSSKRQGVQNKVTTLDRAHAEDALLPIARVADLHEKKSVQLHSSDKDTYMVDQSHADHVETFSMEDKLRSLGILGGTDEQKNLSYASIIDGTDLEAYLPPKKLKSAVLSMEPSTAFKTLEALAAMWQTRACGGRHLLPWIYSIMVNHSHYIMSQEPKIQQLLNTLVKITKSRGTALQQLLQLSGRLQLVTAQINKAAGSQTQITAHDQEIDESEDEEEDVEDHFYGENDNESDLSSDDGKDKDDSLMEM

SEQ ID NO: 11118 - protein, 477 aa, Arabidopsis thaliana
MVCQIDPHSGNLIRKFKASTKTVSSLCVSPDGKILVTASAQLKTFNCSDLKKIQKFTGHPGVVRCVAFTEDGKYVLSSAVGERYIAVWKTDGAKKQSASCVLALEHPPVFVDSWGETNEKGLYVLAISEIGVCYFWYGSNVEELCNATPTKVALATGDSSLKPHKSSLPLIFAAKLQGILKPGSAHAFIASGLLVKPSFQKMVLQFGTDLVLNASKDGILLPITQSVSKSSKRQGVQNKVTTLDRAHAEDALLPIARVADLHEKKSVQLHSSDKDTYMVDQSHADHVETFSMEDKLRSLGILGGTDEQKNLSYASIIDGTDLEAYLPPKKLKSAVLSMEPSTAFKTLEALAAMWQTRACGGRHLLPWIYSIMVNHSHYIMSQEPKIQQLLNTLVKITKSRGTALQQLLQLSGRLQLVTAQINKAAGSQTQITAHDQEIDESEDEEEDVEDHFYGENDNESDLSSDDGKDKDDSLMEM

SEQ ID NO: 11119 - DNA, 2085 bp, Arabidopsis thaliana
ttctcctgttctaactgaggggtcgaggacaaagctcctcattgagttctccttcagtggggtttgatgcgaggtgctgccaaggtcatttcctcttgctgtgctccgcctctcgttcagataaagcggtcgggataagtttgtaaattgcttgtcaaatcaggacaagattctgaattaggggaacctaccgcatagtttgctcatcagacaggccgaaggacaatgtcatcgcctaacaattctgtcagcgcggcactgtcagaaacgacccccgtgtttcagttgagagtatggcaactgattgccattgctgtcgggatagtcatggcgatcctgctcgtcattgcgctttgcctttcgctccagaggaaaaagaagacagtgaaagggtttgacaacagttcgctggctgagatccctatcgtttctaaggaaatcaatgttgacagagttggtgctcagagtctacatgacagtgaagcgcccttcatgccagtgcgggataagtatacgcagaccaaaggtgcagggcagttgggagagagtagatccgtcgacgccgataccttcagccagttcagctcagtgtacaacgtagagaaggctgggagctcatactctgaagattacagtcacagcagctctggtccagctaggaaaggtagctcaccatatgcatattcagcatcaccgctggttggcctgcctgagttatcacatctaggctggggccactggtttaccttgagggacctggagtgtgcaacgaatcggtttgcaaagagtaatgttcttggggagggtggctatggagttgtctacaagggtcgtctggtaaatgggaccgagattgccgtgaagaagatccttaataatctggggcaggcagagaaggaatttagagttgaagttgaagccatcggccatgttcggcataagaatctggtccgccttctgggatactgcgtggaagggatacataggatgcttgtctatgaatatgtcaataatggcaacctagaacaatggcttcatggcatgaatcaacacggtgtccttagttgggaaaatcgtatgaaaattctccttggcactgcaaaagctctcgcgtaccttcatgaggccatagatcccaaagttgtacacagagatatcaagtcaagtaatatcttaattgacgatgaattcaacagcaaggtttctgattttgggttggctaaacttctgaattctgacaaaagtcatatcaatacaagagtgatgggaacatatgggtatgtagcacctgaatatgcaaacagtgggatgctaaatgaaaagagtgatatttacagtttcggagtggtgctgttagaatgtgcgaccgctagggatccagtcgattactctaagcctgcagatgaggtgaatctcatagagtggcttaaaatgatggtcaccagtaagagggcagaggaggtagtggatccaaacctcaatgttaagccaccaaaacgtgccctcaagcggacaatcctggttggtttcaagtgtgtcgatcctgacgctgacaagaggccaaagatgagtcacgttgtccagatgcttgaagcagttcagaatgcatatcatgaagatcaaagcaagctcagccaggtgggatcacagcagtcgctagaggagacctcaaacagcgctgatgcctgaacctcctattctgaacaagcacatcaaataggaccctgaatcatctgatagcaacattgatttgatcattgctcggcacttaatagagtgagcggtgatcggatttacagtttgggtttgcatatactggaggtggtggttaaatcaattagtagcaagttgtttctaaaaggttcatgtcttttacccttaggatatgtatagttttcctgtaggggagcatagaagcaccttcatctttatttgttgttcgagttacaaggagggactaacctcaggcatataactacagtcactggatttcgttacccatgtgtagtgactttttggaaagtcgttattaccctagagatatgaaaacatgaatttctgcaatgaagtactaccccgttctcg

SEQ ID NO: 11120 - protein, 487 aa, Arabidopsis thaliana
MSSPNNSVSAALSETTPVFQLRVWQLIAIAVGIVMAILLVIALCLSLQRKKKTVKGFDNSSLAEIPIVSKEINVDRVGAQSLHDSEAPFMPVRDKYTQTKGAGQLGESRSVDADTFSQFSSVYNVEKAGSSYSEDYSHSSSGPARKGSSPYAYSASPLVGLPELSHLGWGHWFTLRDLECATNRFAKSNVLGEGGYGVVYKGRLVNGTEIAVKKILNNLGQAEKEFRVEVEAIGHVRHKNLVRLLGYCVEGIHRMLVYEYVNNGNLEQWLHGMNQHGVLSWENRMKILLGTAKALAYLHEAIDPKVVHRDIKSSNILIDDEFNSKVSDFGLAKLLNSDKSHINTRVMGTYGYVAPEYANSGMLNEKSDIYSFGVVLLECATARDPVDYSKPADEVNLIEWLKMMVTSKRAEEVVDPNLNVKPPKRALKRTILVGFKCVDPDADKRPKMSHVVQMLEAVQNAYHEDQSKLSQVGSQQSLEETSNSADA

SEQ ID NO: 11121 - protein, 453 aa, Arabidopsis thaliana
MAILLVIALCLSLQRKKKTVKGFDNSSLAEIPIVSKEINVDRVGAQSLHDSEAPFMPVRDKYTQTKGAGQLGESRSVDADTFSQFSSVYNVEKAGSSYSEDYSHSSSGPARKGSSPYAYSASPLVGLPELSHLGWGHWFTLRDLECATNRFAKSNVLGEGGYGVVYKGRLVNGTEIAVKKILNNLGQAEKEFRVEVEAIGHVRHKNLVRLLGYCVEGIHRMLVYEYVNNGNLEQWLHGMNQHGVLSWENRMKILLGTAKALAYLHEAIDPKVVHRDIKSSNILIDDEFNSKVSDFGLAKLLNSDKSHINTRVMGTYGYVAPEYANSGMLNEKSDIYSFGVVLLECATARDPVDYSKPADEVNLIEWLKMMVTSKRAEEVVDPNLNVKPPKRALKRTILVGFKCVDPDADKRPKMSHVVQMLEAVQNAYHEDQSKLSQVGSQQSLEETSNSADA

SEQ ID NO: 11122 - protein, 398 aa, Arabidopsis thaliana
MPVRDKYTQTKGAGQLGESRSVDADTFSQFSSVYNVEKAGSSYSEDYSHSSSGPARKGSSPYAYSASPLVGLPELSHLGWGHWFTLRDLECATNRFAKSNVLGEGGYGVVYKGRLVNGTEIAVKKILNNLGQAEKEFRVEVEAIGHVRHKNLVRLLGYCVEGIHRMLVYEYVNNGNLEQWLHGMNQHGVLSWENRMKILLGTAKALAYLHEAIDPKVVHRDIKSSNILIDDEFNSKVSDFGLAKLLNSDKSHINTRVMGTYGYVAPEYANSGMLNEKSDIYSFGVVLLECATARDPVDYSKPADEVNLIEWLKMMVTSKRAEEVVDPNLNVKPPKRALKRTILVGFKCVDPDADKRPKMSHVVQMLEAVQNAYHEDQSKLSQVGSQQSLEETSNSADA

SEQ ID NO: 11123 - DNA, 2335 bp, Arabidopsis thaliana
tcttccttattctttcttcaatgtcgttgaacatatctgacgatacttgaatctcactctttcttctcttctattctctgtttttagtcacaatttcatctatatctcctctcacttttgtttttgagaattttcgatcccaagcttttctcagagaattttgactggaaatttcgtaattagggtttttgatttgaggcattattctacgatgaaagcttcgattgagaagttaaggagattaacatcgcattcacataaggttgatgtgaaggagaaaggagatgtcatggctacaacacaaatcgacgaactcgatcgagccgggaaggatatgcaagatatgagagaatgttacgatagactactcgctgcagctgctgccaccgcaaatagcgcatatgagttctctgagtcgttgggagaaatgggttcttgtttggagcaaatcgcgcctcataacgacgaagagagcagtagaatcttgtttatgttgggtaaagtacagagtgagcttcaaagacttcttgacacatatcgtagtcatatattcgaaactattacatccccgtccgaggcgcttctcaaggacctcagatatgttgaggatatgaagcaacaatgcgacgggaagaggaatgtgtatgagatgtcgctagtgaaagagaaaggaaggcctaaaagcagtaaaggagagagacatattcctcctgagtctcgacctgcttacagtgagtttcatgatgaagccacaatgtgcatttttcgattgaaatcgcttaaagaaggacaagctcgtagtctcctaatacaagcagtccgtcaccacactgctcagatgcgtttgtttcacactggactgaaatcgctcgaggcagttgagcgtcatgtaaaagttgctgtagagaaacaacacattgactgtgatctatctgttcatgggaacgagatggaagctagcgaggatgatgatgatgatggccgatacatgaatagagaaggagaactcagttttgattacagaacaactgagcagaaggtagaagcttcttctctctctacaccatgggccacaaagatggatgatacagacctctcgtttcctcgcccttctacaacaagaccagcagcggtaaatgctgatcatagagaagaatatccagtttcaacccgcgataagtatttgagcagccattcagctccgttgttcccagaaaagaaacctgatgtatcagagaggttgagacaggcgaatccatcttttaatgcctacgtattaccaacaccaaatgattcaaggtactcaaaaccggtttcccaagcattaaatccgaggccaacaaaccacagtgccggaaacatatggcattcatctccgttagagccgataaaaagcgggaaagatgggaaagacgccgaaagcaacagcttctacggccgcctccctcggccttctacaacagacacgcatcatcatcagcagcaagcagcaggaagacatgcattttctggacctctcagaccgtcctcaacaaaacccatcaccatggctgacagttattcaggcgctttttgtcctctgccgactcctccagtactccaatctcaccctcattcatcatcttctccaagagactcccctaccgcttcacctcctcctgcttcttccccaaggctcaacgagcttcacgagcttccaagacccccaggccactttgcaccacctccaagacgagccaagtcccctggtctggttggtcactcagcgcctctaaccgcatggaaccaagaaagaagcactgtcactgttgctgttccgtccgccaccaacattgtggcctcgccgcttccggttcctccgttggttgtccctagaagctactctataccttcaagaaaccagagagctgtttctcaacggctggtcgaaaggagagatgatatagtagcatccccaccgttaacaccaatgagcctgtctaggccacttcctcaagccacaggagttgctcagaccagtcaaatcagaggagtaggaaagctgatcgaacgatgaggctgccgcgtctgcgtcacgtttgaccaaaacgctgattgtacaaattcagagatcttcacaagtgaatatagaagtcagtatatgtattattctttagttggttaatctccttttttttttcccattgtaaatctgaagcctctgctctttattcccttttcattttcaatcccctcaatttttcttctttcatccccttctatatccgaaacctcaatataaaattttcaaaaatgcaaaagtatataacgtatgaaactaagtctatgtctgtcc

SEQ ID NO: 11124 - protein, 614 aa, Arabidopsis thaliana
MKASIEKLRRLTSHSHKVDVKEKGDVMATTQIDELDRAGKDMQDMRECYDRLLAAAAATANSAYEFSESLGEMGSCLEQIAPHNDEESSRILFMLGKVQSELQRLLDTYRSHIFETITSPSEALLKDLRYVEDMKQQCDGKRNVYEMSLVKEKGRPKSSKGERHIPPESRPAYSEFHDEATMCIFRLKSLKEGQARSLLIQAVRHHTAQMRLFHTGLKSLEAVERHVKVAVEKQHIDCDLSVHGNEMEASEDDDDDGRYMNREGELSFDYRTTEQKVEASSLSTPWATKMDDTDLSFPRPSTTRPAAVNADHREEYPVSTRDKYLSSHSAPLFPEKKPDVSERLRQANPSFNAYVLPTPNDSRYSKPVSQALNPRPTNHSAGNIWHSSPLEPIKSGKDGKDAESNSFYGRLPRPSTTDTHHHQQQAAGRHAFSGPLRPSSTKPITMADSYSGAFCPLPTPPVLQSHPHSSSSPRDSPTASPPPASSPRLNELHELPRPPGHFAPPPRRAKSPGLVGHSAPLTAWNQERSTVTVAVPSATNIVASPLPVPPLVVPRSYSIPSRNQRAVSQRLVERRDDIVASPPLTPMSLSRPLPQATGVAQTSQIRGVGKLIER

SEQ ID NO: 11125 - protein, 588 aa, Arabidopsis thaliana
MATTQIDELDRAGKDMQDMRECYDRLLAAAAATANSAYEFSESLGEMGSCLEQIAPHNDEESSRILFMLGKVQSELQRLLDTYRSHIFETITSPSEALLKDLRYVEDMKQQCDGKRNVYEMSLVKEKGRPKSSKGERHIPPESRPAYSEFHDEATMCIFRLKSLKEGQARSLLIQAVRHHTAQMRLFHTGLKSLEAVERHVKVAVEKQHIDCDLSVHGNEMEASEDDDDDGRYMNREGELSFDYRTTEQKVEASSLSTPWATKMDDTDLSFPRPSTTRPAAVNADHREEYPVSTRDKYLSSHSAPLFPEKKPDVSERLRQANPSFNAYVLPTPNDSRYSKPVSQALNPRPTNHSAGNIWHSSPLEPIKSGKDGKDAESNSFYGRLPRPSTTDTHHHQQQAAGRHAFSGPLRPSSTKPITMADSYSGAFCPLPTPPVLQSHPHSSSSPRDSPTASPPPASSPRLNELHELPRPPGHFAPPPRRAKSPGLVGHSAPLTAWNQERSTVTVAVPSATNIVASPLPVPPLVVPRSYSIPSRNQRAVSQRLVERRDDIVASPPLTPMSLSRPLPQATGVAQTSQIRGVGKLIER

SEQ ID NO: 11126 - protein, 573 aa, Arabidopsis thaliana
MQDMRECYDRLLAAAAATANSAYEFSESLGEMGSCLEQIAPHNDEESSRILFMLGKVQSELQRLLDTYRSHIFETITSPSEALLKDLRYVEDMKQQCDGKRNVYEMSLVKEKGRPKSSKGERHIPPESRPAYSEFHDEATMCIFRLKSLKEGQARSLLIQAVRHHTAQMRLFHTGLKSLEAVERHVKVAVEKQHIDCDLSVHGNEMEASEDDDDDGRYMNREGELSFDYRTTEQKVEASSLSTPWATKMDDTDLSFPRPSTTRPAAVNADHREEYPVSTRDKYLSSHSAPLFPEKKPDVSERLRQANPSFNAYVLPTPNDSRYSKPVSQALNPRPTNHSAGNIWHSSPLEPIKSGKDGKDAESNSFYGRLPRPSTTDTHHHQQQAAGRHAFSGPLRPSSTKPITMADSYSGAFCPLPTPPVLQSHPHSSSSPRDSPTASPPPASSPRLNELHELPRPPGHFAPPPRRAKSPGLVGHSAPLTAWNQERSTVTVAVPSATNIVASPLPVPPLVVPRSYSIPSRNQRAVSQRLVERRDDIVASPPLTPMSLSRPLPQATGVAQTSQIRGVGKLIER

SEQ ID NO: 11127 - DNA, 2072 bp, Arabidopsis thaliana
gagcaaagcgtcttccatttctcagaagagtgtgtgacaacagcggcaaccgacagacatgtcttcgccgacatcgccttggtttgcggatctcttcacagatgacagggtgaggaccctatcgcaccaggtctccacacttggggacagggtgtgggaactggagcacaaaattacccagctgatgggcgagaaggccaagctggagaagcaactggaggaggcaaaggcgatctcaagccacaaggaagaggtggggagaagcttgaaggctgaaaatgataagcttcagtcggaggttttggttgcggaggaaaagtgtagcaagtctgcagcggaggttgagaggctgacgaaggaattaggcgcgctggcggaggcaaaggaggcagctgccaaggaattcaacgacgagagagagaaaatcacgctagaatcggaggatctcaagatgaggctggaggaaatgctggccatcaaggatttgacagagagcgagaatgacaagcttcggtccgaggctttgatcgcagctgaaaagcaaaacatgtatgaagcagagattgagaggctcaagaaggaactgagtgggttgttggaggcgaaggaggcggctgccaaggctttcgacgtacaaaaagcagaaatcaccaatgaattagaggaactacagaggaagctgaaggaaatcgaagctaataaggatttagtggagggagaaaacagtaagcttcagtctgagattctcacagcacaggagaaatatagacagtctgaagcagaggttaagtgcattaaacaagtaatgtgttcagtggtggaggcgaaggaggcagctacaagggcatctgaagctgagaaggcagaaatcatggaggaaatggacaaccttaagaggacaatcgaggagatcaaggccaacagggatttggtagagagtcagaaccaggagcttcggtcaaagatttcgagtgcagagcaagagcgtagcctatttgaaggagagattaagagcgtcaggatggaattgggggcagtagaggaggccaagcagatccttacgagggagttcgatgctgagaaggcagagatcctgaaggaactggatgaccttgagaagaagctagaggaattgcagaccaacaagggtttgctggaggctgaaaacgacaagcttcagctggaggttttgaccgcacagcacaaacaaagcatgtccgaagcagaggctgagagccttaagatggaactgggagcattggtggaggcaaaggaggcggctacaaaagcatttggtgccgagaaagcaaagaccacgaaggaactggaggatcttaagaggaaggtggaggaaatccaaaccaagaaggatctggtggagggcgaaaaggataagctccgtttggagattttaatagcggagcagaggcatgccatggctgaattagaggttaagcgcctcaagatggacttggctgcatcggcagaggcgagggagacagttgtgaggtcatgtgacgctgagaaggccaagttcatggcggaaatagagaacctcaggaggaagatagaggaaatccacgccagcaaggaagcggccgagaaagcagcgcgcaacaaagatgcagaggctgacaggctgaaggatgagctggcgaggatccggctctctgtgtcacagctgcaagcgtcctgcgacgaacttgatgccaagcagtcgcgcctgaacgacgagaagaactctgtccagaaagcactagtgtccgagaaggtcgaaggtaacaagctcaagttaaaaatcgaggaactcgagaatcacattgctggcaaggacggtgagaaagggaaactgaaggcggcgttggaggaaaagatgactgagatcaatgctctcagcaaagacaacgcgatgctacatcgcacaattctcgaggcacaagagaagaataaaggtagcattttatcgttcttgtcaccgtgcggctccaagtaacttggttgtaatgtgttgcattactaatgcaatggtgaaggtaccatgcaatgaaataaaaatttcagtttgctctgtg

SEQ ID NO: 11128 - protein, 644 aa, Arabidopsis thaliana
MSSPTSPWFADLFTDDRVRTLSHQVSTLGDRVWELEHKITQLMGEKAKLEKQLEEAKAISSHKEEVGRSLKAENDKLQSEVLVAEEKCSKSAAEVERLTKELGALAEAKEAAAKEFNDEREKITLESEDLKMRLEEMLAIKDLTESENDKLRSEALIAAEKQNMYEAEIERLKKELSGLLEAKEAAAKAFDVQKAEITNELEELQRKLKEIEANKDLVEGENSKLQSEILTAQEKYRQSEAEVKCIKQVMCSVVEAKEAATRASEAEKAEIMEEMDNLKRTIEEIKANRDLVESQNQELRSKISSAEQERSLFEGEIKSVRMELGAVEEAKQILTREFDAEKAEILKELDDLEKKLEELQTNKGLLEAENDKLQLEVLTAQHKQSMSEAEAESLKMELGALVEAKEAATKAFGAEKAKTTKELEDLKRKVEEIQTKKDLVEGEKDKLRLEILIAEQRHAMAELEVKRLKMDLAASAEARETVVRSCDAEKAKFMAEIENLRRKIEEIHASKEAAEKAARNKDAEADRLKDELARIRLSVSQLQASCDELDAKQSRLNDEKNSVQKALVSEKVEGNKLKLKIEELENHIAGKDGEKGKLKAALEEKMTEINALSKDNAMLHRTILEAQEKNKGSILSFLSPCGSK

SEQ ID NO: 11129 - protein, 602 aa, Arabidopsis thaliana
MGEKAKLEKQLEEAKAISSHKEEVGRSLKAENDKLQSEVLVAEEKCSKSAAEVERLTKELGALAEAKEAAAKEFNDEREKITLESEDLKMRLEEMLAIKDLTESENDKLRSEALIAAEKQNMYEAEIERLKKELSGLLEAKEAAAKAFDVQKAEITNELEELQRKLKEIEANKDLVEGENSKLQSEILTAQEKYRQSEAEVKCIKQVMCSVVEAKEAATRASEAEKAEIMEEMDNLKRTIEEIKANRDLVESQNQELRSKISSAEQERSLFEGEIKSVRMELGAVEEAKQILTREFDAEKAEILKELDDLEKKLEELQTNKGLLEAENDKLQLEVLTAQHKQSMSEAEAESLKMELGALVEAKEAATKAFGAEKAKTTKELEDLKRKVEEIQTKKDLVEGEKDKLRLEILIAEQRHAMAELEVKRLKMDLAASAEARETVVRSCDAEKAKFMAEIENLRRKIEEIHASKEAAEKAARNKDAEADRLKDELARIRLSVSQLQASCDELDAKQSRLNDEKNSVQKALVSEKVEGNKLKLKIEELENHIAGKDGEKGKLKAALEEKMTEINALSKDNAMLHRTILEAQEKNKGSILSFLSPCGSK

SEQ ID NO: 11130 - protein, 513 aa, Arabidopsis thaliana
MRLEEMLAIKDLTESENDKLRSEALIAAEKQNMYEAEIERLKKELSGLLEAKEAAAKAFDVQKAEITNELEELQRKLKEIEANKDLVEGENSKLQSEILTAQEKYRQSEAEVKCIKQVMCSVVEAKEAATRASEAEKAEIMEEMDNLKRTIEEIKANRDLVESQNQELRSKISSAEQERSLFEGEIKSVRMELGAVEEAKQILTREFDAEKAEILKELDDLEKKLEELQTNKGLLEAENDKLQLEVLTAQHKQSMSEAEAESLKMELGALVEAKEAATKAFGAEKAKTTKELEDLKRKVEEIQTKKDLVEGEKDKLRLEILIAEQRHAMAELEVKRLKMDLAASAEARETVVRSCDAEKAKFMAEIENLRRKIEEIHASKEAAEKAARNKDAEADRLKDELARIRLSVSQLQASCDELDAKQSRLNDEKNSVQKALVSEKVEGNKLKLKIEELENHIAGKDGEKGKLKAALEEKMTEINALSKDNAMLHRTILEAQEKNKGSILSFLSPCGSK

SEQ ID NO: 11131 - DNA, 2452 bp, Arabidopsis thaliana
gaatttccaacatgttttgtttatagaaattgaataaaatcaaacgcgccttcatcttcaagttaaaaatcaaatcttaattagtgaagacaaagaagaagaagacattattttaagtgagttctctctctgtcacactcacaaagctttatactttctggctactgcaagctcatcactgaaaagagcttaaaccagagagatctgataagagaaattttagagtctctctgcttcaacaagatctacatcgaccaggaaattagaaagaatcatgggttctaagcataacccaccagggaataacagatcgagaagtacactatctctactcgttgtggttggtttatgttgtttcttctatcttcttggagcatggcaaaagagtgggtttggtaaaggagatagcatagctatggagattacaaagcaagcgcagtgtactgacattgtcactgatcttgattttgaacctcatcacaacacagtgaagatcccacataaagctgatcccaaacctgtttctttcaaaccgtgtgatgtgaagctcaaggattacacgccttgtcaagagcaagaccgagctatgaagttcccgagagagaacatgatttacagagagagacattgtcctcctgataatgagaagctgcgttgtcttgttccagctcctaaagggtatatgactcctttcccttggcctaaaagcagagattatgttcactatgctaatgctcctttcaagagcttgactgtcgaaaaagctggacagaattgggttcagtttcaagggaatgtgtttaaattccctggtggaggaactatgtttcctcaaggtgctgatgcgtatattgaagagctagcttctgttatccctatcaaagatggctctgttagaaccgcattggacactggatgtggggttgctagttggggtgcttatatgcttaagaggaatgttttgactatgtcgtttgcgccaagggataaccacgaagcacaagtccagtttgcgcttgagagaggtgttccagcgattatcgctgttcttggatcaatccttcttccttaccctgcaagagcctttgacatggctcaatgctctcgatgcttgataccatggaccgcaaacgagggaacatacttaatggaagtagatagagtcttgagacctggaggttactgggtcttatcgggtcctccaatcaactggaagacatggcacaagacgtggaaccgaactaaagcagagctaaatgccgagcaaaagagaatagagggaatcgcagagtccttatgctgggagaagaagtatgagaagggagacattgcaattttcagaaagaaaataaacgatagatcatgcgatagatcaacaccggttgacacctgcaaaagaaaggacactgacgatgtctggtacaaggagatagaaacgtgtgtaacaccattccctaaagtatcaaacgaagaagaagttgctggaggaaagctaaagaagttccccgagaggctattcgcagtgcctccaagtatctctaaaggtttgattaatggcgtcgacgaggaatcataccaagaagacatcaatctatggaagaagcgagtgaccggatacaagagaattaacagactgataggttccaccagataccgtaatgtgatggatatgaacgccggtcttggtggattcgctgctgcgcttgaatagcctaaatcatgggttatgaatgtgattccaaccattaacaagaacacattgagtgttgtttatgagagaggtctcattggtatctatcatgactggtgtgaaggcttttcaacttatccaagaacatacgatttcattcacgctagtggtgtcttcagcttgtatcagcacagctgcaaacttgaggatattcttcttgaaactgatcggattttacgaccggaagggattgtgattttccgggatgaggttgatgttttgaatgatgtgaggaagatcgttgatggaatgagatgggatactaagttaatggatcatgaagacggtcctctcgtgccggagaagattcttgtcgccacgaagcagtattgggtagccggcgacgatggaaacaattctccgtcgtcttctaatagtgaagaagaataaaacaaaaacaaaaaactcctcaggttactaagcttgaagtgtagatctattttacaacataaaattcttatcaaaaaaggaaggaatcagaatttccattaaagaaaggtgtcaaaaaaaagttgtaaaactatatagtagtgatcaagacgaatatgtgcatttatgttttatttttgttccctagtttttaattttatttttgaaggaagaaaaaattagttccatgtgtttttgcaagatagttgaaaccttggacgcttgttatgtatgatgcgatcttgacattttttaataacagttattttaaat

SEQ ID NO: 11132 - protein, 478 aa, Arabidopsis thaliana
MGSKHNPPGNNRSRSTLSLLVVVGLCCFFYLLGAWQKSGFGKGDSIAMEITKQAQCTDIVTDLDFEPHHNTVKIPHKADPKPVSFKPCDVKLKDYTPCQEQDRAMKFPRENMIYRERHCPPDNEKLRCLVPAPKGYMTPFPWPKSRDYVHYANAPFKSLTVEKAGQNWVQFQGNVFKFPGGGTMFPQGADAYIEELASVIPIKDGSVRTALDTGCGVASWGAYMLKRNVLTMSFAPRDNHEAQVQFALERGVPAIIAVLGSILLPYPARAFDMAQCSRCLIPWTANEGTYLMEVDRVLRPGGYWVLSGPPINWKTWHKTWNRTKAELNAEQKRIEGIAESLCWEKKYEKGDIAIFRKKINDRSCDRSTPVDTCKRKDTDDVWYKEIETCVTPFPKVSNEEEVAGGKLKKFPERLFAVPPSISKGLINGVDEESYQEDINLWKKRVTGYKRINRLIGSTRYRNVMDMNAGLGGFAAALE

SEQ ID NO: 11133 - protein, 431 aa, Arabidopsis thaliana
MEITKQAQCTDIVTDLDFEPHHNTVKIPHKADPKPVSFKPCDVKLKDYTPCQEQDRAMKFPRENMIYRERHCPPDNEKLRCLVPAPKGYMTPFPWPKSRDYVHYANAPFKSLTVEKAGQNWVQFQGNVFKFPGGGTMFPQGADAYIEELASVIPIKDGSVRTALDTGCGVASWGAYMLKRNVLTMSFAPRDNHEAQVQFALERGVPAIIAVLGSILLPYPARAFDMAQCSRCLIPWTANEGTYLMEVDRVLRPGGYWVLSGPPINWKTWHKTWNRTKAELNAEQKRIEGIAESLCWEKKYEKGDIAIFRKKINDRSCDRSTPVDTCKRKDTDDVWYKEIETCVTPFPKVSNEEEVAGGKLKKFPERLFAVPPSISKGLINGVDEESYQEDINLWKKRVTGYKRINRLIGSTRYRNVMDMNAGLGGFAAALE

SEQ ID NO: 11134 - protein, 374 aa, Arabidopsis thaliana
MKFPRENMIYRERHCPPDNEKLRCLVPAPKGYMTPFPWPKSRDYVHYANAPFKSLTVEKAGQNWVQFQGNVFKFPGGGTMFPQGADAYIEELASVIPIKDGSVRTALDTGCGVASWGAYMLKRNVLTMSFAPRDNHEAQVQFALERGVPAIIAVLGSILLPYPARAFDMAQCSRCLIPWTANEGTYLMEVDRVLRPGGYWVLSGPPINWKTWHKTWNRTKAELNAEQKRIEGIAESLCWEKKYEKGDIAIFRKKINDRSCDRSTPVDTCKRKDTDDVWYKEIETCVTPFPKVSNEEEVAGGKLKKFPERLFAVPPSISKGLINGVDEESYQEDINLWKKRVTGYKRINRLIGSTRYRNVMDMNAGLGGFAAALE

SEQ ID NO: 11135 - DNA, 2298 bp, Arabidopsis thaliana
caaatgttagtctctgctgttgaacagcttcaggtgatggcgtcaaaaagacaatacaaggaggcagctgcacagctcgaggctgtaaaccaattgtgtaaccactttgaagcatacagggatgttcctaaaatcacggagctcagagagaagcttaataatataaagcaaatccttaagtcccatgtattttctgatttttccagtttaggtactgggaaagagacagaggaaacaaatttgctacagaagttatctgattcttgcttggttgttgatgctctggaaccatctgtgagggaagagttggtaaataacttttgcagcagggagctcacctcatatgaacaaatttttgaagaagctgaattggcaaagttggataagacagagcggagatatgcttggataaagcgtcgaatccgaacaaatgaagaaatttggaagatttttcctgcttcttggcatgtgccgtataggctatgcattcagttctgcaagcaaacaaggaagcaagtagaatttattctggtcaacatgaaagagaagccagttgtagcgatattgcttctggcactacaaagtacagtggagtttgaaaaagaacttgaaaagaaatttggtggtggtgttcctactaaagatattgaagatgacattgaagaaattggtacatgggaagataatagtcagaatatatccaaaatccgcaagaaatatgaaaagaagtttgctgctagtcaagaaaccgaggagaatggttttcaacaggaaaagaccggaaacaaagatttatctgttactggagctgggtttaacttccgtggaatgatctcttcctgctttgaacctcatttaactccatatattgagttggaagagaaaacacttatggatgacctggaaaaaattgttcaggaggaatcatgggatgttgaggatggaagccaaaataatgttttatctagtagcacacagctattttccaatataaagaagagcttgaaacgctgtaatactctcagtaagaaccagactttattcaatttgttcaaggtctttcaacgagttttaaaggcctatgctacaaagctattttttaagctcccaaaaggaggcactggtatcgttgccgcagccacaggcatggatggacagataaaggtctcggagagagatgaaagggtgatatgctacatagttaattctgctgagtattgccacaaaacatctggtgaactggcagaaaacgtctcagaaattattgacccacattatgctgatggtgtagacatgtcagaggtccaggatgaattttcagccgtcataacgaaagcattggtaacgctggtccttggacttgagactaaatttgacacagaaatggcagtgatgacacgtgttccatggagcacacttgagagtgttggtgaccagtctgggtacgtgaatggaataaatacagtccttagcggcagcatacctgtcctcgggaaacttctaacaccagtttacttccagtttttccttgacaagctggcatcatccctaggaccacggttctatgctaatattttcagatgcaagcaactatccgaaactggagctcaacagatgttactagatacgcaagctgtgaagtcgattctactagaaattccttcccttgccagacagctattccaaatttgtgagccgtgaaatgagcagagctgaagcactccttaaggtcatactatccccaatcgactcagtggcagacacttatcgtgcactgtttccggagggaacgcccatggagtttcaacgcatcttagaacttaagggtcttaagaaagctgatcagcagagtatactagatgatttcaacaagcatggtccaggattcacacagcagtcggttgcagagcaatgccacaaccaatgccaaccccacctgcaccaccattggcaatcactaatccggctacagctgcagggttcatagcaaacagcgaggatgttttaaccagagcagctgctcttggcagaggagctgcaagcactggcttcaagaagttcattgctcttaccgaagctgccaaagaccgcaaagatgggcctttaaggagactcttcaacgcatgatttgttcctttactacctcatctcaacttttgatttatgcaattcccacctttgtttccttctgtatttaaatgcacttgtttctttgttttcctggttatgtgtatatcagaaattcgtagtgaataacgagttttcttacggtgcggatgtatcttagttgtttactgc

SEQ ID NO: 11136 - protein, 566 aa, Arabidopsis thaliana
QMLVSAVEQLQVMASKRQYKEAAAQLEAVNQLCNHFEAYRDVPKITELREKLNNIKQILKSHVFSDFSSLGTGKETEETNLLQKLSDSCLVVDALEPSVREELVNNFCSRELTSYEQIFEEAELAKLDKTERRYAWIKRRIRTNEEIWKIFPASWHVPYRLCIQFCKQTRKQVEFILVNMKEKPVVAILLLALQSTVEFEKELEKKFGGGVPTKDIEDDIEEIGTWEDNSQNISKIRKKYEKKFAASQETEENGFQQEKTGNKDLSVTGAGFNFRGMISSCFEPHLTPYIELEEKTLMDDLEKIVQEESWDVEDGSQNNVLSSSTQLFSNIKKSLKRCNTLSKNQTLFNLFKVFQRVLKAYATKLFFKLPKGGTGIVAAATGMDGQIKVSERDERVICYIVNSAEYCHKTSGELAENVSEIIDPHYADGVDMSEVQDEFSAVITKALVTLVLGLETKFDTEMAVMTRVPWSTLESVGDQSGYVNGINTVLSGSIPVLGKLLTPVYFQFFLDKLASSLGPRFYANIFRCKQLSETGAQQMLLDTQAVKSILLEIPSLARQLFQICEP

SEQ ID NO: 11137 - protein, 565 aa, Arabidopsis thaliana
MLVSAVEQLQVMASKRQYKEAAAQLEAVNQLCNHFEAYRDVPKITELREKLNNIKQILKSHVFSDFSSLGTGKETEETNLLQKLSDSCLVVDALEPSVREELVNNFCSRELTSYEQIFEEAELAKLDKTERRYAWIKRRIRTNEEIWKIFPASWHVPYRLCIQFCKQTRKQVEFILVNMKEKPVVAILLLALQSTVEFEKELEKKFGGGVPTKDIEDDIEEIGTWEDNSQNISKIRKKYEKKFAASQETEENGFQQEKTGNKDLSVTGAGFNFRGMISSCFEPHLTPYIELEEKTLMDDLEKIVQEESWDVEDGSQNNVLSSSTQLFSNIKKSLKRCNTLSKNQTLFNLFKVFQRVLKAYATKLFFKLPKGGTGIVAAATGMDGQIKVSERDERVICYIVNSAEYCHKTSGELAENVSEIIDPHYADGVDMSEVQDEFSAVITKALVTLVLGLETKFDTEMAVMTRVPWSTLESVGDQSGYVNGINTVLSGSIPVLGKLLTPVYFQFFLDKLASSLGPRFYANIFRCKQLSETGAQQMLLDTQAVKSILLEIPSLARQLFQICEP

SEQ ID NO: 11138 - protein, 554 aa, Arabidopsis thaliana
MASKRQYKEAAAQLEAVNQLCNHFEAYRDVPKITELREKLNNIKQILKSHVFSDFSSLGTGKETEETNLLQKLSDSCLVVDALEPSVREELVNNFCSRELTSYEQIFEEAELAKLDKTERRYAWIKRRIRTNEEIWKIFPASWHVPYRLCIQFCKQTRKQVEFILVNMKEKPVVAILLLALQSTVEFEKELEKKFGGGVPTKDIEDDIEEIGTWEDNSQNISKIRKKYEKKFAASQETEENGFQQEKTGNKDLSVTGAGFNFRGMISSCFEPHLTPYIELEEKTLMDDLEKIVQEESWDVEDGSQNNVLSSSTQLFSNIKKSLKRCNTLSKNQTLFNLFKVFQRVLKAYATKLFFKLPKGGTGIVAAATGMDGQIKVSERDERVICYIVNSAEYCHKTSGELAENVSEIIDPHYADGVDMSEVQDEFSAVITKALVTLVLGLETKFDTEMAVMTRVPWSTLESVGDQSGYVNGINTVLSGSIPVLGKLLTPVYFQFFLDKLASSLGPRFYANIFRCKQLSETGAQQMLLDTQAVKSILLEIPSLARQLFQICEP

SEQ ID NO: 11139 - DNA, 1098 bp, Arabidopsis thaliana
gaagaagacgaagaagcattgagagtgaaaagaaaaacaatgtcgcagctgttatcttctcctccaatggcggttttctccaaaaccttcataaaccataagttttcagatgctcgttttctctcttctcactcaattctcacctccggtggattcgccggaaaaattattcctttaaaaccgacggcgaggttgaaattaacggtgaagtctcgacaaagtgattactttgagaaacagaggtttggtgactcgtcttcttcgcaaaacgctgaagtatcttctcctagattttacgtgggtcattcgatttacaaagggaaagctgctcttacgatagaaccacgagcaccagagtttgtggctttggaatctggtgcgttcaagctgacaaaggaaggttttttgttgctccaatttgctcctgcagctggtgttcgtcaatatgattggagtaggaagcaggtcttctcgttgtcggttacagaaatcggtaatctagttagccttgggccgagggaatcatgtgaattcttccatgatccattcaagggaaaaggtgatgaaggtaaagtgaggaaagtgttgaaagttgagccgctcccagatggttctggccgcttctttaacctgagtgttcaaaacaagctcttgaatgtagatgagagtgtatacataccaatcactaaagcagagtttgctgttcttatctctgctttcaacttcgtcttgccgccccttataggctggagtgcatttgctaactccatcaaaccagaagactctaaccgacttaacaatgcttcgcctaagtatggaggagactacgaatggagtagatgatggagattagaggcaatcttgcaaactcggtttttcggtccataccatctttttgttgttgcaaatcaatgagtcaccaagagctgttcgagatagagaacggaaagaaaagcagcagcagagactgaagtagtttagaccaaatggaatgtgttgttgtgtaggaaataacttatattttgtgttagacaatctgtattcattcaaaagcaatcaattacaattttgttaatacaagaatcagatactcttcct

SEQ ID NO: 11140 - protein, 280 aa, Arabidopsis thaliana
EEDEEALRVKRKTMSQLLSSPPMAVFSKTFINHKFSDARFLSSHSILTSGGFAGKIIPLKPTARLKLTVKSRQSDYFEKQRFGDSSSSQNAEVSSPRFYVGHSIYKGKAALTIEPRAPEFVALESGAFKLTKEGFLLLQFAPAAGVRQYDWSRKQVFSLSVTEIGNLVSLGPRESCEFFHDPFKGKGDEGKVRKVLKVEPLPDGSGRFFNLSVQNKLLNVDESVYIPITKAEFAVLISAFNFVLPPLIGWSAFANSIKPEDSNRLNNASPKYGGDYEWSR

SEQ ID NO: 11141 - protein, 267 aa, Arabidopsis thaliana
MSQLLSSPPMAVFSKTFINHKFSDARFLSSHSILTSGGFAGKIIPLKPTARLKLTVKSRQSDYFEKQRFGDSSSSQNAEVSSPRFYVGHSIYKGKAALTIEPRAPEFVALESGAFKLTKEGFLLLQFAPAAGVRQYDWSRKQVFSLSVTEIGNLVSLGPRESCEFFHDPFKGKGDEGKVRKVLKVEPLPDGSGRFFNLSVQNKLLNVDESVYIPITKAEFAVLISAFNFVLPPLIGWSAFANSIKPEDSNRLNNASPKYGGDYEWSR

SEQ ID NO: 11142 - protein, 258 aa, Arabidopsis thaliana
MAVFSKTFINHKFSDARFLSSHSILTSGGFAGKIIPLKPTARLKLTVKSRQSDYFEKQRFGDSSSSQNAEVSSPRFYVGHSIYKGKAALTIEPRAPEFVALESGAFKLTKEGFLLLQFAPAAGVRQYDWSRKQVFSLSVTEIGNLVSLGPRESCEFFHDPFKGKGDEGKVRKVLKVEPLPDGSGRFFNLSVQNKLLNVDESVYIPITKAEFAVLISAFNFVLPPLIGWSAFANSIKPEDSNRLNNASPKYGGDYEWSR

SEQ ID NO: 11143 - DNA, 1698 bp, Arabidopsis thaliana
agatttgagtctactcgttttttcttatctatcgcaaaacaaactctcccgtcgtcaccattcgattacgggagtgtaatggctcttatacaatttggaagttcatgtgttgctcaatgggggattcttcgtcctcggtttgctgttaaagctttttatccaagcagattggagtctcaccatgacaattgcatcagccaaataaattgtctgggagcttcaaggtcgagtatgtttgcacagggctctttacccttcttgtcattgacgggagtatctcctaatacattctcgtagaggagctcgcttcactgttagagctgatactgatttctattctgtccttggagtctcgaaaaatgcaaccaaagctgagattaaaagcgcttatcggaagctcgctaggagttatcatccagatgtgaacaaggatgctggggcagaagataaatttaaagaaataagtaatgcatatgagatcttatcagatgatgagaaaagatctctatacgacagatatggcgaggcaggagttaaaggcgctggaatgggaggcatgggggattatagtaatccgtttgatctatttgagtcattattcgaaggaatgggtgggatgggaggaatgggcggtggaatgggtagtagaggctcaaggagcagagctatcgatggtgaagatgagtattactcactaatcttgaatttcaaagaagcggttttcggtattgagaaagaaattgagatatctcggttagagagctgtgggacttgcaatggttctggagctaaagcgggaaccaaaccaaccaaatgcaaaacatgtggcgggcaaggacaggtggtagcatcaacgaggacaccactcggtgtattccaacaagtgatgacttgctctccgtgtaacggaactggggagatatcaaaaccgtgtggtgcatgctcaggagatggacgtgtgagaaggacaaagcggattagtcttaaagttcctgcgggtgtggattctggaagtaggttaagagtgaggggagaagggaatgcaggaaagagaggtggatcaccgggagatctctttgcggttattgaggttattccagatccggttttgaagcgtgatgatacaaatatactttatacgtgtaagatatcgtatgtagatgccatattggggacgactttgaggtaccaacagtggatggagaggtggatttgaaagtaccggcagggacacaaccaagcacgacattggtgatggctaaaaaaggagttccggttttgaataagagcaagatgagaggtgatcagttagtgagagtgcaagttgagattcctaagagattgagtaaagaagagaagatgcttgttgaggagctggctgatatgagcaagaacaaggtagctaatagcaggagataaaccaacacacaatattagtgaaatgtgatattatatagattcatcgttctctgcttgtcttctttctaatggttcttctaatgatggagaagataagcaagaggaagaagaaagaattattaggtgagaggaaaatctgaagaactctgtttttgggttttcctcttcaatttttgtgttttacttttaaaacaaattttatgggtttatcaggattcagggtaggtcttgattgtattgtactgctatttttatacatttgaatcttcttttcttatt

SEQ ID NO: 11144 - protein, 222 aa, Arabidopsis thaliana
MGGMGDYSNPFDLFESLFEGMGGMGGMGGGMGSRGSRSRAIDGEDEYYSLILNFKEAVFGIEKEIEISRLESCGTCNGSGAKAGTKPTKCKTCGGQGQVVASTRTPLGVFQQVMTCSPCNGTGEISKPCGACSGDGRVRRTKRISLKVPAGVDSGSRLRVRGEGNAGKRGGSPGDLFAVIEVIPDPVLKRDDTNILYTCKISYVDAILGTTLRYQQWMERWI

SEQ ID NO: 11145 - protein, 219 aa, Arabidopsis thaliana
MGDYSNPFDLFESLFEGMGGMGGMGGGMGSRGSRSRAIDGEDEYYSLILNFKEAVFGIEKEIEISRLESCGTCNGSGAKAGTKPTKCKTCGGQGQVVASTRTPLGVFQQVMTCSPCNGTGEISKPCGACSGDGRVRRTKRISLKVPAGVDSGSRLRVRGEGNAGKRGGSPGDLFAVIEVIPDPVLKRDDTNILYTCKISYVDAILGTTLRYQQWMERWI

SEQ ID NO: 11146 - protein, 202 aa, Arabidopsis thaliana
MGGMGGMGGGMGSRGSRSRAIDGEDEYYSLILNFKEAVFGIEKEIEISRLESCGTCNGSGAKAGTKPTKCKTCGGQGQVVASTRTPLGVFQQVMTCSPCNGTGEISKPCGACSGDGRVRRTKRISLKVPAGVDSGSRLRVRGEGNAGKRGGSPGDLFAVIEVIPDPVLKRDDTNILYTCKISYVDAILGTTLRYQQWMERWI

SEQ ID NO: 11147 - DNA, 2256 bp, Arabidopsis thaliana
atcatcgtcctctctgtttaaatcaggagaaagctcacgagaatccctcttcagatcagaacaccacaaaacatggctgcgtgtacactccacgcgctctcagtcaccttattcctccttctcttctttgccgtgtcaccggcgaaagctcagcaaccgtacgtcaacaaccaccagctcgcctgcgaggtccgtgtctacgacaacataaccaacggattcacatgtaacggcccaccttcttgccgctcatacctcactttctggtctcaaccaccgtacaacacggcggactcaatcgccaaactcctcaacgtctccgccgcagagatccaatcaatcaacaacctccccacagccaccaccagaatcccaacccgtgaattagtcgtgatcccagctaactgctcctgctcctcctccagcggaggattttaccaacacaacgccacttacaatctctccggtaacagaggagatgaaacctatttctcagtggctaacgatacttaccaagctttatccacgtgtcaagccatgatgtcacaaaaccgttacggcgagagacaactaacccccggcttaaacctccttgttcctctccgatgtgcttgtcccaccgccaaacaaaccaccgccggatttaaatatctcctgacttacttagtcgccatgggagatagtatctccggcatcgccgagatgttcaacagcacatccgccgccataaccgaaggtaacgagcttacatcagacaatatcttcttcttcacaccggttctagttcctctcacaactgaacctaccaaaatcgttatatctccgtcgcctcctcctccacccgttgttgctacgccgcctcaaacgccagttgatcctccgggatcttcttcttctcacaaatggatctacatcggaattggaatcggagctggtttgcttctcttactctcaatcttagctctctgcttctacaaacgaaggtctaagaagaagtcattaccgtcgtcgttgccggaggagaacaagctctttgattcatcaaccaaacaatctattcccacaacaacaacgactcaatggtcaatagatttatccaattcatcagaagctttcggtttaaaatccgccatagaatctctaacactatacagattcaacgatcttcaatcagctacttcgaatttcagcgacgaaaacagaatcaaaggctctgtttatcgcgcgacaatcaacggcgacgatgccgctgtgaaagtgatcaaaggagatgtttcttcctctgagatcaatcttttgaagaagctaaatcattctaatatcatccgtctctcaggtttctgtatccgtgaaggaacatcgtacctcgtcttcgagtattcagagaatggatcgatcagtgattggcttcactcgtcgggcaagaagagtttgacatggaaacagagagttgaaatagcaagggatgtggcagaggcgttagattatctccataactatataactccacctcatattcataagaacttggaatcaacaaacatacttctggattctaatttcagagccaagattgcgaatttcggtgttgcgaggattcttgatgaaggtgatcttgatcttcagttaacaagacatgttgaaggaacacaaggctacttagctccagagtatgtggagaatggagtcattacttcgaaactagacgtgtttgcttttggagttgcggttcttgagcttctttcggggagagaagcagtaacgatacataagaagaaggaaggagaagaagaagtggagatgttgtgtaaagtgataaacagtgtgcttggaggagagaatgtgagagagaagttaaaagagtttatggatccatctctagggaatgagtatccgttggagctggcttacaccatggctcagcttgctaagagctgtgtcgcaactgatcttaactcgcgtccatctgtcactcaggttctaaccacgctctcaatgatcgtctcctcctccatcgattgggagccttctgatgaccttcttcgttccggctctcttggcaactagttcagttttttttttctattggtagtcaataacaagtatttagactttagataaggaccatacggctaaaaagttgagatctaataagtaccccactgtgaaacatagtaataagaacatatcatagagaaactttatttagattttgacaaaaaaaaaaaaaaaaaaaactcgaggggggcccggtac

SEQ ID NO: 11148 - protein, 664 aa, Arabidopsis thaliana
MAACTLHALSVTLFLLLFFAVSPAKAQQPYVNNHQLACEVRVYDNITNGFTCNGPPSCRSYLTFWSQPPYNTADSIAKLLNVSAAEIQSINNLPTATTRIPTRELVVIPANCSCSSSSGGFYQHNATYNLSGNRGDETYFSVANDTYQALSTCQAMMSQNRYGERQLTPGLNLLVPLRCACPTAKQTTAGFKYLLTYLVAMGDSISGIAEMFNSTSAAITEGNELTSDNIFFFTPVLVPLTTEPTKIVISPSPPPPPVVATPPQTPVDPPGSSSSHKWIYIGIGIGAGLLLLLSILALCFYKRRSKKKSLPSSLPEENKLFDSSTKQSIPTTTTTQWSIDLSNSSEAFGLKSAIESLTLYRFNDLQSATSNFSDENRIKGSVYRATINGDDAAVKVIKGDVSSSEINLLKKLNHSNIIRLSGFCIREGTSYLVFEYSENGSISDWLHSSGKKSLTWKQRVEIARDVAEALDYLHNYITPPHIHKNLESTNILLDSNFRAKIANFGVARILDEGDLDLQLTRHVEGTQGYLAPEYVENGVITSKLDVFAFGVAVLELLSGREAVTIHKKKEGEEEVEMLCKVINSVLGGENVREKLKEFMDPSLGNEYPLELAYTMAQLAKSCVATDLNSRPSVTQVLTTLSMIVSSSIDWEPSDDLLRSGSLGN

SEQ ID NO: 11149 - protein, 509 aa, Arabidopsis thaliana
MMSQNRYGERQLTPGLNLLVPLRCACPTAKQTTAGFKYLLTYLVAMGDSISGIAEMFNSTSAAITEGNELTSDNIFFFTPVLVPLTTEPTKIVISPSPPPPPVVATPPQTPVDPPGSSSSHKWIYIGIGIGAGLLLLLSILALCFYKRRSKKKSLPSSLPEENKLFDSSTKQSIPTTTTTQWSIDLSNSSEAFGLKSAIESLTLYRFNDLQSATSNFSDENRIKGSVYRATINGDDAAVKVIKGDVSSSEINLLKKLNHSNIIRLSGFCIREGTSYLVFEYSENGSISDWLHSSGKKSLTWKQRVEIARDVAEALDYLHNYITPPHIHKNLESTNILLDSNFRAKIANFGVARILDEGDLDLQLTRHVEGTQGYLAPEYVENGVITSKLDVFAFGVAVLELLSGREAVTIHKKKEGEEEVEMLCKVINSVLGGENVREKLKEFMDPSLGNEYPLELAYTMAQLAKSCVATDLNSRPSVTQVLTTLSMIVSSSIDWEPSDDLLRSGSLGN

SEQ ID NO: 11150 - protein, 508 aa, Arabidopsis thaliana
MSQNRYGERQLTPGLNLLVPLRCACPTAKQTTAGFKYLLTYLVAMGDSISGIAEMFNSTSAAITEGNELTSDNIFFFTPVLVPLTTEPTKIVISPSPPPPPVVATPPQTPVDPPGSSSSHKWIYIGIGIGAGLLLLLSILALCFYKRRSKKKSLPSSLPEENKLFDSSTKQSIPTTTTTQWSIDLSNSSEAFGLKSAIESLTLYRFNDLQSATSNFSDENRIKGSVYRATINGDDAAVKVIKGDVSSSEINLLKKLNHSNIIRLSGFCIREGTSYLVFEYSENGSISDWLHSSGKKSLTWKQRVEIARDVAEALDYLHNYITPPHIHKNLESTNILLDSNFRAKIANFGVARILDEGDLDLQLTRHVEGTQGYLAPEYVENGVITSKLDVFAFGVAVLELLSGREAVTIHKKKEGEEEVEMLCKVINSVLGGENVREKLKEFMDPSLGNEYPLELAYTMAQLAKSCVATDLNSRPSVTQVLTTLSMIVSSSIDWEPSDDLLRSGSLGN

SEQ ID NO: 11151 - DNA, 1990 bp, Arabidopsis thaliana
gattttgtcatctggtggattagagtggagtggagctttgaattggatgatcattatccatgtcgattctacttaggccgtcgtcctctccttcactctgttcttctctcaagcttttccgattatcctctccggattctttaatcgacgcagctgtcctcaggaacaggacaaagccgtcgcagtcgtttcgaatggaggtcgtttcgagtaattccacgtgtctttctagtattagcgtcggtgaagattttccagcagaatatgagcagtggctaccggttccggatccagagagcgggagaagagctggcgttttgctacacccgacgtcgtttcgtggtcctcatggcattggtgatctcggagaagaagccttccggttcatcgattggcttcattctactggttgctccgtttggcaggttcttcctcttgttcctccagacgaaggaggatctccttatgcaggacaggatgcaaattgtgggaacacattgttgatttctctagatgagcttgtgaaagacggcttgttaatcaaggatgagctcccacaaccaattgatgctgactctgtgaactatcagactgccaacaagttaaagagtcccttgattacgaaggcagcaaagaggcttattgatggcaatggtgaactgaagagcaaactgctagatttccgtaacgacccctctatatcatgttggcttgaagatgctgcttattttgcagctattgacaatactttaaatgcatacagttggtttgagtggcctgaaccacttaaaaaccgtcatctttctgccttggaagctatatatgaaagccaaaaggagtttatagacttgttcattgctaagcaatttttgttccaaaggcagtggcagaaagttcgtgagtatgcacggcggcaaggagttgatataatgggagatatgcccatttatgtaggatatcacagtgcagacgtttgggcaaataagaaacatttcttactgaacaagaaaggctttcctcttcttgttagcggtgttcctcctgacttgttcagtgaaactggtcaactgtggggcagccctctttatgactggaaagcaatggagagtgaccaatattcttggtgggttaatcgaataagacgcgcacaggacttgtatgacgaatgcaggattgatcacttcagaggatttgcagggttttgggcggtcccttctgaagcgaaagttgccatggttggacgatggaaggtaggacctggaaagtcattatttgatgccatttccaaaggcgttgggaagatcaaaatcatagctgaagatttgggagttattactaaagatgtagttgagctgaggaaatctatcggagcacctggaatggccgtcctccaatttgcttttggaggaggcgccgataacccacatttacctcacaatcatgaagtaaaccaagttgtatactctggaactcatgacaacgacactattcgaggctggtgggacactctggaccaagaagaaaagtctaaggcaatgaaatacctgtcgatagctggagaagacgatatatcatggtcagtcatccaagctgcattctcttcaaccgctcaaaccgcaatcataccgatgcaagacattctaggacttggaagttctgccaggatgaacactccagccactgaggtggggaattggggttggaggattccaagttcaacgagctttgataatcttgaaactgaatctgacagactcagagatcttttgtcattgtacggacggctttgaggaaaacatttgacgtggaaaagaagaagaatctttggttttcttatcttttttgtaactttgctaatggtaaaagcaataaagtaagcagaagacgaacgaagcatgttgttgaaatagtggatcgatgttgatatgggccatatatgatgatggcatgttcaatctcactgttacttaataaattttcttcattgatg

SEQ ID NO: 11152 - protein, 576 aa, Arabidopsis thaliana
MSILLRPSSSPSLCSSLKLFRLSSPDSLIDAAVLRNRTKPSQSFRMEVVSSNSTCLSSISVGEDFPAEYEQWLPVPDPESGRRAGVLLHPTSFRGPHGIGDLGEEAFRFIDWLHSTGCSVWQVLPLVPPDEGGSPYAGQDANCGNTLLISLDELVKDGLLIKDELPQPIDADSVNYQTANKLKSPLITKAAKRLIDGNGELKSKLLDFRNDPSISCWLEDAAYFAAIDNTLNAYSWFEWPEPLKNRHLSALEAIYESQKEFIDLFIAKQFLFQRQWQKVREYARRQGVDIMGDMPIYVGYHSADVWANKKHFLLNKKGFPLLVSGVPPDLFSETGQLWGSPLYDWKAMESDQYSWWVNRIRRAQDLYDECRIDHFRGFAGFWAVPSEAKVAMVGRWKVGPGKSLFDAISKGVGKIKIIAEDLGVITKDVVELRKSIGAPGMAVLQFAFGGGADNPHLPHNHEVNQVVYSGTHDNDTIRGWWDTLDQEEKSKAMKYLSIAGEDDISWSVIQAAFSSTAQTAIIPMQDILGLGSSARMNTPATEVGNWGWRIPSSTSFDNLETESDRLRDLLSLYGRL

SEQ ID NO: 11153 - protein, 531 aa, Arabidopsis thaliana
MEVVSSNSTCLSSISVGEDFPAEYEQWLPVPDPESGRRAGVLLHPTSFRGPHGIGDLGEEAFRFIDWLHSTGCSVWQVLPLVPPDEGGSPYAGQDANCGNTLLISLDELVKDGLLIKDELPQPIDADSVNYQTANKLKSPLITKAAKRLIDGNGELKSKLLDFRNDPSISCWLEDAAYFAAIDNTLNAYSWFEWPEPLKNRHLSALEAIYESQKEFIDLFIAKQFLFQRQWQKVREYARRQGVDIMGDMPIYVGYHSADVWANKKHFLLNKKGFPLLVSGVPPDLFSETGQLWGSPLYDWKAMESDQYSWWVNRIRRAQDLYDECRIDHFRGFAGFWAVPSEAKVAMVGRWKVGPGKSLFDAISKGVGKIKIIAEDLGVITKDVVELRKSIGAPGMAVLQFAFGGGADNPHLPHNHEVNQVVYSGTHDNDTIRGWWDTLDQEEKSKAMKYLSIAGEDDISWSVIQAAFSSTAQTAIIPMQDILGLGSSARMNTPATEVGNWGWRIPSSTSFDNLETESDRLRDLLSLYGRL

SEQ ID NO: 11154 - DNA, 1315 bp, Arabidopsis thaliana
gaaatttgagaggcgtggaatatgttgctgtagagaaaccagcaggagcttacacgaacatccttttctcatcaggaaccactggtgagccaaaggctattccatggacgaacatttctcctctgaaatctgctgctgatgcttggtgccatttggatgttcagcagggggatgttgttgcttggccgaccaaccttgggtggatgatgggtccgtggcttgtttatgcttccttgataaatggggcttgcatgggattatacaatggatcacctcttggtcctacctttgccaagtttgtgcaggatgccgaggtatcagtgctaggcgtgataccaagcattgttcggacatggcaaaactcaaactccacttcaggctatgattggtcacgaatccgttgttttggttccactggtgaagcttcaaacatagacgagtatctatggctaatgggcagagcacattacaaacctgtaatcgagtattgtggcggaactgagattggaggcagttttatctcaggttctttacttcaacctcagtcgctggctgcttttagcacagctgccatgggttgcaagcttttcattctcggtgaagatagcaatcctattcctccatatgctgcaggagtaggcgaattggctctttgtccttacatgtttggagcttcaagcacccttctgaacggtaatcacttcaaagtttacttccaaggaatgcccaccttccaaggacagattttacgaagacatggggatttatttgaacggacttcaaaaggatactaccgtgctcatggacgtgctgatgacacaatgaatcttggtggcataaaggttggttctattgagatcgaacgagtgtgtaactccgttgatgacagtgttctggagacagcagccatcggtgttccacctcctagtgggggtcctgagcagctagtaatcgctgttgtgttcaagagcccagagttatcaaatcacgacttgaatctgttgaagaagtccttcaactctgagatacaaaagaaactgaatcctttgttcaaggtatcatctgttgtgactcttctttctttaccgaggacggccacaaataaggttatgagaagagttctaaggcaacagcttactcagaccggtctaaactcgaagctatgaggcaatttctctctaatagcaaatgttggttttttccatttacagaaaacaacatttggtctttgttgtacaatccacacccatgtctgtatcaataaatgattatcaaatctccattcacataagtaaagagtggatctagtgtacat

SEQ ID NO: 11155 - protein, 387 aa, Arabidopsis thaliana
NLRGVEYVAVEKPAGAYTNILFSSGTTGEPKAIPWTNISPLKSAADAWCHLDVQQGDVVAWPTNLGWMMGPWLVYASLINGACMGLYNGSPLGPTFAKFVQDAEVSVLGVIPSIVRTWQNSNSTSGYDWSRIRCFGSTGEASNIDEYLWLMGRAHYKPVIEYCGGTEIGGSFISGSLLQPQSLAAFSTAAMGCKLFILGEDSNPIPPYAAGVGELALCPYMFGASSTLLNGNHFKVYFQGMPTFQGQILRRHGDLFERTSKGYYRAHGRADDTMNLGGIKVGSIEIERVCNSVDDSVLETAAIGVPPPSGGPEQLVIAVVFKSPELSNHDLNLLKKSFNSEIQKKLNPLFKVSSVVTLLSLPRTATNKVMRRVLRQQLTQTGLNSKL

SEQ ID NO: 11156 - protein, 320 aa, Arabidopsis thaliana
MMGPWLVYASLINGACMGLYNGSPLGPTFAKFVQDAEVSVLGVIPSIVRTWQNSNSTSGYDWSRIRCFGSTGEASNIDEYLWLMGRAHYKPVIEYCGGTEIGGSFISGSLLQPQSLAAFSTAAMGCKLFILGEDSNPIPPYAAGVGELALCPYMFGASSTLLNGNHFKVYFQGMPTFQGQILRRHGDLFERTSKGYYRAHGRADDTMNLGGIKVGSIEIERVCNSVDDSVLETAAIGVPPPSGGPEQLVIAVVFKSPELSNHDLNLLKKSFNSEIQKKLNPLFKVSSVVTLLSLPRTATNKVMRRVLRQQLTQTGLNSKL

SEQ ID NO: 11157 - protein, 319 aa, Arabidopsis thaliana
MGPWLVYASLINGACMGLYNGSPLGPTFAKFVQDAEVSVLGVIPSIVRTWQNSNSTSGYDWSRIRCFGSTGEASNIDEYLWLMGRAHYKPVIEYCGGTEIGGSFISGSLLQPQSLAAFSTAAMGCKLFILGEDSNPIPPYAAGVGELALCPYMFGASSTLLNGNHFKVYFQGMPTFQGQILRRHGDLFERTSKGYYRAHGRADDTMNLGGIKVGSIEIERVCNSVDDSVLETAAIGVPPPSGGPEQLVIAVVFKSPELSNHDLNLLKKSFNSEIQKKLNPLFKVSSVVTLLSLPRTATNKVMRRVLRQQLTQTGLNSKL

SEQ ID NO: 11158 - DNA, 2193 bp, Arabidopsis thaliana
aagaagaagaagaagaagaaacaaaacaaaactaaacaagaaacagaggagaaaaaaggaaacgacgaggaaaaacaaaaacaaaataaaaacaagcctcgttcttcccttttctctcttcaaatcttttcttttacatattttcttttcttttttttgtctttaatacaaatttactaactaatcagaataaaaatgggttcgagtaagtttaaacgagccataggagccgtaaaggaccaaaccagcgtcggtctagccaaagtcaatggtcgaagcgcttctttatctgaacttgacgtagccatcgtcaaagccactcgtcacgaagagtttccagcagaagagaaatacattagagagattcttagcctaacttcttactcacgcagttacatcaacgcttgcgttagcacgctttcgagacgccttaataaaaccaaatgctggaccgttgccctcaaaaccttgattttgatccaaaggctcttaggagaaggagatcaagcctacgagcaagagatcttcttcgccactcgccgtggaacaaggcttctcaatatgtctgattttagggatgtttcgaggtctaattcttgggactactctgcgtttgtcaggacttacgcattgtaccttgacgaaaggcttgatttcaggatgcaagcgagacacgggaaacgtggagtttactgcgttggaggagaagctgacgaagaagaacaggatcaagctgcggcagatctctccacggctatcgtggtcaggtcacaaccgatcgccgagatgaaaacagagcagattttcatcagaatccaacatttgcagcaacttcttgaccgtttcttggcttgtcgcccaacaggtaatgcgaggaacaacagagttgtgattgtggctctgtatccgatagtgaaggagagttttcagatatattacgatgtaacagagataatggggattttgattgaacgattcatggagttagatattcctgattcgatcaaggtctatgacattttctgccgggtctcgaaacaattcgaagagctcgatcagttctactcttggtgtaagaacatggggatcgcacggtcttctgagtatccagagatagagaagatcacacagaagaagcttgatctcatggatgagtttataagagacaaatctgctttagaacacaccaagcaatcaaaatctgttaaatctgaagccgatgaagatgatgatgaagcgagaacagaggaagtaaatgaagagcaagaagatatgaacgcaataaaggccttacctgaacctccaccaaaagaagaagatgacgtaaaacctgaggaagaagcaaaggaagaagtgatcatagagaagaaacaagaagaaatgggtgatttacttgatcttgggaatacaaacggcggtgaagcaggacaagctggagatagcttagcgttggctttatttgacgggccatacgcaagcggttctggttcagagtctggtccaggatgggaagcgtttaaggatgattctgcggattgggaaacagctttggtgcaaacagctacaaacttgtcaggacaaaagtcagaactcggaggaggctttgatatgttgttgcttaacggaatgtatcagcacggcgctgtaaacgctgccgtgaaaacatcgacggcttatggagccagcggaagcgcgagcagtatggcatttggttctgcaggaagaccagcagcaactatgctggcacttccagcaccatcaacggctaatggaaacgccggaaacattaacagtccggttcccatggatccatttgcagcgtcattggaggttgcgccgccagcatatgtgcagatgaatgatatggagaagaaacagaggatgttgatggaagaacagatgatgtgggatcaatactctagagacggaagacaaggacatatgaatctaaggcaaaaccaaaaccaaccttactcttacacacctcaatattgattgtgccccatagaagaagctctccttgagttgtgacagcttttttgttgtctaccaaacagtttggtctaatagatctactaatctttatgcaaatttcttttttttgttcttgggtcaaatattcatttgaggcatttgtgaggtttgcttctgtaattgtaatctctggtatgactttaaaagaaaaacttaaat

SEQ ID NO: 11159 - protein, 599 aa, Arabidopsis thaliana
MGSSKFKRAIGAVKDQTSVGLAKVNGRSASLSELDVAIVKATRHEEFPAEEKYIREILSLTSYSRSYINACVSTLSRRLNKTKCWTVALKTLILIQRLLGEGDQAYEQEIFFATRRGTRLLNMSDFRDVSRSNSWDYSAFVRTYALYLDERLDFRMQARHGKRGVYCVGGEADEEEQDQAAADLSTAIVVRSQPIAEMKTEQIFIRIQHLQQLLDRFLACRPTGNARNNRVVIVALYPIVKESFQIYYDVTEIMGILIERFMELDIPDSIKVYDIFCRVSKQFEELDQFYSWCKNMGIARSSEYPEIEKITQKKLDLMDEFIRDKSALEHTKQSKSVKSEADEDDDEARTEEVNEEQEDMNAIKALPEPPPKEEDDVKPEEEAKEEVIIEKKQEEMGDLLDLGNTNGGEAGQAGDSLALALFDGPYASGSGSESGPGWEAFKDDSADWETALVQTATNLSGQKSELGGGFDMLLLNGMYQHGAVNAAVKTSTAYGASGSASSMAFGSAGRPAATMLALPAPSTANGNAGNINSPVPMDPFAASLEVAPPAYVQMNDMEKKQRMLMEEQMMWDQYSRDGRQGHMNLRQNQNQPYSYTPQY

SEQ ID NO: 11160 - protein, 477 aa, Arabidopsis thaliana
MSDFRDVSRSNSWDYSAFVRTYALYLDERLDFRMQARHGKRGVYCVGGEADEEEQDQAAADLSTAIVVRSQPIAEMKTEQIFIRIQHLQQLLDRFLACRPTGNARNNRVVIVALYPIVKESFQIYYDVTEIMGILIERFMELDIPDSIKVYDIFCRVSKQFEELDQFYSWCKNMGIARSSEYPEIEKITQKKLDLMDEFIRDKSALEHTKQSKSVKSEADEDDDEARTEEVNEEQEDMNAIKALPEPPPKEEDDVKPEEEAKEEVIIEKKQEEMGDLLDLGNTNGGEAGQAGDSLALALFDGPYASGSGSESGPGWEAFKDDSADWETALVQTATNLSGQKSELGGGFDMLLLNGMYQHGAVNAAVKTSTAYGASGSASSMAFGSAGRPAATMLALPAPSTANGNAGNINSPVPMDPFAASLEVAPPAYVQMNDMEKKQRMLMEEQMMWDQYSRDGRQGHMNLRQNQNQPYSYTPQY

SEQ ID NO: 11161 - protein, 444 aa, Arabidopsis thaliana
MQARHGKRGVYCVGGEADEEEQDQAAADLSTAIVVRSQPIAEMKTEQIFIRIQHLQQLLDRFLACRPTGNARNNRVVIVALYPIVKESFQIYYDVTEIMGILIERFMELDIPDSIKVYDIFCRVSKQFEELDQFYSWCKNMGIARSSEYPEIEKITQKKLDLMDEFIRDKSALEHTKQSKSVKSEADEDDDEARTEEVNEEQEDMNAIKALPEPPPKEEDDVKPEEEAKEEVIIEKKQEEMGDLLDLGNTNGGEAGQAGDSLALALFDGPYASGSGSESGPGWEAFKDDSADWETALVQTATNLSGQKSELGGGFDMLLLNGMYQHGAVNAAVKTSTAYGASGSASSMAFGSAGRPAATMLALPAPSTANGNAGNINSPVPMDPFAASLEVAPPAYVQMNDMEKKQRMLMEEQMMWDQYSRDGRQGHMNLRQNQNQPYSYTPQY

SEQ ID NO: 11162 - DNA, 2806 bp, Arabidopsis thaliana
ttctcttctcttctcttctctattttctcttctcttcttcctgctcaatctctgcttctcaatcttcggctggaagtatcacagaaaaatcgaatttaaaaactgacctatatatcgatccgtggaagtcgaatttcgtgtaaaatagagatgggggaaaacgatgatggttgctcgactcagctaatcgatgggaatggtgaatttaacgttaagggtttggataatttcgtgaaaaagacgaagctttctgattgtggtctttcttatgctgttgttgcaatcatgggtcctcaaagtagtgggaagagtacacttttgaatcatctttttaaaaccagttttcgggaaatggatgcttttgcgggaaggagtcaaacaactaaaggtatttggatggctaggtgtgttggtattgagcctttcacaattgctatggatttggagggtactgatgggagagaaagaggcgaggatgacactacatttgagaaacaaagtgccctgtttgctatagctgttgccgatattgtactgataaacatgtggtgccatgacattggaagggaacaggctgccaacaaaccattgctaaagacagttttccaggtcatgctgcgattgtttagccctcgtaaaacaactcttctttttgtcatacgtgataaaacaaagactccaatagagctgcttgaacgtgctctaagagaagatattcagaagatatgggattcagttcgcaagcctgaagcacacaaaaatacacctctaaatgaattcttcaatgtaatgattgttgcattatccagctatgaagagaaagaaaaacagtttgagcaagaggttgctgagttgaggcagaggtttttccattccatttcacctgggggacttgctggtgatagacgtggtgtagttcctgcttcaggattttctttcagctcccagcagatttggaaagttataaaagagaatagagacttggaccttcctgctcacaaggtaatggttgccactgttcggtgtgaagagatagccaatgagaagctgcgcgacttggcaaccaatgagagttggttggagttgcatgaagccgctgaaggtggtctagttcctggttttggcaaaaagcttagctctatccttgaaaaatacttctcagaatatgacgcagaggcaatatactttgatgaaggagtaagaaaagagaagcgtctacagctgaaacttaatgctttggatttcgtatacccttcttatgctaccatgttgggacatctacggtccaatgcactggaatcctttaagatccgactggaacagtccctaaatcaaggtgaaggattcgcaaaagctgtgcgagactcccaacagtcttgtctgatggtgtttgacaaaggatgtgaagatgctgcggttaaacaagcaacttgggatgcatcaaaaatcagggagaaactttgtcgtgacattgatgctcacacattttttgctaggagtgctaaactatctgaattaactgccaactatgagaaacggctaactcaagcacttagtgaacctgttgagtctttgttcgaagctggtggaaaagagacctggccttccataaggaagcttctcaaacgcgagactgaaacagctgttacagattttctggatgtggttactggttttgagctagatcacgctaaaattgatgctatggttcagaatctaaagaactattctcagagtttagtggagaaaaaagcaagagaagaagctgctaaaattttaatccgaatgaaagataggttctcaacagtcttcagtcatgacaaagactcaatgccacgggtctggactggaaaagaggatattagagcaatcacaaaagatgctcgagcagaggctttaagtcttttatctgtgatgactgcaatacgtttggatgaaagaccagacaatattgagagtactcttttctcttctctaatggatggaactgtttctgctgcatcttcccacaacagaagcgtaggaacgtctacagatccacttgcatctagctcttgggaagaggttcctccaaataatatactactgacgccagtgcagtgtaagtcactgtggagacagttcaaatctgagaccgagtatactgtaacccaagctatttcggcacaggaggctcacaagcgaaataacaactggcttccaccggcttgggcgatcgtgttgatgattgtccttggtttcaatgaattcatgatgcttttgaagaatcctttgtaccttttgggtttcttcgtggcgtttttactctccaaagccttatgggtgcagcttgacattccgagggaatttcaacatggcgcagttgctggagtactgtccatcacgtcgaagtttcttccaactgttatgaatcttctaagaaagcttgcggaagaagcgcaaggaaaaacaacacaggaagttccagacttatcagcttcccaaacctatagacagcaatctccatcacactccatctcaagcacaatatctgaatctgtcgcatcaaacatatcatctgctggtgatggtgcagaatactcaagcccaagcccggccctggttcggagacgaaacaccaacaatgtacaagaatcagaaatctcacaaatgtaaaccaactaaaagtgcaagatctaccgtagaacaagtcatgtcagttctgacaatggtcttcataaaatcacactgtagttctataaataggtagtgtcttgactcagaaacgaaatcttcttctttttttcacaagtcgtattattatatc

SEQ ID NO: 11163 - protein, 834 aa, Arabidopsis thaliana
MGENDDGCSTQLIDGNGEFNVKGLDNFVKKTKLSDCGLSYAVVAIMGPQSSGKSTLLNHLFKTSFREMDAFAGRSQTTKGIWMARCVGIEPFTIAMDLEGTDGRERGEDDTTFEKQSALFAIAVADIVLINMWCHDIGREQAANKPLLKTVFQVMLRLFSPRKTTLLFVIRDKTKTPIELLERALREDIQKIWDSVRKPEAHKNTPLNEFFNVMIVALSSYEEKEKQFEQEVAELRQRFFHSISPGGLAGDRRGVVPASGFSFSSQQIWKVIKENRDLDLPAHKVMVATVRCEEIANEKLRDLATNESWLELHEAAEGGLVPGFGKKLSSILEKYFSEYDAEAIYFDEGVRKEKRLQLKLNALDFVYPSYATMLGHLRSNALESFKIRLEQSLNQGEGFAKAVRDSQQSCLMVFDKGCEDAAVKQATWDASKIREKLCRDIDAHTFFARSAKLSELTANYEKRLTQALSEPVESLFEAGGKETWPSIRKLLKRETETAVTDFLDVVTGFELDHAKIDAMVQNLKNYSQSLVEKKAREEAAKILIRMKDRFSTVFSHDKDSMPRVWTGKEDIRAITKDARAEALSLLSVMTAIRLDERPDNIESTLFSSLMDGTVSAASSHNRSVGTSTDPLASSSWEEVPPNNILLTPVQCKSLWRQFKSETEYTVTQAISAQEAHKRNNNWLPPAWAIVLMIVLGFNEFMMLLKNPLYLLGFFVAFLLSKALWVQLDIPREFQHGAVAGVLSITSKFLPTVMNLLRKLAEEAQGKTTQEVPDLSASQTYRQQSPSHSISSTISESVASNISSAGDGAEYSSPSPALVRRRNTNNVQESEISQM

SEQ ID NO: 11164 - protein, 789 aa, Arabidopsis thaliana
MGPQSSGKSTLLNHLFKTSFREMDAFAGRSQTTKGIWMARCVGIEPFTIAMDLEGTDGRERGEDDTTFEKQSALFAIAVADIVLINMWCHDIGREQAANKPLLKTVFQVMLRLFSPRKTTLLFVIRDKTKTPIELLERALREDIQKIWDSVRKPEAHKNTPLNEFFNVMIVALSSYEEKEKQFEQEVAELRQRFFHSISPGGLAGDRRGVVPASGFSFSSQQIWKVIKENRDLDLPAHKVMVATVRCEEIANEKLRDLATNESWLELHEAAEGGLVPGFGKKLSSILEKYFSEYDAEAIYFDEGVRKEKRLQLKLNALDFVYPSYATMLGHLRSNALESFKIRLEQSLNQGEGFAKAVRDSQQSCLMVFDKGCEDAAVKQATWDASKIREKLCRDIDAHTFFARSAKLSELTANYEKRLTQALSEPVESLFEAGGKETWPSIRKLLKRETETAVTDFLDVVTGFELDHAKIDAMVQNLKNYSQSLVEKKAREEAAKILIRMKDRFSTVFSHDKDSMPRVWTGKEDIRAITKDARAEALSLLSVMTAIRLDERPDNIESTLFSSLMDGTVSAASSHNRSVGTSTDPLASSSWEEVPPNNILLTPVQCKSLWRQFKSETEYTVTQAISAQEAHKRNNNWLPPAWAIVLMIVLGFNEFMMLLKNPLYLLGFFVAFLLSKALWVQLDIPREFQHGAVAGVLSITSKFLPTVMNLLRKLAEEAQGKTTQEVPDLSASQTYRQQSPSHSISSTISESVASNISSAGDGAEYSSPSPALVRRRNTNNVQESEISQM

SEQ ID NO: 11165 - protein, 767 aa, Arabidopsis thaliana
MDAFAGRSQTTKGIWMARCVGIEPFTIAMDLEGTDGRERGEDDTTFEKQSALFAIAVADIVLINMWCHDIGREQAANKPLLKTVFQVMLRLFSPRKTTLLFVIRDKTKTPIELLERALREDIQKIWDSVRKPEAHKNTPLNEFFNVMIVALSSYEEKEKQFEQEVAELRQRFFHSISPGGLAGDRRGVVPASGFSFSSQQIWKVIKENRDLDLPAHKVMVATVRCEEIANEKLRDLATNESWLELHEAAEGGLVPGFGKKLSSILEKYFSEYDAEAIYFDEGVRKEKRLQLKLNALDFVYPSYATMLGHLRSNALESFKIRLEQSLNQGEGFAKAVRDSQQSCLMVFDKGCEDAAVKQATWDASKIREKLCRDIDAHTFFARSAKLSELTANYEKRLTQALSEPVESLFEAGGKETWPSIRKLLKRETETAVTDFLDVVTGFELDHAKIDAMVQNLKNYSQSLVEKKAREEAAKILIRMKDRFSTVFSHDKDSMPRVWTGKEDIRAITKDARAEALSLLSVMTAIRLDERPDNIESTLFSSLMDGTVSAASSHNRSVGTSTDPLASSSWEEVPPNNILLTPVQCKSLWRQFKSETEYTVTQAISAQEAHKRNNNWLPPAWAIVLMIVLGFNEFMMLLKNPLYLLGFFVAFLLSKALWVQLDIPREFQHGAVAGVLSITSKFLPTVMNLLRKLAEEAQGKTTQEVPDLSASQTYRQQSPSHSISSTISESVASNISSAGDGAEYSSPSPALVRRRNTNNVQESEISQM

SEQ ID NO: 11166 - DNA, 2257 bp, Arabidopsis thaliana
gttttgtttttgaatcagatccttattcttgacctttcgatcagattcatggcaacgactcaatcacacacctcagatcttacttcagaggagcaacctgctagtttggacatcatgaaggagcagactgtcccggcaaacaacgagacatcagcctcttttaagtcctcccaggaagctccagttgtagttcatccagcaaaagttgctccacttactggaccttatggtttagccggtgattttgccggacacttaccgagcagcatcctctctcctcaagcacaaggcttttactatagaggttatgaaaaccccacaggcgaatgggacgagtattcctcgtatgtcaatgttgaaggattggacatcacatctcctgttggcttcaatgagaatgcttctctggtctaccaaacgggatatggatacaaccctcaaatgccatatgggccatattcccctgcagcaagtcccttgccttctgagggacagttgtattctccacaacagtttccgttttcaggggcatcaccgtattaccagcaggtagttcctcctagcatgcaatatattacttctccaactcagcccgagctcaccagccttgtcggtgttgaccaacaaggtgataacatcggaccacgccagtcctaccatcctcatcccattggaccgtttaatggaaaccagccaaaccttggttttcctgaatggcagcaaggttttgacgggggaatatggtcggattggtccaagccttctgatatgcacaggcattcttcttctatttctccggctttatctcctcagccactcggctcatatggatcatatggccagaacatacccatggggtcacagcgacagagatcattttacggttttggatctggttcgaactcttataacagaggttatatgcatagtggtggtcgtggccagggttctaactatggaagtagactaatttctaatgtgggtatgggaaaccaaggctggattggggttgacaacagtcgagggcgtggaagggttagtgatccatctttgggtggtgcttataatggtacttttgatatcctcaatgagcaaaatcgaggaccaagggcttcaaagcccaagactcaggtcttagaggagcttgattctgctgctgattctaagaaaaataacaaaggcagtgcaaaggagcacgaggaatccaacaacgcagactttgtcaccgactacactaacgccaagttgttcatcatcaagtcttacagtgaagacaatgttcacaaaagcatcaaatacaatgtatgggctagcacccctaatggcaacaaaaagcttgacgctgcttatcgtgaggccaaggatgagaaagaaccgtgtccactttttcttctgttctcggtaaatgcgagctctcaattctgtggtgtagcagagatggttggacctgttgattttgagaagagcgttgattactggcaacaagataaatggagtggacagttcccagtgaagtggcacattatcaaagatgttccaaacagccagttccgccacattatattggaaaacaatgacaataagcctgtgactaatagtcgagacacccaagaagtaaaactggaacagggcatcgagaagctgaagatcttcaagaactacgacgctgacacgtcaatcttggatgatttcgggttttatgaagagcgggagaaaattatacaagaccggaaggcaagaagacagccaagcttgccatctgcaggagtagtagcaggagaaaatgaacataaacctgcttctgctgcattacccacagacttcatgaagaacatgtccaagagttttgcgcaagttgtccgcttggacgaaggcagcaaagaagcagtcaaggccagttcatctccagatgcaattacaacagcagcagtctcttctggtcaatccaactagtaagtaaaagacatcaattagcaaagactatgttttcaaattccataatatgatcttttgtttgttctaagaaggtatttcaaatgaaattttacgtctgaccgggtctggtttttgtgtaaagtaagcctctttcctccgcccttttctgcttcaggggtatttagccaaaatttgattcatttccctcttttcaatgttctataataccctcactcttctgagttgatagaagaagaagatgaagaagataatgtatgaaagacaatataatgtttctcttgtaaagttggcctcatttatc

SEQ ID NO: 11167 - protein, 650 aa, Arabidopsis thaliana
VLFLNQILILDLSIRFMATTQSHTSDLTSEEQPASLDIMKEQTVPANNETSASFKSSQEAPVVVHPAKVAPLTGPYGLAGDFAGHLPSSILSPQAQGFYYRGYENPTGEWDEYSSYVNVEGLDITSPVGFNENASLVYQTGYGYNPQMPYGPYSPAASPLPSEGQLYSPQQFPFSGASPYYQQVVPPSMQYITSPTQPELTSLVGVDQQGDNIGPRQSYHPHPIGPFNGNQPNLGFPEWQQGFDGGIWSDWSKPSDMHRHSSSISPALSPQPLGSYGSYGQNIPMGSQRQRSFYGFGSGSNSYNRGYMHSGGRGQGSNYGSRLISNVGMGNQGWIGVDNSRGRGRVSDPSLGGAYNGTFDILNEQNRGPRASKPKTQVLEELDSAADSKKNNKGSAKEHEESNNADFVTDYTNAKLFIIKSYSEDNVHKSIKYNVWASTPNGNKKLDAAYREAKDEKEPCPLFLLFSVNASSQFCGVAEMVGPVDFEKSVDYWQQDKWSGQFPVKWHIIKDVPNSQFRHIILENNDNKPVTNSRDTQEVKLEQGIEKLKIFKNYDADTSILDDFGFYEEREKIIQDRKARRQPSLPSAGVVAGENEHKPASAALPTDFMKNMSKSFAQVVRLDEGSKEAVKASSSPDAITTAAVSSGQSN

SEQ ID NO: 11168 - protein, 634 aa, Arabidopsis thaliana
MATTQSHTSDLTSEEQPASLDIMKEQTVPANNETSASFKSSQEAPVVVHPAKVAPLTGPYGLAGDFAGHLPSSILSPQAQGFYYRGYENPTGEWDEYSSYVNVEGLDITSPVGFNENASLVYQTGYGYNPQMPYGPYSPAASPLPSEGQLYSPQQFPFSGASPYYQQVVPPSMQYITSPTQPELTSLVGVDQQGDNIGPRQSYHPHPIGPFNGNQPNLGFPEWQQGFDGGIWSDWSKPSDMHRHSSSISPALSPQPLGSYGSYGQNIPMGSQRQRSFYGFGSGSNSYNRGYMHSGGRGQGSNYGSRLISNVGMGNQGWIGVDNSRGRGRVSDPSLGGAYNGTFDILNEQNRGPRASKPKTQVLEELDSAADSKKNNKGSAKEHEESNNADFVTDYTNAKLFIIKSYSEDNVHKSIKYNVWASTPNGNKKLDAAYREAKDEKEPCPLFLLFSVNASSQFCGVAEMVGPVDFEKSVDYWQQDKWSGQFPVKWHIIKDVPNSQFRHIILENNDNKPVTNSRDTQEVKLEQGIEKLKIFKNYDADTSILDDFGFYEEREKIIQDRKARRQPSLPSAGVVAGENEHKPASAALPTDFMKNMSKSFAQVVRLDEGSKEAVKASSSPDAITTAAVSSGQSN

SEQ ID NO: 11169 - protein, 612 aa, Arabidopsis thaliana
MKEQTVPANNETSASFKSSQEAPVVVHPAKVAPLTGPYGLAGDFAGHLPSSILSPQAQGFYYRGYENPTGEWDEYSSYVNVEGLDITSPVGFNENASLVYQTGYGYNPQMPYGPYSPAASPLPSEGQLYSPQQFPFSGASPYYQQVVPPSMQYITSPTQPELTSLVGVDQQGDNIGPRQSYHPHPIGPFNGNQPNLGFPEWQQGFDGGIWSDWSKPSDMHRHSSSISPALSPQPLGSYGSYGQNIPMGSQRQRSFYGFGSGSNSYNRGYMHSGGRGQGSNYGSRLISNVGMGNQGWIGVDNSRGRGRVSDPSLGGAYNGTFDILNEQNRGPRASKPKTQVLEELDSAADSKKNNKGSAKEHEESNNADFVTDYTNAKLFIIKSYSEDNVHKSIKYNVWASTPNGNKKLDAAYREAKDEKEPCPLFLLFSVNASSQFCGVAEMVGPVDFEKSVDYWQQDKWSGQFPVKWHIIKDVPNSQFRHIILENNDNKPVTNSRDTQEVKLEQGIEKLKIFKNYDADTSILDDFGFYEEREKIIQDRKARRQPSLPSAGVVAGENEHKPASAALPTDFMKNMSKSFAQVVRLDEGSKEAVKASSSPDAITTAAVSSGQSN

SEQ ID NO: 11170 - DNA, 1248 bp, Arabidopsis thaliana
acttcaattgccattatccgccgaattctcatggcaacatcagtcctcaaggtagctgctaaagtaattggagaagttcaagcgcttattatattcccggctataccgttcgcgatgctagcaatattctatatgttctggatatcagcggctctccatctcttcagttctggtcaagttgttcagaacaactgcaacaacactaactgctgtgcgtatgatctcgtgttaaagaaagttaattgtgaccgttgttgcggttatagcatacattacacccctcacatcaccattgctatattcttccacctgtttggttgctattgggctacacagttcttcattgcatcttctgcgacagtgattgctggctctgttgcctcctattattgggctcaaggggaagcatcgccagagataccgtttcttcctgttttcgcatcaatgaagcggcttgcacgctacaacctaggatccgtggctcttggttcactcattgtctcttttgttgagtctgttcggttcattctcgaagcaattcgtcgtaaaacaaaagtaagcgggaccatacctgatcactggttttggagaatggctcattacacttcacgtggttgtctcaaaagtgtggagtggaccatcaaatcggttaaccgtaatgcctacataatgattgctataacagggaaaagcttctgcaaatcgtctgcaatcgcgacagagctgatcataagcaacattctgaggatagggaaagttaatgtgataggagatgttatattgtttctaggaaagctttgtgtgagtctcttcagtgctctctttggcttcttgatgttggattcgcaccgatatcgtgcttctcacaacaaagtctcatccccgctattacctgttttggcatgttgggcattggggtatattgtggcaacacttttctttgcggtggttgagatgtcgatagacaccatcattctctccttctgtcaagactcagaggagaatcaagggaatgctcagcacgcaccacctcttctgcttgaaactttagatagcaatcaggaggaagaggttcagagtcttactcactgatagatccatactgtataagttttgtttcttctttggttggccggtttatatggttttttaaaatagaatcttttatctctacaacattctaagcatattgtaatgtcagatggcttgataattcttcgattccgaaaccaaaaatcatatttccgc

SEQ ID NO: 11171 - protein, 363 aa, Arabidopsis thaliana
TSIAIIRRILMATSVLKVAAKVIGEVQALIIFPAIPFAMLAIFYMFWISAALHLFSSGQVVQNNCNNTNCCAYDLVLKKVNCDRCCGYSIHYTPHITIAIFFHLFGCYWATQFFIASSATVIAGSVASYYWAQGEASPEIPFLPVFASMKRLARYNLGSVALGSLIVSFVESVRFILEAIRRKTKVSGTIPDHWFWRMAHYTSRGCLKSVEWTIKSVNRNAYIMIAITGKSFCKSSAIATELIISNILRIGKVNVIGDVILFLGKLCVSLFSALFGFLMLDSHRYRASHNKVSSPLLPVLACWALGYIVATLFFAVVEMSIDTIILSFCQDSEENQGNAQHAPPLLLETLDSNQEEEVQSLTH

SEQ ID NO: 11172 - protein, 353 aa, Arabidopsis thaliana
MATSVLKVAAKVIGEVQALIIFPAIPFAMLAIFYMFWISAALHLFSSGQVVQNNCNNTNCCAYDLVLKKVNCDRCCGYSIHYTPHITIAIFFHLFGCYWATQFFIASSATVIAGSVASYYWAQGEASPEIPFLPVFASMKRLARYNLGSVALGSLIVSFVESVRFILEAIRRKTKVSGTIPDHWFWRMAHYTSRGCLKSVEWTIKSVNRNAYIMIAITGKSFCKSSAIATELIISNILRIGKVNVIGDVILFLGKLCVSLFSALFGFLMLDSHRYRASHNKVSSPLLPVLACWALGYIVATLFFAVVEMSIDTIILSFCQDSEENQGNAQHAPPLLLETLDSNQEEEVQSLTH

SEQ ID NO: 11173 - protein, 325 aa, Arabidopsis thaliana
MLAIFYMFWISAALHLFSSGQVVQNNCNNTNCCAYDLVLKKVNCDRCCGYSIHYTPHITIAIFFHLFGCYWATQFFIASSATVIAGSVASYYWAQGEASPEIPFLPVFASMKRLARYNLGSVALGSLIVSFVESVRFILEAIRRKTKVSGTIPDHWFWRMAHYTSRGCLKSVEWTIKSVNRNAYIMIAITGKSFCKSSAIATELIISNILRIGKVNVIGDVILFLGKLCVSLFSALFGFLMLDSHRYRASHNKVSSPLLPVLACWALGYIVATLFFAVVEMSIDTIILSFCQDSEENQGNAQHAPPLLLETLDSNQEEEVQSLTH

SEQ ID NO: 11174 - DNA, 1177 bp, Arabidopsis thaliana
gctcactagtccccccccccccccccccccgctctgctccacttacctttaatcttcaatcaacggtactctcaggaacaggaatcagatcgagcaatgctcaggttaatcgttaattaccctctgattcccaagatatcccaccgggtttgtagtaacagtagtagtaagctcgggagttactatgattcttcgtcgatcataaaatatggcggaatcagcgatgttgttggtaagaagcaggagctttttctaagtgtttcggtgaaagcagtggaagacaaaggtaacaatggaggtggaagcatgagtttctcgggtcaaagctgggatcctagttccgagattgaagttccttcagaccaaagacccgtgaatgagtattcgtctctaaaggaaggaatgttgtattcatggggagaattgggtccaagcgaattctttattcgtctaggtggtctttggttggtcactttcactgttcttggagttcctgttgcagctgctagctttaatccttccagagagcctttgagatttattctagctgcagggactggaactttatttctcgtttctttgattgtcttgagaatttatctggggtggagctatgttggagatagactactttctgcagttataccttacgaagagagtggatggtatgatggacaaatgtgggtcaaaccacctgaggtgttggctcgcgacaggttgttgggttcttacaaggtgaagccagtgatcaagatgctcaaacaaacattaatcggaacaggagctttactcgtttcagcattcgtgctattcgttttcgcaacaccagtcgaggatttctttaaaaccactctaggatctacagaaaacaaccagaagtttccatttcaagaaccagcaacaagttcaatataagataagaacaattgcttcgactacccgtagatgttgtgactgacgatgatctggcagcagccgcggctgaggctgcggatggaagacctgtctattgcagagaccggtactaccgtgcattagcaggtggtcaatactgcaaatgtgaagatcttgttaaatagttgtcacactaatagaataccaacacacatactacagtatgtaatttttgcttaaaatggctttaaaagcctcatgaattatccactcattcatcact

SEQ ID NO: 11175 - protein, 272 aa, Arabidopsis thaliana
MLRLIVNYPLIPKISHRVCSNSSSKLGSYYDSSSIIKYGGISDVVGKKQELFLSVSVKAVEDKGNNGGGSMSFSGQSWDPSSEIEVPSDQRPVNEYSSLKEGMLYSWGELGPSEFFIRLGGLWLVTFTVLGVPVAAASFNPSREPLRFILAAGTGTLFLVSLIVLRIYLGWSYVGDRLLSAVIPYEESGWYDGQMWVKPPEVLARDRLLGSYKVKPVIKMLKQTLIGTGALLVSAFVLFVFATPVEDFFKTTLGSTENNQKFPFQEPATSSI

SEQ ID NO: 11176 - protein, 202 aa, Arabidopsis thaliana
MSFSGQSWDPSSEIEVPSDQRPVNEYSSLKEGMLYSWGELGPSEFFIRLGGLWLVTFTVLGVPVAAASFNPSREPLRFILAAGTGTLFLVSLIVLRIYLGWSYVGDRLLSAVIPYEESGWYDGQMWVKPPEVLARDRLLGSYKVKPVIKMLKQTLIGTGALLVSAFVLFVFATPVEDFFKTTLGSTENNQKFPFQEPATSSI

SEQ ID NO: 11177 - protein, 170 aa, Arabidopsis thaliana
MLYSWGELGPSEFFIRLGGLWLVTFTVLGVPVAAASFNPSREPLRFILAAGTGTLFLVSLIVLRIYLGWSYVGDRLLSAVIPYEESGWYDGQMWVKPPEVLARDRLLGSYKVKPVIKMLKQTLIGTGALLVSAFVLFVFATPVEDFFKTTLGSTENNQKFPFQEPATSSI

SEQ ID NO: 11178 - DNA, 1522 bp, Arabidopsis thaliana
ttggacgtgtaacgccgttaaaacgattctttcccattgtatccgcttttaacaactctcgtcgtcatctccaccgtccgttttctctcagctatattttaatggcgacaattcagaagcttgaagaagttgcaggcaaagatcaaactctaagagccgttgatctaaccatcatcaacggcgtcagaaacgtcgaaacttcaagacctttccaagtaaatcccacagtgagtctcgagcccaaggcggagccggtgatgccgtcgttttcaatgtctttagctccaccgtcttcgacaggaccaccattgaagagagcttcgactaaagaccgtcacacgaaggttgaaggaagagggagaaggatacggatgcctgccacgtgtgcggctaggatttttcaattaactcgagagttaggtcacaaatccgacggcgaaacgattcggtggttgttggagaacgctgagccggcgattatagccgccacgggtacgggaacggttcccgccatcgccatgtcggttaacggaaccttaaaaatcccgacgacgacgaacgctgattctgatatgggtgaaaatctgatgaagaagaaacgtaaacgaccttctaacagtgagtatatagacataagcgacgccgtttcagcttcctccggtttagctccaattgccacgacgacaacgatccaacctccgcaagctctggcatcatccactgtggctcagcaacttctgccgcaaggaatgtatccgatgtgggctattccatcaaacgcaatgattccgacggtcggagctttcttcttgattccacaaatcgctggtccgtcgaatcagcctcagttattagcttttcccgccgccgctgcttcgccgtcgtcttacgtcgccgctgttcaacaggcttccacgatggctagaccacctcctttacaagttgttccaagcagcggctttgtatccgtttcagacgttagcggttcgaatttatcaagagcgacgtcggttatggctccgagctcaagctcaggcgtaacaaccggtagttcatcgtcaattgcaacaacaacgacgcacacgctgagagacttctccctagagatatacgagaaacaagagcttcaccagttcatgagcaccacaacagcacggtcatcgaaccactgaagaaaagaaaggaaacggcggcgtattagtgatcggaaaaaaagcacgtgtgcacatgaagaagtgcacgtgttaagaagtgggcctcgattttaggcagaagtgggtcaacacgcaccaaaaagagagtggagggaggaggagaggggccacacggctcccaccttacgcatagcttccgaggcagccaggttgggtgtggtccccaaatggttagagctacgtggtccgtatgagtaggaccagcttaagcttaagcataattcgaaacgtttcgtttttttggtgggggctcaccactttgtcttgacttttttggtctttgtaattttacaaaataagatttattg

SEQ ID NO: 11179 - protein, 389 aa, Arabidopsis thaliana
GRVTPLKRFFPIVSAFNNSRRHLHRPFSLSYILMATIQKLEEVAGKDQTLRAVDLTIINGVRNVETSRPFQVNPTVSLEPKAEPVMPSFSMSLAPPSSTGPPLKRASTKDRHTKVEGRGRRIRMPATCAARIFQLTRELGHKSDGETIRWLLENAEPAIIAATGTGTVPAIAMSVNGTLKIPTTTNADSDMGENLMKKKRKRPSNSEYIDISDAVSASSGLAPIATTTTIQPPQALASSTVAQQLLPQGMYPMWAIPSNAMIPTVGAFFLIPQIAGPSNQPQLLAFPAAAASPSSYVAAVQQASTMARPPPLQVVPSSGFVSVSDVSGSNLSRATSVMAPSSSSGVTTGSSSSIATTTTHTLRDFSLEIYEKQELHQFMSTTTARSSNH

SEQ ID NO: 11180 - protein, 356 aa, Arabidopsis thaliana
MATIQKLEEVAGKDQTLRAVDLTIINGVRNVETSRPFQVNPTVSLEPKAEPVMPSFSMSLAPPSSTGPPLKRASTKDRHTKVEGRGRRIRMPATCAARIFQLTRELGHKSDGETIRWLLENAEPAIIAATGTGTVPAIAMSVNGTLKIPTTTNADSDMGENLMKKKRKRPSNSEYIDISDAVSASSGLAPIATTTTIQPPQALASSTVAQQLLPQGMYPMWAIPSNAMIPTVGAFFLIPQIAGPSNQPQLLAFPAAAASPSSYVAAVQQASTMARPPPLQVVPSSGFVSVSDVSGSNLSRATSVMAPSSSSGVTTGSSSSIATTTTHTLRDFSLEIYEKQELHQFMSTTTARSSNH

SEQ ID NO: 11181 - protein, 304 aa, Arabidopsis thaliana
MPSFSMSLAPPSSTGPPLKRASTKDRHTKVEGRGRRIRMPATCAARIFQLTRELGHKSDGETIRWLLENAEPAIIAATGTGTVPAIAMSVNGTLKIPTTTNADSDMGENLMKKKRKRPSNSEYIDISDAVSASSGLAPIATTTTIQPPQALASSTVAQQLLPQGMYPMWAIPSNAMIPTVGAFFLIPQIAGPSNQPQLLAFPAAAASPSSYVAAVQQASTMARPPPLQVVPSSGFVSVSDVSGSNLSRATSVMAPSSSSGVTTGSSSSIATTTTHTLRDFSLEIYEKQELHQFMSTTTARSSNH

SEQ ID NO: 11182 - DNA, 1934 bp, Arabidopsis thaliana
gacagaccgctagttttttttgccactctcttcgtctctctcttgtagcaatgccgcttcttcatccacagtcgttgcggcatccttctttcgagattcagacccaaagaagaagcaattccacaacaagattgcttctttctcacaagtttctccattctcaagcttccattatctcaatctccaggacaagaatcctcaaacgggtctctcagaatctctctgtagctaaagctgcttcagctcaaggttataaagtttgttcctttgtctccgcctgaaaaattgttaacgttatacgcgaaggagactaagcaagttctgatattttttaacttatgcattttggaaaacagctagtagtagtgttggtgagagtgttgctcaaacatcagaaaaagatgtgttgaaggctctgtctcagattattgatcctgattttgggacagatattgtttcttgtggttttgtgaaagatttggggattaatgaagctttgggtgaggtttcgttccgtttggagctgacaacacccgcatgtccagtcaaagacatgtttgagaacaaggcaaatgaggtagttgcagcccttccatgggtgaagaaggtaaatctgacaatgtcagcacaaccagccaagcccatttttgcagggcagcttccctttggattatcaagaatttcgaacatcatcgctgtttctagttgcaagggtggtgttgggaaatcaacagtagctgtaaatcttgcttatacattagctggtatgggtgctagagttggtatctttgatgctgatgtctatggtccaagtctaccaaccatggtcaatcctgagagccgtatattggaaatgaacccggagaagaagaccatcattccaacagaatacatgggcgtcaagctagtctcatttggatttgcaggacaagggcgtgccattatgagaggtcctatggtgtctggtgttataaaccaactccttacaacaactgaatggggagagctggactatcttgttatcgacatgcctcctggaactggtgatatacaactgaccttatgccaggttgcgccattgacagcagcggtaaatgtcaccacccctcaaaagttggcgtttattgatgttgcaaaaggtgtaaggatgttctcaaaacttaaggtgccttgcgttgctgttgtggagaatatgtgccactttgacgctgatgggaaacgttattacccttttgggaaaggttcaggttctgaggtggtcaagcaattcggcatacctcacctctttgacctccccattagaccaacgttatctgcttcgggggatagcggaactcctgaagtagtgtcggatcctctaagtgacgttgccagaacgttccaggatcttggtgtatgtgtagtgcaacaatgcgccaagatacgccagcaagtatcaacggccgtgacatacgacaagtatctcaaggcaattagagtgaaggtaccaaactcagacgaagagttcttactgcaccctgcaaccgtcagaagaaatgatagatctgcacaaagtgtggatgaatggactggagagcaaaaagttctatatggcgatgtagcggaagatatcgaacctgaggacatacgaccaatgggaaactacgctgtctcgataacctggcccgacgggtttagccagattgctccatatgaccagttggaagaaattgaaaggctagtagatgttcctccattgtctccagtcgaagtctagttcttgaacaatatgttttcgctttacgatatctcttgaaaatgaaatttgtatattcatattaagagcattgttatgaatcttacaatgatgaaaagagggttactgtaagcttttatttttactattataaactacagttataaccacagattttggactaggacgtagttgatct

SEQ ID NO: 11183 - protein, 400 aa, Arabidopsis thaliana
MFENKANEVVAALPWVKKVNLTMSAQPAKPIFAGQLPFGLSRISNIIAVSSCKGGVGKSTVAVNLAYTLAGMGARVGIFDADVYGPSLPTMVNPESRILEMNPEKKTIIPTEYMGVKLVSFGFAGQGRAIMRGPMVSGVINQLLTTTEWGELDYLVIDMPPGTGDIQLTLCQVAPLTAAVNVTTPQKLAFIDVAKGVRMFSKLKVPCVAVVENMCHFDADGKRYYPFGKGSGSEVVKQFGIPHLFDLPIRPTLSASGDSGTPEVVSDPLSDVARTFQDLGVCVVQQCAKIRQQVSTAVTYDKYLKAIRVKVPNSDEEFLLHPATVRRNDRSAQSVDEWTGEQKVLYGDVAEDIEPEDIRPMGNYAVSITWPDGFSQIAPYDQLEEIERLVDVPPLSPVEV

SEQ ID NO: 11184 - protein, 378 aa, Arabidopsis thaliana
MSAQPAKPIFAGQLPFGLSRISNIIAVSSCKGGVGKSTVAVNLAYTLAGMGARVGIFDADVYGPSLPTMVNPESRILEMNPEKKTIIPTEYMGVKLVSFGFAGQGRAIMRGPMVSGVINQLLTTTEWGELDYLVIDMPPGTGDIQLTLCQVAPLTAAVNVTTPQKLAFIDVAKGVRMFSKLKVPCVAVVENMCHFDADGKRYYPFGKGSGSEVVKQFGIPHLFDLPIRPTLSASGDSGTPEVVSDPLSDVARTFQDLGVCVVQQCAKIRQQVSTAVTYDKYLKAIRVKVPNSDEEFLLHPATVRRNDRSAQSVDEWTGEQKVLYGDVAEDIEPEDIRPMGNYAVSITWPDGFSQIAPYDQLEEIERLVDVPPLSPVEV

SEQ ID NO: 11185 - protein, 329 aa, Arabidopsis thaliana
MGARVGIFDADVYGPSLPTMVNPESRILEMNPEKKTIIPTEYMGVKLVSFGFAGQGRAIMRGPMVSGVINQLLTTTEWGELDYLVIDMPPGTGDIQLTLCQVAPLTAAVNVTTPQKLAFIDVAKGVRMFSKLKVPCVAVVENMCHFDADGKRYYPFGKGSGSEVVKQFGIPHLFDLPIRPTLSASGDSGTPEVVSDPLSDVARTFQDLGVCVVQQCAKIRQQVSTAVTYDKYLKAIRVKVPNSDEEFLLHPATVRRNDRSAQSVDEWTGEQKVLYGDVAEDIEPEDIRPMGNYAVSITWPDGFSQIAPYDQLEEIERLVDVPPLSPVEV

SEQ ID NO: 11186 - DNA, 2234 bp, Arabidopsis thaliana
gacccaaaacaacatcttttaagcttctcccgcaaaattcagcaaagctttcggaggaatctcctaacagtcaccaccaccaccaccgtctaggtcaaatctcgtcttcctcacgctctatttctccatagaatatttcctaactcctcctccggtttatcgattttttcaatttttctagggtttcgcgccgggatctaaaaaatcacaatcatgccggtgagtttgactccgaacgcaatcacggcgatacatgacggcgacgtgaatttgaagccgttgttacagattttagaaatcaaaatgataggaagaagtcaagagagaagccaagagaggtatcgtttcctcatttcagatggtgtttctgctcaacatgctatggtcgcggttcagcttaataatcgagtcaagtcaggacaatttgagaaaggatctatcgttcagcttattgattacatttgtagcgacgttaaaggccgcaagcttattgtggtgctgaacatggagacgatagtacaacagtctgaaaccattgggaaccctacaatatttggagaaacagatacagaagcccagaagacattttcaggtacgggcaatataccgcctccgaacagggttgtttttaatgaaccaatggttcagcattctgttaatagagcacctcccaggggtgtaaacattcaaaatcaagccaacaatactccaagcttcaggccatctgttcaaccttcatatcaaccgccagcaagttacagaaatcatggacccatcatgaagaacgaggctccagctcgagtcatccctattgctgctctcaatccataccaaggtcgatgggctattaaggctagagtaactgcgaaaggagatatcagacgatataacaatgcaaaaggagatggaaaggttttctcgtttgatctgcttgactatgatggaggggagattcgggttacgtgctttaatgctcttgttgaccgtttctatgatgttactgaggttggtaaggtatatttgatttcaaagggaagtttgaagcctgcacagaaaaatttcaaccacttaaagaatgaatgggaaattttcttggagtcaacatcgactgtggagctttgccctgatgaagatggctccataccaaagcagcaattctccttccgcccaataagtgacattgagaacgctgagaacaataccatactcgatgtcattggtgtggtgacttctgtgaacccctcggtgccaatcttgagaaagaacgggatggaaacccataggaggatcctgaatctaaaggatgaatcaggaaaggctgtagaggtaacactttggggagaattctgtaaccgagatggtcggcaactggaagagatggttgattcagcttttcacccggttttagcaataaaagctggaaaagtaagcgacttcagtgggaaatcagtagggacaatatcttcaacacagctcttcataaatccagatttccctgaagctcataaactacggacctggttcgattacgggggaaaagacactgcttccttctccatctccagggacactatgcctggaggagtttccaggaacgagataaagaaaaatgtttctcagatcaaagaggaaggtcttggaagatcagataagcctgactggatcactgtgaaagcaaccatatcattcatcaaaacagatagcttctgttatacagcttgtcctttgatgatcggggataaacaatgcaacaagaaggttacacggtctggaacaaacaggtggctctgtgaccggtgcaaccaagagtctgatgaatgcgactatagataccttcttcaggtacagattcaagaccacactgggttgacttggataaccgcgtttcaagaaacaggagaagaaataatgggatgtccggctaagaagctttacgcaatgaaatacgaattggagaaggaggaagagttcgcagagattgttagagacagactgtttcatcagtacatgttgaagctgaagatcaaagaggaatcgtatggggatgaacaaagagtgaagatgactgttgtgaaggttgataaggtgaattatacatccgagagtaaatacatgcttgatttgctcgtaaggtaagttcgttctaggtattacagtgaggtatttcaattaactcagaatatgcaagctcgagtttagtacactattatattatgaattgatgaattctattg

SEQ ID NO: 11187 - protein, 640 aa, Arabidopsis thaliana
MPVSLTPNAITAIHDGDVNLKPLLQILEIKMIGRSQERSQERYRFLISDGVSAQHAMVAVQLNNRVKSGQFEKGSIVQLIDYICSDVKGRKLIVVLNMETIVQQSETIGNPTIFGETDTEAQKTFSGTGNIPPPNRVVFNEPMVQHSVNRAPPRGVNIQNQANNTPSFRPSVQPSYQPPASYRNHGPIMKNEAPARVIPIAALNPYQGRWAIKARVTAKGDIRRYNNAKGDGKVFSFDLLDYDGGEIRVTCFNALVDRFYDVTEVGKVYLISKGSLKPAQKNFNHLKNEWEIFLESTSTVELCPDEDGSIPKQQFSFRPISDIENAENNTILDVIGVVTSVNPSVPILRKNGMETHRRILNLKDESGKAVEVTLWGEFCNRDGRQLEEMVDSAFHPVLAIKAGKVSDFSGKSVGTISSTQLFINPDFPEAHKLRTWFDYGGKDTASFSISRDTMPGGVSRNEIKKNVSQIKEEGLGRSDKPDWITVKATISFIKTDSFCYTACPLMIGDKQCNKKVTRSGTNRWLCDRCNQESDECDYRYLLQVQIQDHTGLTWITAFQETGEEIMGCPAKKLYAMKYELEKEEEFAEIVRDRLFHQYMLKLKIKEESYGDEQRVKMTVVKVDKVNYTSESKYMLDLLVR

SEQ ID NO: 11188 - protein, 610 aa, Arabidopsis thaliana
MIGRSQERSQERYRFLISDGVSAQHAMVAVQLNNRVKSGQFEKGSIVQLIDYICSDVKGRKLIVVLNMETIVQQSETIGNPTIFGETDTEAQKTFSGTGNIPPPNRVVFNEPMVQHSVNRAPPRGVNIQNQANNTPSFRPSVQPSYQPPASYRNHGPIMKNEAPARVIPIAALNPYQGRWAIKARVTAKGDIRRYNNAKGDGKVFSFDLLDYDGGEIRVTCFNALVDRFYDVTEVGKVYLISKGSLKPAQKNFNHLKNEWEIFLESTSTVELCPDEDGSIPKQQFSFRPISDIENAENNTILDVIGVVTSVNPSVPILRKNGMETHRRILNLKDESGKAVEVTLWGEFCNRDGRQLEEMVDSAFHPVLAIKAGKVSDFSGKSVGTISSTQLFINPDFPEAHKLRTWFDYGGKDTASFSISRDTMPGGVSRNEIKKNVSQIKEEGLGRSDKPDWITVKATISFIKTDSFCYTACPLMIGDKQCNKKVTRSGTNRWLCDRCNQESDECDYRYLLQVQIQDHTGLTWITAFQETGEEIMGCPAKKLYAMKYELEKEEEFAEIVRDRLFHQYMLKLKIKEESYGDEQRVKMTVVKVDKVNYTSESKYMLDLLVR

SEQ ID NO: 11189 - protein, 584 aa, Arabidopsis thaliana
MVAVQLNNRVKSGQFEKGSIVQLIDYICSDVKGRKLIVVLNMETIVQQSETIGNPTIFGETDTEAQKTFSGTGNIPPPNRVVFNEPMVQHSVNRAPPRGVNIQNQANNTPSFRPSVQPSYQPPASYRNHGPIMKNEAPARVIPIAALNPYQGRWAIKARVTAKGDIRRYNNAKGDGKVFSFDLLDYDGGEIRVTCFNALVDRFYDVTEVGKVYLISKGSLKPAQKNFNHLKNEWEIFLESTSTVELCPDEDGSIPKQQFSFRPISDIENAENNTILDVIGVVTSVNPSVPILRKNGMETHRRILNLKDESGKAVEVTLWGEFCNRDGRQLEEMVDSAFHPVLAIKAGKVSDFSGKSVGTISSTQLFINPDFPEAHKLRTWFDYGGKDTASFSISRDTMPGGVSRNEIKKNVSQIKEEGLGRSDKPDWITVKATISFIKTDSFCYTACPLMIGDKQCNKKVTRSGTNRWLCDRCNQESDECDYRYLLQVQIQDHTGLTWITAFQETGEEIMGCPAKKLYAMKYELEKEEEFAEIVRDRLFHQYMLKLKIKEESYGDEQRVKMTVVKVDKVNYTSESKYMLDLLVR

SEQ ID NO: 11190 - DNA, 1964 bp, Arabidopsis thaliana
gggaggatcctgcgaagaccaaccagtctgttaattttgtataaacaatgaaacgaagaagatcttccgagaatattctctccttctcacgcataccctagaatattgtttcgtctctcttccttctacgtttgcttatttgccccaactcgacgcgaatcatcagcttttataaattctgtcaactcaaagattgtttctgaattggaatcttacagaggtttagcttgagatgatatgactaatcagcaggagcaacacattgcgatatttacaacagctagtattccatggcttacgggaactgctgttaatcctctcttccgtgctgcctaccttgcaaatgatggggaaagacgggtcacgttggtgattccatggctgactttgaagcaccaaaagcttgtctacccaaatagcatcacttttagttccccgtcagagcaagaagcttatgtccgccagtggcttgaggagagagtctcttttcgtttagcctttgagatacgtttctatcctggaaagtttgctattgacaaaaggagtattcttcctgttggggatatatctgatgccattcctgatgaagaggcagacattgctgtcctcgaggagcctgagcatctcacatggtttcatcatggccaaaaatggaaaactaagttcaactacgtcataggaatcgtacacactaactacttggaatacgttaaaagagagaaacaaggccgtgtcaaagcatttttcctcaaatacttaaatagttgggttgttggcatttactgccacaaggtaaacttctttcttctttacagccactaggacatgatagagtgattgctcaattatgtgaatatatccaatggctgggtttaatttgagaatcaagacagtttgttggaatgtgaccacaattatggccggtccttttgatgtgaatcaggacttgtaccaatgatgttactcctgcaagtaatcaagttatctgctgcgactcaggaataccctaaatctatagtctgcaatgttcatggcgtcaaccctaaatttctcgaaattgggttgagaaaactagaacagcagaagctccaggagcagcccttcactaaaggcgcatactacattggtaagatggtctggagcaaagggtacaaggagcttcttaaactacttgagaaacaccaaaaggaacttgccgagttagaggttgatttatacggtgatggagaggactctgaagagatcaaagaagcagcccgaaaactcgacttgacggttaatgtttacccaggacgtgatcacgctgactcgctatttcacaactataaagtgtttctcaaccccagcacgacagacgttgtgtgtacaacaactgcagaagccttggcgatgggaaaaatagtagtatgcgcgaatcacatatcgaacaagttcttcaaacagtttcccaactgcagaacctatgacgatggacaaggttttgtaagagccacactcaaggctcttggggaacaaccatcgcaacttacagagcaacaaaggcatgaactatcatgggaagctgctacacaacggtttataaaagtctctgatctgaaccggttatcaagagctgattcgaacttgtcaaagagaagtgtgtttgcgtcatcttcgattagtgtggggaaaaacttggaggatatgtcagcgtatattcatttcttggcgtctggatttgaagcttccagaacagcttttggtgctatacctggaagcttgcagcccgatgaagagttatgtagagatcttggtttgtctctcaacactccttccccaaatactcgcaagcaagattgacctgttttttaatttatctttgtctgcatatcattgggatatttttgtgtataaatcaatgtatactatctgaatcattctatagcagctttggtgtaatattgatgatgaaagttagatttttc

SEQ ID NO: 11191 - protein, 294 aa, Arabidopsis thaliana
MMLLLQVIKLSAATQEYPKSIVCNVHGVNPKFLEIGLRKLEQQKLQEQPFTKGAYYIGKMVWSKGYKELLKLLEKHQKELAELEVDLYGDGEDSEEIKEAARKLDLTVNVYPGRDHADSLFHNYKVFLNPSTTDVVCTTTAEALAMGKIVVCANHISNKFFKQFPNCRTYDDGQGFVRATLKALGEQPSQLTEQQRHELSWEAATQRFIKVSDLNRLSRADSNLSKRSVFASSSISVGKNLEDMSAYIHFLASGFEASRTAFGAIPGSLQPDEELCRDLGLSLNTPSPNTRKQD

SEQ ID NO: 11192 - protein, 293 aa, Arabidopsis thaliana
MLLLQVIKLSAATQEYPKSIVCNVHGVNPKFLEIGLRKLEQQKLQEQPFTKGAYYIGKMVWSKGYKELLKLLEKHQKELAELEVDLYGDGEDSEEIKEAARKLDLTVNVYPGRDHADSLFHNYKVFLNPSTTDVVCTTTAEALAMGKIVVCANHISNKFFKQFPNCRTYDDGQGFVRATLKALGEQPSQLTEQQRHELSWEAATQRFIKVSDLNRLSRADSNLSKRSVFASSSISVGKNLEDMSAYIHFLASGFEASRTAFGAIPGSLQPDEELCRDLGLSLNTPSPNTRKQD

SEQ ID NO: 11193 - protein, 235 aa, Arabidopsis thaliana
MVWSKGYKELLKLLEKHQKELAELEVDLYGDGEDSEEIKEAARKLDLTVNVYPGRDHADSLFHNYKVFLNPSTTDVVCTTTAEALAMGKIVVCANHISNKFFKQFPNCRTYDDGQGFVRATLKALGEQPSQLTEQQRHELSWEAATQRFIKVSDLNRLSRADSNLSKRSVFASSSISVGKNLEDMSAYIHFLASGFEASRTAFGAIPGSLQPDEELCRDLGLSLNTPSPNTRKQD

SEQ ID NO: 11194 - DNA, 1382 bp, Arabidopsis thaliana
tgtgtcttaagttcttgcctacaggaagccagaaacattgaagactttctggagaacttcaaagatgaccccacagtcaaaattcctggagtatacaagaatctttgtggtccgcgggttctggtaatggagtggattgatggtattcggtgcactgacccacaggccatcaaggatgcagggattgatttaaatggattcttgactgttggcgtaagtgctgctctaaggcagctgttggaatttggattgttccatggagatccacatcctggaaatatctttgcaatgcaagatgggcgtatcgcttatgtggacttcggtaatgttgctgtactgagtcagcaaaacaagcaaattttgattgatgctgttgttcatgcggttaatgaggactatggggagatggcaaatgatttcactaggcttgggttcttggccaaggataccgatgtttctcctatcgttccagctttagaagccatctggcagaactctgcagggaaaggacttgcagatttcaatttccgaagtgttacaggacaattcaacaagcttgtgtacgactttcccatccgtatcccagagcggttctctcttgttattcgttctctgcttacgcaggagggtatatgtttcacactgaagcctgattttaaatttctagaggttgcttatccatatgtagcaaaacggctcctaacggatccaaatcctgcacttcgggaacgcttgatacaggttctattcaaagatggtgttttccaatggaaaaggctagaaaaccttttatcacttgcaaaggaaaacgtcgccaagatgagtagcaatcctaatctacgagtaaagcgtgtggagagtaagcttgacttgacagataccattaaggacggagctcgtcttttcctccttgacgaaggcatccgcaggaaacttattcttgcactcacagaggactcgaagcttcatgtagaagagcttgtggacgtatacagattggttgaagacgaagtagatattcccacactggccatgcaagtcgtgcaagatttaccgaatgttttccgagattttgtgttgtcatggagcaactcagtattatccgacagataatgaatcagcttctcacttactttttttggctctttttgaagaggaaagaggtaatatatattacagggagtagatggagaagaaaagcgtagattaatatatagtttaatcttcgatgcatacatgttattaacttatacaccaatccatacatgtaattatataaaagcacacacaaacttcacttcacttgttacccagtttgagtcttggtctcttggacgttgtctactgtagttggatatctaaacacattaatcgacgtcatc

SEQ ID NO: 11195 - protein, 370 aa, Arabidopsis thaliana
CVLSSCLQEARNIEDFLENFKDDPTVKIPGVYKNLCGPRVLVMEWIDGIRCTDPQAIKDAGIDLNGFLTVGVSAALRQLLEFGLFHGDPHPGNIFAMQDGRIAYVDFGNVAVLSQQNKQILIDAVVHAVNEDYGEMANDFTRLGFLAKDTDVSPIVPALEAIWQNSAGKGLADFNFRSVTGQFNKLVYDFPIRIPERFSLVIRSLLTQEGICFTLKPDFKFLEVAYPYVAKRLLTDPNPALRERLIQVLFKDGVFQWKRLENLLSLAKENVAKMSSNPNLRVKRVESKLDLTDTIKDGARLFLLDEGIRRKLILALTEDSKLHVEELVDVYRLVEDEVDIPTLAMQVVQDLPNVFRDFVLSWSNSVLSDR

SEQ ID NO: 11196 - protein, 328 aa, Arabidopsis thaliana
MEWIDGIRCTDPQAIKDAGIDLNGFLTVGVSAALRQLLEFGLFHGDPHPGNIFAMQDGRIAYVDFGNVAVLSQQNKQILIDAVVHAVNEDYGEMANDFTRLGFLAKDTDVSPIVPALEAIWQNSAGKGLADFNFRSVTGQFNKLVYDFPIRIPERFSLVIRSLLTQEGICFTLKPDFKFLEVAYPYVAKRLLTDPNPALRERLIQVLFKDGVFQWKRLENLLSLAKENVAKMSSNPNLRVKRVESKLDLTDTIKDGARLFLLDEGIRRKLILALTEDSKLHVEELVDVYRLVEDEVDIPTLAMQVVQDLPNVFRDFVLSWSNSVLSDR

SEQ ID NO: 11197 - protein, 274 aa, Arabidopsis thaliana
MQDGRIAYVDFGNVAVLSQQNKQILIDAVVHAVNEDYGEMANDFTRLGFLAKDTDVSPIVPALEAIWQNSAGKGLADFNFRSVTGQFNKLVYDFPIRIPERFSLVIRSLLTQEGICFTLKPDFKFLEVAYPYVAKRLLTDPNPALRERLIQVLFKDGVFQWKRLENLLSLAKENVAKMSSNPNLRVKRVESKLDLTDTIKDGARLFLLDEGIRRKLILALTEDSKLHVEELVDVYRLVEDEVDIPTLAMQVVQDLPNVFRDFVLSWSNSVLSDR

SEQ ID NO: 11198 - DNA, 2411 bp, Arabidopsis thaliana
ggatgaagaccagctcaaagccaggtcaaaatccatcaatcctggcctcatcaatgttaaaaatctttactttcacacatctctagatcttccatagaaggatcaatcaaaagctgtaatctttctttcttcctcgtagctccttctcttgcggatccttgtcggtacacttctacattctcaaatctgattcctttctggagttgctcctgagctacggttcagcttcaattacttcgatctcgtgtaaaaatcacttctagaagctttgataagctttgataggagttggttttactctttagggttttgtttgagtttgatctttattgtatagatgttgtgatcttcgtacactctatatatgtttccaagggtttctatgaggcgtcgctctgctgaagtttctcctacagagccaatggagaagggaaatggaaaaaatcagactaatcgaatctgtttgttggttgctttgtcactctttttctgggcattgttgttgtacttccattttgttgtcttagggactagtaacattgataaacagctccaattgcaacctagttatgctcaatctcagccatcatcagtctctcttcgtgttgataaattccctatagagcctcatgcagctccatcgaaaccacctcccaaagagcctttagttactatcgataagccaatactccctcctgcaccagtagccaattctagttccacctttaagccacctagaattgttgagagcgggaagaaacaggagttttcgtttataagagccttgaagacagtagacaacaagagtgacccttgtggagggaagtacatttatgttcacaatctaccctcaaagttcaatgaggatatgcttagagactgtaagaagcttagtctctggactaacatgtgtaagttcacaaccaatgctggccttgggccgccgcttgagaatgttgaaggtgtcttctctgatgaaggttggtatgcgactaatcagtttgctgttgatgtgatattcagcaaccggatgaagcagtacaaatgtttgacaaatgattcttcccttgctgctgccatctttgtgccgttctatgctggattcgacattgctaggtatctgtggggatacaatatctcgagaagggatgctgcttcgcttgagttggtcgattggctcatgaagcggcctgagtgggatataatgaggggaaaagatcatttccttgtggcgggtaggataacgtgggattttaggagattgtctgaagaagaaactgattggggcaacaagcttctcttcttaccggctgccaagaacatgtctatgcttgtggttgagtcgagcccatggaatgctaatgattttgggatcccgtacccaacctacttccacccagcaaaggactcagaggtttttgaatggcaagaccggatgagaaacctggaaaggaagtggcttttctcgtttgcaggagccccacgacctgacaatccgaaatctatcagagggcagatcattgatcaatgtcgaaactcaaatgttggcaaattattagaatgcgattttggggagagcaaatgccatgcaccaagcagcattatgcaaatgtttcaaagctctctcttctgcctgcagccacagggagactcttacacccgaagatcggcatttgactcaatgcttgccggttgtataccggtcttcttccatccgggttcagcctacacgcaatacacgtggcatctacccaagaactacacaacctactcggtattcatccccgaggatgatgttcggaagagaaacataagcatcgaggagcgactcctccagattccagccaagcaggtcaagataatgagagagaatgtcatcaacctcatcccaaggctgatctacgcagacccgagatcagaactggagacgcagaaagatgcatttgatgtctcggtacaggctgtgatagacaaggtgactcggttaaggaagaacatgatcgagggccgaaccgagtatgactacttcgtggaggagaacagctggaagtatgcgttgctggaggaaggccaacgggaagcagggggccatgtgtgggacccgttcttctccaaaccaaagcccggagaagatggcagcagcgatggtaatggaggcacgactatttcagcagatgcagctaagaattcatggaagagtgagcagagagaaagacacagtgaaaagagacagaaaccacattttgttacggttttgatatagttttcggttactatttatacggacaaaaaatgatttatttttgttgtattggtatcaaatgtagtttctccagtttcatagagataagtttgtttgtatcagttacccacagaaattaataataagaagtgacccttttcaagttttt

SEQ ID NO: 11199 - protein, 632 aa, Arabidopsis thaliana
MFPRVSMRRRSAEVSPTEPMEKGNGKNQTNRICLLVALSLFFWALLLYFHFVVLGTSNIDKQLQLQPSYAQSQPSSVSLRVDKFPIEPHAAPSKPPPKEPLVTIDKPILPPAPVANSSSTFKPPRIVESGKKQEFSFIRALKTVDNKSDPCGGKYIYVHNLPSKFNEDMLRDCKKLSLWTNMCKFTTNAGLGPPLENVEGVFSDEGWYATNQFAVDVIFSNRMKQYKCLTNDSSLAAAIFVPFYAGFDIARYLWGYNISRRDAASLELVDWLMKRPEWDIMRGKDHFLVAGRITWDFRRLSEEETDWGNKLLFLPAAKNMSMLVVESSPWNANDFGIPYPTYFHPAKDSEVFEWQDRMRNLERKWLFSFAGAPRPDNPKSIRGQIIDQCRNSNVGKLLECDFGESKCHAPSSIMQMFQSSLFCLQPQGDSYTRRSAFDSMLAGCIPVFFHPGSAYTQYTWHLPKNYTTYSVFIPEDDVRKRNISIEERLLQIPAKQVKIMRENVINLIPRLIYADPRSELETQKDAFDVSVQAVIDKVTRLRKNMIEGRTEYDYFVEENSWKYALLEEGQREAGGHVWDPFFSKPKPGEDGSSDGNGGTTISADAAKNSWKSEQRERHSEKRQKPHFVTVLI

SEQ ID NO: 11200 - protein, 626 aa, Arabidopsis thaliana
MRRRSAEVSPTEPMEKGNGKNQTNRICLLVALSLFFWALLLYFHFVVLGTSNIDKQLQLQPSYAQSQPSSVSLRVDKFPIEPHAAPSKPPPKEPLVTIDKPILPPAPVANSSSTFKPPRIVESGKKQEFSFIRALKTVDNKSDPCGGKYIYVHNLPSKFNEDMLRDCKKLSLWTNMCKFTTNAGLGPPLENVEGVFSDEGWYATNQFAVDVIFSNRMKQYKCLTNDSSLAAAIFVPFYAGFDIARYLWGYNISRRDAASLELVDWLMKRPEWDIMRGKDHFLVAGRITWDFRRLSEEETDWGNKLLFLPAAKNMSMLVVESSPWNANDFGIPYPTYFHPAKDSEVFEWQDRMRNLERKWLFSFAGAPRPDNPKSIRGQIIDQCRNSNVGKLLECDFGESKCHAPSSIMQMFQSSLFCLQPQGDSYTRRSAFDSMLAGCIPVFFHPGSAYTQYTWHLPKNYTTYSVFIPEDDVRKRNISIEERLLQIPAKQVKIMRENVINLIPRLIYADPRSELETQKDAFDVSVQAVIDKVTRLRKNMIEGRTEYDYFVEENSWKYALLEEGQREAGGHVWDPFFSKPKPGEDGSSDGNGGTTISADAAKNSWKSEQRERHSEKRQKPHFVTVLI

SEQ ID NO: 11201 - protein, 613 aa, Arabidopsis thaliana
MEKGNGKNQTNRICLLVALSLFFWALLLYFHFVVLGTSNIDKQLQLQPSYAQSQPSSVSLRVDKFPIEPHAAPSKPPPKEPLVTIDKPILPPAPVANSSSTFKPPRIVESGKKQEFSFIRALKTVDNKSDPCGGKYIYVHNLPSKFNEDMLRDCKKLSLWTNMCKFTTNAGLGPPLENVEGVFSDEGWYATNQFAVDVIFSNRMKQYKCLTNDSSLAAAIFVPFYAGFDIARYLWGYNISRRDAASLELVDWLMKRPEWDIMRGKDHFLVAGRITWDFRRLSEEETDWGNKLLFLPAAKNMSMLVVESSPWNANDFGIPYPTYFHPAKDSEVFEWQDRMRNLERKWLFSFAGAPRPDNPKSIRGQIIDQCRNSNVGKLLECDFGESKCHAPSSIMQMFQSSLFCLQPQGDSYTRRSAFDSMLAGCIPVFFHPGSAYTQYTWHLPKNYTTYSVFIPEDDVRKRNISIEERLLQIPAKQVKIMRENVINLIPRLIYADPRSELETQKDAFDVSVQAVIDKVTRLRKNMIEGRTEYDYFVEENSWKYALLEEGQREAGGHVWDPFFSKPKPGEDGSSDGNGGTTISADAAKNSWKSEQRERHSEKRQKPHFVTVLI

SEQ ID NO: 11202 - DNA, 1166 bp, Arabidopsis thaliana
tatgtctttgaagacgcgaacaatggatgcgttgcgtttctggtaaacaatgacgctaaagccagtcaaatacaattcagaaacaatgcgtatagcttgagtcccaagtcaattggtattcttcagaactgcaaaaacctaatttatgaaactgcaaaagtgaatgtgaagatgaatacgagagttacaacgccggttcaagtgttcaacgttcccgataactggaatttgtttagagaaacaatccctgcattcccaggcacatctttgaagacaaatgctttgttggaacacactaatttgacaaaggacaaaactgattatctttggtacacttcaagctttaagctggattcaccctgcacgaacccgtctatctacacagaatcatcaggacatgttgtccacgtgttcgtcaacaatgcactagcaggatctggacatggaagcagagacataagggtagttaaactacaagctccggttagcttaatcaatggacaaaacaatatatcgatcctcagcggcatggttggtctaccggactctggagcttacatggagaggagatcttatggactaaccaaagtacaaattagctgtggcgggacaaaacccatcgatttgagtagatctcaatggggttactcggtgggtttgcttggagagaaagttaggttatatcaatggaagaatttaaatagagtgaagtggagtatgaataaagctggactaattaagaaccgccccctcgcttggtacaagacaacgtttgatgggccgaatggagatgggcccgtgggcctacacatgtcgagtatgggtaaaggagaaatttgggtgaatggtgaaagcattggtcgttattgggtctcgtttctcacccctgctggacaaccttctcaatctatatatcatattcctcgggcgttcttaaaaccatctggaaatttattggtggtatttgaagaggaaggtggtgatcctcttgggatatctttgaatacaatatcggttgttggttcgagtcaagctcaatctcaattctactgaagattattttttaaaaaatggtttttgggtaattgggggtgttttataaaccaaacaatacattatattgaaatgatacaatacacaaattgaatgaaatatacaggtttcat

SEQ ID NO: 11203 - protein, 350 aa, Arabidopsis thaliana
YVFEDANNGCVAFLVNNDAKASQIQFRNNAYSLSPKSIGILQNCKNLIYETAKVNVKMNTRVTTPVQVFNVPDNWNLFRETIPAFPGTSLKTNALLEHTNLTKDKTDYLWYTSSFKLDSPCTNPSIYTESSGHVVHVFVNNALAGSGHGSRDIRVVKLQAPVSLINGQNNISILSGMVGLPDSGAYMERRSYGLTKVQISCGGTKPIDLSRSQWGYSVGLLGEKVRLYQWKNLNRVKWSMNKAGLIKNRPLAWYKTTFDGPNGDGPVGLHMSSMGKGEIWVNGESIGRYWVSFLTPAGQPSQSIYHIPRAFLKPSGNLLVVFEEEGGDPLGISLNTISVVGSSQAQSQFY

SEQ ID NO: 11204 - protein, 293 aa, Arabidopsis thaliana
MNTRVTTPVQVFNVPDNWNLFRETIPAFPGTSLKTNALLEHTNLTKDKTDYLWYTSSFKLDSPCTNPSIYTESSGHVVHVFVNNALAGSGHGSRDIRVVKLQAPVSLINGQNNISILSGMVGLPDSGAYMERRSYGLTKVQISCGGTKPIDLSRSQWGYSVGLLGEKVRLYQWKNLNRVKWSMNKAGLIKNRPLAWYKTTFDGPNGDGPVGLHMSSMGKGEIWVNGESIGRYWVSFLTPAGQPSQSIYHIPRAFLKPSGNLLVVFEEEGGDPLGISLNTISVVGSSQAQSQFY

SEQ ID NO: 11205 - DNA, 2255 bp, Arabidopsis thaliana
gagaaccttctttttccggcgagggaaaagcttcctcagccctaatcgctaaatcgatgaaattatgctcccaacgtttaacggtttaaagatcattccaaaaactcaaccttttgcgtgtctcctctcgccatgaccctaatctcaagatttttgatctctagagtgattagtagaactctgttttcgaatcagaataatagaacagctattaatgtttctgtaaagttgccacaattcagaattcagagtaatggatatcacacattgggtcttcttcataatgttaaaggaaggtttttaggtagtaatcatcatcagcttgcgcgtaggagctattcgattgcagttgcgagtaatgtagttaagcaacatgctcaagtctcttggggaaggcttgtacagagagtaactctgagtcgtagttggaacttacctcggataagtcagattgctcaagcgtgtagcttgtctttagcccgttcgcacttcttgttacctggtttattggctcttacctatagacaagtggcgtatgcgcaaagggtggttccaaatcctgtggtctattctccttcacacatttctccttataggagttcgataaacttccctatcgttctctcgtctttagtgttttctgcggtcaagggtgttgttctgaacgggagagctctttatttagcaattttgttttctccaaatgttattatggcgttgttgggatttgcttgcgggcctcgttacagacagctgcagtatgaggtcctccatcgaactctggagaaagcaggtcctgcttttatcaaatttggtcaatggattgctacgcgacctgatcggtttaataaggatttgtgtttgcagctttcaaagcttcacagtaatgctcctgagcacagttttgcgttcaccaaaaagagcattgaaaatgcatttggtcgtaaactctctgagatatttgaggaatttgatgaggcgccagtggcatctgggagtatagctcaagtacaccgagcttccttgaagtttcagtatgcaggacaaaaggtgaagtcctcggaagttgctgtgaaagttagacatccttgtgttgaggaaacgatgaagcgagattttgtgataattaatttcgtggcgaggctaaccacttttattccggggttaaattggcttagattggacgagtgtgtgcaacagtttagtgtctacatgttgtcccaagttgatctctcaagggaagcttctcatttgagtcggtttatatataacttccgtggatggaaagatgtctcttttcctaagcccatctatcctctaatacatcccgctgttttagtcgagacgtatgagcacggagagagtgtggctcgttatgttgatggctccgaaggacaagaaaaacttaaggctaaagtagctcatatcggaactaatgctctcttgaaaatgctcctggtcgacaacttcattcatgcagatatgcatcctgggaatattcttgtccggccaaacaatactagaagaggtctattcagatcgaggaagccacacatcgttttcctagatgtgggcatgactgcagaactttcaaaaactgaccgagataacctactcggatttttcaaggccgttgcacgtagagacggccggactgctgctgaacgaacacttaaattatctaaacaacagaattgtcctgatccacaggcctttatcaaggaagtagaagaagcatttacattctggggaacagaggaaggggatctagtccatccagcggattgtatgcacgaactattcgagaaaatgaggagtcatagagttaatatcgacggcaatgtgtccaccgtcatgtttacaacattagttctcgagggttggcaacggaaactggatccaggatacgatgtgatgcgtacgctacaaacaatgctgctgaaaacggattggatgaaatcactttcttacacgatcgatggacttatggctccgtagattgaaaaggttcaatctttgattcttttacccatttaacacttgagagccacatttttgttttgttgccttaggatgtgaagaagaaccaaaacatatattttagagaaaaacaaaggaaaagtcctttactgttttgtcttcttcttatcttttgcttattctttgattattctttttgctagaaattggaattcttcatcattctaaaacagagaatttgtattttgggtatatatcagttttgaatttcctcg

SEQ ID NO: 11206 - protein, 621 aa, Arabidopsis thaliana
MTLISRFLISRVISRTLFSNQNNRTAINVSVKLPQFRIQSNGYHTLGLLHNVKGRFLGSNHHQLARRSYSIAVASNVVKQHAQVSWGRLVQRVTLSRSWNLPRISQIAQACSLSLARSHFLLPGLLALTYRQVAYAQRVVPNPVVYSPSHISPYRSSINFPIVLSSLVFSAVKGVVLNGRALYLAILFSPNVIMALLGFACGPRYRQLQYEVLHRTLEKAGPAFIKFGQWIATRPDRFNKDLCLQLSKLHSNAPEHSFAFTKKSIENAFGRKLSEIFEEFDEAPVASGSIAQVHRASLKFQYAGQKVKSSEVAVKVRHPCVEETMKRDFVIINFVARLTTFIPGLNWLRLDECVQQFSVYMLSQVDLSREASHLSRFIYNFRGWKDVSFPKPIYPLIHPAVLVETYEHGESVARYVDGSEGQEKLKAKVAHIGTNALLKMLLVDNFIHADMHPGNILVRPNNTRRGLFRSRKPHIVFLDVGMTAELSKTDRDNLLGFFKAVARRDGRTAAERTLKLSKQQNCPDPQAFIKEVEEAFTFWGTEEGDLVHPADCMHELFEKMRSHRVNIDGNVSTVMFTTLVLEGWQRKLDPGYDVMRTLQTMLLKTDWMKSLSYTIDGLMAP

SEQ ID NO: 11207 - protein, 428 aa, Arabidopsis thaliana
MALLGFACGPRYRQLQYEVLHRTLEKAGPAFIKFGQWIATRPDRFNKDLCLQLSKLHSNAPEHSFAFTKKSIENAFGRKLSEIFEEFDEAPVASGSIAQVHRASLKFQYAGQKVKSSEVAVKVRHPCVEETMKRDFVIINFVARLTTFIPGLNWLRLDECVQQFSVYMLSQVDLSREASHLSRFIYNFRGWKDVSFPKPIYPLIHPAVLVETYEHGESVARYVDGSEGQEKLKAKVAHIGTNALLKMLLVDNFIHADMHPGNILVRPNNTRRGLFRSRKPHIVFLDVGMTAELSKTDRDNLLGFFKAVARRDGRTAAERTLKLSKQQNCPDPQAFIKEVEEAFTFWGTEEGDLVHPADCMHELFEKMRSHRVNIDGNVSTVMFTTLVLEGWQRKLDPGYDVMRTLQTMLLKTDWMKSLSYTIDGLMAP

SEQ ID NO: 11208 - DNA, 1150 bp, Arabidopsis thaliana
tagtcccccccccccccgatattaacacttcgaagcttcttcttcctttagtaaattcaagtgtgaggtgtgtttattgataaagtgctcattttctcggatctcagatcttagatccaaaccctcattatttcattgatccaagatctaatagcttgagcttgctgggattttagttatggcgagacggcaagtaggttcaacaagacgtgttggcgatggtggaagcttcccttttgcaggagctttacactcaaagtctcgatcttctccactactatctatttgccttgttcttgtgggggcttgtcttctcattggttatgcttacagtggtccaggtatatttaaaagtatcaaagaagttagcaaagttacaggtgactattcttgcacagcagaagtccaaagagccattcctgtacttaagaaggcttatggagatggcatgcgcaaagtcttgcatgtgggccctgacacatgctcagtggtttccagtctattgaaagaagaagagactgaagcatggggtgttgaaccatatgatattgaggatgcagattctcactgcaagagttttgtgagcaaaggtcttgtacgtgttgctgatatcaagtttcctctgccctaccgggcaaaatccttctctcttgtgattgtgtcagatgctctggattatctctcacccaagtacctgaacaagaccgttcctgaactcgcaagggtggcttcagacggtgtggttctttttgcaggtctccctggtcagcagagagctaaagttgctgaactctctaaattcggccgacccgctaaaatgcgtagcgcatcgtggtggaaccgctttttcgtccagacaaacttagaagaaaacgacgcaccaagcaagaagttcgaacaggctgtttccaaaggattatacaaaccagcctgccaagtcttccacctcaagccattacattaaccagccaccaccaaagcctactggttccacaccaaagcatatttacacgtagagccgcacgcgaaaaaaaaaaatagcgtaatcgatatttctccttgtattttgtaacaggtcagtttttatccttcaatgttgtatccgccaacacaatttttcctattcaattaaatcataattattatcacc

SEQ ID NO: 11209 - protein, 261 aa, Arabidopsis thaliana
MARRQVGSTRRVGDGGSFPFAGALHSKSRSSPLLSICLVLVGACLLIGYAYSGPGIFKSIKEVSKVTGDYSCTAEVQRAIPVLKKAYGDGMRKVLHVGPDTCSVVSSLLKEEETEAWGVEPYDIEDADSHCKSFVSKGLVRVADIKFPLPYRAKSFSLVIVSDALDYLSPKYLNKTVPELARVASDGVVLFAGLPGQQRAKVAELSKFGRPAKMRSASWWNRFFVQTNLEENDAPSKKFEQAVSKGLYKPACQVFHLKPLH

SEQ ID NO: 11210 - protein, 171 aa, Arabidopsis thaliana
MRKVLHVGPDTCSVVSSLLKEEETEAWGVEPYDIEDADSHCKSFVSKGLVRVADIKFPLPYRAKSFSLVIVSDALDYLSPKYLNKTVPELARVASDGVVLFAGLPGQQRAKVAELSKFGRPAKMRSASWWNRFFVQTNLEENDAPSKKFEQAVSKGLYKPACQVFHLKPLH

SEQ ID NO: 11211 - DNA, 1560 bp, Arabidopsis thaliana
gctcactagtccccccccccccggcttttccattttcatcttcatgcattgctttccttcgtcgtccttggaggggacgacgacggatctgtctttctgtctactgaaaatccaaatttcatcctctccatttatttaactttttcagatttagttttgtcaagaaaacacaaaatgtcctttcttgcgccttgtcaaattttggagctgaatattatttcggcccaagaattggcgcccgtggcacggtgtatgaagacatatgcaatcgcttggattgatccagagcgtaaattgacgactcgggtcgacaatacgggcggaacaagccctacatggaacgacaagtttgtgtttcgtctagatgaggaagcactctacgatgccacatcaatagttgttatagagatctatgcattgcattggttcaaagacattcatgttggaacggtacaagccttaataagtgaccttgtaagcccttcttcggctatgagatttgttaccctagaggttcttcgtgcctctggccgccctcacggcctcctaaacattgcggtggggcttatcgataactcaggccaaagcatgcctctttagtttgaagaagatttgttgtttcacaagaaaaacatatcttcaaaacctgtagggcttcgacggtcaaaaagtgatacaagctcaatggtggattcaccaaggaaggtgacacaatcccgtgtgagttctactacaaactcaggatttgagaaagatgagttttcttctgactctcaaatggttgtttatgaaccccaaagaaaaacgccaaatacaatgaggcaaacaaagcaacaactcgtgtatgggacaccgatgaggccaaggaaaacgacagcatatatccccaaaaggaacacggtcgaatatggaacaccaatgaggtcaagaccaatcgttattacagaatctgacttaggtccttcagcctcagtagttgctgcccaaatagcaaaagagaaagcacttacagggaaagatgcggagagtactgtgataagtgttggtgaacgaagtgtcgagggtcttcgttctaagttagaaagatggcaagccaatttaccagtggttttagacgtggggtcaagttatcaaccaagttctgactacaaaacaaactctaactttaaccctaaatcaagttacaagcctaatgaaatcgtcccaagaaatcctcaaatgattggagctcccatccaaaagccaagtgggaggaacaagaaaagtggagataatggattgttttcatgttttggtaacatttgtggcgttgagtgttctattgtttgtggtggctctagtggacaaaaagcagccaagaagaagatgaaaaagaagtgataaataacaaacatgattcctccaaattctaaatgattcatttctcattatgtttctatttttcaagcttgtcgattttgctactcaataatccaaatttataatagtaagacagggaaaaaggtacattaattatttcattacttttttatagtaaacatgaaaaatttggtttaaatc

SEQ ID NO: 11212 - protein, 231 aa, Arabidopsis thaliana
MVDSPRKVTQSRVSSTTNSGFEKDEFSSDSQMVVYEPQRKTPNTMRQTKQQLVYGTPMRPRKTTAYIPKRNTVEYGTPMRSRPIVITESDLGPSASVVAAQIAKEKALTGKDAESTVISVGERSVEGLRSKLERWQANLPVVLDVGSSYQPSSDYKTNSNFNPKSSYKPNEIVPRNPQMIGAPIQKPSGRNKKSGDNGLFSCFGNICGVECSIVCGGSSGQKAAKKKMKKK

SEQ ID NO: 11213 - protein, 200 aa, Arabidopsis thaliana
MVVYEPQRKTPNTMRQTKQQLVYGTPMRPRKTTAYIPKRNTVEYGTPMRSRPIVITESDLGPSASVVAAQIAKEKALTGKDAESTVISVGERSVEGLRSKLERWQANLPVVLDVGSSYQPSSDYKTNSNFNPKSSYKPNEIVPRNPQMIGAPIQKPSGRNKKSGDNGLFSCFGNICGVECSIVCGGSSGQKAAKKKMKKK

SEQ ID NO: 11214 - protein, 187 aa, Arabidopsis thaliana
MRQTKQQLVYGTPMRPRKTTAYIPKRNTVEYGTPMRSRPIVITESDLGPSASVVAAQIAKEKALTGKDAESTVISVGERSVEGLRSKLERWQANLPVVLDVGSSYQPSSDYKTNSNFNPKSSYKPNEIVPRNPQMIGAPIQKPSGRNKKSGDNGLFSCFGNICGVECSIVCGGSSGQKAAKKKMKKK

SEQ ID NO: 11215 - DNA, 1999 bp, Arabidopsis thaliana
ttatgaagtggatgcaattagaaagacgtacgagcgggccaacatctcgcggtggctcgccttgggcaatcggacctgcccgaccacgatgcaggagctctaggacgacgccctcacccccaacgccactctccgacaactcatcgccgcctggttctcccgcctggttctgcattttgttttcttatctgtcaatcatgtttttccatattactgcaggtgggtctgattaattatttaaatgtagtttatcttagatattgtttgaacgtatgggatgttggaggacagaagacaatcatgtcttactggagaaattactttgagcagactaatgggttagtttggtttgctgatagttcagacataaggaggcttgatgaatgccgtgctgaactccacaacctcttgaaagaagaggataaaggtttacctatctaggcagtgttctattgttgatttttgcaaataagcaagacatgcaaggagctctaaaaccaactggaatcgtgaaggtaagcgaacttcagtcatttattatatgcattagagacatgttttcctgtctatgacatcatttttaacttgtactgtgtttttccggtcctcatggttgccaagattttacttagttcgatgtgggagcaaaaggatatgccaaattgaatgtagtttcatcagttatgctctattatggatgttcagaggcatccaatttcagtgtgtactgcaatacttgggtccacctgcacgtggtagatgttctgcattttgttttcttataaattagatttggcttccattatgttgttctcttttggaacagagtcactctccgacagctcatcgccgcttggttctcccgtcggtacacaaggtttaagaagcgctacgcggacttccacggccgcgctgccgatctcgtccatggcctccggggcacggcgatgcccaggagacaggccctcgaggaagagcaatgtacagaagagaaaggtatctcgactattccaaagcacaagtatgcatccaaagcctgttccccaaaaggaacctttatctgcagctctctctacgcttactcttgttgtgcaatttaatgggtggctatcatttttcctcttgctttattataaacttcctctgcggccagaaactcacaagacatactatgaatacactggcttgtggcacatctatgggctccttgccatgaattcatggttctggagtgccatatatcacagttgtgacacaatttggacagaaaaagctatatttttcatcagatgctgcctttctagggtattccctcattttgatgatagttggtgagcatgtagtagcaagtttcatgggctctggtagattaactgacctttgtgtgttccattagcctgtgaagttcgaaactggtcatattgctaagaattctaggaggttactattagggcccagagtaaatgactacatgctgatgaaaatctgttcagattaatcattctggaacttgtactaacaattgaagcaagtggaggcatagcaccaattgtgtcagtgctgcagctctggatgtcagtagacaagaggtgtatcagagagaagcacttcaaggttaatttgagcaaattggagatgctggattttgtattttggttgctcatgggtggtgaatgatctgacgacttcagaagaggatagatctgagattacctttcatgcatgtcaaggaagttaagtagctgatgccatcaaagcaatggagaaacgtcaggtgaaccgcgagcagaattctgtggcgcatttgttagcgcagttagttaggactctgttcatacaactgttcgattaaaccaaatacctaatttagttttatattggttgttgtcaaagaatttgtgaaatattgaggttgataatatatgtggcgttcgtttttatgtaatcattgttcactaatattttgtcgaatattttatattatatagacattactaag

SEQ ID NO: 11216 - protein, 191 aa, Arabidopsis thaliana
MFCILFSYKLDLASIMLFSFGTESLSDSSSPLGSPVGTQGLRSATRTSTAALPISSMASGARRCPGDRPSRKSNVQKRKVSRLFQSTSMHPKPVPQKEPLSAALSTLTLVVQFNGWLSFFLLLYYKLPLRPETHKTYYEYTGLWHIYGLLAMNSWFWSAIYHSCDTIWTEKAIFFIRCCLSRVFPHFDDSW

SEQ ID NO: 11217 - protein, 176 aa, Arabidopsis thaliana
MLFSFGTESLSDSSSPLGSPVGTQGLRSATRTSTAALPISSMASGARRCPGDRPSRKSNVQKRKVSRLFQSTSMHPKPVPQKEPLSAALSTLTLVVQFNGWLSFFLLLYYKLPLRPETHKTYYEYTGLWHIYGLLAMNSWFWSAIYHSCDTIWTEKAIFFIRCCLSRVFPHFDDSW

SEQ ID NO: 11218 - protein, 135 aa, Arabidopsis thaliana
MASGARRCPGDRPSRKSNVQKRKVSRLFQSTSMHPKPVPQKEPLSAALSTLTLVVQFNGWLSFFLLLYYKLPLRPETHKTYYEYTGLWHIYGLLAMNSWFWSAIYHSCDTIWTEKAIFFIRCCLSRVFPHFDDSW

SEQ ID NO: 11219 - DNA, 1073 bp, Arabidopsis thaliana
aaaaaaaaaaaaaaggtaggaaacgtgggccgaacattatcagaaggattcaagcgaagcaaaatcccaccctttcttctgtgacagagtgtctgtatttgttgtttcccttcaattggagagagtaagcgagtctcttacgcccagagagagagagagagaggcttgtttgttttctctcctctaagaaacaatcagtctcataaagtggcaaagatggttgcagaacgatacacagtcgatttgaataagccacttgtgtttcaggttggtcatcttggcgaagaatatcaggaatggattcatcaacctattgtatgcgttgagggtcctcgttttttcgaaagtgatttttgggagtttttgactcgcacggtttggtgggcaatcccaacaatctggcttccagttgtttgctacgttctttcaatatcggcgagtaagggacttacgtttccccagatcggtttaatagttgcttttggtgtactcacgtggacactgctcgagtacacgcttcatcgcttccttttccacatccaaaccaagagttactgggcaaacactgcacactatcttcttcatggatgccatcacaagcacccacaagacggccttcgtcttgttttccctcctacagcaacagctattctcttggttccactatggaagcttctccatctcctagctactcctgctacagcacctgctattcttggaggcatattgtttggctatgtgatgtatgatattacccattactatctacaccatggtcaacctaaagaaccaacctttaaacatcttaagaaataccacctgaatcatcactttaggattcaggacaaaggatatggaatcacttcctctctatgggacaaagtctttggaacacttcccggtattaaagccgctgcgaagaagagctaaatcggatttctgtttgccatttttcagagtgtcgaaaaactcactgatattgtgtattccaaattcatcaggtgattcaatgactgtttaactacttctgtatacgatctattcaccatatttgaacatatttttagtggttt

SEQ ID NO: 11220 - protein, 237 aa, Arabidopsis thaliana
MVAERYTVDLNKPLVFQVGHLGEEYQEWIHQPIVCVEGPRFFESDFWEFLTRTVWWAIPTIWLPVVCYVLSISASKGLTFPQIGLIVAFGVLTWTLLEYTLHRFLFHIQTKSYWANTAHYLLHGCHHKHPQDGLRLVFPPTATAILLVPLWKLLHLLATPATAPAILGGILFGYVMYDITHYYLHHGQPKEPTFKHLKKYHLNHHFRIQDKGYGITSSLWDKVFGTLPGIKAAAKKS

SEQ ID NO: 11221 - DNA, 1060 bp, Arabidopsis thaliana
gatgcttatttccaaaaacatctctctgcttctttagtttcacatctcacacaagtctttgctctctcttaacagtttttcttctatcatctttaaactatgggaactgttgtgtatcaacaagggtttcagtctcagcttaatgagcctagggctttaaggcttaggctatcttcaccaaatcctcacttttctcaaccatttggtttagctctcaaatctcatttacttgactcctctcatgcagaggacacccgaaaccgtaacgatgacaaagctgctgcttccccggtctctgactcgagtggctggagctctctccagtccctatcctctggctcctcctcctccacaaagacgacgacaagctctgagaaagagagtagttactatgttcaacgtccgtcttcttgtagagctctaagcgaccagagcttagcattgtgcactgagaatctcggaagcgaatctggttctgatgttacagatattgatgagttgttctcgcttgacgtgcaaaccaagaatctcggggaaacaacaacggagacaagaacgttaaaaagtaggaaaaggagtgtgagccctagtgatctcccacctcctttgaccactatgagaggatttcaatgcattcaaatgagaccacaccgtgaaaacggaagattggtcatgaccgccacaaacgcgcctcctcgtaacggatgctttcaagctgaccgtagcaatggtcgtctccgtctctctatcttgaaagactccaatgagtttgtagagaacgaagaagagactattgagcctgaagaaaccgaagaatacgaggaggaggaggaagaggaagaagatgaagatgaagatgaagtgatgggcattgagaatgttcaagtatcaagaagatgtgttcaaggcgatcgggaaaacaggggattgctaaattgggaatctttctgcgttgctacttcctaaaagagagaaacttcttattttgctctgtatttacaatttcacaatttttctccgatgtgttttattgtttttaatagaaaaatcatcgtttcct

SEQ ID NO: 11222 - protein, 288 aa, Arabidopsis thaliana
MGTVVYQQGFQSQLNEPRALRLRLSSPNPHFSQPFGLALKSHLLDSSHAEDTRNRNDDKAAASPVSDSSGWSSLQSLSSGSSSSTKTTTSSEKESSYYVQRPSSCRALSDQSLALCTENLGSESGSDVTDIDELFSLDVQTKNLGETTTETRTLKSRKRSVSPSDLPPPLTTMRGFQCIQMRPHRENGRLVMTATNAPPRNGCFQADRSNGRLRLSILKDSNEFVENEEETIEPEETEEYEEEEEEEEDEDEDEVMGIENVQVSRRCVQGDRENRGLLNWESFCVATS

SEQ ID NO: 11223 - DNA, 1965 bp, Arabidopsis thaliana
attctcctcaaaaccctaatttctcacatctgtaaagaaaaattctccctaaacttaaccctcctgtagaaaaaaaaaaaaaccctggtaattatgagtgttttaggagaaattcttctgaaattaagattccgccatggaagcttttgatctttctcttcactagttttacttaattttcaacacacaataacaaaaacaaaaaaatctctttgccccttttctctgaatcttacgtcctctggatctttcttctctctctctctctcttgtctatactttaagtgtctgtctgaagaagcttgaatctgtcgtgatcatcaagattcaagttctgtctttttgagtctttttcttctacttctattgagtttctcttccttaattgtcggaatcagaatcttttcagatggaggagagagaaggaactaacatcaacaacatcccaaccagttttggtctgaaacaacatgaaactcctcttcctcctcctggttacccaccacggtctgaaaaccctaatctttttccggtgggtcaatccagcacttcctccgccgccgccgcggtgaaaccttctgagaatgttgctcctccttttagcttaacaatgccggtggagaattcttcttctgagttgaagaagaagagagggagaccaagaaagtataaccctgatggctcactcgctgtgactctctctcctatgcctatctcatcctccgttccgttgacgtcggagtttggttctcggaaacgaggaagaggtcgaggaagaggcagaggaagaggacgaggacgtggacaaggacaaggaagcagagagcccaataacaacaacaacgacaacaattggctcaagaatcctcagatgttcgaatttaacaacaacactcctacttctggtggaggaggacctgctgaaattgtcagtccaagttttacacctcatgtgctcacagtaaatgccggtgaggatgtgacaatgaagataatgacattctctcaacaaggctcgcgtgctatttgtattctttcagcgaacggtcccatatccaatgttacacttcgtcaatctatgacatctggtggtactctcacttatgagggtcattttgagattctttctttgacgggttcgtttataccaagcgagagtggaggaacccgaagcagagctggtgggatgagtgtctctcttgcaggacaagatggtcgtgtctttggtggtggacttgctggtctctttattgccgctggtcctgttcaggtaatggtagggagttttatagcgggtcaggaggaatcgcagcagcagcagcagcagataaagaagcaaagaagggaaagactcgggatcccgacaacaacacaagcttctaatatctcattcggtggctcagcggaagatcctaaggctagatacgggctcaacaagcctgttgttattcagccaccaccggtgtctgcaccacctgtgtccttttcgcatgaaccaagtactaacaccgtccatggttactatgcaaataacacagctaaccatatcaaggatctcttctcttccctccctggagaagatggggaagaagatgaggatgatttagaaggtgaagatgatgaagaattcggaggccatagcgaatctgacaccgaggttccaagctgatgatcgatggaaagaatccgacatatatgtgttatgaatcttgagttgttttatttcggtgtcttcagatttttttagagcgtaatggtattttttttctttcagattgttagttgttaaagtcttaaacagagatatttcactaaaagttagggtttactagaggatgtaatctttagggttctttgacttgtgtctttcttttaatcctcagatggttgttgtaggcttgtagccaatcttagtgtgtgttcaaactctctccttcaatcaaactccccaatgacttcattttg

SEQ ID NO: 11224 - protein, 419 aa, Arabidopsis thaliana
MEEREGTNINNIPTSFGLKQHETPLPPPGYPPRSENPNLFPVGQSSTSSAAAAVKPSENVAPPFSLTMPVENSSSELKKKRGRPRKYNPDGSLAVTLSPMPISSSVPLTSEFGSRKRGRGRGRGRGRGRGRGQGQGSREPNNNNNDNNWLKNPQMFEFNNNTPTSGGGGPAEIVSPSFTPHVLTVNAGEDVTMKIMTFSQQGSRAICILSANGPISNVTLRQSMTSGGTLTYEGHFEILSLTGSFIPSESGGTRSRAGGMSVSLAGQDGRVFGGGLAGLFIAAGPVQVMVGSFIAGQEESQQQQQQIKKQRRERLGIPTTTQASNISFGGSAEDPKARYGLNKPVVIQPPPVSAPPVSFSHEPSTNTVHGYYANNTANHIKDLFSSLPGEDGEEDEDDLEGEDDEEFGGHSESDTEVPS

SEQ ID NO: 11225 - protein, 352 aa, Arabidopsis thaliana
MPVENSSSELKKKRGRPRKYNPDGSLAVTLSPMPISSSVPLTSEFGSRKRGRGRGRGRGRGRGRGQGQGSREPNNNNNDNNWLKNPQMFEFNNNTPTSGGGGPAEIVSPSFTPHVLTVNAGEDVTMKIMTFSQQGSRAICILSANGPISNVTLRQSMTSGGTLTYEGHFEILSLTGSFIPSESGGTRSRAGGMSVSLAGQDGRVFGGGLAGLFIAAGPVQVMVGSFIAGQEESQQQQQQIKKQRRERLGIPTTTQASNISFGGSAEDPKARYGLNKPVVIQPPPVSAPPVSFSHEPSTNTVHGYYANNTANHIKDLFSSLPGEDGEEDEDDLEGEDDEEFGGHSESDTEVPS

SEQ ID NO: 11226 - protein, 320 aa, Arabidopsis thaliana
MPISSSVPLTSEFGSRKRGRGRGRGRGRGRGRGQGQGSREPNNNNNDNNWLKNPQMFEFNNNTPTSGGGGPAEIVSPSFTPHVLTVNAGEDVTMKIMTFSQQGSRAICILSANGPISNVTLRQSMTSGGTLTYEGHFEILSLTGSFIPSESGGTRSRAGGMSVSLAGQDGRVFGGGLAGLFIAAGPVQVMVGSFIAGQEESQQQQQQIKKQRRERLGIPTTTQASNISFGGSAEDPKARYGLNKPVVIQPPPVSAPPVSFSHEPSTNTVHGYYANNTANHIKDLFSSLPGEDGEEDEDDLEGEDDEEFGGHSESDTEVPS

SEQ ID NO: 11227 - DNA, 1570 bp, Arabidopsis thaliana
aaaaagatctgttgagagaattcgaaagaaaaacttcaaatgcaaagccatcaaaatcgaagcaggctgagcttgattctacggtctagattcatcccttccttctcttcaccactctccctcttcgtcgtcctcgctgccgttcctcttccgatctacttttccggtctactctccggcagaaacaacaagccgctttcagttatgagactcaactccaacttagcttcttcaatggtggaatcgaatatttcttgtaccactttcaatatcttggctccgatttataaacgcgttgatcaaaagaatcatagcactcgagagagcgatttccgcacgctttggttagctcgtaaccagaggattttagatttgttactccatcagcgctcttcagttatctgtctccaggaagtttgggttgggaatgaggaattagtgaacttgtaccaccaccagctttcatcttcaggctacactatttatcagttggctagaacaaacagtcgtggtgatggtcttttaacagccattcataaggaccactttaaagttgtaaattaccgggagctgctctttaaagattttggagaccgtgttgctcagctcttacatgtcaaaaccgttattccctttccgcttaatgggaagcaagacgttcagcaagaagtcattatagtgaacactcacctcttgtttcctcacgattctagtttgtctattgtaagactgcatcaggtttacaaaattcttgaatatctggaagcttaccaaaaggaaaataaacttaatcacatgcccattattctctgcggtgactggaatggaagcaaacgcgggcatgtctacaaatttttgagatctcaagggttcatttcatcatacgatgatgctcatcagtataccgacagtgatgctcataggtgggttagccacagaaaccacaggggaaatatttgcggggttgatttcatatggctctgtaaccctagtgattcaagaaaaccattgagaacaagttgggtggaagctgttttcagcattatcaagtatcaactacacaaagcttccatagccgaggacgatgcctttacttttcttggggcgaaaaatcacagtgattcactaacctactctgacttttgcctagcacttcaaaaggtaaatctaacgggtattccacatggacttagcttcgaagagacaaaagagctatgggttcgagctgatcttgatggaaatggtgtcttcgactatgaagaacttaagaaaatttggaacatgacgatggtaaatcaacctggaaactgcaaagagagtgtgatggagagtaagaaagaagaaggagaagatgaagcaatcggattgaaagtgaataaagcgattttgtatccgcaagaagcagagaaaggattgtggccggagaattacaatatatccgatcatgcttgtctcaccgtacaattctctccggtcaaaatgctttgtagctaaattttgtttaattacggctcttgtaaatgtaaagaagcaatgagattgagatttgcaatgagacatctttacgaac

SEQ ID NO: 11228 - protein, 484 aa, Arabidopsis thaliana
MQSHQNRSRLSLILRSRFIPSFSSPLSLFVVLAAVPLPIYFSGLLSGRNNKPLSVMRLNSNLASSMVESNISCTTFNILAPIYKRVDQKNHSTRESDFRTLWLARNQRILDLLLHQRSSVICLQEVWVGNEELVNLYHHQLSSSGYTIYQLARTNSRGDGLLTAIHKDHFKVVNYRELLFKDFGDRVAQLLHVKTVIPFPLNGKQDVQQEVIIVNTHLLFPHDSSLSIVRLHQVYKILEYLEAYQKENKLNHMPIILCGDWNGSKRGHVYKFLRSQGFISSYDDAHQYTDSDAHRWVSHRNHRGNICGVDFIWLCNPSDSRKPLRTSWVEAVFSIIKYQLHKASIAEDDAFTFLGAKNHSDSLTYSDFCLALQKVNLTGIPHGLSFEETKELWVRADLDGNGVFDYEELKKIWNMTMVNQPGNCKESVMESKKEEGEDEAIGLKVNKAILYPQEAEKGLWPENYNISDHACLTVQFSPVKMLCS

SEQ ID NO: 11229 - protein, 429 aa, Arabidopsis thaliana
MRLNSNLASSMVESNISCTTFNILAPIYKRVDQKNHSTRESDFRTLWLARNQRILDLLLHQRSSVICLQEVWVGNEELVNLYHHQLSSSGYTIYQLARTNSRGDGLLTAIHKDHFKVVNYRELLFKDFGDRVAQLLHVKTVIPFPLNGKQDVQQEVIIVNTHLLFPHDSSLSIVRLHQVYKILEYLEAYQKENKLNHMPIILCGDWNGSKRGHVYKFLRSQGFISSYDDAHQYTDSDAHRWVSHRNHRGNICGVDFIWLCNPSDSRKPLRTSWVEAVFSIIKYQLHKASIAEDDAFTFLGAKNHSDSLTYSDFCLALQKVNLTGIPHGLSFEETKELWVRADLDGNGVFDYEELKKIWNMTMVNQPGNCKESVMESKKEEGEDEAIGLKVNKAILYPQEAEKGLWPENYNISDHACLTVQFSPVKMLCS

SEQ ID NO: 11230 - protein, 419 aa, Arabidopsis thaliana
MVESNISCTTFNILAPIYKRVDQKNHSTRESDFRTLWLARNQRILDLLLHQRSSVICLQEVWVGNEELVNLYHHQLSSSGYTIYQLARTNSRGDGLLTAIHKDHFKVVNYRELLFKDFGDRVAQLLHVKTVIPFPLNGKQDVQQEVIIVNTHLLFPHDSSLSIVRLHQVYKILEYLEAYQKENKLNHMPIILCGDWNGSKRGHVYKFLRSQGFISSYDDAHQYTDSDAHRWVSHRNHRGNICGVDFIWLCNPSDSRKPLRTSWVEAVFSIIKYQLHKASIAEDDAFTFLGAKNHSDSLTYSDFCLALQKVNLTGIPHGLSFEETKELWVRADLDGNGVFDYEELKKIWNMTMVNQPGNCKESVMESKKEEGEDEAIGLKVNKAILYPQEAEKGLWPENYNISDHACLTVQFSPVKMLCS

SEQ ID NO: 11231 - DNA, 597 bp, Arabidopsis thaliana
ggtgagaagagatcgagagaagaatagtttgatcatcttgtgagaaaaataatggctgcttcagtgatgctatcttcggtgacattgaaaccagctggtttcacggtggagaagacggcggctagaggattaccgtcgctcacaagagctcgtccctccttcaaaattgtcgccagtggcgtcaagaagatcaagaccgacaagcccttcggaattaacggcagcatggacttgagggacggcgtcgacgcttccggcagaaagggcaagggatacggtgtttacaagtacgtcgacaagtatggagctaacgtcgatggatacagtcctatttacaacgagaacgagtggtcagcgagtggtgacgtgtacaagggaggagtcaccggattggcaatttgggcggtaactctcgccggaattcttgccggaggtgctcttcttgtgtacaacacaagtgctttggctcagtaaatcttaaagttgttagcgcatgtgtaatcatgtttctataaatgtttctgtgttgttctctttctctctaatgttgtaaaactcagacatactttgaatttataagacttctagtgtttgtat

SEQ ID NO: 11232 - protein, 140 aa, Arabidopsis thaliana
MAASVMLSSVTLKPAGFTVEKTAARGLPSLTRARPSFKIVASGVKKIKTDKPFGINGSMDLRDGVDASGRKGKGYGVYKYVDKYGANVDGYSPIYNENEWSASGDVYKGGVTGLAIWAVTLAGILAGGALLVYNTSALAQ

SEQ ID NO: 11233 - protein, 135 aa, Arabidopsis thaliana
MLSSVTLKPAGFTVEKTAARGLPSLTRARPSFKIVASGVKKIKTDKPFGINGSMDLRDGVDASGRKGKGYGVYKYVDKYGANVDGYSPIYNENEWSASGDVYKGGVTGLAIWAVTLAGILAGGALLVYNTSALAQ

SEQ ID NO: 11234 - protein, 82 aa, Arabidopsis thaliana
MDLRDGVDASGRKGKGYGVYKYVDKYGANVDGYSPIYNENEWSASGDVYKGGVTGLAIWAVTLAGILAGGALLVYNTSALAQ

SEQ ID NO: 11235 - DNA, 948 bp, Arabidopsis thaliana
gttccttctcttcttcgatcagacgattcaatcgcttctcactcaaaccacttcgctccttcgcatccatgtcttcttcttcccccgacgctgctcagactcctctaaccaccgctccttatggctcctggaaatctccaatactggacaagtcgaggttgggcatttgttgatgtcaattatggtggaagcacaggttatggtcgagagtatcgagagcggttgttaaggcagtggggaatagtcgacgttgatgactgttgtggctgtgctaaatacttggtatcttctggcaaggcagatgttaagcggctctgtatatctggcggttctgcaggaggttacacaactcttgcatcattggcgttcagggatgttttcaaagctggagcgtccttatacggagtggctgatttaaaaatgttgaaagaagaaggtcataaatttgaatcccgttatatcgacaatcttgttggagatgaaaaagatttctatgagagatcaccaatcaatttcgtcgataagttctcttgtcccatcatccttttccaaggactagaagacaaggttgtaactccagatcaatcacgtaaaatctatgaagcattaaagaaaaaaggtctgcctgttgctcttgtcgagtacgaaggagaacaacacggttttcgcaaggcggaaaacatcaaatacacacttgagcaacagatggtgttctttgcccgagtggttggagggttcaaagttgctgatgacatcactcctttgaaaattgacaacttcgacacttagaaaacgatgcttaaatagatatgtttggaaaagatttgctttttttttattatttagagaaaatacaggcttggactaacgttttcggataatttgttcatcaaaagtccaaaaccttctatattcactagaatgggaatacctaggaggtggctcggc

SEQ ID NO: 11236 - protein, 222 aa, Arabidopsis thaliana
MAPGNLQYWTSRGWAFVDVNYGGSTGYGREYRERLLRQWGIVDVDDCCGCAKYLVSSGKADVKRLCISGGSAGGYTTLASLAFRDVFKAGASLYGVADLKMLKEEGHKFESRYIDNLVGDEKDFYERSPINFVDKFSCPIILFQGLEDKVVTPDQSRKIYEALKKKGLPVALVEYEGEQHGFRKAENIKYTLEQQMVFFARVVGGFKVADDITPLKIDNFDT

SEQ ID NO: 11237 - protein, 122 aa, Arabidopsis thaliana
MLKEEGHKFESRYIDNLVGDEKDFYERSPINFVDKFSCPIILFQGLEDKVVTPDQSRKIYEALKKKGLPVALVEYEGEQHGFRKAENIKYTLEQQMVFFARVVGGFKVADDITPLKIDNFDT

SEQ ID NO: 11238 - DNA, 1029 bp, Arabidopsis thaliana
aaagaggcgacgtaccacccacctaaccacaaccagatccccaaaagacagagaactttctcgatacgaacgccaaagagaagaagacgaagacgaagatgatgggtgtgttgaagtcggcgattggggatatgttgatgaccttctcttgggttgtcctctccgctacctttggaattcagacggcggcgattatctccgccggtgattttcaggcaatcacttgggctccgttggtgattttgacgtcgttgattttcgtctacgtctcgatcttcaccgttatcttcggtagcgctagcttcaatcctaccggaagcgctgccatttatgtcgccggtgtccccggagatactcttttctccttggcgattagattacctgctcaggcaattggtgctgcaggaggtgcattggcgatcatggagttcataccagagaaatacaagcatatgattggaggtccttctcttcaggttgatgtgcacactggagctattgctgaaacgatcttaagttttggtattacctttgcggttttgctaattatcctcaggggtccacggagattgcttgctaagacgttcttgcttgctcttgcaaccatctcatttgttgtcgccggatctaaatacactggaccagccatgaatcctgccattgcgtttggatgggcatacatgtacagctcccacaacacatgggaccatatctacgtctactggatcagttctttcgtaggagcattatctgctgcattgcttttccgttctatcttcccgccacctcggccccagaagaagaaacaaaagaaagcctgaggaaaataaaacaattgggagaacaccggtcagattcttcaccggtttgggctgtagaaagattcacaaagctgttccattctaaaataaggagaccaacaacaacaaaaagtcaaaagtctccttgtcattgtttagatccacacgcttattttacagatttgtgcgacgtaacttttctcttttatgttcataaatcattcagact

SEQ ID NO: 11239 - protein, 240 aa, Arabidopsis thaliana
MMGVLKSAIGDMLMTFSWVVLSATFGIQTAAIISAGDFQAITWAPLVILTSLIFVYVSIFTVIFGSASFNPTGSAAIYVAGVPGDTLFSLAIRLPAQAIGAAGGALAIMEFIPEKYKHMIGGPSLQVDVHTGAIAETILSFGITFAVLLIILRGPRRLLAKTFLLALATISFVVAGSKYTGPAMNPAIAFGWAYMYSSHNTWDHIYVYWISSFVGALSAALLFRSIFPPPRPQKKKQKKA

SEQ ID NO: 11240 - protein, 239 aa, Arabidopsis thaliana
MGVLKSAIGDMLMTFSWVVLSATFGIQTAAIISAGDFQAITWAPLVILTSLIFVYVSIFTVIFGSASFNPTGSAAIYVAGVPGDTLFSLAIRLPAQAIGAAGGALAIMEFIPEKYKHMIGGPSLQVDVHTGAIAETILSFGITFAVLLIILRGPRRLLAKTFLLALATISFVVAGSKYTGPAMNPAIAFGWAYMYSSHNTWDHIYVYWISSFVGALSAALLFRSIFPPPRPQKKKQKKA

SEQ ID NO: 11241 - protein, 229 aa, Arabidopsis thaliana
MLMTFSWVVLSATFGIQTAAIISAGDFQAITWAPLVILTSLIFVYVSIFTVIFGSASFNPTGSAAIYVAGVPGDTLFSLAIRLPAQAIGAAGGALAIMEFIPEKYKHMIGGPSLQVDVHTGAIAETILSFGITFAVLLIILRGPRRLLAKTFLLALATISFVVAGSKYTGPAMNPAIAFGWAYMYSSHNTWDHIYVYWISSFVGALSAALLFRSIFPPPRPQKKKQKKA

SEQ ID NO: 11242 - DNA, 1488 bp, Arabidopsis thaliana
gaaaagaaagattcttctttttcgctgactctccacttctctcaatcgtccgcctctacctacagagagagagactgaaccagacgactttcagtttcagttccagtttcaaagatctctttttcgtttctcgctgtctgtagcatcaatggcaatcgcttcctgcttcttctgtgttccaacaccgaacacagctatctctgaatccaatctgacatggcctcacatcgcttcgtttcctagactctcttcatcttcctcttttaacggtgtaatctctgcaaagtcaatctcttttaaccgccgtgtacctattacccctgttttatccgcttcaagtggtaacggcggctctgataacaacggaggaggtcttagtggtggtggtggtggtggcgatggaggtaagaatgatggagatggacacggtgacgaggacagggataggaacaggaacgaggcgatgcttttgttgaaggagtctgggattgaattggagagtcttcccaaagatctagcggctgctattgaggcgggtcggattcctggatcggttatcactcggttcctggagcttcagaaatcggctgtgatgcggtggctgatgcagtttggtgggtttagggaaagattgttggctgatgatctcttcatggctaaactcgccatggaatgtggtgttggaatcttcaccaagactgctgctgagtatgaacggcgtagagaaaacttcttcaatgaacttgaagttgtctttgccgatgtggcgatggctattattgctgatttcatgttggtttatcttcctgctcctaccgtttctcttcgaccacctctcgcacttactgctggaggtatatccaagtttttccacaactgcccagacaatgccttccaggttgctctctccggaacctcatatactctcttgcaaaggctaggtgctataacgcgcaatggagctaagctgtttgccgttggcaccacatcatcgctggttggtactgctattacaaatgcattcataaaagcacgaaaagctgtggaccagaattctgaaggtgaagtcgaaactgttccgatagtctccacaagtgttgcatatggtgtctacatggcagtttctagcaacctaaggtaccaaatagtggctggtgtgattgaacaacgtctcctggagccaatgctacaccaacacaaacttgcactcagtgcgttgtgctttgcagttagaacaggcaacacattcttgggttccttattatgggtggattatgcccgcctcattggtatccagaaatctcactgatgaagcggaataagaaccggatgtgcccgattctgacatggtctttcgacttatgtatacgcacactacttttgtcttcatacgattgtttctgattttggggccgtttcgttgttctatgttggtcctctttctaggaaattagtcgatttttcaatgcaaactaaggctattttcac

SEQ ID NO: 11243 - protein, 386 aa, Arabidopsis thaliana
MAIASCFFCVPTPNTAISESNLTWPHIASFPRLSSSSSFNGVISAKSISFNRRVPITPVLSASSGNGGSDNNGGGLSGGGGGGDGGKNDGDGHGDEDRDRNRNEAMLLLKESGIELESLPKDLAAAIEAGRIPGSVITRFLELQKSAVMRWLMQFGGFRERLLADDLFMAKLAMECGVGIFTKTAAEYERRRENFFNELEVVFADVAMAIIADFMLVYLPAPTVSLRPPLALTAGGISKFFHNCPDNAFQVALSGTSYTLLQRLGAITRNGAKLFAVGTTSSLVGTAITNAFIKARKAVDQNSEGEVETVPIVSTSVAYGVYMAVSSNLRYQIVAGVIEQRLLEPMLHQHKLALSALCFAVRTGNTFLGSLLWVDYARLIGIQKSH

SEQ ID NO: 11244 - protein, 281 aa, Arabidopsis thaliana
MLLLKESGIELESLPKDLAAAIEAGRIPGSVITRFLELQKSAVMRWLMQFGGFRERLLADDLFMAKLAMECGVGIFTKTAAEYERRRENFFNELEVVFADVAMAIIADFMLVYLPAPTVSLRPPLALTAGGISKFFHNCPDNAFQVALSGTSYTLLQRLGAITRNGAKLFAVGTTSSLVGTAITNAFIKARKAVDQNSEGEVETVPIVSTSVAYGVYMAVSSNLRYQIVAGVIEQRLLEPMLHQHKLALSALCFAVRTGNTFLGSLLWVDYARLIGIQKSH

SEQ ID NO: 11245 - protein, 238 aa, Arabidopsis thaliana
MRWLMQFGGFRERLLADDLFMAKLAMECGVGIFTKTAAEYERRRENFFNELEVVFADVAMAIIADFMLVYLPAPTVSLRPPLALTAGGISKFFHNCPDNAFQVALSGTSYTLLQRLGAITRNGAKLFAVGTTSSLVGTAITNAFIKARKAVDQNSEGEVETVPIVSTSVAYGVYMAVSSNLRYQIVAGVIEQRLLEPMLHQHKLALSALCFAVRTGNTFLGSLLWVDYARLIGIQKSH

SEQ ID NO: 11246 - DNA, 1178 bp, Arabidopsis thaliana
accacttaacgtcagtggtccgattgacaaacagacctgtgactgtgagtgaagaagataatgcagactcaccttttggtgggacctatcccactcaaaggctaccgtcgattctcttcctcctccttctccggcgatctcctccctccgtcgtctaaccctatcggccgagacctattccctcaccgtcgaaggcaccgcgacggcaaatctcggagttaccgtaatcgctcgaaaacgacgattactagtgctgcgttttcttcaagttctaataccggcgggcagaatcattacgctgttttgggcatcgctcgaaacgccacacaaggtgacatcaagagagcttatcgtttgctagctcgaaagtttcatcctgatgttaataaggactctaaagccggagagctattcaagagtgtccgttgttcctacgaagtactatctaatgaagctacaaggactcagtacgacagagcacttaaacttcaagaaaattcccggttccatagagtgaaaaggcacagctacacccctgaggttgaagatgccatgaagtattactacacctggtctgagaaaagacaaagatccagacacgggagattctatggacactattctacatatccaaactcacatttctacgctgagaccgagccgcaagaagaagaaggagtagaaacagcaccagaccagcgagactcatttgttgaagctctcaaatccgccttcttatcgatgtttcttctatatacattcggttgcctagcatctctcacatttagcacattcacagcgttgctcgacaaggaactcgacatgggttacaaagtcggattcatgatcgcttggatacttggcggaaaaggcggtatccttcttactctctgcttaacatttgcaagctggctctgtgggaaagcaagcagcagcgtggtggttcttgtgttagtagcaatgtgggttggctcgaatttagctagacatgctcctcttccacaaggtgctcttctcaccctcctctacatgtcaatcaaacttcaagtcgactcaacctgaatcttctgtaagtttccactacgttttagattgtaaatagctaagttacattatttgtatcctatgatttgggtcttggagaaaaatgattagtagtaaagagaagaaattgcttg

SEQ ID NO: 11247 - protein, 333 aa, Arabidopsis thaliana; identical to SEQ ID NO: 2863

SEQ ID NO: 11248 - protein, 169 aa, Arabidopsis thaliana; identical to SEQ ID NO: 2864

SEQ ID NO: 11249 - DNA, 1968 bp, Arabidopsis thaliana
gaaaaactttggaataacgataaataaaaataaaaaaattccatttctcgagaagaagaagaatctgctctgctctcgtttctgtttttcgctctccggccaatctactaaatagttcggacgtgattctcgagataaaggagagaaagaagaagatggagatcgataaagcgatcggagaaagtgacgataagaggttgaagactaagtacaataacgccatcttcgtcattaaaagagctcttgctctttactctattgaagaggtcgcctttagtttcaatggaggaaaagactccactgtactgttgcaccttcttagagctggttattttttgcataaaaaagagcagacttgttctaatggtggtctatcaagttttccagtccggaccatttattttgagagcccttctgccttcactgaaatcaatgcttttacatacgatgctgctcaaacttacaatctgcaacttgatatcattcgccaggatttcaaatccgggttggaggcattattaaaggctaaccctatcagagctattttccttggcgtccgaattggtgatcctactgcggttggtcaagagcaattctctcctagttcacctggatggcctccctttatgagggtgaatcctatattggattggtcctacagagatgtttgggcgtttctcctaacttgcaaggtcaagtattgcagtctttatgaccagggatatacatcaattgggagcattcatgatacggttcccaactcattattgtctgttaacgacactagtagtaaagagaaattcaaacctgcttatttgctttctgatgggagattagaaagggcagggagagtcaagaaaattgcttcactgaaaaaagacgtagataccgaatcacagaaacacgaggtgcttttggcctcagtaattgctgtcggcgatgagattctgtctggcactgttgaggatcaattaggactgtctttgtgtaagaagttgacttctgtcggttggtcggtgcaacaaaccactgtccttcggaatgatatagattctgtatccgaggaagttgaccgccaaaggtctacgagtgatatggtattcatatatggaggagttggtcctttgcattcagatgttactttggccggtgttgctaaggcatttggagttcgcctggcacctgatgaagagtttgaggaataccttaggcatcttatcagcgaccagtgcacaggtgacaggaatgagatggctcagttaccggaaggaattacagaactactgcatcatgaaaagctttctgtgccattgattaagtgccgcaatgtgattgttcttgctgctacaaacactgaggagctcgagaaagagtgggaatgtctgacggaacttactaaattgggtggaggttcactcatagaatattcgtcgaggcgcttgatgacatctttaacagatgttgaagttgcagagcctctgtccaaactaggtctcgaattcccagacatatatcttgggtgttaccggaaatctagacaaggtcctatcatcatctgcttaacgggaaaggataatgcacggatggactcagctgcacaggcactacgcaagaaattcaagaaagatgtgttcgtagaaatcaagtagacacaagtttaagaaccggttgagaaagagacacagcttcaatggtccacttgaatggcttctatgtaccggtcacagaacctgagaggaagtaactgagaggataggatcagaatctgacactttttaaggaaactggaagcagttattgtggcgtaaacatatttatcataacctataaaattataaaattgaatgtatcactcttatcagttatcaactctaaataatgaaatttgtaggaaagtaacccataagggttctgcttttacacattttgtcttgaacggtttaagcatgatatgcttatgttgcattc

SEQ ID NO: 11250 - protein, 497 aa, Arabidopsis thaliana
MEIDKAIGESDDKRLKTKYNNAIFVIKRALALYSIEEVAFSFNGGKDSTVLLHLLRAGYFLHKKEQTCSNGGLSSFPVRTIYFESPSAFTEINAFTYDAAQTYNLQLDIIRQDFKSGLEALLKANPIRAIFLGVRIGDPTAVGQEQFSPSSPGWPPFMRVNPILDWSYRDVWAFLLTCKVKYCSLYDQGYTSIGSIHDTVPNSLLSVNDTSSKEKFKPAYLLSDGRLERAGRVKKIASLKKDVDTESQKHEVLLASVIAVGDEILSGTVEDQLGLSLCKKLTSVGWSVQQTTVLRNDIDSVSEEVDRQRSTSDMVFIYGGVGPLHSDVTLAGVAKAFGVRLAPDEEFEEYLRHLISDQCTGDRNEMAQLPEGITELLHHEKLSVPLIKCRNVIVLAATNTEELEKEWECLTELTKLGGGSLIEYSSRRLMTSLTDVEVAEPLSKLGLEFPDIYLGCYRKSRQGPIIICLTGKDNARMDSAAQALRKKFKKDVFVEIK

SEQ ID NO: 11251 - protein, 340 aa, Arabidopsis thaliana
MRVNPILDWSYRDVWAFLLTCKVKYCSLYDQGYTSIGSIHDTVPNSLLSVNDTSSKEKFKPAYLLSDGRLERAGRVKKIASLKKDVDTESQKHEVLLASVIAVGDEILSGTVEDQLGLSLCKKLTSVGWSVQQTTVLRNDIDSVSEEVDRQRSTSDMVFIYGGVGPLHSDVTLAGVAKAFGVRLAPDEEFEEYLRHLISDQCTGDRNEMAQLPEGITELLHHEKLSVPLIKCRNVIVLAATNTEELEKEWECLTELTKLGGGSLIEYSSRRLMTSLTDVEVAEPLSKLGLEFPDIYLGCYRKSRQGPIIICLTGKDNARMDSAAQALRKKFKKDVFVEIK

SEQ ID NO: 11252 - DNA, 1914 bp, Arabidopsis thaliana
ggccctttagggtttatcctccaagaccaaaatgtctccaattgagaattcctcatcttggacactcgaatccgacctagaagatctagacctcgacctccaagactacaaaccatccgtaccattaaagaaagtcccaaacggagacattttcgaagcctcacgcgccggtgacgtcgatagactccggtaccttgttgaaaccggagtcaacgtcaacgcacgtgaccgttgggactctgttgctctttactacgcttgtctcgctggtcacatagactctgctcgattgcttctagagaacggtgcgatttgctctgaacatacttttgatggtgttcgttgtcattatgcttctcttaatttaaggattcggaagcttctgaaggcttttgaagctcgtcctcctcctcttgctcctttgcaagcttctcttagagatacctttttgggatgttgtcataatcgagattatcttcaacaagaagaagctaatcttgatgtctctgatactctgagtgagtttggtagttcgaattactttccaccggatgtgatgttctatgtgcaaggtagacctattgaagcacacagggttatcttaagtgctcgatctccgtttttcaagcagaagtttgagaatgaatggaaagaccggagagaagttcggttttcgaaagagaagctttcgtatcctgctctctgtagtcttattcacttcttttattcagataggttggagatatctgttgatgatatggaagatcttgttaggatttgcaaagtttgtaaatgtgaatcactgcagaaaatcattgagaaggaactgattcaccagagatatgctgagtataagactcatagagatcttgataactccatgaaacggtttatcttacagggtatatcacttccagaggaagacaggcttcctgcttctttgcataggattcttcgagtttcactagcgaaatcgtttgttggtgatgtaatagattcatctgttggggatacgagagttggtgattctgtggaaagtcttgctgatgtttgtgttagagttgataaaagaaatttctactgccatcaagttattctagcttcaagatcagagtacttcagagcacgattatcacgagtgaatgattttcatgaggggaagaatggtttgccgggtgatactcttccatttcttgaaaaaatgatttgagtgcagaggcttttgagaagatgattgagtatatgtacactgatggcttaaaggagatcaatccgaatcaggctgaggagatctttgatgttgcatctcgctacttgctgtttccgcttaaacgtgctgtggctgacgccttgttgcctcacttggaaactgccacacctgcagaactctgtcaatggctggttttgtcagatatgtacggagtgttgaagataagagagtactgcctggacttggttgcttgtaattttgaggcatttgttgaaacccacgagttcagggcaatgttattaacattgcctccaccatcaggagactcttcacttcgaaccactgttccaagtgcaccaggtgccatgatgaccacagaccaagggaatctccttgatgatctgagagagaagtggcttgaagcagaggctttagagcttgacatgagagacgagagtgctttgattttcgataagcgccttgcaatgcttgtggaaatagcagagcgagagaaatccgaatcagaagctgaggactacaaagacaccagcgcatgattattggtttttctaaaaacaagttttgagtctcttcattatacatactgttacctcgttctcgaacttttacacaaatgaataaacatgttgtagatattgatgattaaatttcattatcttagtacatgcaccatttgcttcact

SEQ ID NO: 11253 - protein, 392 aa, Arabidopsis thaliana
MSPIENSSSWTLESDLEDLDLDLQDYKPSVPLKKVPNGDIFEASRAGDVDRLRYLVETGVNVNARDRWDSVALYYACLAGHIDSARLLLENGAICSEHTFDGVRCHYASLNLRIRKLLKAFEARPPPLAPLQASLRDTFLGCCHNRDYLQQEEANLDVSDTLSEFGSSNYFPPDVMFYVQGRPIEAHRVILSARSPFFKQKFENEWKDRREVRFSKEKLSYPALCSLIHFFYSDRLEISVDDMEDLVRICKVCKCESLQKIIEKELIHQRYAEYKTHRDLDNSMKRFILQGISLPEEDRLPASLHRILRVSLAKSFVGDVIDSSVGDTRVGDSVESLADVCVRVDKRNFYCHQVILASRSEYFRARLSRVNDFHEGKNGLPGDTLPFLEKMI

SEQ ID NO: 11254 - protein, 217 aa, Arabidopsis thaliana
MFYVQGRPIEAHRVILSARSPFFKQKFENEWKDRREVRFSKEKLSYPALCSLIHFFYSDRLEISVDDMEDLVRICKVCKCESLQKIIEKELIHQRYAEYKTHRDLDNSMKRFILQGISLPEEDRLPASLHRILRVSLAKSFVGDVIDSSVGDTRVGDSVESLADVCVRVDKRNFYCHQVILASRSEYFRARLSRVNDFHEGKNGLPGDTLPFLEKMI

SEQ ID NO: 11255 - DNA, 1970 bp, Arabidopsis thaliana
gaatggaaaaaaaaaacacagatttcaaacactcgagagtcaagagtctcagacccacccagcttctggtttcgtttcgccgtcgcgcacggctgaacatatctgctatatcggagattagtgaaggttagttactattgattaaaggtttcataatttggggctaatctctctgcaaggtgacgagaaaatccattattcccttcccaaggtttgtcctctgaagatataaagtctcaatctttggataagaaagttcaaatggaaaattggaaacttttcttcagttgaatgaatgattgagctgaagaaaccaaagctagaatggggcaaagttcattgtcatggggtccctagaatattcgaatctatgatccttttggtgtaaagtattagtcaagttgagagatatttttaacattttgtggtcactatcgatgtcttggagttgattgcttctaaacccactttaacttgtgagagagtttctaagaatctggctctggatatcaaataatcttatcatgagagaagagacagtgtcttggaagtactttaaaagagatgttgttccgttcactgcgatgatcgctatagagtgtacaacggttggatccagcatactgtataaagctgctaccttgagaggatttagcttttatgtctttgtgttttacgcttatgttggtgctacacttgtccttcttctactttcacttatctttggaaggtcgagaagtttgcctacagccaagtcttctcttttcttcaagattttcttacttgcgcttctcgggctcacgtcgcgggtagctggttgtaaaggtatagaatatagttccccaactctttcctctgctatcagcaatcttacaccagctttcaccttcatccttgccatcttcttcaggttccactttctcctaaactgggtgattccactcttaaccatacaaaagatatgattttcagacagtaacagtcaatatgaaatgatatcgttgtctgtgaattatggagtagttgtataagtatgagaaatgttggatagatatgaggtttgtttgtaactcttaactttggtgacttgttctgcttcctggggtgactcgtaaaggatggaacaagtgatgttaagaagctctgcaactcaggctaaaatcattggcacaatagtttctatatctggtgctctggttattgttctgtataaaggcccaaaacttcttgttgctgcatcgtttacttcattcgagtcaagttggataattggaggccttttgctcggtctgcagtttttgcttctttcagtctggtttattcttcagactcatatcatggagatataccctgaagaaatagccgtagtcttctgctacaacttatgcgcaactctaatctcagggacagtatgtctacttgtagaaaaagacttgaattcttggcagcttaaaccgggtttctccctcgcttcagtcatatactcgggactctttgatacatcattgggctcagttatccacacatggggtctccatgtgaagggtccagtctacatatccttgttcaagccgctgtctatcgcaattgcagtcgccatggctgctatattcctcggcgacacacttcatcttgggagtgtgattggataagtgatattgagctttgggttttacactgtgatttggggcaaagcaagagaggattcaaccaaaacagtaagtgattctgagcaatcacttttattgccttcacacgacagagaagaagattgaaaccttgtcatgaaaatatgttggagacaagtgtaatcgttttcttattttattcataattatggtcccattagatgatgatgatccctatttatcttgtgaagatcttatgacttgtacaaaaaaaatctaacatgatacattgaaatgtgaaaaatgatatacttatttgttgagaaaatgataatatttctt

SEQ ID NO: 11256 - protein, 177 aa, Arabidopsis thaliana
MEQVMLRSSATQAKIIGTIVSISGALVIVLYKGPKLLVAASFTSFESSWIIGGLLLGLQFLLLSVWFILQTHIMEIYPEEIAVVFCYNLCATLISGTVCLLVEKDLNSWQLKPGFSLASVIYSGLFDTSLGSVIHTWGLHVKGPVYISLFKPLSIAIAVAMAAIFLGDTLHLGSVIG

SEQ ID NO: 11257 - protein, 173 aa, Arabidopsis thaliana
MLRSSATQAKIIGTIVSISGALVIVLYKGPKLLVAASFTSFESSWIIGGLLLGLQFLLLSVWFILQTHIMEIYPEEIAVVFCYNLCATLISGTVCLLVEKDLNSWQLKPGFSLASVIYSGLFDTSLGSVIHTWGLHVKGPVYISLFKPLSIAIAVAMAAIFLGDTLHLGSVIG

SEQ ID NO: 11258 - protein, 146 aa, Arabidopsis thaliana
MREETVSWKYFKRDVVPFTAMIAIECTTVGSSILYKAATLRGFSFYVFVFYAYVGATLVLLLLSLIFGRSRSLPTAKSSLFFKIFLLALLGLTSRVAGCKGIEYSSPTLSSAISNLTPAFTFILAIFFRFHFLLNWVIPLLTIQKI

SEQ ID NO: 11259 - DNA, 2573 bp, Arabidopsis thaliana
tttctggttacagacagatacattccctctgagaaccaagaaaacaaaataataataaaaaaccctaattccccgctccacttctctctctcacgctctctctgtgattttagtatggaagcaacggcggaggaatcagttagtactcttgttacgacgatggttgatgagacgtatgagttcttagcgcctcgatggtttgatttcgttaatggagagactgaagatgagtctcgccgagcagaactctggtttcaatcggccttaagctgcgctccttctccttcggttcctagaatcaaagcaaggagatcgttcaaggtagaggccatgtgcaacttcaatgaagatgaagaagagacgctcaaggataaagagccgttagaaccagtagttccaattgtttctttacaatcgcagccttctcaggccaagaaagcagaagttgctccttctaaagcaagcactgttaagccgtctcgcatcagttccaaggacgcagaggtcaacaacaagaccgtagatgccagcgatccgacgactgagccaatagaagacaaggagaacattgctcctgcttgcacacccaaaccaccaatgcagttttctctaggggcaaagtcggtggatcttaagaagcagcaaactgctagaaagatagctagtctgctgaagaatccatctacactaaggcctaaaaaccagtctcaagccaaaggcagtcatcagaaaagtgtgaaaggggaaacgaatcttaacaacatagctagcactaccaatctgattcaagaaaatcaagccatcaaaaggcaaaagctagatgatggaaaatcaagacagattctcaatccaaaaccagcaactctgctccacaagacaagaaatggtcttgttaacactggtttcaacttatgcccttcagtcactaagcacactccgaaggaaaacagaaaggtttatgttcgtgagcaaattgcaccttttgtttcaactgctgaattgatgaagaagttccaaacaagcacgcgagacctattcgtccagaatcgacctaagctgacactgacaagaccaaaggaacccgaatttgtgacgtcccaacgagctcgtcctttgagagttaagagcagtgcagaacttgaggaagagatgttggcaaagattcccaagtttaaagctcgacctgtgaacaagaagattttggcagctccagctttgcctgcacctcaaagaagtacaccacatctgccagaatttcaggaatttcatcttcaaacaatggcaagggctaaccagcatgcagagacatcttcaatagcttcaacagaagtgtctaagcagcataatgatcagaagcatcaccttactgaaccaaagagccctgtgctccaaacaatgctaagagctcgtcctactatagcaaaaactactgcagaacttgagcaagaggaactggagaaggcaccaaagttcaaagcaaaacctttgaacaaaaagatatttgaaagtaaaggagaaatgggtatcttttgcaacaccaagaagcacataacgatacctcaagagtatcactttgcgacagatgagaggatatcacgaccagaatctgtcttagatatattcgacaagctctcactgaactccgaatcttgccatgaaaaacctctaccaaggaacactgctccaaaccccttcaatcttaagacagaagaaagaggcgctgagaaagagaagaaattttatatggaactcatgtataagaaattaggagatgtaaaggcaagagttccaaaggcaaatccatatccttacacgacggactatccagtggtaccaccaaaaccagaacctaagcaatgcacacaaccagaaccgttccagttagagagtctagtaaggcacgaagaggaaatgcgaagagaaagggaagagaggaggagaatggagacagaagaagcccagaagaggctcttcaaagcacaaccagttataaaagaggacccaatccctgttccagagaaagtacgaatgcccctcacagaaattcaggagttcaatcttcatgtagagcatcgagctgttgaacgagcagattttgatcacaaaatcaaagagaaggagaaccagtacaaaagataccgtgaagagagtgaagctgcaaaaatggtggaggaagagagagctctgaagcaaatgagaaagacaatggttcctcatgccagacctgtgcctaacttcaacaaacccttcttacctcagaagtccaacaaggggaccacaaaagcaaaatcacccaatcttagagtgattaaaagaaccgagagaagaaccatgatggctcgaccaaccatctctgcagctactagcgcctctgctggtcagatgagatagttgtttgcagtaatgttttctgaagcagcctgaaatgttcatgaatgcttgaacctacattttcctttgtaaaaatgattcagtactaaattttcctgtaacctgttcttactaatatagtacattgtcttatgtatcctggttcaagttttaataaactgaaaaaaaaaactgttcttact

SEQ ID NO: 11260 - protein, 796 aa, Arabidopsis thaliana
FLVTDRYIPSENQENKIIIKNPNSPLHFSLSRSLCDFSMEATAEESVSTLVTTMVDETYEFLAPRWFDFVNGETEDESRRAELWFQSALSCAPSPSVPRIKARRSFKVEAMCNFNEDEEETLKDKEPLEPVVPIVSLQSQPSQAKKAEVAPSKASTVKPSRISSKDAEVNNKTVDASDPTTEPIEDKENIAPACTPKPPMQFSLGAKSVDLKKQQTARKIASLLKNPSTLRPKNQSQAKGSHQKSVKGETNLNNIASTTNLIQENQAIKRQKLDDGKSRQILNPKPATLLHKTRNGLVNTGFNLCPSVTKHTPKENRKVYVREQIAPFVSTAELMKKFQTSTRDLFVQNRPKLTLTRPKEPEFVTSQRARPLRVKSSAELEEEMLAKIPKFKARPVNKKILAAPALPAPQRSTPHLPEFQEFHLQTMARANQHAETSSIASTEVSKQHNDQKHHLTEPKSPVLQTMLRARPTIAKTTAELEQEELEKAPKFKAKPLNKKIFESKGEMGIFCNTKKHITIPQEYHFATDERISRPESVLDIFDKLSLNSESCHEKPLPRNTAPNPFNLKTEERGAEKEKKFYMELMYKKLGDVKARVPKANPYPYTTDYPVVPPKPEPKQCTQPEPFQLESLVRHEEEMRREREERRRMETEEAQKRLFKAQPVIKEDPIPVPEKVRMPLTEIQEFNLHVEHRAVERADFDHKIKEKENQYKRYREESEAAKMVEEERALKQMRKTMVPHARPVPNFNKPFLPQKSNKGTTKAKSPNLRVIKRTERRTMMARPTISAATSASAGQMR

SEQ ID NO: 11261 - protein, 758 aa, Arabidopsis thaliana
MEATAEESVSTLVTTMVDETYEFLAPRWFDFVNGETEDESRRAELWFQSALSCAPSPSVPRIKARRSFKVEAMCNFNEDEEETLKDKEPLEPVVPIVSLQSQPSQAKKAEVAPSKASTVKPSRISSKDAEVNNKTVDASDPTTEPIEDKENIAPACTPKPPMQFSLGAKSVDLKKQQTARKIASLLKNPSTLRPKNQSQAKGSHQKSVKGETNLNNIASTTNLIQENQAIKRQKLDDGKSRQILNPKPATLLHKTRNGLVNTGFNLCPSVTKHTPKENRKVYVREQIAPFVSTAELMKKFQTSTRDLFVQNRPKLTLTRPKEPEFVTSQRARPLRVKSSAELEEEMLAKIPKFKARPVNKKILAAPALPAPQRSTPHLPEFQEFHLQTMARANQHAETSSIASTEVSKQHNDQKHHLTEPKSPVLQTMLRARPTIAKTTAELEQEELEKAPKFKAKPLNKKIFESKGEMGIFCNTKKHITIPQEYHFATDERISRPESVLDIFDKLSLNSESCHEKPLPRNTAPNPFNLKTEERGAEKEKKFYMELMYKKLGDVKARVPKANPYPYTTDYPVVPPKPEPKQCTQPEPFQLESLVRHEEEMRREREERRRMETEEAQKRLFKAQPVIKEDPIPVPEKVRMPLTEIQEFNLHVEHRAVERADFDHKIKEKENQYKRYREESEAAKMVEEERALKQMRKTMVPHARPVPNFNKPFLPQKSNKGTTKAKSPNLRVIKRTERRTMMARPTISAATSASAGQMR

SEQ ID NO: 11262 - protein, 743 aa, Arabidopsis thaliana
MVDETYEFLAPRWFDFVNGETEDESRRAELWFQSALSCAPSPSVPRIKARRSFKVEAMCNFNEDEEETLKDKEPLEPVVPIVSLQSQPSQAKKAEVAPSKASTVKPSRISSKDAEVNNKTVDASDPTTEPIEDKENIAPACTPKPPMQFSLGAKSVDLKKQQTARKIASLLKNPSTLRPKNQSQAKGSHQKSVKGETNLNNIASTTNLIQENQAIKRQKLDDGKSRQILNPKPATLLHKTRNGLVNTGFNLCPSVTKHTPKENRKVYVREQIAPFVSTAELMKKFQTSTRDLFVQNRPKLTLTRPKEPEFVTSQRARPLRVKSSAELEEEMLAKIPKFKARPVNKKILAAPALPAPQRSTPHLPEFQEFHLQTMARANQHAETSSIASTEVSKQHNDQKHHLTEPKSPVLQTMLRARPTIAKTTAELEQEELEKAPKFKAKPLNKKIFESKGEMGIFCNTKKHITIPQEYHFATDERISRPESVLDIFDKLSLNSESCHEKPLPRNTAPNPFNLKTEERGAEKEKKFYMELMYKKLGDVKARVPKANPYPYTTDYPVVPPKPEPKQCTQPEPFQLESLVRHEEEMRREREERRRMETEEAQKRLFKAQPVIKEDPIPVPEKVRMPLTEIQEFNLHVEHRAVERADFDHKIKEKENQYKRYREESEAAKMVEEERALKQMRKTMVPHARPVPNFNKPFLPQKSNKGTTKAKSPNLRVIKRTERRTMMARPTISAATSASAGQMR

SEQ ID NO: 11263 - DNA, 1385 bp, Arabidopsis thaliana
gaccctaatttgagcagatctttccaattgaaagcgaaccgtgaattttgagtctctttaccggcggcgaaaaaatgcttggtggattatacggagatcttcctccaccgaccgatgatgagaaacccagtggaaactcctcttccgtctggtcaagcagtaccaaaatggctccacctacacttcgcaaaccaccagcttttgctcccccgcaaacaatcttaagacctctcaacaaacctaaacctatcgtttcggctccgtacaagcctcctcctccttcgaattcatcgcaatcggtgcttattccggcgaacgaatcagcaccttcgcatcagcctgcattggttggtgtgacttcatcggtgattgaagagtacgatccagcgagacctaacgattacgaggagtataagagggagaagaagaggaaagctacggaagctgagatgaaacgagagatggataagagaaggcaagaggatgaggaaagagataagagagaaagagaagagagggagaaggagagagagagagataacagtgatccgtctcggttgaatatctccggtgaggaagcgtggaagagacgcgctgctatgagtggtggtggaagtggtgggaagggaagatcttcgtctccgccggggaatgttgatgggtttagtattgggaaatcggagacgagtgggttaggagtaggagcaggtggacagatgacagctgctcagaggatgatggcgaagatgggatggaaacaaggacaagggcttgggaaatcagagcaagggattactacgccattgatggctaagaagactgatcgtagagctggtgtcattgtcaatgctagtgagaataaatcttcttcggcggagaagaaggttgttaagagtgttaatatcaatggtgaaccaaccagggttttgcttcttagaaacatggttgggccaggacaagtagatgatgagctagaagatgaggtaggaggcgagtgtggcaaatacggtacagtcactcgtgtactgatattcgagatcactgaaccgaacttccctgtacacgaagcagtaagaatctttgttcagttttcaagacccgaggaaacaactaaagcccttgtagacctcgatgggagatactttggaggaagaaccgtacgtgcaacgttctatgatgaagagaaattcagtaagaacgagttggctccagttccaggtgaaatccctggctattaataactcctaagacaaagaagaaacttcatcttctaggagattcttgttagaaagaaaccatagatgaggttttaaaaacatttgtaaagtacttagaaatcttgggattatctctttattgttgttcaaagtagcttcacaaggatc

SEQ ID NO: 11264 - protein, 387 aa, Arabidopsis thaliana
MLGGLYGDLPPPTDDEKPSGNSSSVWSSSTKMAPPTLRKPPAFAPPQTILRPLNKPKPIVSAPYKPPPPSNSSQSVLIPANESAPSHQPALVGVTSSVIEEYDPARPNDYEEYKREKKRKATEAEMKREMDKRRQEDEERDKREREEREKERERDNSDPSRLNISGEEAWKRRAAMSGGGSGGKGRSSSPPGNVDGFSIGKSETSGLGVGAGGQMTAAQRMMAKMGWKQGQGLGKSEQGITTPLMAKKTDRRAGVIVNASENKSSSAEKKVVKSVNINGEPTRVLLLRNMVGPGQVDDELEDEVGGECGKYGTVTRVLIFEITEPNFPVHEAVRIFVQFSRPEETTKALVDLDGRYFGGRTVRATFYDEEKFSKNELAPVPGEIPGY

SEQ ID NO: 11265 - protein, 356 aa, Arabidopsis thaliana
MAPPTLRKPPAFAPPQTILRPLNKPKPIVSAPYKPPPPSNSSQSVLIPANESAPSHQPALVGVTSSVIEEYDPARPNDYEEYKREKKRKATEAEMKREMDKRRQEDEERDKREREEREKERERDNSDPSRLNISGEEAWKRRAAMSGGGSGGKGRSSSPPGNVDGFSIGKSETSGLGVGAGGQMTAAQRMMAKMGWKQGQGLGKSEQGITTPLMAKKTDRRAGVIVNASENKSSSAEKKVVKSVNINGEPTRVLLLRNMVGPGQVDDELEDEVGGECGKYGTVTRVLIFEITEPNFPVHEAVRIFVQFSRPEETTKALVDLDGRYFGGRTVRATFYDEEKFSKNELAPVPGEIPGY

SEQ ID NO: 11266 - protein, 262 aa, Arabidopsis thaliana
MKREMDKRRQEDEERDKREREEREKERERDNSDPSRLNISGEEAWKRRAAMSGGGSGGKGRSSSPPGNVDGFSIGKSETSGLGVGAGGQMTAAQRMMAKMGWKQGQGLGKSEQGITTPLMAKKTDRRAGVIVNASENKSSSAEKKVVKSVNINGEPTRVLLLRNMVGPGQVDDELEDEVGGECGKYGTVTRVLIFEITEPNFPVHEAVRIFVQFSRPEETTKALVDLDGRYFGGRTVRATFYDEEKFSKNELAPVPGEIPGY

SEQ ID NO: 11267 - DNA, 1782 bp, Arabidopsis thaliana
gaactcacgagtcgtgtgtgactcggtgactcgcgactcaaccgaaccttacccaatactcaaccacacaacaatgggccaagctccgtcgtctccggcggaaccaaacgtacgcgatacttctttatgtctatggtcaccggaatttctcgattgcgaatcgattggtttcgaagacggagattacgatttcacggcaaatctaccagacgattgcctcgctcatatctttcaatttctcagtgccggagatcggaaacgatgctctcttgtatccaaacggtggctattagtcgacggacagaatcgtcaccgtttatcacttgacgctaaatctgagattctccctttcttaccatgtatcttcaatcgattcgattccgtaacaaagctcgctcttcgttgtgatcggagatcttttagcttaagcgatgaagctttattcatagtctcgattcgttgctcgaatctgattcgagtcaagcttcgtggttgtcgagagataacagatctaggtatggaatcgttcgctagaaactgtaagagcttgaggaaattatcatgtggctcttgtactttcggtgcgaagggaataaacgcgatgcttgagcattgtaaggttcttgaggagttatctctgaagagaatcagaggacttcatgaattggctgagccaataaagctgagtttgtctgcttcacttagatctgtgtttttgaaggagcttgttaatggtcaggtgtttggatctttggttgctactagaactttgaagaaagttaaaatcattcgttgtttaggtaattgggatagagtttttgaaatgaatggaaatgggaatagttctttaactgagattcgtctagagaggcttcaagtgactgatattggactgtttggtatatctaaatgttcgaatttagagactttgcatatagtgaaaactcctgattgctcgaatttaggtttagctagtgttgttgagagatgtaagttactgagaaagcttcatattgatggttggagggttaagaggattggtgatcaaggtttgatgtctgtagctaagcactgtttgaatttgcaagagcttgtacttatcggtgttgatgcgacgtatatgagcttgtctgctattgcttcaaactgtaagaagcttgaacggttagctctttgtgggagtggtacgattggggatgcggagattggttgtatcgcggagaaatgtgtgacgttgaggaaattctgtatcaagggatgtttgatttcagatgtaggggtccaggcgttggctttaggctgtcctaagttggtgaaactgaaggtgaagaaatgtagtttggttacaggtgaagttagggaatggttgcgtgaacggaggatgacattggtggtgagtatggatgatgatgaaaccaatggtgtgggtttggtggatggtggtgatcagagagttcttgagacggttgttgaggaggaggctccgccagtgattgatggtgatggtggtttgggagttgcaggtggtggtaggctagggttagctatcttgaagacaaagttagggttacttgcaggaaggaacttggtggcttgcacgttgagaagatggtctcaaagtgaagctactagttccatttgattgcactttttttattaaacaagggtctttgactcgttgtgcattcagaacaaaacccacttctgtattattatttcttgtttgtttattttatcttcacaattcattttcaaaatatttcatggcataagattattact

SEQ ID NO: 11268 - protein, 546 aa, Arabidopsis thaliana
NSRVVCDSVTRDSTEPYPILNHTTMGQAPSSPAEPNVRDTSLCLWSPEFLDCESIGFEDGDYDFTANLPDDCLAHIFQFLSAGDRKRCSLVSKRWLLVDGQNRHRLSLDAKSEILPFLPCIFNRFDSVTKLALRCDRRSFSLSDEALFIVSIRCSNLIRVKLRGCREITDLGMESFARNCKSLRKLSCGSCTFGAKGINAMLEHCKVLEELSLKRIRGLHELAEPIKLSLSASLRSVFLKELVNGQVFGSLVATRTLKKVKIIRCLGNWDRVFEMNGNGNSSLTEIRLERLQVTDIGLFGISKCSNLETLHIVKTPDCSNLGLASVVERCKLLRKLHIDGWRVKRIGDQGLMSVAKHCLNLQELVLIGVDATYMSLSAIASNCKKLERLALCGSGTIGDAEIGCIAEKCVTLRKFCIKGCLISDVGVQALALGCPKLVKLKVKKCSLVTGEVREWLRERRMTLVVSMDDDETNGVGLVDGGDQRVLETVVEEEAPPVIDGDGGLGVAGGGRLGLAILKTKLGLLAGRNLVACTLRRWSQSEATSSI

SEQ ID NO: 11269 - protein, 522 aa, Arabidopsis thaliana
MGQAPSSPAEPNVRDTSLCLWSPEFLDCESIGFEDGDYDFTANLPDDCLAHIFQFLSAGDRKRCSLVSKRWLLVDGQNRHRLSLDAKSEILPFLPCIFNRFDSVTKLALRCDRRSFSLSDEALFIVSIRCSNLIRVKLRGCREITDLGMESFARNCKSLRKLSCGSCTFGAKGINAMLEHCKVLEELSLKRIRGLHELAEPIKLSLSASLRSVFLKELVNGQVFGSLVATRTLKKVKIIRCLGNWDRVFEMNGNGNSSLTEIRLERLQVTDIGLFGISKCSNLETLHIVKTPDCSNLGLASVVERCKLLRKLHIDGWRVKRIGDQGLMSVAKHCLNLQELVLIGVDATYMSLSAIASNCKKLERLALCGSGTIGDAEIGCIAEKCVTLRKFCIKGCLISDVGVQALALGCPKLVKLKVKKCSLVTGEVREWLRERRMTLVVSMDDDETNGVGLVDGGDQRVLETVVEEEAPPVIDGDGGLGVAGGGRLGLAILKTKLGLLAGRNLVACTLRRWSQSEATSSI

SEQ ID NO: 11270 - protein, 374 aa, Arabidopsis thaliana
MESFARNCKSLRKLSCGSCTFGAKGINAMLEHCKVLEELSLKRIRGLHELAEPIKLSLSASLRSVFLKELVNGQVFGSLVATRTLKKVKIIRCLGNWDRVFEMNGNGNSSLTEIRLERLQVTDIGLFGISKCSNLETLHIVKTPDCSNLGLASVVERCKLLRKLHIDGWRVKRIGDQGLMSVAKHCLNLQELVLIGVDATYMSLSAIASNCKKLERLALCGSGTIGDAEIGCIAEKCVTLRKFCIKGCLISDVGVQALALGCPKLVKLKVKKCSLVTGEVREWLRERRMTLVVSMDDDETNGVGLVDGGDQRVLETVVEEEAPPVIDGDGGLGVAGGGRLGLAILKTKLGLLAGRNLVACTLRRWSQSEATSSI

SEQ ID NO: 11271 - DNA, 1804 bp, Arabidopsis thaliana
gataactctttctctccctctaccggcgccggagaaattcccgatcaacacaatctcgagacaactgagacgagttcaaattatcgactcaaataggattctagatggagagacgcgccccaaacgcattccctggtgctccaccaccagttccctactatcataacaactacaacaaccctcctcatcatcagattcatccgccgccgccgccgcaccaccatatcgctgccgttggattccacaaatacccccaaaacgacaacagggatcagcgtttcaatcaaccgcattactccggccaacagcagaacatgatcgttgatcagagtaataacgctcctccgccgtttccgccgagtccttgcggtggcagcagcttaaggaagagacggtctcaatcagctacagataatgctgatggtagtattgccaagttatatgttgcgcccatctcaaagacagctactgaatatgatatccgtcaggtctttgaaaaatatggtaatgtcactgagatcattctacccaaagataagatgaccggtgaaagggcagcttactgttttattaagtacaaaaaggtagaagagggtaatgcggctattgcagctttaactgaacagtttacctttcctggggaaatgcttccagtcaaggtccgatttgctgaagctgaacgagaacggattggttttgccccagtgcaacttcctgataaccctaaactatatgttagatgcctcaacaaacaaactacaaaaatggaagtcaatgaggtcttctctaggtacggaatcattgaagatatttatatggcacttgacgacatgaagatttgtcgtgggtatgcatttgttcagttttcttgtaaagagatggcactagcggcaatcaaagctttaaatggactctttaccatacggggttctgatcagcctctgattgttagatttgctgatcctaaaaaaccccgtctaggggaacaaaggtctacctttaacactccacctgcaatgcaacacttcgacccaaattggcattcacaaccatatccccagtgggaaaacaaggaacctgcaccccctagagtcgttcagcatcatgatttctcttcacagccaaatcacttcccgcaccaaaatactcaagcagtatccgaggttcataaaccactgcatcaagatattccacctgctaattttgagaagcatcagaaatctgagactgccagcgtggagactagaagtgatggtcagaagatttctagtcattcaaatgcattccatgaagatcaaaatacagtgagctcagagtgtgactggagtgaacacacttgtcccaatgggaataaatattacttccattgcatcacttgcgaaagcacgtgggagaaaccggacgaatactccatgtatgaaagatggttgaaagagcaaacaaggctacaggatgaaaaaattaaatctcccccgttaaacaatgagagccaagaagcaatcgaaaacagcgagcaagttgagtctgatgtattacaacagaatggtgaactccaacaaccatccttatccacagcggatcaggagaacaatgtagtagtatatccagtaacaacactagctgttgaaacaacatgttcataaaaggtttcttcagtaaaaaaatctactgaggaagctttgtgtgatgagcaatggagagatgaaagctgtaaaacggagaaagaagcagattttacgttttggttagaaacttttagaattggaaaggaaaaaataatcgaaaaattgttttgataaacggt

SEQ ID NO: 11272 - protein, 512 aa, Arabidopsis thaliana
MERRAPNAFPGAPPPVPYYHNNYNNPPHHQIHPPPPPHHHIAAVGFHKYPQNDNRDQRFNQPHYSGQQQNMIVDQSNNAPPPFPPSPCGGSSLRKRRSQSATDNADGSIAKLYVAPISKTATEYDIRQVFEKYGNVTEIILPKDKMTGERAAYCFIKYKKVEEGNAAIAALTEQFTFPGEMLPVKVRFAEAERERIGFAPVQLPDNPKLYVRCLNKQTTKMEVNEVFSRYGIIEDIYMALDDMKICRGYAFVQFSCKEMALAAIKALNGLFTIRGSDQPLIVRFADPKKPRLGEQRSTFNTPPAMQHFDPNWHSQPYPQWENKEPAPPRVVQHHDFSSQPNHFPHQNTQAVSEVHKPLHQDIPPANFEKHQKSETASVETRSDGQKISSHSNAFHEDQNTVSSECDWSEHTCPNGNKYYFHCITCESTWEKPDEYSMYERWLKEQTRLQDEKIKSPPLNNESQEAIENSEQVESDVLQQNGELQQPSLSTADQENNVVVYPVTTLAVETTCS

SEQ ID NO: 11273 - protein, 442 aa, Arabidopsis thaliana
MIVDQSNNAPPPFPPSPCGGSSLRKRRSQSATDNADGSIAKLYVAPISKTATEYDIRQVFEKYGNVTEIILPKDKMTGERAAYCFIKYKKVEEGNAAIAALTEQFTFPGEMLPVKVRFAEAERERIGFAPVQLPDNPKLYVRCLNKQTTKMEVNEVFSRYGIIEDIYMALDDMKICRGYAFVQFSCKEMALAAIKALNGLFTIRGSDQPLIVRFADPKKPRLGEQRSTFNTPPAMQHFDPNWHSQPYPQWENKEPAPPRVVQHHDFSSQPNHFPHQNTQAVSEVHKPLHQDIPPANFEKHQKSETASVETRSDGQKISSHSNAFHEDQNTVSSECDWSEHTCPNGNKYYFHCITCESTWEKPDEYSMYERWLKEQTRLQDEKIKSPPLNNESQEAIENSEQVESDVLQQNGELQQPSLSTADQENNVVVYPVTTLAVETTCS

SEQ ID NO: 11274 - protein, 367 aa, Arabidopsis thaliana
MTGERAAYCFIKYKKVEEGNAAIAALTEQFTFPGEMLPVKVRFAEAERERIGFAPVQLPDNPKLYVRCLNKQTTKMEVNEVFSRYGIIEDIYMALDDMKICRGYAFVQFSCKEMALAAIKALNGLFTIRGSDQPLIVRFADPKKPRLGEQRSTFNTPPAMQHFDPNWHSQPYPQWENKEPAPPRVVQHHDFSSQPNHFPHQNTQAVSEVHKPLHQDIPPANFEKHQKSETASVETRSDGQKISSHSNAFHEDQNTVSSECDWSEHTCPNGNKYYFHCITCESTWEKPDEYSMYERWLKEQTRLQDEKIKSPPLNNESQEAIENSEQVESDVLQQNGELQQPSLSTADQENNVVVYPVTTLAVETTCS

SEQ ID NO: 11275 - DNA, 2113 bp, Arabidopsis thaliana
gacgacggttctccgagagagagattttttaaaaatcaaattgcaacagaagagagataaaaggaagaaccctaatcgatttcgcgctctgattcgttctactttttccactgattaatctcaaaaaatggcgagtgagagttcgcaatcttcctcgccgtcgtcatctcaacctccgtcatctgtaccttctccgtcgccgggtaacaacgtcggcgatacgtttataggaagtttcatcagtctaatttctaagtacgagatccgttacgaaggcattctctaccatctcaacgttcaggactcgacgctaggtctaaaaaacgtaagatcatgtggaacggaggggaggaagaaagatgggccgcaaattccgccatgtgataaagtttacgattacattctttttcgtggaagtgacatcaaggatctccaagttaacccatctccatctgctcaatcaagacaagagattcaaagtgaacaagacgtcaatcagtcccctcactctaggccagctatgactatgagctctccgatttctggctatgatagcggttatggtttggggagaggatcacaatggatcaatacacctgctttgagtagtaaaccggttcctgtcacacaacattcatcagtccctttaagcttccagcctccttcagctaatgctggaagtttgacagaatcaccagtgagcttaattgattcaactcaaagtaatgctggttcctcgatgcccatgccttcttttgtgcaaggtaacaaatttgcttccagtggtgtccctcttggtatgatgcagaagccagtttcatcctcctcgaccatacccaatggtccgcagattatagattatttttcttcaccaatcatggggttagtggatgattcatcacaggttgttactcgttcacctgacgtctcttccaatcaatcatactcttccaacccttctcctcttggtcaaacacaactccatactccacctggccttgcttcagtatcctctaacctttctccaccttctgaagcgcagctttctgctccaaatattcagaaaatttaccccagtgcaccccaggctattggtaaagttgtctatgaccctcagtctaatcatcctcaccgatctaaacctcatgagttacctgctgtggcttctaattcagctcctgtgattcctggtccattgtcaaaatcgcctgagtcatttttcggtatggatccgtcactgcaatctaggcagcagatggtatataggggtcaagagatgtttgctgcaactaacccggcatcagcgaatgtgccatcacaaagttttgctcccagaaatcatgcaccattgctgcctcttccagtttcagctcatcagtctcggatccctagttctagcattgagtacactgaagaatttgattttgaagcaatgaatgagaagttcaagaagagtgaactatggggttatcttggaagaaataaccagaggaatcaaaatgattatggggaagaaactgcgattgagccaaacgcagaagggaagcctgcatataacaaggatgacttttttgacacaatctcgtgcaatcaacttgaccgtgtggcaagaagcggacaacagcacaaccagtttcccgaacacatgagacaagttcctgaggcatttggtaataattttcaaaggccacctccactacaaccaggtcagggtgcatatctcgctgcacaaaccaattacagaggcggataccataataacaacaacaacaactactactcaaactcgggttatggttactactctggtgggagaggccgaggcagaaacacacatttctgacctgctgagtttctatcttccaaggctttattggtcactcgcgtacacacatttctactcttagcccttctttaaagttttaaattcagctttttgggtaaaaacagttgtatggttaccacatcgcgagatgtgtaggcatatcatattggcaagttcatgttcctttttttaatctgatgaactttagcctcaggagagaatgtttgttcatgtagagaaaacaaaaagtactacgaacctttttggtaaacgcaaatcattaagtac

SEQ ID NO: 11276 - protein, 571 aa, Arabidopsis thaliana
MASESSQSSSPSSSQPPSSVPSPSPGNNVGDTFIGSFISLISKYEIRYEGILYHLNVQDSTLGLKNVRSCGTEGRKKDGPQIPPCDKVYDYILFRGSDIKDLQVNPSPSAQSRQEIQSEQDVNQSPHSRPAMTMSSPISGYDSGYGLGRGSQWINTPALSSKPVPVTQHSSVPLSFQPPSANAGSLTESPVSLIDSTQSNAGSSMPMPSFVQGNKFASSGVPLGMMQKPVSSSSTIPNGPQIIDYFSSPIMGLVDDSSQVVTRSPDVSSNQSYSSNPSPLGQTQLHTPPGLASVSSNLSPPSEAQLSAPNIQKIYPSAPQAIGKVVYDPQSNHPHRSKPHELPAVASNSAPVIPGPLSKSPESFFGMDPSLQSRQQMVYRGQEMFAATNPASANVPSQSFAPRNHAPLLPLPVSAHQSRIPSSSIEYTEEFDFEAMNEKFKKSELWGYLGRNNQRNQNDYGEETAIEPNAEGKPAYNKDDFFDTISCNQLDRVARSGQQHNQFPEHMRQVPEAFGNNFQRPPPLQPGQGAYLAAQTNYRGGYHNNNNNNYYSNSGYGYYSGGRGRGRNTHF

SEQ ID NO: 11277 - protein, 440 aa, Arabidopsis thaliana
MTMSSPISGYDSGYGLGRGSQWINTPALSSKPVPVTQHSSVPLSFQPPSANAGSLTESPVSLIDSTQSNAGSSMPMPSFVQGNKFASSGVPLGMMQKPVSSSSTIPNGPQIIDYFSSPIMGLVDDSSQVVTRSPDVSSNQSYSSNPSPLGQTQLHTPPGLASVSSNLSPPSEAQLSAPNIQKIYPSAPQAIGKVVYDPQSNHPHRSKPHELPAVASNSAPVIPGPLSKSPESFFGMDPSLQSRQQMVYRGQEMFAATNPASANVPSQSFAPRNHAPLLPLPVSAHQSRIPSSSIEYTEEFDFEAMNEKFKKSELWGYLGRNNQRNQNDYGEETAIEPNAEGKPAYNKDDFFDTISCNQLDRVARSGQQHNQFPEHMRQVPEAFGNNFQRPPPLQPGQGAYLAAQTNYRGGYHNNNNNNYYSNSGYGYYSGGRGRGRNTHF

SEQ ID NO: 11278 - protein, 438 aa, Arabidopsis thaliana
MSSPISGYDSGYGLGRGSQWINTPALSSKPVPVTQHSSVPLSFQPPSANAGSLTESPVSLIDSTQSNAGSSMPMPSFVQGNKFASSGVPLGMMQKPVSSSSTIPNGPQIIDYFSSPIMGLVDDSSQVVTRSPDVSSNQSYSSNPSPLGQTQLHTPPGLASVSSNLSPPSEAQLSAPNIQKIYPSAPQAIGKVVYDPQSNHPHRSKPHELPAVASNSAPVIPGPLSKSPESFFGMDPSLQSRQQMVYRGQEMFAATNPASANVPSQSFAPRNHAPLLPLPVSAHQSRIPSSSIEYTEEFDFEAMNEKFKKSELWGYLGRNNQRNQNDYGEETAIEPNAEGKPAYNKDDFFDTISCNQLDRVARSGQQHNQFPEHMRQVPEAFGNNFQRPPPLQPGQGAYLAAQTNYRGGYHNNNNNNYYSNSGYGYYSGGRGRGRNTHF

SEQ ID NO: 11279 - DNA, 1063 bp, Arabidopsis thaliana
ggagagagcaagccattgcaggaaatggcgattccagtgacgagaatgatggttcctcacgcaataccatcgcttcgtctctcacatccaaaccctagtcgtgttgacttcctctgtcgctgtgctccatcagaaatccaaccacttcggcctgaactcactttatctgtcggaattcacgcaatccctcatccagataagtgtcgaaattatataggtagagaaaggtggtgaagatgctttctttgtaagtagttatagaggtggagtcatggctgttgcagatggtgtctccggttgggctgaacaagatgttgatccttccttgttctctaaagaacttatggctaacgcttctcgtttagttgatgaccaagaggtcagatatgatcctggttttctcattgacaaagctcataccgcaactacttctagaggttctgccacaattattctagctatgcttgaggaagtgggtattctcaaaataggcaatgttggtgactgtggacttaagcttcttcgggaaggtcagattatttttgccactgctccacaagagcactattttgactgtccttaccaactaagctctgaggggtctgctcaaacttatctagatgcatcgtttagcatagtggaagtacagaagggagacgtgatcgtgatgggttcagacggacttttcgataatgtgtttgatcatgagatcgtttctatagtgaccaagcatacagatgttgcagagtcatcaaggttattagctgaagtggcgagtagccattcaagagatacagagtttgagtctccatatgcattagaagcaagagccaaggggtttgatgttcctctctggaagaaggtactaggaaagaagcttacaggagggaagcttgatgatgtcactgtgatcgttgccaaagttgttagctcatgaatcactctgttcatgataagatcttctctttattctttttgtacaagtccttgtaagaaacttgttcttcacagaaattgataaatggtatttcaaagttcaaacaataagaatcgaatctttatc

SEQ ID NO: 11280 - protein, 221 aa, Arabidopsis thaliana
MAVADGVSGWAEQDVDPSLFSKELMANASRLVDDQEVRYDPGFLIDKAHTATTSRGSATIILAMLEEVGILKIGNVGDCGLKLLREGQIIFATAPQEHYFDCPYQLSSEGSAQTYLDASFSIVEVQKGDVIVMGSDGLFDNVFDHEIVSIVTKHTDVAESSRLLAEVASSHSRDTEFESPYALEARAKGFDVPLWKKVLGKKLTGGKLDDVTVIVAKVVSS

SEQ ID NO: 11281 - protein, 197 aa, Arabidopsis thaliana
MANASRLVDDQEVRYDPGFLIDKAHTATTSRGSATIILAMLEEVGILKIGNVGDCGLKLLREGQIIFATAPQEHYFDCPYQLSSEGSAQTYLDASFSIVEVQKGDVIVMGSDGLFDNVFDHEIVSIVTKHTDVAESSRLLAEVASSHSRDTEFESPYALEARAKGFDVPLWKKVLGKKLTGGKLDDVTVIVAKVVSS

SEQ ID NO: 11282 - protein, 158 aa, Arabidopsis thaliana
MLEEVGILKIGNVGDCGLKLLREGQIIFATAPQEHYFDCPYQLSSEGSAQTYLDASFSIVEVQKGDVIVMGSDGLFDNVFDHEIVSIVTKHTDVAESSRLLAEVASSHSRDTEFESPYALEARAKGFDVPLWKKVLGKKLTGGKLDDVTVIVAKVVSS

SEQ ID NO: 11283 - DNA, 1172 bp, Arabidopsis thaliana
gggaggaagcggccattgaagcgccacgaagtctcattcttctttctccaataataacagagagcgattctttttactattccaatttcattttcaatgttaccaacacgagctcagattttcatacaccaatttttctatacgcatcgttatacacagaagcagtcgcggatctcaatttcaggtgtttgcgattccgatttaggtttgatcggttgaaattttttccgatggtggatcattagcaagttctaggcgttacgagaaacgcgacgaagaaggaggttaaagatgcgtttaggagattggcgattaagtatcatccggataagcacgctcagtctccggagcatgttcgtcataacgccaccgtgcggtttaagcttgtatcggaggcgtacgaagttttgaatgatgatctgaaacgcgcgtcttataacgctggtagcgattctgattgctttcgccgtacgagcggttcgtatagtaatccgtatggaaatcgtggtggcagagcgcaaggttctggttacggttatggttatggttactctacgaggaatcgtcaggcctctagcttcagcagcgggtttgattcgacgtttcgttatttgactacgcgagcgtttctattgaatctcgcattagctggtggtctgtactttgcgtttactgcgattgatacaagcggagaaacactatggaaaatgcgtaactcagggaaatcattcgaagaagcaatggaatcaatcgagaaatcaaagtcacataaagatgaagggtgaaagagaagaatcaaaggtacttctaaagactttgactttttaagctgcttctgtgggcctggtgggtttgtgtgggtcattgctagggacttttatagatttcactctcttagacaggagatgtgaaaatgtaagtaaatttatcaaaaatgaaccatgagaagttgaaaaccctaatttatcatgaagtgtaatagataggtttttatgttcttgtaacaaatattcatctctccagataataatcgattatgagagaagtcctagtacacgcaattgtatttgaatgcataatgggcaagcagaggtgggatgttgtaataaaacaaaaacttattttggctttgtatcagtaatggagacattattgtattagtggtcgtaacg

SEQ ID NO: 11284 - protein, 80 aa, Arabidopsis thaliana
EEAAIEAPRSLILLSPIITESDSFYYSNFIFNVTNTSSDFHTPIFLYASLYTEAVADLNFRCLRFRFRFDRLKFFPMVDH

SEQ ID NO: 11285 - protein, 40 aa, Arabidopsis thaliana
MLPTRAQIFIHQFFYTHRYTQKQSRISISGVCDSDLGLIG

SEQ ID NO: 11286 - DNA, 1473 bp, Arabidopsis thaliana
ttttttctcaaaaggaccacatttcttctctctgtctctctctttctcttgcacgaagaaagagagagagataacaaaaccccccaaaaaaaaacaacaaaaaaaaaaaaaaaaaagaagaagaagaagaagaagacaaccttgtctgtttttttttcgaaaggcaaaatgtttgatgggctgttcaaacccaagttttatacgaaatgcaagtcgttggtcaagataacgaagacaagagtagacacggtgaagaggaagaaaaactcggtttgcaaatatctcaagaacgacattgtcgatcttctcaagaacagcctcgattacaatgcatatggcagggcagaagggcttatagaggagaaaaggaggctggcttgttatgagtttttggagcaattctgcaactgtgttgcatccaatgtctctctattacagaaacccatccggtgccctgatgagtgccgcgaggccatctcctcccttgtatatgcagccgctagagtctctgaagtccctgagctacgcgacctcagatctttatttgctgagagatacggaaacacacttgatcagtttgtgaaccctgagtttgtagagagattcaaagcagagccgccgtcaaaggaaatgaaagtggagctgctgcaggaaatcgccagagagtactccataaaatgggatgccaagtctttagagcagagattgtacacaccacctcatcatcatcatgtccatacggaaactgaagaaccaaaaacagagaagaccaacagcgaacccgaaaagaccatggaaaagagaagcagcctttcgttccatggcagagaagactcgatggatgacagcaacaagtccataatgagtacaagcgaagaagactccatgagtacaagcgggagttgtatgactggcccggaggatgatcctgaaatgaaacctttctactacagattcatgactcctgcgccttacaccaaacccaagatcgaaaaacaggaaagtcttccggagaagatgactacatctcatctcatggacaccgaatcgccgacgggcggaaaaccaaagccgagatcagtgagacgaagattcgcaaacccgccacctgaagcggaaacggaaggggaagcattgaaattgaaagtagagagtaagaacatgatgagagcatcagagtcgatggggaaagcaagcggagagggttttaggagaatgagtcgtcgaacagcctcgtggcagcataagccctcctcctgcgtccccgattttgatgaggtcgccgctcgcgtcgatgccctctcccgatattgattttctcctctgtgaatcatcatcattagtcaattagatacccccaaagaaaaattggtctatttgttgttgtcgtcgtctgtgtgtgaattcttttgtaaaaaaaacaaacttattccgccgccgccactttaatccaaactcactcttttgatgctt

SEQ ID NO: 11287 - protein, 437 aa, Arabidopsis thaliana
FFLKRTTFLLSVSLFLLHEERERDNKTPQKKTTKKKKKKKKKKKKTTLSVFFSKGKMFDGLFKPKFYTKCKSLVKITKTRVDTVKRKKNSVCKYLKNDIVDLLKNSLDYNAYGRAEGLIEEKRRLACYEFLEQFCNCVASNVSLLQKPIRCPDECREAISSLVYAAARVSEVPELRDLRSLFAERYGNTLDQFVNPEFVERFKAEPPSKEMKVELLQEIAREYSIKWDAKSLEQRLYTPPHHHHVHTETEEPKTEKTNSEPEKTMEKRSSLSFHGREDSMDDSNKSIMSTSEEDSMSTSGSCMTGPEDDPEMKPFYYRFMTPAPYTKPKIEKQESLPEKMTTSHLMDTESPTGGKPKPRSVRRRFANPPPEAETEGEALKLKVESKNMMRASESMGKASGEGFRRMSRRTASWQHKPSSCVPDFDEVAARVDALSRY

SEQ ID NO: 11288 - protein, 381 aa, Arabidopsis thaliana
MFDGLFKPKFYTKCKSLVKITKTRVDTVKRKKNSVCKYLKNDIVDLLKNSLDYNAYGRAEGLIEEKRRLACYEFLEQFCNCVASNVSLLQKPIRCPDECREAISSLVYAAARVSEVPELRDLRSLFAERYGNTLDQFVNPEFVERFKAEPPSKEMKVELLQEIAREYSIKWDAKSLEQRLYTPPHHHHVHTETEEPKTEKTNSEPEKTMEKRSSLSFHGREDSMDDSNKSIMSTSEEDSMSTSGSCMTGPEDDPEMKPFYYRFMTPAPYTKPKIEKQESLPEKMTTSHLMDTESPTGGKPKPRSVRRRFANPPPEAETEGEALKLKVESKNMMRASESMGKASGEGFRRMSRRTASWQHKPSSCVPDFDEVAARVDALSRY

SEQ ID NO: 11289 - protein, 227 aa, Arabidopsis thaliana
MKVELLQEIAREYSIKWDAKSLEQRLYTPPHHHHVHTETEEPKTEKTNSEPEKTMEKRSSLSFHGREDSMDDSNKSIMSTSEEDSMSTSGSCMTGPEDDPEMKPFYYRFMTPAPYTKPKIEKQESLPEKMTTSHLMDTESPTGGKPKPRSVRRRFANPPPEAETEGEALKLKVESKNMMRASESMGKASGEGFRRMSRRTASWQHKPSSCVPDFDEVAARVDALSRY

SEQ ID NO: 11290 - DNA, 2524 bp, Arabidopsis thaliana
aaaaacacccctcctcgattgtcgaacagtccaggttcctgaaatgttctcgtcagggcgacattagggtttcttcattcccgtccttcagattcgtatttgaaacaggaaggagagaaaaatgggtatacaagggcttttgccgttgttgaaatcgataatggtaccgattcatatcaaggagctcgagggttgtatcgtcgccgtcgatacatattcatggctacacaaaggggctttatcttgtagccgagagctctgcaagggattacccaccaagaggcatattcaatactgtatgcatagagtgaatttacttcgccatcatggagtgaagcctatcatggtctttgatggaggtccgttaccgatgaaactagaacaagagaataagcgtgctaggtccagaaaggaaaatcttgctcgtgcattggagcatgaagcaaatggaaattcctcagctgcttatgagtgctactcaaaggccgtagatatttcaccttctattgcacatgagttgatacaggttctgaggcaggagaatgttgattacgttgttgctccttacgaagctgatgcgcagatggcattcttagctattactaagcaagttgatgcgattatcactgaggattctgatctcataccttttggctgcccaagaatcattttcaaaatggacaagtttggtcatggtgttgagtttcaagcctccaagctacccaaaaataaggatctcagtctatcaggattttcaagccaaatgcttctcgaaatgtgcatattaagtggctgcgattatttgcagtcacttccaggaatgggactcaaaagagcacatgcactcattacaaaattcaaaagctatgacagggtaattaagcacttaaagtacagcacagtttcagttcctcctctttatgaagagtcattcaagagagctttactgactttcaagcatcaacgtgtctatgacccaaatgctgaagatatcatacacttgtgtgacatttctgacaaccttggtgaagattcagattttgttggcccatcgatgccacaagatattgctaagggtatagcactaggccagcttgatcccttcacacagttgccattccaggctgagagtgttactcctaaatcggctgttgatgatatatcccgtcccaaaagtttcaaacctgaaactgtaaagaaaaagcttgatttgccagtccaaaaaaaccttctcaccaagtacttctgctttgcgtctgttgaggcaaaaagaaaattcaaggctcctaggatatcaccaatgtctctgaccccaactgatgagtctccaagcattcctgatgacaacacaccagatttagatgctctttcaagccagacaacaaatgaatccccggtttatagcttgggtgagaatccatgtgttagcgaagttgcagagaaaagagattcacccgatgacgatgcagtggaaaggaatcacaaggaccttcatcataaatactgcgaacgggaagtggataggccgaagtcagatagtttgaaggttatagtaagaagcaagtattttaagcagaaacaggaggacaaaagtctgaaacaatcgatcccatgtcttaatgattgctctgtgattggtcagagaaaggctgttaaaactgtgattaacatgtcaagcgcgtctaaaagagaagagagtcacagagctatagcaacaagtccatgtttacaccatgaccgaatctacaacgatcatgaagatgctaaagaagcgagtttctctgccatgaacgaggtggctgagaggacaataaacacccacaagattaaccatcagatcaatgaagaagaacagaacccatccgttgaaattccttctgcctttagtactcccgagaatgttatacctctctcttccattgctattgatagttgccatggagttgcaacagggaagaggaagcttgactcagatgaaaaccttcacaaggaaaatttgaaatccaagcacatgcgcatggatgaaactgatactgctcttaatgcagaaacaccattggaaaccgatgatgttgagaagtttggatcgaacatttcacatatagggcattactcagaaatagcagagaaatcagtggaaagatttgtctcagctatatcgtctttcaaatattctgggactggctctcgtgctagcggtctccgtgcccctctcaaagatatccgcaacacttgtccgtccaaagggttatctcttaaaccagacatcagcaagtttggctatgcgtcaagcaaccgacacatggtgacaaagtcaaggagaatgtgagctcagatttgtaagttaaccatctctttagagccacatgtgagagctttagctttagaattaacttcttggtcgcatgatgatatttttggtgttgtgtctgtattagctttctacttactgtgcatagcattcttgttcaaagacacttcacacaacagttggattcataaatgaaacaactttcaacttgtc

SEQ ID NO: 11291 - protein, 735 aa, Arabidopsis thaliana
MGIQGLLPLLKSIMVPIHIKELEGCIVAVDTYSWLHKGALSCSRELCKGLPTKRHIQYCMHRVNLLRHHGVKPIMVFDGGPLPMKLEQENKRARSRKENLARALEHEANGNSSAAYECYSKAVDISPSIAHELIQVLRQENVDYVVAPYEADAQMAFLAITKQVDAIITEDSDLIPFGCPRIIFKMDKFGHGVEFQASKLPKNKDLSLSGFSSQMLLEMCILSGCDYLQSLPGMGLKRAHALITKFKSYDRVIKHLKYSTVSVPPLYEESFKRALLTFKHQRVYDPNAEDIIHLCDISDNLGEDSDFVGPSMPQDIAKGIALGQLDPFTQLPFQAESVTPKSAVDDISRPKSFKPETVKKKLDLPVQKNLLTKYFCFASVEAKRKFKAPRISPMSLTPTDESPSIPDDNTPDLDALSSQTTNESPVYSLGENPCVSEVAEKRDSPDDDAVERNHKDLHHKYCEREVDRPKSDSLKVIVRSKYFKQKQEDKSLKQSIPCLNDCSVIGQRKAVKTVINMSSASKREESHRAIATSPCLHHDRIYNDHEDAKEASFSAMNEVAERTINTHKINHQINEEEQNPSVEIPSAFSTPENVIPLSSIAIDSCHGVATGKRKLDSDENLHKENLKSKHMRMDETDTALNAETPLETDDVEKFGSNISHIGHYSEIAEKSVERFVSAISSFKYSGTGSRASGLRAPLKDIRNTCPSKGLSLKPDISKFGYASSNRHMVTKSRRM

SEQ ID NO: 11292 - protein, 722 aa, Arabidopsis thaliana
MVPIHIKELEGCIVAVDTYSWLHKGALSCSRELCKGLPTKRHIQYCMHRVNLLRHHGVKPIMVFDGGPLPMKLEQENKRARSRKENLARALEHEANGNSSAAYECYSKAVDISPSIAHELIQVLRQENVDYVVAPYEADAQMAFLAITKQVDAIITEDSDLIPFGCPRIIFKMDKFGHGVEFQASKLPKNKDLSLSGFSSQMLLEMCILSGCDYLQSLPGMGLKRAHALITKFKSYDRVIKHLKYSTVSVPPLYEESFKRALLTFKHQRVYDPNAEDIIHLCDISDNLGEDSDFVGPSMPQDIAKGIALGQLDPFTQLPFQAESVTPKSAVDDISRPKSFKPETVKKKLDLPVQKNLLTKYFCFASVEAKRKFKAPRISPMSLTPTDESPSIPDDNTPDLDALSSQTTNESPVYSLGENPCVSEVAEKRDSPDDDAVERNHKDLHHKYCEREVDRPKSDSLKVIVRSKYFKQKQEDKSLKQSIPCLNDCSVIGQRKAVKTVINMSSASKREESHRAIATSPCLHHDRIYNDHEDAKEASFSAMNEVAERTINTHKINHQINEEEQNPSVEIPSAFSTPENVIPLSSIAIDSCHGVATGKRKLDSDENLHKENLKSKHMRMDETDTALNAETPLETDDVEKFGSNISHIGHYSEIAEKSVERFVSAISSFKYSGTGSRASGLRAPLKDIRNTCPSKGLSLKPDISKFGYASSNRHMVTKSRRM

SEQ ID NO: 11293 - protein, 676 aa, Arabidopsis thaliana
MHRVNLLRHHGVKPIMVFDGGPLPMKLEQENKRARSRKENLARALEHEANGNSSAAYECYSKAVDISPSIAHELIQVLRQENVDYVVAPYEADAQMAFLAITKQVDAIITEDSDLIPFGCPRIIFKMDKFGHGVEFQASKLPKNKDLSLSGFSSQMLLEMCILSGCDYLQSLPGMGLKRAHALITKFKSYDRVIKHLKYSTVSVPPLYEESFKRALLTFKHQRVYDPNAEDIIHLCDISDNLGEDSDFVGPSMPQDIAKGIALGQLDPFTQLPFQAESVTPKSAVDDISRPKSFKPETVKKKLDLPVQKNLLTKYFCFASVEAKRKFKAPRISPMSLTPTDESPSIPDDNTPDLDALSSQTTNESPVYSLGENPCVSEVAEKRDSPDDDAVERNHKDLHHKYCEREVDRPKSDSLKVIVRSKYFKQKQEDKSLKQSIPCLNDCSVIGQRKAVKTVINMSSASKREESHRAIATSPCLHHDRIYNDHEDAKEASFSAMNEVAERTINTHKINHQINEEEQNPSVEIPSAFSTPENVIPLSSIAIDSCHGVATGKRKLDSDENLHKENLKSKHMRMDETDTALNAETPLETDDVEKFGSNISHIGHYSEIAEKSVERFVSAISSFKYSGTGSRASGLRAPLKDIRNTCPSKGLSLKPDISKFGYASSNRHMVTKSRRM

SEQ ID NO: 11294 - DNA, 1086 bp, Arabidopsis thaliana
agattataacccagggccggcgcaacccttcttcttaacaaaaaccttttgattccaattgttcttctctcttcttcttcttcttcttcttcttcttcttcgccgcttcttctctctcgaattcaccccatctcaagtgtacgttagcctcctccctctaatggcgactcgtcttaagtttgagaacaactgcgaagttggtgtcttttccaaactcactaatgcctattgcttagtcgctataggaggctctgagaacttttacagtgcttttgagtcggagttagcagatgttatccctattgttaagacctctattggaggaacacgaattattgggcgtctttgtgctggaaacaagaatgggcttcttgtacctcatacaacaactgaccaagagcttcaacacttaaggaacagtctacctgatcaagttgaggtccagcgaattgatgaacgtctgtctgctcttggaaattgcattgcctgcaatgactatgtagctcttgcccacaccgaccttgataaggaaaccgaggaaataatagcggatgtacttggcgttgaagttttccgtcagacaattgcaggcaacattctcgtgggcagttactgtgccctatccaacaaaggtggaatggtccatcctcacacctcagtggaagacttggaagaactctcaacacttcttcaagtccctctcgttgcaggaaccgtgaaccgtggtagtgaagttatcgctgcgggtatgaccgttaatgattggacctctttctgcggttcagacacaactgcgactgagctctctgtcatagacagcatcttcaagctaagggaagcccaacccagctctatcgtcgatgagatgaggaagtcattgatcgatacctatgtttaaattttgtttgtttggatgacacacacatcccaacatcgccaatgtgtcaatgtcagaaaattttcatactctactgttagcaagaattagctgttttattttatttttgtgtggtttttaacagtttaaaagtaatctgttgatgtctctttgaatctttctgagtaagtgataagaaaattctcctt

SEQ ID NO: 11295 - protein, 245 aa, Arabidopsis thaliana
MATRLKFENNCEVGVFSKLTNAYCLVAIGGSENFYSAFESELADVIPIVKTSIGGTRIIGRLCAGNKNGLLVPHTTTDQELQHLRNSLPDQVEVQRIDERLSALGNCIACNDYVALAHTDLDKETEEIIADVLGVEVFRQTIAGNILVGSYCALSNKGGMVHPHTSVEDLEELSTLLQVPLVAGTVNRGSEVIAAGMTVNDWTSFCGSDTTATELSVIDSIFKLREAQPSSIVDEMRKSLIDTYV

SEQ ID NO: 11296 - DNA, 1432 bp, Arabidopsis thaliana
gattgaatcttcatcatcctcgatcagtggttgttacctgagaaaccctagatttcaattcccaacaccttaattttgttcgacaaacccaagaagattcgatgggtaagaacgattttctaaccccaaaggcgattgcgaatcgaatcaaagccaaaggtcttcaaaagcttcgaaggtattgtcagatgtgtcagaaacaatgccgagacgagaatggattcaagtgtcattgtatgagcgaatctcaccagaggcagatgcaagtttttgggcagaatccgactcgtgttgtcgatggttactctgaagaattcgagcagacgtttctcgatctgatgcggcggagccaccgtttctctcgtatcgctgccactgttgtctacaatgagtatattaacgatagacatcatgttcacatgaattcgacggagtgggcgacgttgacggagtttatcaagcatcttgggaaaactggtaagtgtaaggttgaagaaactcctaaaggttggtttattacttatatagatagagattctgagactttgtttaaggagaggttgaagaataagagagttaagagtgatttagctgaggaggagaagcaagagagggagattcagagacagattgagagagctgctgagaaattgaatggtggtggtggtgaaggtgaaaccagtggtaatgatgaagttgtggatgatggtgatgatgagaggaagaaagatgaagacttgaggttgaagagtggggtcaaggttggatttgctcttggtggaggtgttaaacaggttgctacgggtaaagagagaggggaaagctcgaaacttttgtttggggatgaagagaatgacaaggttgagagaggggagaagaggaagagaagtggggactccgggaggagcgagaaggagaggagatcagctttggatgagttgatgaaggaggaagagaagaagaaggagaggatgaatcgtaaagattactggttgttcgaagggataattgtgaaggtgatgagtaaggctttggcagagaaagggtattataagcaaaagggtgttgtgaagaaagtgattgataattatgttggggagatcaaaatgcttgattctaaacatgtgttgagagttgatcaaaaggagctagagactgtgcttccacaaattggagggatggtgaagatagtgaatggggcatatcgtggttcgaatgcaaggttgttgggtgtggatacagagaagttctgtgctaaagtgcagatcgagaaaggtgtctatgatggaagagtcatcaagtccattgagtacgaggacatatgcaaacttgcttagttatatcttttagaccatatcgggttttacgatgccttgtatttctgcttgaacctcttttttttatatacaagtgaagcactctgtttcctgat

SEQ ID NO: 11297 - protein, 411 aa, Arabidopsis thaliana
MGKNDFLTPKAIANRIKAKGLQKLRRYCQMCQKQCRDENGFKCHCMSESHQRQMQVFGQNPTRVVDGYSEEFEQTFLDLMRRSHRFSRIAATVVYNEYINDRHHVHMNSTEWATLTEFIKHLGKTGKCKVEETPKGWFITYIDRDSETLFKERLKNKRVKSDLAEEEKQEREIQRQIERAAEKLNGGGGEGETSGNDEVVDDGDDERKKDEDLRLKSGVKVGFALGGGVKQVATGKERGESSKLLFGDEENDKVERGEKRKRSGDSGRSEKERRSALDELMKEEEKKKERMNRKDYWLFEGIIVKVMSKALAEKGYYKQKGVVKKVIDNYVGEIKMLDSKHVLRVDQKELETVLPQIGGMVKIVNGAYRGSNARLLGVDTEKFCAKVQIEKGVYDGRVIKSIEYEDICKLA

SEQ ID NO: 11298 - protein, 382 aa, Arabidopsis thaliana; identical to SEQ ID NO: 6273

SEQ ID NO: 11299 - protein, 366 aa, Arabidopsis thaliana; identical to SEQ ID NO: 6274

SEQ ID NO: 11300 - DNA, 1581 bp, Arabidopsis thaliana
gaagagagacatggcggaagaagctaaagttgatgtgaagacttcggcgaagaaggatatacgcaattatctatgccagtattgcggaatcagcagatctaaaaagtatctcatcacttcacacatcaaatcacatcatcaggtttgagatctttctccaattcgattccaatgaaattgagagttgagagtcagtagaattggtgatggtttgttggattgagagtttgtctgatttgtttgttcagatggaacttgaagaggaaagagttgatgaagcttgtgaggttgatgaagagtcttcaagtaaacacacttgtcaagaatgtggtgctgagtttaagaaacctgctcaattgaaacagcatatgcagagtcattcgctcgagagatcttttacttgctatgtggatgattgtgctgctagctataggaggaaggatcatctcaataggcatcttcttacacataaagggaagctctttaagtgtccgaaggagaactgcaagagtgaattctcagtacagggaaatgttggtaggcatgttaagaaatatcatagtaatgacaaccgtgataaggacaatactggtttgggcgatggtgataaggacaatacctgtaaggtggatgatgataaggaaaaatctggtagtggcggttgtgagaaggaaaatgaagggaatggcggaagtggtaaggacaataatggtaatggcgattctcagcctgcggagtgttcaactggtcagaagcaggttgtctgcaaagaaattggttgtggaaaagcctttaagtatccttcacagcttcaaaagcatcaggattctcatgtgaaattagactctgtggaggcattttgttccgagcctgggtgtatgaagtactttaccaacgaagaatgcctcaagtcacacataagatcctgtcatcagcacatcaactgtgagatatgtggttctaagcatttgaaaaagaacatcaagagacatctacggactcatgatgaagattcctcaccaggagaaatcaagtgtgaagttgagggttgctcttcgactttctccaaggcttctaatcttcagaaacacatgaaagcagtgcacgatgatatacgtccctttgtctgtggctttcccggttgtggcatgagatttgcttacaaacatgtcagaaacaagcacgagaattccgggtatcacgtatatacctgcggtgattttgtcgaaactgatgaagatttcacttcaagaccgagaggtggactaaagaggaagcaagttactgcggaaatgctggtgcgaaagagagtcatgcctcctcggtttgatgcagaagaacacgaaacttgctagtagtgtccaagccttaattatattttgtcttaagataagtgaagtagttttgtgtaaagttctttttgtttgtgtgttggtaggaagaaatatagaactacaatagtatgtagtaatataagtaatgttgtagttagaatttatgttcgtttaaccttttatctcccacggctttaatgtattgaaccaaacatttgaagatataagtaacgttgtgcttagaatc

SEQ ID NO: 11301 - protein, 382 aa, Arabidopsis thaliana
MVCWIESLSDLFVQMELEEERVDEACEVDEESSSKHTCQECGAEFKKPAQLKQHMQSHSLERSFTCYVDDCAASYRRKDHLNRHLLTHKGKLFKCPKENCKSEFSVQGNVGRHVKKYHSNDNRDKDNTGLGDGDKDNTCKVDDDKEKSGSGGCEKENEGNGGSGKDNNGNGDSQPAECSTGQKQVVCKEIGCGKAFKYPSQLQKHQDSHVKLDSVEAFCSEPGCMKYFTNEECLKSHIRSCHQHINCEICGSKHLKKNIKRHLRTHDEDSSPGEIKCEVEGCSSTFSKASNLQKHMKAVHDDIRPFVCGFPGCGMRFAYKHVRNKHENSGYHVYTCGDFVETDEDFTSRPRGGLKRKQVTAEMLVRKRVMPPRFDAEEHETC

SEQ ID NO: 11302 - protein, 368 aa, Arabidopsis thaliana
MELEEERVDEACEVDEESSSKHTCQECGAEFKKPAQLKQHMQSHSLERSFTCYVDDCAASYRRKDHLNRHLLTHKGKLFKCPKENCKSEFSVQGNVGRHVKKYHSNDNRDKDNTGLGDGDKDNTCKVDDDKEKSGSGGCEKENEGNGGSGKDNNGNGDSQPAECSTGQKQVVCKEIGCGKAFKYPSQLQKHQDSHVKLDSVEAFCSEPGCMKYFTNEECLKSHIRSCHQHINCEICGSKHLKKNIKRHLRTHDEDSSPGEIKCEVEGCSSTFSKASNLQKHMKAVHDDIRPFVCGFPGCGMRFAYKHVRNKHENSGYHVYTCGDFVETDEDFTSRPRGGLKRKQVTAEMLVRKRVMPPRFDAEEHETC

SEQ ID NO: 11303 - protein, 328 aa, Arabidopsis thaliana
MQSHSLERSFTCYVDDCAASYRRKDHLNRHLLTHKGKLFKCPKENCKSEFSVQGNVGRHVKKYHSNDNRDKDNTGLGDGDKDNTCKVDDDKEKSGSGGCEKENEGNGGSGKDNNGNGDSQPAECSTGQKQVVCKEIGCGKAFKYPSQLQKHQDSHVKLDSVEAFCSEPGCMKYFTNEECLKSHIRSCHQHINCEICGSKHLKKNIKRHLRTHDEDSSPGEIKCEVEGCSSTFSKASNLQKHMKAVHDDIRPFVCGFPGCGMRFAYKHVRNKHENSGYHVYTCGDFVETDEDFTSRPRGGLKRKQVTAEMLVRKRVMPPRFDAEEHETC

SEQ ID NO: 11304 - DNA, 951 bp, Arabidopsis thaliana
gacaaccccacttttgtacttctcttccctctccccctcccaaataaccgccgataaacaatgctccggctaagcaacgccgccgtaataacaaccaatgcaattctcgcattgatcggcctcgccgctctatctttttccgtctacgtctacgttcaaggcccatcacagtgtcaacgtttcgttcaaaaccctctcattgtaactgcggctctcctcttcttcatctcgtccttaggccttatcgctgctctctacggtagccacatcatcatcacactctatctcttcttccttttcctctccattcttctgcttcttgtcctctctgtctttatcttcctcgtcacgaatcccaccgccggaaaagcgttatccggtagaggaataggcaatgtcaagaccggagattatcagaactggatcgggaaccatttccttcgtgggaagaattgggaagggatcaccaaatgtttgtctgattctagggtttgtaaaaggtttggtccacgtgacattgactttgactccaaacatctctctaatgtacagtttggttgttgtcgacctcccgtagaatgtgggttcgaatcaaagaatgccacgtggtggacagttcctgccacagcgactacggcgattataggggattgtaaggcatggagtaacacgcagagccagttatgttacgcgtgcgagtcgtgtaagattggagttttaaaagggataagaaaaagatggaggatacttattgtcgtcaatctccttcttatccttctcgtcgtttttctttactcgtgtggctgttgcgtgagaaagaacaatcgtgttccatggaagcgccggtttttctaacaactctttccatttgttttccaaattattaattaattctttatatatttttctgtttttgaaatatttagttgatgtttgatgtttcttttagtg

SEQ ID NO: 11305 - protein, 264 aa, Arabidopsis thaliana
MLRLSNAAVITTNAILALIGLAALSFSVYVYVQGPSQCQRFVQNPLIVTAALLFFISSLGLIAALYGSHIIITLYLFFLFLSILLLLVLSVFIFLVTNPTAGKALSGRGIGNVKTGDYQNWIGNHFLRGKNWEGITKCLSDSRVCKRFGPRDIDFDSKHLSNVQFGCCRPPVECGFESKNATWWTVPATATTAIIGDCKAWSNTQSQLCYACESCKIGVLKGIRKRWRILIVVNLLLILLVVFLYSCGCCVRKNNRVPWKRRFF

SEQ ID NO: 11306 - DNA, 1845 bp, Arabidopsis thaliana
gatgttactcttgtctgaatcttcctcaaatctactcatgtagacctccctatctcgatctaaatttccgccaaactttttttaatcccaaagattctttaaacagaatcatcatcaatcatgaaagaaatcaagaagacgatgacgaagcagatgacggcgagacgtgacgacacgccgttacacacggcggttagagaaggcaaaacggaccttcttttggagatgatcggagaacacgacggcgtggagctgaaagagttgttggcggaacaaaaccagtccggtgaaactgctttatacgttgcggctgagtacggtcacaccgacatggttaagattctgatgaaactctccgactctgtcttagccggaaccaaagccaagaacggcttcgatgcctttcacatcgccgccaaaaacggaaatttacaggttcttgatgtgttaatacaggcaaatccagaactttcatttacatttgattcatccaaaacgacggcacttcataccgcggcttcacagggtcatggagagattgtttgtttcttgttggataaaggtgtggacttagctgctattgcgagaagcaatggtaaaaccgctttgcactctgcagctaggaacgggcacacggtgattgtgaaggagttgattgaaaagaaggctggtatggttacaagagtcgacaagaaaggtcaaaccgctcttcatatggcggttaaaggacaaaacactgagattgtggatgtgttgatggaagcagatggttcgttgatcaattccgcggataataaaggaaacactccattgcatatagcagtccgtaaaaacagagcagagattgttcagacagttttaaagtattgtgaagtcagtagagtggcggttaataaatcaggagaaacagctcttgatatcgctgagaaaaccggactacatgagatcgtaccgcttctgcaaaagatcggtatgcagaacgcaagatccatcaagccagctgaaaaagtggaaccatcaggctcttctaggaaactgaaagaaacagttagtgaaataggccatgaggtgcatactcagcttgaacaaaccgggagaacgagaagagagatccaaggaatcgctaaacgggtcaacaaaatgcacacggaaggactcaacaacgcgataaactccactaccctagtagccattctcatagcaaccgttgcttttgcagctatcttcaacgttccaggccagtacacggacgaccctaaagacgtacctccaggatattcactcggagaagcaagagcagctccaagacccgagttcttgatattcgtcgtgtttgattctttcgcgcttttcatctctttagcggtggttgtggttcagacatcagtggtggttatagagaggagagcaaagaagcaaatgatggctataatcaacaagctcatgtggatggcttgcattatgatctcagtagcgttcgtatcactgtcttttgttgtcgtgggagagaaagagaagcctttggcggttggagtaaccgccattggagctttgatcatggtttcaacactagggactatgtgttattgggtgattgctaaccggattgaaggatctaagtcatctccagcttccatgatgtcagatcctgagttagctgattccaaacataaccggaaactttatgcggtttgattagagtgaaacagaggatttagaaaatcattaaagaaaagagagattttgtatccagataataaaagagataactcttgtgtttatagtagattctgtatatgtaacaaaaggaaaatagtataaatcaatttataagacttttacatg

SEQ ID NO: 11307 - protein, 524 aa, Arabidopsis thaliana
MKEIKKTMTKQMTARRDDTPLHTAVREGKTDLLLEMIGEHDGVELKELLAEQNQSGETALYVAAEYGHTDMVKILMKLSDSVLAGTKAKNGFDAFHIAAKNGNLQVLDVLIQANPELSFTFDSSKTTALHTAASQGHGEIVCFLLDKGVDLAAIARSNGKTALHSAARNGHTVIVKELIEKKAGMVTRVDKKGQTALHMAVKGQNTEIVDVLMEADGSLINSADNKGNTPLHIAVRKNRAEIVQTVLKYCEVSRVAVNKSGETALDIAEKTGLHEIVPLLQKIGMQNARSIKPAEKVEPSGSSRKLKETVSEIGHEVHTQLEQTGRTRREIQGIAKRVNKMHTEGLNNAINSTTLVAILIATVAFAAIFNVPGQYTDDPKDVPPGYSLGEARAAPRPEFLIFVVFDSFALFISLAVVVVQTSVVVIERRAKKQMMAIINKLMWMACIMISVAFVSLSFVVVGEKEKPLAVGVTAIGALIMVSTLGTMCYWVIANRIEGSKSSPASMMSDPELADSKHNRKLYAV

SEQ ID NO: 11308 - protein, 517 aa, Arabidopsis thaliana
MTKQMTARRDDTPLHTAVREGKTDLLLEMIGEHDGVELKELLAEQNQSGETALYVAAEYGHTDMVKILMKLSDSVLAGTKAKNGFDAFHIAAKNGNLQVLDVLIQANPELSFTFDSSKTTALHTAASQGHGEIVCFLLDKGVDLAAIARSNGKTALHSAARNGHTVIVKELIEKKAGMVTRVDKKGQTALHMAVKGQNTEIVDVLMEADGSLINSADNKGNTPLHIAVRKNRAEIVQTVLKYCEVSRVAVNKSGETALDIAEKTGLHEIVPLLQKIGMQNARSIKPAEKVEPSGSSRKLKETVSEIGHEVHTQLEQTGRTRREIQGIAKRVNKMHTEGLNNAINSTTLVAILIATVAFAAIFNVPGQYTDDPKDVPPGYSLGEARAAPRPEFLIFVVFDSFALFISLAVVVVQTSVVVIERRAKKQMMAIINKLMWMACIMISVAFVSLSFVVVGEKEKPLAVGVTAIGALIMVSTLGTMCYWVIANRIEGSKSSPASMMSDPELADSKHNRKLYAV

SEQ ID NO: 11309 - protein, 513 aa, Arabidopsis thaliana
MTARRDDTPLHTAVREGKTDLLLEMIGEHDGVELKELLAEQNQSGETALYVAAEYGHTDMVKILMKLSDSVLAGTKAKNGFDAFHIAAKNGNLQVLDVLIQANPELSFTFDSSKTTALHTAASQGHGEIVCFLLDKGVDLAAIARSNGKTALHSAARNGHTVIVKELIEKKAGMVTRVDKKGQTALHMAVKGQNTEIVDVLMEADGSLINSADNKGNTPLHIAVRKNRAEIVQTVLKYCEVSRVAVNKSGETALDIAEKTGLHEIVPLLQKIGMQNARSIKPAEKVEPSGSSRKLKETVSEIGHEVHTQLEQTGRTRREIQGIAKRVNKMHTEGLNNAINSTTLVAILIATVAFAAIFNVPGQYTDDPKDVPPGYSLGEARAAPRPEFLIFVVFDSFALFISLAVVVVQTSVVVIERRAKKQMMAIINKLMWMACIMISVAFVSLSFVVVGEKEKPLAVGVTAIGALIMVSTLGTMCYWVIANRIEGSKSSPASMMSDPELADSKHNRKLYAV

SEQ ID NO: 11310 - DNA, 1313 bp, Arabidopsis thaliana
gaccatcaacaaactcaatcacaatcacaagtaaatacaaaaatcaccatagaaaaatatgaagcgatttattgttcttgcgctttgcatgcttatggttcttgaaaccacaaagggtttagatttccatgacaaagatgtggaatcagagaatagcttgtgggagctatacgaacggtggaggagtcaccacactgttgctaggagccttgaagagaaagctaagaggttcaacgtgttcaagcacaacgtgaagcacatccatgagaccaacaagaaggataaatcttacaagctcaagctaaacaagtttggtgacatgactagtgaagaatttaggagaacatacgctggttcaaacatcaaacatcataggatgtttcaaggcaaaaaaaaggccacaaagagcttcatgtatgcaaatgtaaatactctcccaacctccgttgattggagaaagaatggagccgtcactcctgtcaaaaaccaaggccaatgcgggagttgttgggcgttttcaacagttgttgcggtggaagggatcaaccaaataagaactaaaaagctgacatcactctcagagcaagagctagtagattgtgatacaaaccagaaccaaggatgcaatggaggtctaatggaccttgcttttgagttcatcaaggagaaaggaggactcacaagtgagctagtgtacccttacaaggcttctgatgaaacttgtgacacaaacaaagaaaatgctccggtagtttcaatcgatggacacgaagatgttcctaagaacagcgaggatgatctaatgaaagctgttgctaatcagcctgtttctgttgctattgatgctggaggctcagactttcaattctactccgagggagtgtttaccgggagatgcggaacagagctaaaccatggagttgcggtagtagggtatggaacaacgatagacggaacaaagtattggattgttaagaattcatggggagaggaatggggagagaaaggatacataagaatgcagagagggattcgtcataaagaaggactttgtggtattgctatggaagcttcttatcctctcaagaactccaacactaacccttctagactttccttggactcgcttaaggatgaactctaaattaaatctctttatattaagattaaatagacattgacaagtttgtttatgatgattgtttttttttaaatatatttctttttcattaataggttatggttttcaatgtatgaagttgatgggaatcgtttgaattcgttaaatgaataaataaatggttttatgtagc

SEQ ID NO: 11311 - protein, 361 aa, Arabidopsis thaliana
MKRFIVLALCMLMVLETTKGLDFHDKDVESENSLWELYERWRSHHTVARSLEEKAKRFNVFKHNVKHIHETNKKDKSYKLKLNKFGDMTSEEFRRTYAGSNIKHHRMFQGKKKATKSFMYANVNTLPTSVDWRKNGAVTPVKNQGQCGSCWAFSTVVAVEGINQIRTKKLTSLSEQELVDCDTNQNQGCNGGLMDLAFEFIKEKGGLTSELVYPYKASDETCDTNKENAPVVSIDGHEDVPKNSEDDLMKAVANQPVSVAIDAGGSDFQFYSEGVFTGRCGTELNHGVAVVGYGTTIDGTKYWIVKNSWGEEWGEKGYIRMQRGIRHKEGLCGIAMEASYPLKNSNTNPSRLSLDSLKDEL

SEQ ID NO: 11312 - protein, 351 aa, Arabidopsis thaliana
MLMVLETTKGLDFHDKDVESENSLWELYERWRSHHTVARSLEEKAKRFNVFKHNVKHIHETNKKDKSYKLKLNKFGDMTSEEFRRTYAGSNIKHHRMFQGKKKATKSFMYANVNTLPTSVDWRKNGAVTPVKNQGQCGSCWAFSTVVAVEGINQIRTKKLTSLSEQELVDCDTNQNQGCNGGLMDLAFEFIKEKGGLTSELVYPYKASDETCDTNKENAPVVSIDGHEDVPKNSEDDLMKAVANQPVSVAIDAGGSDFQFYSEGVFTGRCGTELNHGVAVVGYGTTIDGTKYWIVKNSWGEEWGEKGYIRMQRGIRHKEGLCGIAMEASYPLKNSNTNPSRLSLDSLKDEL

SEQ ID NO: 11313 - protein, 349 aa, Arabidopsis thaliana
MVLETTKGLDFHDKDVESENSLWELYERWRSHHTVARSLEEKAKRFNVFKHNVKHIHETNKKDKSYKLKLNKFGDMTSEEFRRTYAGSNIKHHRMFQGKKKATKSFMYANVNTLPTSVDWRKNGAVTPVKNQGQCGSCWAFSTVVAVEGINQIRTKKLTSLSEQELVDCDTNQNQGCNGGLMDLAFEFIKEKGGLTSELVYPYKASDETCDTNKENAPVVSIDGHEDVPKNSEDDLMKAVANQPVSVAIDAGGSDFQFYSEGVFTGRCGTELNHGVAVVGYGTTIDGTKYWIVKNSWGEEWGEKGYIRMQRGIRHKEGLCGIAMEASYPLKNSNTNPSRLSLDSLKDEL

SEQ ID NO: 11314 - DNA, 1736 bp, Arabidopsis thaliana
ttctcttacatctctatcttcttaagttctttcctttgttcttcgatttgatcaccaactctcacatatttcgaaatcgtcacactttgttgcgtgtcgtcttctctctctcataattcttgagtttcacgtctcaagatttgatcacttctgccaattttccagattgatctctctaattatggcttccatgagtttcgccttgaatcgcttctctggactctcctctaaaaccaccttatcagctgacttcgatccatcctctcgccggagttttctaccgccgactagagttggacttaagatctcttccgccgccgaatcggagcctgatctcagtgtcactgtaaatggcctgaaaatgcccaatcctttcgtgatcgggtcgggtccaccgggtaccaactacaccgtcatgaagagagcctttgatgaaggttggggggccgtcatcgccaaaaccgtatctttagatgcatccaaagttatcaacgtgacacctagatatgctcggctacgaaccggatccaatggctcagccaaaacagatgtaattgggtggcagaacatagaacttatcagtgacagacctcttgaaaccatgctcaaagagtttgagcggttgaaaaaagagtatcctgatcggattctgattgcttcagtcatggaggaatataacaaaactgcttgggaagagcttatcgaccgtgttgagcaaactggtgttgatgctttagaaatcaacttctcgtgtcctcatggtatgccagagcgcagaatgggtgccgctgttggacaagattgtgcgcttctcgacgaggtttgcggatggattaatgctaaagctacagttcctgtatgggctaagatgactcctaatattactgacataactgagcctgctagggtgtcactaaaatccggatgtgaaggaattgcagcgatcaatacaatcatgagtgtaatgggaattgatatgaagacgttgcgtcctgagccatgcgttgaaggttactccactccagggggatactcttataaggccgttcgcccaattgcactggcaaaagttatgaacattgccaaaatgatgaaatctgagtttagtgaggatcgctcgctttcgggtattggaggagttgaaactggctatgatgccgctgaattcattctccttggatcaaatactgtacaggtatgcaccggtgtgatgatgcacggctatggtcatgtgaaaaccctttgcgctgagctgaaagatttcatgaaacaacacaacttctctacaatagaagagttcagagggcattcgctgcagtactttacaacacacacagatttagttaagagacagaaagaagcagttgagcagagaaaagctgagaagagaggcttgaaatctgataaagattggaccggggatgggttcgtgaaggagactgagagtatggtttctaactaagttagtagcctgatgaagttatgaccacccaaatatttcaataaaggttcagcaacttcattcacaactcacatgcaaattacgaaggctctttctttcaaatgtttaaaatcaacttcttaaatctcacttgaaaagaaataactaaattttatgtttcttaattttcttctcgttgtgtattattcatcttgtatccatccatagcaaccatttctttgttacttcaagttggcttaaattttggccaataataataccatagaccttctcc

SEQ ID NO: 11315 - protein, 426 aa, Arabidopsis thaliana
MASMSFALNRFSGLSSKTTLSADFDPSSRRSFLPPTRVGLKISSAAESEPDLSVTVNGLKMPNPFVIGSGPPGTNYTVMKRAFDEGWGAVIAKTVSLDASKVINVTPRYARLRTGSNGSAKTDVIGWQNIELISDRPLETMLKEFERLKKEYPDRILIASVMEEYNKTAWEELIDRVEQTGVDALEINFSCPHGMPERRMGAAVGQDCALLDEVCGWINAKATVPVWAKMTPNITDITEPARVSLKSGCEGIAAINTIMSVMGIDMKTLRPEPCVEGYSTPGGYSYKAVRPIALAKVMNIAKMMKSEFSEDRSLSGIGGVETGYDAAEFILLGSNTVQVCTGVMMHGYGHVKTLCAELKDFMKQHNFSTIEEFRGHSLQYFTTHTDLVKRQKEAVEQRKAEKRGLKSDKDWTGDGFVKETESMVSN

SEQ ID NO: 11316 - protein, 423 aa, Arabidopsis thaliana
MSFALNRFSGLSSKTTLSADFDPSSRRSFLPPTRVGLKISSAAESEPDLSVTVNGLKMPNPFVIGSGPPGTNYTVMKRAFDEGWGAVIAKTVSLDASKVINVTPRYARLRTGSNGSAKTDVIGWQNIELISDRPLETMLKEFERLKKEYPDRILIASVMEEYNKTAWEELIDRVEQTGVDALEINFSCPHGMPERRMGAAVGQDCALLDEVCGWINAKATVPVWAKMTPNITDITEPARVSLKSGCEGIAAINTIMSVMGIDMKTLRPEPCVEGYSTPGGYSYKAVRPIALAKVMNIAKMMKSEFSEDRSLSGIGGVETGYDAAEFILLGSNTVQVCTGVMMHGYGHVKTLCAELKDFMKQHNFSTIEEFRGHSLQYFTTHTDLVKRQKEAVEQRKAEKRGLKSDKDWTGDGFVKETESMVSN

SEQ ID NO: 11317 - protein, 366 aa, Arabidopsis thaliana
MPNPFVIGSGPPGTNYTVMKRAFDEGWGAVIAKTVSLDASKVINVTPRYARLRTGSNGSAKTDVIGWQNIELISDRPLETMLKEFERLKKEYPDRILIASVMEEYNKTAWEELIDRVEQTGVDALEINFSCPHGMPERRMGAAVGQDCALLDEVCGWINAKATVPVWAKMTPNITDITEPARVSLKSGCEGIAAINTIMSVMGIDMKTLRPEPCVEGYSTPGGYSYKAVRPIALAKVMNIAKMMKSEFSEDRSLSGIGGVETGYDAAEFILLGSNTVQVCTGVMMHGYGHVKTLCAELKDFMKQHNFSTIEEFRGHSLQYFTTHTDLVKRQKEAVEQRKAEKRGLKSDKDWTGDGFVKETESMVSN

SEQ ID NO: 11318 - DNA, 2106 bp, Arabidopsis thaliana
attgttaacctctcgtaactaaaatcttccatggtagtagtaacaaagaagaccatgaagattcaaattcatctcctttactcgttcttgttcctctgtttctctactctcactctatcttctgagcccagaaaccctgaagttgaggcgttgataagtataaggaacaatttgcatgatcctcatggagctttgaacaattgggacgagttttcagttgatccttgtagctgggctatgatcacttgctctcccgacaacctcgtcattggactaggagcgccgagccagtctctctcgggaggtttatctgagtctatcggaaatctcacaaatctccgacaagtgtcattgcaaaataacaacatctccggcaaaattccaccggagctcggttttctacccaaattacaaaccttggatctttccaacaaccgattctccggtgacatccctgtttccatcgaccagctaagcagccttcaatatctgagactcaacaacaactctttgtctgggcccttccctgcttctttgtcccaaattcctcacctctccttcttggacttgtcttacaacaatctcagtggccctgttcctaaattcccagcaaggactttcaacgttgctggtaatcctttgatttgtagaagcaacccacctgagatttgttctggatcaatcaatgcaagtccactttctgtttctttgagctcttcatcaggacgcaggtctaatagattggcaatagctcttagtgtaagccttggctctgttgttatactagtccttgctctcgggtccttttgttggtaccgaaagaaacaaagaaggctactgatccttaacttaaacgataaacaagaggaagggcttcaaggacttgggaatctaagaagcttcacattcagagaactccatgtttatacagatggtttcagttccacgaacattctcggcgctggtggattcggtaatgtgtacagaggcaagcttggagatgggacaatggtggcagtgaaacggttgaaggatattaatggaacctcaggggattcacagtttcgtatggagctagagatgattagcttagctgttcataagaatctgcttcggttaattggttattgcgcaacttctggtgaaaggcttcttgtttacccttacatgcctaatggaagcgtcgcctctaagcttaaatctaaaccggcattggactggaacatgaggaagaggatagcaattggtgcagcgagaggtttgttgtatctacatgagcaatgtgatcccaagatcattcatagagatgtaaaggcagctaatattctcttagacgagtgctttgaagctgttgttgttgactttggactcgcaaagctccttaaccatgcggattctcatgtcacaactgcggtccgtggtacggttggccacattgcacctgaatatctctccactggtcagtcttctgagaaaaccgatgtgtttgggttcggtatactattgctcgagctcataaccggactgagagctcttgagtttggtaaaaccgttagccagaaaggagctatgcttgaatgggtgaggaaattacatgaagagatgaaagtagaggaactattggatcgagaactcggaactaactacgataagattgaagttggagagatgttgcaagtggctttgctatgcacacaatatctgccagctcatcgtcctaaaatgtctgaagttgttttgatgcttgaaggcgatggattagccgagagatgggctgcttcgcataaccattcacatttctaccatgccaatatctctttcaagacaatctctactctgtctactacttctgtctcaaggcttgacgcacattgcaatgatccaacttatcaaatgtttggatcttcggctttcgatgatgacgatgatcatcagcctttagattcctttgccatggaactatccggtccaagataacacaatgaaagaaagatatcatttttacgatggatcaaacaatccaatgaaaaaagctctacacttttataatatagacatgtatatggtggtgaaaattgatgaaaaatatctctacagtttgagatc

SEQ ID NO: 11319 - protein, 648 aa, Arabidopsis thaliana
MVVVTKKTMKIQIHLLYSFLFLCFSTLTLSSEPRNPEVEALISIRNNLHDPHGALNNWDEFSVDPCSWAMITCSPDNLVIGLGAPSQSLSGGLSESIGNLTNLRQVSLQNNNISGKIPPELGFLPKLQTLDLSNNRFSGDIPVSIDQLSSLQYLRLNNNSLSGPFPASLSQIPHLSFLDLSYNNLSGPVPKFPARTFNVAGNPLICRSNPPEICSGSINASPLSVSLSSSSGRRSNRLAIALSVSLGSVVILVLALGSFCWYRKKQRRLLILNLNDKQEEGLQGLGNLRSFTFRELHVYTDGFSSTNILGAGGFGNVYRGKLGDGTMVAVKRLKDINGTSGDSQFRMELEMISLAVHKNLLRLIGYCATSGERLLVYPYMPNGSVASKLKSKPALDWNMRKRIAIGAARGLLYLHEQCDPKIIHRDVKAANILLDECFEAVVVDFGLAKLLNHADSHVTTAVRGTVGHIAPEYLSTGQSSEKTDVFGFGILLLELITGLRALEFGKTVSQKGAMLEWVRKLHEEMKVEELLDRELGTNYDKIEVGEMLQVALLCTQYLPAHRPKMSEVVLMLEGDGLAERWAASHNHSHFYHANISFKTISTLSTTSVSRLDAHCNDPTYQMFGSSAFDDDDDHQPLDSFAMELSGPR

SEQ ID NO: 11320 - protein, 640 aa, Arabidopsis thaliana
MKIQIHLLYSFLFLCFSTLTLSSEPRNPEVEALISIRNNLHDPHGALNNWDEFSVDPCSWAMITCSPDNLVIGLGAPSQSLSGGLSESIGNLTNLRQVSLQNNNISGKIPPELGFLPKLQTLDLSNNRFSGDIPVSIDQLSSLQYLRLNNNSLSGPFPASLSQIPHLSFLDLSYNNLSGPVPKFPARTFNVAGNPLICRSNPPEICSGSINASPLSVSLSSSSGRRSNRLAIALSVSLGSVVILVLALGSFCWYRKKQRRLLILNLNDKQEEGLQGLGNLRSFTFRELHVYTDGFSSTNILGAGGFGNVYRGKLGDGTMVAVKRLKDINGTSGDSQFRMELEMISLAVHKNLLRLIGYCATSGERLLVYPYMPNGSVASKLKSKPALDWNMRKRIAIGAARGLLYLHEQCDPKIIHRDVKAANILLDECFEAVVVDFGLAKLLNHADSHVTTAVRGTVGHIAPEYLSTGQSSEKTDVFGFGILLLELITGLRALEFGKTVSQKGAMLEWVRKLHEEMKVEELLDRELGTNYDKIEVGEMLQVALLCTQYLPAHRPKMSEVVLMLEGDGLAERWAASHNHSHFYHANISFKTISTLSTTSVSRLDAHCNDPTYQMFGSSAFDDDDDHQPLDSFAMELSGPR

SEQ ID NO: 11321 - protein, 579 aa, Arabidopsis thaliana
MITCSPDNLVIGLGAPSQSLSGGLSESIGNLTNLRQVSLQNNNISGKIPPELGFLPKLQTLDLSNNRFSGDIPVSIDQLSSLQYLRLNNNSLSGPFPASLSQIPHLSFLDLSYNNLSGPVPKFPARTFNVAGNPLICRSNPPEICSGSINASPLSVSLSSSSGRRSNRLAIALSVSLGSVVILVLALGSFCWYRKKQRRLLILNLNDKQEEGLQGLGNLRSFTFRELHVYTDGFSSTNILGAGGFGNVYRGKLGDGTMVAVKRLKDINGTSGDSQFRMELEMISLAVHKNLLRLIGYCATSGERLLVYPYMPNGSVASKLKSKPALDWNMRKRIAIGAARGLLYLHEQCDPKIIHRDVKAANILLDECFEAVVVDFGLAKLLNHADSHVTTAVRGTVGHIAPEYLSTGQSSEKTDVFGFGILLLELITGLRALEFGKTVSQKGAMLEWVRKLHEEMKVEELLDRELGTNYDKIEVGEMLQVALLCTQYLPAHRPKMSEVVLMLEGDGLAERWAASHNHSHFYHANISFKTISTLSTTSVSRLDAHCNDPTYQMFGSSAFDDDDDHQPLDSFAMELSGPR

SEQ ID NO: 11322 - DNA, 2007 bp, Arabidopsis thaliana
tgcccaattctcgggtcaaatccatctaaaagtttgtgcttttcgtattgggattagttcgattcctaaatctgatttagggttttaatcaatttggcaatcgggtctcttgcgatgaagttttcggagatttattgatttcatggtgggtttttgttttcgaagctcgttgatgaagaattgacttctggaatctcaatctctgaagggctttttcgatgttaaattcgtgaatctgggttttaaatgctgaattggaaaacagatccaggggctaattaaggaaaaaaggaggtttcttttgatattgatttttgggaattttgaggtttgagagagatcggagaagatggatctcgtgatcggtgggaaatttaagcttgggaagaaaattggtagtggatcatttggagagctttatctaggtgtaaatgtccaaacaggagaagaagttgctgtcaagctggaaaatgtgaagaccaagcatccacaacttcattatgagtcaaagttgtatatgctgcttcaaggaggatctggtattccgaacatcaagtggtttggagttgaaggtgactacagcgtaatggttattgaccttctaggtcctagtcttgaagacttgtttaactactgcaacagaaagttaacattgaaaactgttctcatgcttgccgaccaattacttaacagggttgaatttatgcatactcgaggtttccttcaccgtgatataaaacctgacaactttttaatgggccttggacgcaaagcaaatcaggtgtatatcattgattttggactagggaagaaatacagagaccttcagactcacaagcacattccttacagagaaaacaaaaatcttactgggacagctcggtatgcaagtgttaacactcaccttggagtcgaacaaagtcgaagggatgatttagaatcacttggttatgttcttatgtattttctcaaaggaagcttaccttggcagggattaaagacagaagtatgacagaatcagtgagaagaaagtgtcaactcctatagaggtgttgtgtaaaaaccaaccgtctgaattcgtttcatactttcattactgccgatctttacggtttgatgacaaacctgattactcttacctcaagaggcttttccgtgacttgtttatccgagaaggttatcaattcgattatgtatttgactggacagtgctaaagtatcctcaagtcggatccagctctggttctagttcacgaacaaggcatcatacaacagcgaaacccggattcaatgcagatcctatcgaaagacaagagaggatcctaggaaaggaaacaacccgatataaaatcccaggtgcagtggaggcattctccagaagacacccgactacaacttcttcgcctcgagatcgttctagatcaagaaactcagacgacggacctttctctaagcagacacatggagactccgaaagagcaaacagttcctcaagatacagagcatcttcttctaggaaagccgttgctgcttcaagctcccggccaagttctgcaggtggaccaagcgaaagccgaacttcaagtcgtctggtttcctcaagcggtggtggtggcagcggcagtggaaatggccgtccctcaactagccagagagtgcaagctggatatgaatccaagactctgtctttctctcgtgcaacagcggcaagaaacactcgggaagatcaattaagaagcttcgagcttctctctcttcggaaataaaggaaaatgatggagagagagacagcaaactccatgaaaacccaaagaaattacctctgaagaaagatgagaatcttggtttgagggaattcatatatttgaacctgatgaaatcctcagatctttttacatgtaatttcagcttcagcttgcagagatctttttcactcgttttgtttatgtaatcgtgatatgtgttagacaaaaataacaatcaaaaatgtagagagagtttccatgt

SEQ ID NO: 11323 - protein, 220 aa, Arabidopsis thaliana
MDLVIGGKFKLGKKIGSGSFGELYLGVNVQTGEEVAVKLENVKTKHPQLHYESKLYMLLQGGSGIPNIKWFGVEGDYSVMVIDLLGPSLEDLFNYCNRKLTLKTVLMLADQLLNRVEFMHTRGFLHRDIKPDNFLMGLGRKANQVYIIDFGLGKKYRDLQTHKHIPYRENKNLTGTARYASVNTHLGVEQSRRDDLESLGYVLMYFLKGSLPWQGLKTEV

SEQ ID NO: 11324 - protein, 164 aa, Arabidopsis thaliana
MLLQGGSGIPNIKWFGVEGDYSVMVIDLLGPSLEDLFNYCNRKLTLKTVLMLADQLLNRVEFMHTRGFLHRDIKPDNFLMGLGRKANQVYIIDFGLGKKYRDLQTHKHIPYRENKNLTGTARYASVNTHLGVEQSRRDDLESLGYVLMYFLKGSLPWQGLKTEV

SEQ ID NO: 11325 - protein, 141 aa, Arabidopsis thaliana
MVIDLLGPSLEDLFNYCNRKLTLKTVLMLADQLLNRVEFMHTRGFLHRDIKPDNFLMGLGRKANQVYIIDFGLGKKYRDLQTHKHIPYRENKNLTGTARYASVNTHLGVEQSRRDDLESLGYVLMYFLKGSLPWQGLKTEV

SEQ ID NO: 11326 - DNA, 1558 bp, Arabidopsis thaliana
ggaagaagaaggaagctatggattctgagaaggcactagagcttgtgaagtatggagctacacttctatttctcgatgttcctcaatatacactggtcggaatcgatactcagattttcgcagttggaccagctttcaaagggattaagatgatacctcctggaattcactttgtattctatagttcatcgacaagggatggtagagagttttcacctaccattggcttctttattgatgttgctccttctcaggttattgtacgaaaatggaatcagcaagacgagtggttaaccaaagtatctgaagaagaggaagggagatattctcaagcagtcaggtctttggagtttgacaaaaatcttggcccatacaatctaaggcaatatggggaatggaagcacttatctaactacattacgaaggatgttgttgaaaagtttgagccagttggaggagaaataacagtcacatatgaatctgctattctaaaaggtggacctaaaacggcaatggaaatagcacttgatacgcagatgaaaaaaagcaagttgatgacatcatctactgagcaacctaaagggaataggttttactacacgtctattcctcggattataaagcacaagggaatgtctggacaggagctaacctctatgaatcttgacaagactcaattgctagaaagcgtattgtcaaaggagtacaaagactcggaagatttgctacttggggagctacaattttcatttgttgcatttttgatggggcagtctcttgaatcgttcatgcagtggaagtccatagttagtcttttactgggctgcaccagtgcgccctttcagacgaggagtcagctatttacaaagttcatcaaagtcatctaccatcaactaaaatatggactacaaaaagagaatagtggtcctgagacgggcattcatgcgcttcttgatgattcttggctagcttcagatagctttctgcatttcctttgtaaggacttctttgcattagtggaagagacgtctgtagttgatggagatttattgtcatggacaaggaagttcaaagagttgcttgagaacagattaggatgggagtttcagaagaagagccctgttgacgggatttactttgaagaagatgatgagtatgctcctgtggttgagatgttggatgaaagtcatggagaatatatggataaaaccacttagacatcgatcgatgcagtctctgtcttcatagcttcttcagcttttgacctctcaagccattccaaaaagcagctgcgttgatcgctttcttaccaggaagctggacttctagtacctgaatcagcaacaccaaatattagctttataaatacttgattaatgtctgattatcacgtcctaacgcatctgctttttgtagtaacagttagtgagtttgtaactttctatagctttatgtgaatattagcagtaattttctatagctttacctccaaagctgtaccgcctctacaaggaaacaccaatgaacctttcttgaaagttacataatcttgttcacc

SEQ ID NO: 11327 - protein, 404 aa, Arabidopsis thaliana
KKKEAMDSEKALELVKYGATLLFLDVPQYTLVGIDTQIFAVGPAFKGIKMIPPGIHFVFYSSSTRDGREFSPTIGFFIDVAPSQVIVRKWNQQDEWLTKVSEEEEGRYSQAVRSLEFDKNLGPYNLRQYGEWKHLSNYITKDVVEKFEPVGGEITVTYESAILKGGPKTAMEIALDTQMKKSKLMTSSTEQPKGNRFYYTSIPRIIKHKGMSGQELTSMNLDKTQLLESVLSKEYKDSEDLLLGELQFSFVAFLMGQSLESFMQWKSIVSLLLGCTSAPFQTRSQLFTKFIKVIYHQLKYGLQKENSGPETGIHALLDDSWLASDSFLHFLCKDFFALVEETSVVDGDLLSWTRKFKELLENRLGWEFQKKSPVDGIYFEEDDEYAPVVEMLDESHGEYMDKTT

SEQ ID NO: 11328 - protein, 399 aa, Arabidopsis thaliana
MDSEKALELVKYGATLLFLDVPQYTLVGIDTQIFAVGPAFKGIKMIPPGIHFVFYSSSTRDGREFSPTIGFFIDVAPSQVIVRKWNQQDEWLTKVSEEEEGRYSQAVRSLEFDKNLGPYNLRQYGEWKHLSNYITKDVVEKFEPVGGEITVTYESAILKGGPKTAMEIALDTQMKKSKLMTSSTEQPKGNRFYYTSIPRIIKHKGMSGQELTSMNLDKTQLLESVLSKEYKDSEDLLLGELQFSFVAFLMGQSLESFMQWKSIVSLLLGCTSAPFQTRSQLFTKFIKVIYHQLKYGLQKENSGPETGIHALLDDSWLASDSFLHFLCKDFFALVEETSVVDGDLLSWTRKFKELLENRLGWEFQKKSPVDGIYFEEDDEYAPVVEMLDESHGEYMDKTT

SEQ ID NO: 11329 - protein, 355 aa, Arabidopsis thaliana
MIPPGIHFVFYSSSTRDGREFSPTIGFFIDVAPSQVIVRKWNQQDEWLTKVSEEEEGRYSQAVRSLEFDKNLGPYNLRQYGEWKHLSNYITKDVVEKFEPVGGEITVTYESAILKGGPKTAMEIALDTQMKKSKLMTSSTEQPKGNRFYYTSIPRIIKHKGMSGQELTSMNLDKTQLLESVLSKEYKDSEDLLLGELQFSFVAFLMGQSLESFMQWKSIVSLLLGCTSAPFQTRSQLFTKFIKVIYHQLKYGLQKENSGPETGIHALLDDSWLASDSFLHFLCKDFFALVEETSVVDGDLLSWTRKFKELLENRLGWEFQKKSPVDGIYFEEDDEYAPVVEMLDESHGEYMDKTT

SEQ ID NO: 11330 - DNA, 2070 bp, Arabidopsis thaliana
gggagaaggtagtaggatcttccacttgccgctctttgaaaatcactcgccgtgtctctctaagcttcttcttcactgtgaaaacctcagatcgcaaatatgcacgcaccggtactcgttctgagcgattcgttgaagcgtgaatctggaagcaaggttcatcatggtaatatccaagcttccaaggctgttgctgatatcattcgtacaacattgggtcctcgttctatgttgaagatgcttcttgatgctggtggagggattgttgttactaatgatgggaatgctattcttcgtgagctagatgtcgctcatcctgcagctaagtcaatgattgagttgagccgtacgcaagatgaagaagttggtgatgggacaacgtctgttattgttctagctggaaatgcttcacgttgcagaagcgtttcttgagaagaattaccatcccacagtcatatgccgagcttacatcaaggctctcgaagattctattgctgttcttgacaaaattgctatgtcaattgatatcaatgaccgttcacaagtgctaggattagtcaagagctgcatagggacaaagttcactagccaatttggagatcttattgcggatttggctattgatgccactactactgttggtgttgatcttggacaaggtttgagggaggtagacattaaaaagtacatcaaggttgagaaagttcctggtggtcagttcgaggactctgaggttcttaaaggagttatgtttaacaaagatgttgttgctcctggtaaaatgaaaagaaagattgtcaacccacggattattcttcttgactgtcctcttgagtacaagaaaggtgaaaatcaaaccaatgctgagttggttagagaagaggactgggaagtgttgttgaagttggaagaggaatatatcgagaacatttgcgttcaaatactaaagttcaagcctgatttggttatcacagagaagggtcttagtgacttggcctgtcactatttcagtaaagctggggttagtgcaatccgaaggttgagaaaaactgacaacaacagaatcgccaaggcttgtggagcagtaattgtgaacaggcccgacgaactgcaggagtctgatatcggtactggggctggcttgtttgaggtcaagaaaattggagatgatttcttttctttcattgttgattgcaaagaacccaaagcctgtactgtactcttaaggggaccaagtaaagatttcatcaatgaagtggaaagaaatttacaggatgccatgtctgttgcaagaaacattatcaaaaacccaaagctagttcctggtggaggagccacagagctaaccgtttctgccacattaaaacagaagagtgcaacaattgaaggcatagaaaagtggccttatgaagcagctgccattgctttcgaggctattccacgtaccctggctcaaaactgtggggttaacgtgatccgtactatgactgcattgcaagggaagcatgcaaatggtgaaaacgcatggactggtattgacgggaacactggtgcaatagctgatatgaaagagagcaagatatgggattcgtacaatgtgaaggcgcaaactttcaagacggctatagaagcagcgtgtatgcttcttaggatcgatgatatagtgagtggaatcaagaagaagcaagctcctggatctggaccttcaaagcctaccattgagacagaaggagatgcagacaacgaacaaattcttcccgactaagcgaagggagaaacactttggtctcagcataactcaatctctgttttcacttgtttaatggttgcactcttttggctattatcttcccttgacatatcttttaattctgcagtttgacttggtgagataagattttcgagggtggtttttttttgtttgttttggaatattagcttttttgaattttcgtagtcactttgttggtttttagagtgctagttgttattgtctttttgaaatttctggcactagagacttttttagtttgtgtcgtttttgtttgaatatcatcaagtatgtacttc

SEQ ID NO: 11331 - protein, 453 aa, Arabidopsis thaliana
MLHVAEAFLEKNYHPTVICRAYIKALEDSIAVLDKIAMSIDINDRSQVLGLVKSCIGTKFTSQFGDLIADLAIDATTTVGVDLGQGLREVDIKKYIKVEKVPGGQFEDSEVLKGVMFNKDVVAPGKMKRKIVNPRIILLDCPLEYKKGENQTNAELVREEDWEVLLKLEEEYIENICVQILKFKPDLVITEKGLSDLACHYFSKAGVSAIRRLRKTDNNRIAKACGAVIVNRPDELQESDIGTGAGLFEVKKIGDDFFSFIVDCKEPKACTVLLRGPSKDFINEVERNLQDAMSVARNIIKNPKLVPGGGATELTVSATLKQKSATIEGIEKWPYEAAAIAFEAIPRTLAQNCGVNVIRTMTALQGKHANGENAWTGIDGNTGAIADMKESKIWDSYNVKAQTFKTAIEAACMLLRIDDIVSGIKKKQAPGSGPSKPTIETEGDADNEQILPD

SEQ ID NO: 11332 - protein, 416 aa, Arabidopsis thaliana
MSIDINDRSQVLGLVKSCIGTKFTSQFGDLIADLAIDATTTVGVDLGQGLREVDIKKYIKVEKVPGGQFEDSEVLKGVMFNKDVVAPGKMKRKIVNPRIILLDCPLEYKKGENQTNAELVREEDWEVLLKLEEEYIENICVQILKFKPDLVITEKGLSDLACHYFSKAGVSAIRRLRKTDNNRIAKACGAVIVNRPDELQESDIGTGAGLFEVKKIGDDFFSFIVDCKEPKACTVLLRGPSKDFINEVERNLQDAMSVARNIIKNPKLVPGGGATELTVSATLKQKSATIEGIEKWPYEAAAIAFEAIPRTLAQNCGVNVIRTMTALQGKHANGENAWTGIDGNTGAIADMKESKIWDSYNVKAQTFKTAIEAACMLLRIDDIVSGIKKKQAPGSGPSKPTIETEGDADNEQILPD

SEQ ID NO: 11333 - protein, 338 aa, Arabidopsis thaliana
MFNKDVVAPGKMKRKIVNPRIILLDCPLEYKKGENQTNAELVREEDWEVLLKLEEEYIENICVQILKFKPDLVITEKGLSDLACHYFSKAGVSAIRRLRKTDNNRIAKACGAVIVNRPDELQESDIGTGAGLFEVKKIGDDFFSFIVDCKEPKACTVLLRGPSKDFINEVERNLQDAMSVARNIIKNPKLVPGGGATELTVSATLKQKSATIEGIEKWPYEAAAIAFEAIPRTLAQNCGVNVIRTMTALQGKHANGENAWTGIDGNTGAIADMKESKIWDSYNVKAQTFKTAIEAACMLLRIDDIVSGIKKKQAPGSGPSKPTIETEGDADNEQILPD

SEQ ID NO: 11334 - DNA, 1541 bp, Arabidopsis thaliana
tgtttcttcaatatctctttctctccaacaaaatcaaaatcaagaaaacaaaaaagaaaaactctcaagaaacaatggatgcttcattgtctccattcgatcaccaaaaaactcaaaacacagagccaaagaaaagcttcattacctcactaatcactctccgttcaaacaacatcaaagaagacacatacttcgtctcagaactcaaacccacggagcaaaaatcacttcaagaactcaaagaaaagctctcagcttcatcctccaaagcttcttcaatgtggggagtctcactcctcggtggagacgacaaagctgacgtaatcctcctcaagttcctcagagcaagagatttcaaagtagcagactctttgagaatgcttgagaagtgtttggagtggagagaagagttcaaagcagagaaattgacagaagaagatctgggttttaaagatttggaaggtaaagttgcttacatgagaggctacgacaaagaaggacacccagtttgttacaatgcttatggtgtgtttaaagagaaagagatgtatgagagagtgtttggtgatgaagagaagcttaacaagtttctgagatggagagttcaggttttggagagaggtgttaaaatgcttcattttaaacctggtggtgttaattccattattcaagttacagatcttaaagatatgcctaagagagagcttagagttgcttctaatcagatcctctctctttttcaagataattaccctgaattggttgctactaagatattcataaacgtgccttggtacttcagtgtgatctactcaatgttcagcccattcctgactcagagaacaaagagcaagtttgtgatgtccaaagaaggcaatgcagcagaaacactctacaagttcattaggccagaagatattccggtgcaatacggtggtcttagccgtcctactgattcgcaaaacggaccgccaaaaccggcgtctgaattctccatcaagggtggtgagaaagttaacattcagattgaaggcattgagggtggagcaaccataacatgggatatagtagttggaggatgggatttagagtacagtgcagagtttgttccaaacgctgaagagagttacgcgatcgttgtcgagaaaccgaagaagatgaaagctacagatgaagctgtttgcaactctttcactacagtagaagctgggaagctcattctctctgttgacaatactctctctcgcaagaagaaagttgctgcttaccgttacactgtccggaaatctactacaaccgtctaatctataaccggtttttcagaagattggttgctttcttactactactttttgtgggtgtgttgaggggttttctttcttgggtttgagtactaggtttgttttgcttactcaacggttcatgttgaaccggaaatatcgataaatttgcgaggaaatcatatgtataaaaactatgatttgtatgacatttgatgtttggccttaatattttaactagagattgaagttttagtctgc

SEQ ID NO: 11335 - protein, 433 aa, Arabidopsis thaliana
FLQYLFLSNKIKIKKTKKKNSQETMDASLSPFDHQKTQNTEPKKSFITSLITLRSNNIKEDTYFVSELKPTEQKSLQELKEKLSASSSKASSMWGVSLLGGDDKADVILLKFLRARDFKVADSLRMLEKCLEWREEFKAEKLTEEDLGFKDLEGKVAYMRGYDKEGHPVCYNAYGVFKEKEMYERVFGDEEKLNKFLRWRVQVLERGVKMLHFKPGGVNSIIQVTDLKDMPKRELRVASNQILSLFQDNYPELVATKIFINVPWYFSVIYSMFSPFLTQRTKSKFVMSKEGNAAETLYKFIRPEDIPVQYGGLSRPTDSQNGPPKPASEFSIKGGEKVNIQIEGIEGGATITWDIVVGGWDLEYSAEFVPNAEESYAIVVEKPKKMKATDEAVCNSFTTVEAGKLILSVDNTLSRKKKVAAYRYTVRKSTTTV

SEQ ID NO: 11336 - protein, 409 aa, Arabidopsis thaliana
MDASLSPFDHQKTQNTEPKKSFITSLITLRSNNIKEDTYFVSELKPTEQKSLQELKEKLSASSSKASSMWGVSLLGGDDKADVILLKFLRARDFKVADSLRMLEKCLEWREEFKAEKLTEEDLGFKDLEGKVAYMRGYDKEGHPVCYNAYGVFKEKEMYERVFGDEEKLNKFLRWRVQVLERGVKMLHFKPGGVNSIIQVTDLKDMPKRELRVASNQILSLFQDNYPELVATKIFINVPWYFSVIYSMFSPFLTQRTKSKFVMSKEGNAAETLYKFIRPEDIPVQYGGLSRPTDSQNGPPKPASEFSIKGGEKVNIQIEGIEGGATITWDIVVGGWDLEYSAEFVPNAEESYAIVVEKPKKMKATDEAVCNSFTTVEAGKLILSVDNTLSRKKKVAAYRYTVRKSTTTV

SEQ ID NO: 11337 - protein, 341 aa, Arabidopsis thaliana
MWGVSLLGGDDKADVILLKFLRARDFKVADSLRMLEKCLEWREEFKAEKLTEEDLGFKDLEGKVAYMRGYDKEGHPVCYNAYGVFKEKEMYERVFGDEEKLNKFLRWRVQVLERGVKMLHFKPGGVNSIIQVTDLKDMPKRELRVASNQILSLFQDNYPELVATKIFINVPWYFSVIYSMFSPFLTQRTKSKFVMSKEGNAAETLYKFIRPEDIPVQYGGLSRPTDSQNGPPKPASEFSIKGGEKVNIQIEGIEGGATITWDIVVGGWDLEYSAEFVPNAEESYAIVVEKPKKMKATDEAVCNSFTTVEAGKLILSVDNTLSRKKKVAAYRYTVRKSTTTV

SEQ ID NO: 11338 - DNA, 1479 bp, Arabidopsis thaliana
gagagagaaattcacaacaaaaatggagactagggaaacaaaaccagtgatctttctcttccctttccctttacaaggtcacttaaacccaatgtttcagctcgccaacatcttcttcaacagaggcttctccatcactgtgatccacactaagttcaactctccaaactcttccaatttccctcacttcagtttcgtatccattcccgatggcttgtctgaacctgaatcctatcccgatgtcattgagattctccatgacctcaattccaagtgtgttgctccttttggtgattgcttaaagaagcttatatctgaagaaccaacagcagcttgtgtgattgttgacgctctttggtacttcactcacgatttaaccgagaaattcaatttcccgaggattgttctccgaaccgttaacctctcagctttcgtcgctttctcaaagtttcatgttttacgagagaaagggtatctttctttacaagagactaaggcagactcaccggttccggagcttccgtatcttagaatgaaggatcttccatggttccagacagaagatccaagatcaggggataagttacagataggtgtgatgaagtcactaaagtcttcctcaggaatcatattcaaagccattgaagatcttgaaacagatcagcttgatgaagcccgcatagaattcccagttccactcttctgtattggaccctttcacaggtacgtttcagcttcatccagtagcttacttgcacacgacatgacttgtctctcctggttagacaagcaagcaacaaattccgtaatctacgcaagtcttggaagcattgcttcgatcgatgaatctgaattcttggagattgcttggggtctaagaaacagcaaccaaccttttctatgggtggttagacccggtttaatccacgggaaagaatggatcgagattctgcctaaagggttcatcaaaaatctcgagggccggtgtaaaatagtgaaatgggcacctcagcctgaagttttagctcaccgtgcaacaggcggattcttaacacattgtggatggaactcaacacttgagggcatatgtgaagctataccaatgatatgcagaccatcttttggggaccagagggtgaatgctagatacattaacgatgtttggaagatcggattgcatttggaaaacaaggtagagagactagtgatcgaaaacgcggttagaacactaatgacgagctcggaaggggaagagatccgcaagaggattatgcccatgaaggaaactgttgaacaatgccttaagcttggaggttcatcatttcggaatctcgaaaacttaattgcttatatattgtctttctaatgcggtgttcttcttctccacatccaaatttgctttcctttgatttaatctgcattcccataataagacacattttatcattcaaaaactttaccatgtatatttgaattatc

SEQ ID NO: 11339 - protein, 454 aa, Arabidopsis thaliana
REKFTTKMETRETKPVIFLFPFPLQGHLNPMFQLANIFFNRGFSITVIHTKFNSPNSSNFPHFSFVSIPDGLSEPESYPDVIEILHDLNSKCVAPFGDCLKKLISEEPTAACVIVDALWYFTHDLTEKFNFPRIVLRTVNLSAFVAFSKFHVLREKGYLSLQETKADSPVPELPYLRMKDLPWFQTEDPRSGDKLQIGVMKSLKSSSGIIFKAIEDLETDQLDEARIEFPVPLFCIGPFHRYVSASSSSLLAHDMTCLSWLDKQATNSVIYASLGSIASIDESEFLEIAWGLRNSNQPFLWVVRPGLIHGKEWIEILPKGFIKNLEGRCKIVKWAPQPEVLAHRATGGFLTHCGWNSTLEGICEAIPMICRPSFGDQRVNARYINDVWKIGLHLENKVERLVIENAVRTLMTSSEGEEIRKRIMPMKETVEQCLKLGGSSFRNLENLIAYILSF

SEQ ID NO: 11340 - protein, 447 aa, Arabidopsis thaliana
METRETKPVIFLFPFPLQGHLNPMFQLANIFFNRGFSITVIHTKFNSPNSSNFPHFSFVSIPDGLSEPESYPDVIEILHDLNSKCVAPFGDCLKKLISEEPTAACVIVDALWYFTHDLTEKFNFPRIVLRTVNLSAFVAFSKFHVLREKGYLSLQETKADSPVPELPYLRMKDLPWFQTEDPRSGDKLQIGVMKSLKSSSGIIFKAIEDLETDQLDEARIEFPVPLFCIGPFHRYVSASSSSLLAHDMTCLSWLDKQATNSVIYASLGSIASIDESEFLEIAWGLRNSNQPFLWVVRPGLIHGKEWIEILPKGFIKNLEGRCKIVKWAPQPEVLAHRATGGFLTHCGWNSTLEGICEAIPMICRPSFGDQRVNARYINDVWKIGLHLENKVERLVIENAVRTLMTSSEGEEIRKRIMPMKETVEQCLKLGGSSFRNLENLIAYILSF

SEQ ID NO: 11341 - protein, 424 aa, Arabidopsis thaliana
MFQLANIFFNRGFSITVIHTKFNSPNSSNFPHFSFVSIPDGLSEPESYPDVIEILHDLNSKCVAPFGDCLKKLISEEPTAACVIVDALWYFTHDLTEKFNFPRIVLRTVNLSAFVAFSKFHVLREKGYLSLQETKADSPVPELPYLRMKDLPWFQTEDPRSGDKLQIGVMKSLKSSSGIIFKAIEDLETDQLDEARIEFPVPLFCIGPFHRYVSASSSSLLAHDMTCLSWLDKQATNSVIYASLGSIASIDESEFLEIAWGLRNSNQPFLWVVRPGLIHGKEWIEILPKGFIKNLEGRCKIVKWAPQPEVLAHRATGGFLTHCGWNSTLEGICEAIPMICRPSFGDQRVNARYINDVWKIGLHLENKVERLVIENAVRTLMTSSEGEEIRKRIMPMKETVEQCLKLGGSSFRNLENLIAYILSF

SEQ ID NO: 11342 - DNA, 2330 bp, Arabidopsis thaliana
attctctttctcgtcaatctcaatcaatggcttctgaagatactctctcctcgaatcctctattgcagaattttgacttccttccgtttgactccgttgatgctcaccatgtcagacctgggattcgtgctctgttgcagcagctcgaagctgaattggagcagctagaaaaagctgtagagccttcatggccaaaactagtggagccattagagaagattattgatcggttatctgttgtttggggaatgatcaatcatcttaaggctgtcaaggacacacctgagcttcgtgctgccattgaagaagttcagccggagaaggtgaagttccagctcaggttgggacagagcaaacccatttacaatgcatttaaggctattcgagaatctccagactggaattcattgagcgaagctcgtcaacgattagttgaagcccaaataaaggaggcggttctgagtggtattgctcttgaagatgataagagggaagaatttaacaaaattgaacaggaacttgaaaaactttctcataagttttctgagaatgttttggacgctacaaagaagtttgaaaagttgataacagacaagaaagagattgaggggttgccaccatctgcacttggattgttcgcacaagcagctgtttccaagggccatgaaactgcaactgctgacactggaccatggctcattacactcgatgctcctagttatcttcccgttatgcaacatgccaaaaaccgagctctgcgcgaggaagtctaccgtgcttacttatcccgtgcctcttcgggtgatttagataatacagcaattatcgaccaaatcttgaagcttcgactggaaaaggctaagcttcttggttacagaaattatgctgaggtaagcatggccacgaaaatggctactgtggagaaagcagatgagctactagaaaagcttcgcagtgcttcatgggatccggctgttcaagacatagaagaccttaagagttttgcgaagaaccaaggtgctgcagaggctgacagtttgactcactgggacatcactttctggagtgagaggcttcgtgaatccaaatacgatattaatgaggaagaactgcgaccttacttctcattgccaaaggttatggatgcgttattcggtctagctaagacactatttggaattgatgttgtgccagcagacggtgtagcgccggtctggaacagcatgttaggttctactgtgtcaaagattcttctgggaatccaactgcttatttctactttgatccctactctcgcccttcagaaaagagagacggcgcttggatggatgaagttttttctcgtagccgagtcatggcccagaagggttcctccgttagactccctgttgctcaaatggtctgcaaccaaactccacctgttggtgacaagccaagccttatgacattccgtgaggtagagactgtgttccatgaatttggccatgctcttcagcatatgcttaccaaagaggatgaggggctagtggctggtatccggaatatcgagtgggatgcagttgaattaccgtcacagtttatggagaactggtgctaccacagggataccttaatgagcattgctaagcattatcaaacaggagaaactcttcccgagaatgtatacaagaagctactggctgcaagaacattccgtgcagggtcccttagtcttcgccagttgaagtttgctacagttgatctggagctgcacacaaaatacatgccaggtggggcagagaccatctacgaagttgatcaaagggtgtccataaaaacacaagtgatccctccacttcctgaagatagattcctctgtagcttcagtcatatatttgcaggtggttatgcagctggatactacagttacaagtgggcggaggttttgtctgcagatgcgttttcagcttttgaagatgctgggttggatgacattaaggctgtcaaagaaacaggacagagattcagaaacactatacttgctctgggaggaggaaaagctcctctaaaagtgtttgtggagttcagaggacgagaaccttccccagagcctctgctcagacacaatggactcttggctgcttctgcttgaactaattatgtcctttgctactctcacactcaactttgggtttattaatgtcattaaataaaattaaactttttccttgcttgtttcctgagcatgctttcttcaagtgttgtagtaatcatctcatagaagtgcagctggtaaaaaaaaaaaatggttcataaacgaaacgaacagagataatatttttcttcgaacc

SEQ ID NO: 11343 - protein, 480 aa, Arabidopsis thaliana
SLSRQSQSMASEDTLSSNPLLQNFDFLPFDSVDAHHVRPGIRALLQQLEAELEQLEKAVEPSWPKLVEPLEKIIDRLSVVWGMINHLKAVKDTPELRAAIEEVQPEKVKFQLRLGQSKPIYNAFKAIRESPDWNSLSEARQRLVEAQIKEAVLSGIALEDDKREEFNKIEQELEKLSHKFSENVLDATKKFEKLITDKKEIEGLPPSALGLFAQAAVSKGHETATADTGPWLITLDAPSYLPVMQHAKNRALREEVYRAYLSRASSGDLDNTAIIDQILKLRLEKAKLLGYRNYAEVSMATKMATVEKADELLEKLRSASWDPAVQDIEDLKSFAKNQGAAEADSLTHWDITFWSERLRESKYDINEEELRPYFSLPKVMDALFGLAKTLFGIDVVPADGVAPVWNSMLGSTVSKILLGIQLLISTLIPTLALQKRETALGWMKFFLVAESWPRRVPPLDSLLLKWSATKLHLLVTSQAL

SEQ ID NO: 11344 - protein, 472 aa, Arabidopsis thaliana
MASEDTLSSNPLLQNFDFLPFDSVDAHHVRPGIRALLQQLEAELEQLEKAVEPSWPKLVEPLEKIIDRLSVVWGMINHLKAVKDTPELRAAIEEVQPEKVKFQLRLGQSKPIYNAFKAIRESPDWNSLSEARQRLVEAQIKEAVLSGIALEDDKREEFNKIEQELEKLSHKFSENVLDATKKFEKLITDKKEIEGLPPSALGLFAQAAVSKGHETATADTGPWLITLDAPSYLPVMQHAKNRALREEVYRAYLSRASSGDLDNTAIIDQILKLRLEKAKLLGYRNYAEVSMATKMATVEKADELLEKLRSASWDPAVQDIEDLKSFAKNQGAAEADSLTHWDITFWSERLRESKYDINEEELRPYFSLPKVMDALFGLAKTLFGIDVVPADGVAPVWNSMLGSTVSKILLGIQLLISTLIPTLALQKRETALGWMKFFLVAESWPRRVPPLDSLLLKWSATKLHLLVTSQAL

SEQ ID NO: 11345 - protein, 398 aa, Arabidopsis thaliana
MINHLKAVKDTPELRAAIEEVQPEKVKFQLRLGQSKPIYNAFKAIRESPDWNSLSEARQRLVEAQIKEAVLSGIALEDDKREEFNKIEQELEKLSHKFSENVLDATKKFEKLITDKKEIEGLPPSALGLFAQAAVSKGHETATADTGPWLITLDAPSYLPVMQHAKNRALREEVYRAYLSRASSGDLDNTAIIDQILKLRLEKAKLLGYRNYAEVSMATKMATVEKADELLEKLRSASWDPAVQDIEDLKSFAKNQGAAEADSLTHWDITFWSERLRESKYDINEEELRPYFSLPKVMDALFGLAKTLFGIDVVPADGVAPVWNSMLGSTVSKILLGIQLLISTLIPTLALQKRETALGWMKFFLVAESWPRRVPPLDSLLLKWSATKLHLLVTSQAL

SEQ ID NO: 11346 - DNA, 2402 bp, Arabidopsis thaliana
tttcctctgtttatctaatctttctctgtttcttcctctactttttaaatttctcaaacgctcaatcatcgccggttttcgcctgcgacgtagctgcaaacccttctctcgccgcctatggtttctgcaacaccgttttgaagatcgaataccgagtcgctgatctggtcgcgaggctcacgttgcaagaaaagatcgggtttttagtgagtaaagctaacggcgtgactcgtcttgggattccaacgtatgaatggtggtctgaagcacttcacggcgtttcttacatcggacccggcacgcatttttctagccaagttcccggagctacgagtttcccgcaggttatactcaccgccgcttctttcaacgtatctctgtttcaagccattggcaaggtcgtctcaacggaagcgagggcaatgtacaacgtgggattagccggactaacgtattggtcaccgaacgtgaacatattccgagatccaagatggggaagagggcaagagactccaggagaagatccattgctcgctagtaagtatgcttcagggtacgttaagggtcttcaagagactgacggtggcgattctaaccgtctcaaagtcgccgcctgctgcaaacactataccgcttacgatgtcgataattggaaaggcgtagaacgttacagtttcaacgccgtggtgactcaacaagatatggatgatacgtatcaaccaccgttcaagagttgtgtggttgatgggaatgtggcgagtgttatgtgttcttacaatcaagttaacggcaaaccgacatgcgctgatccagatctgctctctggtgttatccgcggtgaatggaaattaaatgggtacattgtttcagattgtgattcagtagatgtcttgtataagaaccaacactatacaaagactccagctgaagctgcagccatatctatattggaggtttggatttaaactgtggttcattcttgggtcaacatacagaggaagcagttaagtcgggtttggtaaacgaggcagctatcgataaagcgatttcgaacaactttttgacccttatgcgtttaggattctttgatggaaacccaaagaaccaaatctatggcgggttaggtcctaccgacgtttgcacgtctgcgaatcaagagctagcagcagatgcagcaagacaaggcattgttctactcaagaacactggatgcttaccgctttctcctaaatcgatcaaaacactagccgtgattggaccaaacgcgaatgtcaccaaaacaatgattggaaactacgaaggcacgccgtgtaaatacacaacaccactacaaggactagccgggacggtatctacaacatatctaccaggctgctccaatgtagcttgtgctgtagcggatgtagccggcgccacgaaactagcagccactgcagatgtgtctgtgcttgtgatcggtgccgatcaatcaatcgaggcagagagccgagacagagtcgacctgcatcttcctggacagcaacaagagctggtgatccaagtggctaaagcagcaaaaggaccggtcttgctcgtcattatgtccggtggaggtttcgatattacattcgctaagaatgacccaaagatcgccggaattttgtgggttggttatcccggagaagccggtggtatcgccattgctgatatcatctttggccgttataatccaagtgggaaattaccgatgacgtggtatccacagtcgtatgtagagaaagttccgatgacaataatgaacatgagacccgataaagcaagcgggtatccgggtcggacttaccgattctacaccggagaaacagtatacgcattcggagatggactcagctacaccaaattcagtcacactttagtcaaagctccaagtctcgtttctctcggtctcgaagagaatcacgtttgccgatcatcggaatgtcaatcgctagacgcgatcggaccgcactgcgaaaacgctgtctccggcggtggatcggcgtttgaagttcatatcaaggtacgaaacggaggagatagagaagggattcacacggtgtttctattcacgacgccgccggcgattcacggatcgccgaggaagcatttggtaggattcgagaagattcgattggggaagagggaagaagcggtggttaggtttaaggtagagatatgtaaagatctgagtgtggttgatgagattgggaagaggaagattggtttgggaaagcatcttcttcatgtcggagatttaaaacattccttaagcattagaatctgattctatatttttatttgaggaagaaaaaaagaatatttaatatgcttaagcttttgcaagttggaaaagaaaagtaataaaaaaagaaattgtgaatctc

SEQ ID NO: 11347 - protein, 410 aa, Arabidopsis thaliana
MRLGFFDGNPKNQIYGGLGPTDVCTSANQELAADAARQGIVLLKNTGCLPLSPKSIKTLAVIGPNANVTKTMIGNYEGTPCKYTTPLQGLAGTVSTTYLPGCSNVACAVADVAGATKLAATADVSVLVIGADQSIEAESRDRVDLHLPGQQQELVIQVAKAAKGPVLLVIMSGGGFDITFAKNDPKIAGILWVGYPGEAGGIAIADIIFGRYNPSGKLPMTWYPQSYVEKVPMTIMNMRPDKASGYPGRTYRFYTGETVYAFGDGLSYTKFSHTLVKAPSLVSLGLEENHVCRSSECQSLDAIGPHCENAVSGGGSAFEVHIKVRNGGDREGIHTVFLFTTPPAIHGSPRKHLVGFEKIRLGKREEAVVRFKVEICKDLSVVDEIGKRKIGLGKHLLHVGDLKHSLSIRI

SEQ ID NO: 11348 - protein, 339 aa, Arabidopsis thaliana
MIGNYEGTPCKYTTPLQGLAGTVSTTYLPGCSNVACAVADVAGATKLAATADVSVLVIGADQSIEAESRDRVDLHLPGQQQELVIQVAKAAKGPVLLVIMSGGGFDITFAKNDPKIAGILWVGYPGEAGGIAIADIIFGRYNPSGKLPMTWYPQSYVEKVPMTIMNMRPDKASGYPGRTYRFYTGETVYAFGDGLSYTKFSHTLVKAPSLVSLGLEENHVCRSSECQSLDAIGPHCENAVSGGGSAFEVHIKVRNGGDREGIHTVFLFTTPPAIHGSPRKHLVGFEKIRLGKREEAVVRFKVEICKDLSVVDEIGKRKIGLGKHLLHVGDLKHSLSIRI

SEQ ID NO: 11349 - protein, 320 aa, Arabidopsis thaliana
SSVYLIFLCFFLYFLNFSNAQSSPVFACDVAANPSLAAYGFCNTVLKIEYRVADLVARLTLQEKIGFLVSKANGVTRLGIPTYEWWSEALHGVSYIGPGTHFSSQVPGATSFPQVILTAASFNVSLFQAIGKVVSTEARAMYNVGLAGLTYWSPNVNIFRDPRWGRGQETPGEDPLLASKYASGYVKGLQETDGGDSNRLKVAACCKHYTAYDVDNWKGVERYSFNAVVTQQDMDDTYQPPFKSCVVDGNVASVMCSYNQVNGKPTCADPDLLSGVIRGEWKLNGYIVSDCDSVDVLYKNQHYTKTPAEAAAISILEVWI

SEQ ID NO: 11350 - DNA, 2420 bp, Arabidopsis thaliana
gacatccagattctagcttccaattccgtaattctccgttaaaaaaccctaatttcacgaatttactctgatctgtgtagaaattagggagtgaagtgtccgcaagtgtttggcaatgtcggatgacatggttttgcatttctcctcgaattcttctaatcagtcggatcactctttacccgacaaaatcgccaagcttgaggcccgcttgactggtaagaccccttcctcggccaagccaccacaacaacaacaacagcagcagcagcaggtctctctctggtcatctgcttctgccgctgtcaaagtcgtcacttccacaccgccgggattgtccgaaacctctatcagtgattcagacgacgagaatactggagatttcctaatccgagcaaatacaaaaaagcgccagaaagttcaagaatctaacaacttcagtgttgttgatcatgttgagccacaagaggcagcatatgatggaaggaaaaatgatgctgagtccaagacaggcctagatgtaagtaagaagaaacaaggtcgaggtcgggcttcgtcaacaggtagagggcgtggttctaaaactaataacgatgtgacaaaatctcagtttgtggttgcaccagtatcagctgccagtcaactggatgcctctgatcaaaaggattttaggcctgatggacagctcaggaatggtgaatgctctctccaggatgaagacttaaaatctttgcgtgcaaaaatcgctatgctggaggaggaattgcgtaaatctcgacaagattcttctgagtatcaccaccttgtcaggaatcttgagaatgaggtaaaagatctgaaagatcaggaacaacaagggaagcaaaagacaactaaagtaatctaggaccttctcatatctgtttccaaaactgagagacaagaagcaagaacgaaagtcagaaatgaatctttgcgattaggcagtgttggtgttctcaggacaggaacgatcatagctgagacatgggaggacggacaaatgttaaaagatctgaatgctcaacttagacaattgctggaaaccaaggaggctattgagagacaaagaaagttacttaagaaacgacaaaatggtgataagaatgacggaactgacacagaatcaggagcacaggaggaagatatcatccctgacgaggtttacaagtctcgtcttactagtattaagcgggaagaggaagctgttttgcgtgagagagaaaggtacacattagagaaggggctacttatgagggagatgaaacgcatacgagatgaagatggttctcgtttcaaccatttcccagttttgaatagccgctatgctcttctaaatcttcttggtaaaggcggatttagtgaagtctataaggcatatgatttggtggaccatagatatgttgcgtgcaagcttcatggtttaaatgctcagtggagtgaagaaaagaagcaaagttacatccgccatgccaacagggaatgtgagatccataaaagtcttgtgcatcaccacattgttcggctttgggataaatttcatatcgacatgcatacattctgcaccgttctggaatattgtagtgggaaagaccttgatgctgtattaaaggcaacatctaatcttcctgagaaagaagcaaggattatcattgtgcaaatagttcaaggccttgtatatctgaacaaaaagtcacagaagataatccactatgatctgaagcctggtaatgttctctttgatgagtttggagtagcaaaagtaactgattttggtctaagcaagatagtggaggacaatgttggttctcaaggaatggagcttacatcacagggagctggaacatactggtacttgcccccagaatgctttgagcttaacaaaactcctatgatctcatcaaaggttgatgtatggtcagttggtgttttgttttaccaaatgctgtttggaaagcgaccttttggacatgaccaaagccaagaacggatactaagagaagacacaatcattaaagccaaaaaggttgagttcccagtaacaagacctgccatctcaaatgaagcgaaggatttgattcgacggtgtctaacatataaccaagaagataggccggatgttctaacaatggcacaggatccatatcttgcctactctaagaagtgagattgtgtagtcttcaaaaacaaaccagagatgctaaaagaccagatcgtagaatattttttggtatagcttataaagtttctgttttgtttgtctaaatattttatctcccggccccttgaaccatattaatttcgggtgaagttaatgtgtcttgtcttccttttattatgtaacatgttatgtatatttttcatgttttataatagaagaaagctgaaagttggaaacaggcccc

SEQ ID NO: 11351 - protein, 387 aa, Arabidopsis thaliana
MLKDLNAQLRQLLETKEAIERQRKLLKKRQNGDKNDGTDTESGAQEEDIIPDEVYKSRLTSIKREEEAVLRERERYTLEKGLLMREMKRIRDEDGSRFNHFPVLNSRYALLNLLGKGGFSEVYKAYDLVDHRYVACKLHGLNAQWSEEKKQSYIRHANRECEIHKSLVHHHIVRLWDKFHIDMHTFCTVLEYCSGKDLDAVLKATSNLPEKEARIIIVQIVQGLVYLNKKSQKIIHYDLKPGNVLFDEFGVAKVTDFGLSKIVEDNVGSQGMELTSQGAGTYWYLPPECFELNKTPMISSKVDVWSVGVLFYQMLFGKRPFGHDQSQERILREDTIIKAKKVEFPVTRPAISNEAKDLIRRCLTYNQEDRPDVLTMAQDPYLAYSKK

SEQ ID NO: 11352 - protein, 304 aa, Arabidopsis thaliana
MREMKRIRDEDGSRFNHFPVLNSRYALLNLLGKGGFSEVYKAYDLVDHRYVACKLHGLNAQWSEEKKQSYIRHANRECEIHKSLVHHHIVRLWDKFHIDMHTFCTVLEYCSGKDLDAVLKATSNLPEKEARIIIVQIVQGLVYLNKKSQKIIHYDLKPGNVLFDEFGVAKVTDFGLSKIVEDNVGSQGMELTSQGAGTYWYLPPECFELNKTPMISSKVDVWSVGVLFYQMLFGKRPFGHDQSQERILREDTIIKAKKVEFPVTRPAISNEAKDLIRRCLTYNQEDRPDVLTMAQDPYLAYSKK

SEQ ID NO: 11353 - protein, 301 aa, Arabidopsis thaliana
MKRIRDEDGSRFNHFPVLNSRYALLNLLGKGGFSEVYKAYDLVDHRYVACKLHGLNAQWSEEKKQSYIRHANRECEIHKSLVHHHIVRLWDKFHIDMHTFCTVLEYCSGKDLDAVLKATSNLPEKEARIIIVQIVQGLVYLNKKSQKIIHYDLKPGNVLFDEFGVAKVTDFGLSKIVEDNVGSQGMELTSQGAGTYWYLPPECFELNKTPMISSKVDVWSVGVLFYQMLFGKRPFGHDQSQERILREDTIIKAKKVEFPVTRPAISNEAKDLIRRCLTYNQEDRPDVLTMAQDPYLAYSKK

SEQ ID NO: 11354 - DNA, 2894 bp, Arabidopsis thaliana
gaattacttttatccattttctctgtatatatatagaaagcaaaagaaagcattttcatcacctaccatcctctgttttcatttcctctgtttttcaaacttcctctgttctctcatggctccacttcacgaatctctgtcatcaatcaacgatgtaatcgaatccaaacctctttttgttccaataactaagccaatcttgcagccaaactcatttaacctatccgaagggtctctctgtgccaaagactctactccaatcctctttgatgttcctcaaaacgtaactttcacaccattctcatctcactccatatccactgatgctcctctcccaatcctcctccgagttcaagccaacgctcacaaaggagggtttctcggattcaccaaagaatcaccctctgatcgtctcacaaactccttgggaagattcgaagacagagagtttctcagtcttttccggttcaaaatgtggtggtcgacggcttggatcgggaaatcagggtcggatcttcaagccgagactcagtgggtgatgctaaagattcctgagatcgattcctacgtggccatcataccaaccattgaaggagcttttagggcttcacttactcctggtgagaaaggtaatgtcttgatttgtgcagagagtggctcaactaaagtaaaagagtcatctttcaaatccattgcctacattcacatttgtgacaacccctataacctcatgaaagaggcttttagtgcacttcgtgttcatatgaacactttcaagcatctagaagagaagaagcttccgaaaatcgtcgataagtttggatggtgcacttgggatgcttgctacttgaccgttgatcctgcaaccatttggactggagttaaggagtttgaagatggtggggtgtgtccgaagtttgtcatcattgatgatggatggcaaagtattaactttgatggtgatgagctagacaaagacgctgagaatcttgttcttggtggggagcaaatgactgcgaggcttaccagcttcaaggagtgtaagaagtttagaaactataaaggtggatcctttataacatctgatgcatctcacttcaatcctctcaagccgaagatgcttatctacaaagcgaccgagcgaattcaggcgattatattgagacggaagttggttaaggagtctggggaacaagatctgaccgaacttgatgaaaagatcaagattttgagtgaagaactcaatgcaatgtttgatgaggttgagaaagaagagtctttgggttctgatgatgtttctggctcaggtatggcggctttcacaaaggatttgaggttaaggtttaagagtttagatgatatatatgtgtggcatgctctttgtggtgcttggaatggtgttaggcctgaaaccatgatggatttgaaggccaaggttgctccttttgagctttcacctagtctaggcgctacgatggctgatctcgcagtcgacaaggttgtagaagctgggattggtcttgttcatccttctaaagctcatgaattctacgactcgatgcactcttatcttgctagtgttggtgttacaggagccaagattgatgttttccaaaccttggagtcactagcagaagaacatggaggacgagtggagcttgctaaagcttactacgatggtctgaccgaatccatgatcaagaattttaatggaactgatgtcattgcgagtatgcaacagtgcaatgagttcttcttccttgccacaaagcaaatctctattggcagagttggtgatgatttttggtgacaagacccatatggtgacccacaaggagtatattggctacaaggagttcacatgattcactgttcttacaacagtatttggatgggtcaaatgattcaaccagattgggacatgttccaatcagaccatgtctgtgccgagtaccacgccgcatctcgagccatttgcggtgggcctgtctatctcaatgaccatcttggcaaagcctcacataactttgatctcatcaagaaacttgctttctttgatggtaccatcccaaggtgtgtccactatgctcttcccactagagattcgctcttcaagaaccctttgtttgacaaagagtcaatcctcaagatcttcaacttcaacaagtttggaggagtgattggaacatttaactgtcaaggtgctgggtggagcccagaggagcataggttcaaaggatacaaagaatgttacacgacagtttcgggaacagttcatgtctcggacattgaatgggatcagaatccagaagctgcaggctctcaggtgacctacactggagattacttggtttacaagcaacaatctgaagaaatccttttcatgaactcgaaatcagaagcgatgaagataacccttgagccatccgcgtttgacctgttgagtttcgtgccagtcacggaacttgtaagttcaggggttagattcgcacctctagggttgatcaacatgttcaactgcgtcggaacagtccaagacatgaaggttactggtgataacagcataagagtggacgtgaaaggcgaaggaagattcatggcgtattcgagttcagctccggtgaagtgttacttgaacgacaaggaagctgagtttaagtgggaagaagaaactggtaaactcagtttctttgttccttgggttgaagaatctggtggcatctctcatctgtctttcaccttttaataatttgtttggatttttgtttttcgttttccttttcttgcattttgttatcagaagttgggttgtcaatttctgtttggtgttttacttttcaatttggagacttctcaaacaaattttaatatcaaatggattttctttgtcggtt

SEQ ID NO: 11355 - protein, 602 aa, Arabidopsis thaliana
NYFYPFSLYIYRKQKKAFSSPTILCFHFLCFSNFLCSLMAPLHESLSSINDVIESKPLFVPITKPILQPNSFNLSEGSLCAKDSTPILFDVPQNVTFTPFSSHSISTDAPLPILLRVQANAHKGGFLGFTKESPSDRLTNSLGRFEDREFLSLFRFKMWWSTAWIGKSGSDLQAETQWVMLKIPEIDSYVAIIPTIEGAFRASLTPGEKGNVLICAESGSTKVKESSFKSIAYIHICDNPYNLMKEAFSALRVHMNTFKHLEEKKLPKIVDKFGWCTWDACYLTVDPATIWTGVKEFEDGGVCPKFVIIDDGWQSINFDGDELDKDAENLVLGGEQMTARLTSFKECKKFRNYKGGSFITSDASHFNPLKPKMLIYKATERIQAIILRRKLVKESGEQDLTELDEKIKILSEELNAMFDEVEKEESLGSDDVSGSGMAAFTKDLRLRFKSLDDIYVWHALCGAWNGVRPETMMDLKAKVAPFELSPSLGATMADLAVDKVVEAGIGLVHPSKAHEFYDSMHSYLASVGVTGAKIDVFQTLESLAEEHGGRVELAKAYYDGLTESMIKNFNGTDVIASMQQCNEFFFLATKQISIGRVGDDFW

SEQ ID NO: 11356 - protein, 564 aa, Arabidopsis thaliana
MAPLHESLSSINDVIESKPLFVPITKPILQPNSFNLSEGSLCAKDSTPILFDVPQNVTFTPFSSHSISTDAPLPILLRVQANAHKGGFLGFTKESPSDRLTNSLGRFEDREFLSLFRFKMWWSTAWIGKSGSDLQAETQWVMLKIPEIDSYVAIIPTIEGAFRASLTPGEKGNVLICAESGSTKVKESSFKSIAYIHICDNPYNLMKEAFSALRVHMNTFKHLEEKKLPKIVDKFGWCTWDACYLTVDPATIWTGVKEFEDGGVCPKFVIIDDGWQSINFDGDELDKDAENLVLGGEQMTARLTSFKECKKFRNYKGGSFITSDASHFNPLKPKMLIYKATERIQAIILRRKLVKESGEQDLTELDEKIKILSEELNAMFDEVEKEESLGSDDVSGSGMAAFTKDLRLRFKSLDDIYVWHALCGAWNGVRPETMMDLKAKVAPFELSPSLGATMADLAVDKVVEAGIGLVHPSKAHEFYDSMHSYLASVGVTGAKIDVFQTLESLAEEHGGRVELAKAYYDGLTESMIKNFNGTDVIASMQQCNEFFFLATKQISIGRVGDDFW

SEQ ID NO: 11357 - protein, 445 aa, Arabidopsis thaliana
MWWSTAWIGKSGSDLQAETQWVMLKIPEIDSYVAIIPTIEGAFRASLTPGEKGNVLICAESGSTKVKESSFKSIAYIHICDNPYNLMKEAFSALRVHMNTFKHLEEKKLPKIVDKFGWCTWDACYLTVDPATIWTGVKEFEDGGVCPKFVIIDDGWQSINFDGDELDKDAENLVLGGEQMTARLTSFKECKKFRNYKGGSFITSDASHFNPLKPKMLIYKATERIQAIILRRKLVKESGEQDLTELDEKIKILSEELNAMFDEVEKEESLGSDDVSGSGMAAFTKDLRLRFKSLDDIYVWHALCGAWNGVRPETMMDLKAKVAPFELSPSLGATMADLAVDKVVEAGIGLVHPSKAHEFYDSMHSYLASVGVTGAKIDVFQTLESLAEEHGGRVELAKAYYDGLTESMIKNFNGTDVIASMQQCNEFFFLATKQISIGRVGDDFW

SEQ ID NO: 11358 - DNA, 1490 bp, Arabidopsis thaliana
gatctctgtctctctctctccgtatccaaaaagagaaagaaaaaaaatctcaaatcaaagaccaagccagtcaccggaaaatgctgacgtgtatagctcgttcgaagcgagcaggcgatgaatcctccggtcaaccagacgatccagattctaaaaacgccaaatctctaacatctcagctcaaagacatggctctgaaagcatcaggagcttaccggcattgcacgccgtgtacggcggcgcaaggtcagggacaaggacaaggcccgatcaagaacaatccgtcgtcgtcggcggtaaagtcggatttcgaatcggatcaacggtttaaaatgctttacggaagatcaaacagttcgattacagctacggcggcggcggcggcgacgcaacaacagcctagggtttggggaaaggagatggaagcgagacttaaaggaatatcgagcggcgaagcgactccgaaatcggcgagtgggagaaaccgggtcgacccgattgtgttcgtggaggagaaagaacctaaagaatgggttgctcaggttgagcccggagttctcataaccttcgtttctcttcccggcggtggtaatgatctcaagcggatacgtttcagccgagacatgttcaacaagttacaagctcaacgatggtgggcagataactatgacaaagtaatggaactttacaatgttcaaaaactaagccgccaagctttcccgcttcccacaccgcctagatccgaagacgagaatgcaaaagtggagtaccatccagaagacactcctgcaacaccgcctctaaacaaagaacggttgcctcgtactatccatcgtccacctggattggctgcttactcatcctcagattcactcgaccataattcaatgcagagccagcagttctatgactctggtctactcaactcaactcctaaagtttcaagcatcagtgtagccaagacagaaacttcttccatagatgcttccataagaagcagctcgtcgagagatgcagaccggtcagaggaaatgtcggtaagcaatgcgagtgatgttgacaacgaatgggtggagcaagatgagcctggcgtttatatcaccattaaagttttaccaggtgggaaaagagagcttcgaagagtcagattcagccgagagagattcggggagatgcacgcgagattatggtgggaagagaacagggcaaggatacatgaacaatacttgtgatcataaatctaagagttttgttttttcctcattctctcggtatacagtctttttttccagctcaagtaaattcttccacaggtactcattgtgcctcccagaaatctcaaaatatcaattgtgggatatgttttaaggaggtttcttattttcttccttcaaaaaaattgagaaagcttggaaaagataagatgttgtctcctttgctcaatatgtgtatcctttagttctttaaaaaaaatacgttcttcaaattag

SEQ ID NO: 11359 - protein, 409 aa, Arabidopsis thaliana
SLSLSLRIQKEKEKKSQIKDQASHRKMLTCIARSKRAGDESSGQPDDPDSKNAKSLTSQLKDMALKASGAYRHCTPCTAAQGQGQGQGPIKNNPSSSAVKSDFESDQRFKMLYGRSNSSITATAAAAATQQQPRVWGKEMEARLKGISSGEATPKSASGRNRVDPIVFVEEKEPKEWVAQVEPGVLITFVSLPGGGNDLKRIRFSRDMFNKLQAQRWWADNYDKVMELYNVQKLSRQAFPLPTPPRSEDENAKVEYHPEDTPATPPLNKERLPRTIHRPPGLAAYSSSDSLDHNSMQSQQFYDSGLLNSTPKVSSISVAKTETSSIDASIRSSSSRDADRSEEMSVSNASDVDNEWVEQDEPGVYITIKVLPGGKRELRRVRFSRERFGEMHARLWWEENRARIHEQYL

SEQ ID NO: 11360 - protein, 383 aa, Arabidopsis thaliana
MLTCIARSKRAGDESSGQPDDPDSKNAKSLTSQLKDMALKASGAYRHCTPCTAAQGQGQGQGPIKNNPSSSAVKSDFESDQRFKMLYGRSNSSITATAAAAATQQQPRVWGKEMEARLKGISSGEATPKSASGRNRVDPIVFVEEKEPKEWVAQVEPGVLITFVSLPGGGNDLKRIRFSRDMFNKLQAQRWWADNYDKVMELYNVQKLSRQAFPLPTPPRSEDENAKVEYHPEDTPATPPLNKERLPRTIHRPPGLAAYSSSDSLDHNSMQSQQFYDSGLLNSTPKVSSISVAKTETSSIDASIRSSSSRDADRSEEMSVSNASDVDNEWVEQDEPGVYITIKVLPGGKRELRRVRFSRERFGEMHARLWWEENRARIHEQYL

SEQ ID NO: 11361 - protein, 347 aa, Arabidopsis thaliana
MALKASGAYRHCTPCTAAQGQGQGQGPIKNNPSSSAVKSDFESDQRFKMLYGRSNSSITATAAAAATQQQPRVWGKEMEARLKGISSGEATPKSASGRNRVDPIVFVEEKEPKEWVAQVEPGVLITFVSLPGGGNDLKRIRFSRDMFNKLQAQRWWADNYDKVMELYNVQKLSRQAFPLPTPPRSEDENAKVEYHPEDTPATPPLNKERLPRTIHRPPGLAAYSSSDSLDHNSMQSQQFYDSGLLNSTPKVSSISVAKTETSSIDASIRSSSSRDADRSEEMSVSNASDVDNEWVEQDEPGVYITIKVLPGGKRELRRVRFSRERFGEMHARLWWEENRARIHEQYL

SEQ ID NO: 11362 - DNA, 2687 bp, Arabidopsis thaliana
agcttctctgattcgtctttctcctctgtctctgactcttcgcgaaaaccctaattagctttgtggtcttgttgttttcgccatggaagacgacggcaagagcagccccaagttaccgatccctggaaagagaaatatactaatcaccagtgctttgccttacgtcaacaacgttcctcatctcggaaacatcatcggatgtgttttgagcgctgatgtgtatgctagatactgtcgtctccgtggctataatgcgatttacatatgtggaaccgatgaatatgggactgcaactgagaccaaagctttggaggagaattgcacccacaaggaaatctgtgacaagtaccatgccattcataaagaagtttatgactggtttggtataagttttgacaagtttgggcgaacttcaactccagaacagactgaggtgtgccaagcaattttcaacaagttgtgggaaaacaagtggctttcagagaacaccatgcagcagctttactgcgatacatgcaagaagttcttagcggaccggcttgttgagggttcttgtccgttcgaaggatgtaattatgattctgctcgtggagatcagtgcgaaaaatgtggaaagctcctgaatcctactgaacttaaagatccgaagtgcaaggtctgtcaaaacacaccccgaattcgcgacacagaccacctgtttattgagcttccgttactgaaagataggttggaagcgtatattaaaaagacctctgttactggatcttggagtcaaaatgctattcaaacgacaaatgcatggcttagggatgggcttagacagagatgcattacgagggatcttaagtggggagtgcctgtcccacatgagaaatacaaggacaaagtcttctatgtttggtttgatgctcctattggatacgtctcaataacgtcttgctatacatctgaatgggagaagtggtggaagaatcctgagaatgtggagctttatcagtttatggggaaagacaatgtgccatttcacactgtgatgtttccctctacccagcttggaactgaggaaaattggacactcatgaagacaatcagtgtgactgaatatttaaactatgaagacggaaagttctccaagagtaaaggtgttggagtgtttggtaatgatgtaaaagatacaaatatacctgtcgaagtgtggagatactacttgctgaccaacaggcctgaggtgtctgacacatcgttttcatggactgatttgcaagcaaaactgaatggcgagttgctgagcaacctaggcaactttgttaatcgagttctgagttttatagcaaagcctgataatgcaggttacgggtctgtcattcctgatgctcatgatgctgaatctcattctttaacaaaatcactggcggaaaaggttgaaaagtttgtggcagagtatgttgaagccatggaaaaggttaagctcaagcagggactgaaaactgctatgctgatttcaagcgaagggaactattacttgcaggcaagccaattttggaaactttacaaggaagataaacctttgtgtgcagttgttataagaactgctgctggtttagtacaccttcttgctcaattgttagaccctttcatgccatccttttcttctgaggtatttaaacagttaaatttgcctccacaattttctctctccgacgagaggggagaggtattactagcaagtagaccatgggatattctgcctcctagccacaggataggcacccctcaacctttgttcaaggagttggaaaacgacgaagtggcacggtacagagaaaagtttgctggaagtcagtgtgatagacgtgctagggatgaagcagcaaatttggcggatcaacttaataaaacaaaactttcagatgccaagaaacaaaaggcatcatcaaaaggcggaggaaaacccaaacctcaaccagctgctgatcgtgaaataactatggcaagacttgatatccgagttggtaaaattgtgaaggctgagaaacatcccaaggcagatgcattgtatgtagaagaaattgatgttgggggtggtgaaattcgcactgttgtcagtggactggtcaaatatatacctcttgaggaaatgcagaatcgtatggtttgtgttctttgcaacttgaaaccggcgaaaatgagggatattgtgtcacaagcaatggttcttgcagcttccagtagtgatggaagcaaggtggagttagttgagccccctaaaactgctaatattggagagcgagttacatttcccgggtttgaaggcgagccagacgatgtcttaaacccaaagaagaaagtatgggagacgcttttggttgatctaaacacaaaagagaatctagttgcttgctacaaagatgtgcccttcactacatctgcaggtgtatgcaaagtttcatccatcagcaatggcacgatccggtaaaagcttacttgagccataagcaaactaatattctccatttctatctttctctgtaagagaaacgaaattcggagattttcatttgaaaatttgattctaattacaaacatgttcttgtaaacttaaagcttggtacaattgtggttattgattgatgttgtgagaaacattcagcttttttaaattgggcccagacgcaaagcaaccacac

SEQ ID NO: 11363 - protein, 797 aa, Arabidopsis thaliana
MEDDGKSSPKLPIPGKRNILITSALPYVNNVPHLGNIIGCVLSADVYARYCRLRGYNAIYICGTDEYGTATETKALEENCTHKEICDKYHAIHKEVYDWFGISFDKFGRTSTPEQTEVCQAIFNKLWENKWLSENTMQQLYCDTCKKFLADRLVEGSCPFEGCNYDSARGDQCEKCGKLLNPTELKDPKCKVCQNTPRIRDTDHLFIELPLLKDRLEAYIKKTSVTGSWSQNAIQTTNAWLRDGLRQRCITRDLKWGVPVPHEKYKDKVFYVWFDAPIGYVSITSCYTSEWEKWWKNPENVELYQFMGKDNVPFHTVMFPSTQLGTEENWTLMKTISVTEYLNYEDGKFSKSKGVGVFGNDVKDTNIPVEVWRYYLLTNRPEVSDTSFSWTDLQAKLNGELLSNLGNFVNRVLSFIAKPDNAGYGSVIPDAHDAESHSLTKSLAEKVEKFVAEYVEAMEKVKLKQGLKTAMLISSEGNYYLQASQFWKLYKEDKPLCAVVIRTAAGLVHLLAQLLDPFMPSFSSEVFKQLNLPPQFSLSDERGEVLLASRPWDILPPSHRIGTPQPLFKELENDEVARYREKFAGSQCDRRARDEAANLADQLNKTKLSDAKKQKASSKGGGKPKPQPAADREITMARLDIRVGKIVKAEKHPKADALYVEEIDVGGGEIRTVVSGLVKYIPLEEMQNRMVCVLCNLKPAKMRDIVSQAMVLAASSSDGSKVELVEPPKTANIGERVTFPGFEGEPDDVLNPKKKVWETLLVDLNTKENLVACYKDVPFTTSAGVCKVSSISNGTIR

SEQ ID NO: 11364 - protein, 661 aa, Arabidopsis thaliana
MQQLYCDTCKKFLADRLVEGSCPFEGCNYDSARGDQCEKCGKLLNPTELKDPKCKVCQNTPRIRDTDHLFIELPLLKDRLEAYIKKTSVTGSWSQNAIQTTNAWLRDGLRQRCITRDLKWGVPVPHEKYKDKVFYVWFDAPIGYVSITSCYTSEWEKWWKNPENVELYQFMGKDNVPFHTVMFPSTQLGTEENWTLMKTISVTEYLNYEDGKFSKSKGVGVFGNDVKDTNIPVEVWRYYLLTNRPEVSDTSFSWTDLQAKLNGELLSNLGNFVNRVLSFIAKPDNAGYGSVIPDAHDAESHSLTKSLAEKVEKFVAEYVEAMEKVKLKQGLKTAMLISSEGNYYLQASQFWKLYKEDKPLCAVVIRTAAGLVHLLAQLLDPFMPSFSSEVFKQLNLPPQFSLSDERGEVLLASRPWDILPPSHRIGTPQPLFKELENDEVARYREKFAGSQCDRRARDEAANLADQLNKTKLSDAKKQKASSKGGGKPKPQPAADREITMARLDIRVGKIVKAEKHPKADALYVEEIDVGGGEIRTVVSGLVKYIPLEEMQNRMVCVLCNLKPAKMRDIVSQAMVLAASSSDGSKVELVEPPKTANIGERVTFPGFEGEPDDVLNPKKKVWETLLVDLNTKENLVACYKDVPFTTSAGVCKVSSISNGTIR

SEQ ID NO: 11365 - protein, 491 aa, Arabidopsis thaliana
MGKDNVPFHTVMFPSTQLGTEENWTLMKTISVTEYLNYEDGKFSKSKGVGVFGNDVKDTNIPVEVWRYYLLTNRPEVSDTSFSWTDLQAKLNGELLSNLGNFVNRVLSFIAKPDNAGYGSVIPDAHDAESHSLTKSLAEKVEKFVAEYVEAMEKVKLKQGLKTAMLISSEGNYYLQASQFWKLYKEDKPLCAVVIRTAAGLVHLLAQLLDPFMPSFSSEVFKQLNLPPQFSLSDERGEVLLASRPWDILPPSHRIGTPQPLFKELENDEVARYREKFAGSQCDRRARDEAANLADQLNKTKLSDAKKQKASSKGGGKPKPQPAADREITMARLDIRVGKIVKAEKHPKADALYVEEIDVGGGEIRTVVSGLVKYIPLEEMQNRMVCVLCNLKPAKMRDIVSQAMVLAASSSDGSKVELVEPPKTANIGERVTFPGFEGEPDDVLNPKKKVWETLLVDLNTKENLVACYKDVPFTTSAGVCKVSSISNGTIR

SEQ ID NO: 11366 - DNA, 2517 bp, Arabidopsis thaliana
agaattatcgggagaacttcagacatgctctgctccgaccgaatctcatcatctatcaatttcatgtgacttattaaattgttctgtattctaagaagtggttccgtagaagcggagcaatgccgatttctatggaacttccagttttctctactctccgagtaccattgttctctcgtttagctttacttcctacttttggagttccgttttcgtcccttggtgctacgacgcgattgaactgtacatctcgaaaggcgcgtcggatttgcgtgatgtgcttagtgagggattctgctccgatagagacgtgcgagagagctggagaagatgggtctgacgagttcattgaggttcttgtcatcggtagtcgcaaggagtctatcatggattcatgcttggattctccttttccttctcttcctctccgattttggagtattagcaaggacagctctggaggtttagtgttacagcagaggctcaatcaccaagataatgcctcgaagaccatgaatccaattgagctgttacagtcacgtccaagggccttcatccttgtttgtacttttctcgcctaacattgtggctagtgctggatatggttctgaccaggttgaagctattaatattcttagtgcagtaagatctgggggtaacttagctgttgctgtgctattaaagcctttcagctttgaaggccgaaagcgtctagaagaggttaacgagttggctagaaaactgcagcaacacaccaatttctgtatagatatcgacatagaggttttactacagaaggatttggtaactttggacgaggcgctgagaaatgcaaacaatgctgtgtctatggcaataaatgcagcttccgctctgataagtgggatgcatggaaacttcatcgatgtgatgcataaagatcttaaagaacttgaaggttcagaagttaaaacgattctagaaagttacaaagaggcaaaggttggttttggagttggtcacaaccttaagacttcgatattacgagctatatatgactgcccattctttcgacctggtctaaaggatctaaacgctattatatgcattgtggctagttcggtacctctccagaagaaagacgtgaaaacaattcttcgtactttccgtcaaactatggagtacactggagatattatagtatctactgttcatgagcctgatctggagcctaaagtgcgtgtcacaacgttttttattctaagttcttcagaagaggaaacatccaacaaaggcaacattttttctggtcttgttccttttgttttaaatatcttcacgagatatcgttcacagctccaaaaagaaacaaatattggacttggagagacgccagtttcaattaaagattcagcagactctactgacataaaaacttccaatcagaatgttgaggaatttgaaattgactctgaggacctcctggaagtttctgagaacggtgatgatagtgaatacccattaaaagagggggaaccatccagaaacagtcgtctggatcttaaagatgaaaatgtagaagattttggtgcaatccagagggagcctattgccaattggagtatggatcagggatatcagattgagcagaaatggcaagctgattctggagacactgcagtgcttagcctgggaattgtcaaccttcctgttggtgtgagaccttcgaagaaattgaacagtaatctcagtgttgccagtcaactctctaggaaggctgattccagagaagaatcatttttcaaccctaatggctcgacaaaagactctagtgatactgcatctaccctgctatctgagaaatatgctgattttacaaagcaaagaaatctatccgctcgagcatcgtctatgctggaagctgaacgagattcatcaaaaagatggagtcctattcttgagatgcagtacagaggaggacttttcaagggaagatgccaaggaggccttcccgaaggaaagggtcgtttggtacttggagatggaagcatatatgatggaatgtggcacaacggtaaaagatctggtctcggaacattctacttcaagaatggagacgtgttccaaggcacatggagagaagatttaatacacggaaagggttggttttatttgcacaaaggtgatcgatggtttgcaaatttctggaaaggaaaagccagtggcgaaggccggttctattcaaagtccggtgagatattctttggacatttcaaagatggttggcgccacggacaattcctctgtatagatttggatggaacaagatactctgaaacttgggacgacggtgttctcattgaccggaaacaagtggacgccggagattgatatcatccggcaatgctgtaactatatagtgcatatcgattttgtcttttctcaggttattattatgacaaaacgtgattcataaaaagtattcctgtgacttaaaaactccttttctttgattagatgtttaaaagaaacgaatta

SEQ ID NO: 11367 - protein, 506 aa, Arabidopsis thaliana
MAINAASALISGMHGNFIDVMHKDLKELEGSEVKTILESYKEAKVGFGVGHNLKTSILRAIYDCPFFRPGLKDLNAIICIVASSVPLQKKDVKTILRTFRQTMEYTGDIIVSTVHEPDLEPKVRVTTFFILSSSEEETSNKGNIFSGLVPFVLNIFTRYRSQLQKETNIGLGETPVSIKDSADSTDIKTSNQNVEEFEIDSEDLLEVSENGDDSEYPLKEGEPSRNSRLDLKDENVEDFGAIQREPIANWSMDQGYQIEQKWQADSGDTAVLSLGIVNLPVGVRPSKKLNSNLSVASQLSRKADSREESFFNPNGSTKDSSDTASTLLSEKYADFTKQRNLSARASSMLEAERDSSKRWSPILEMQYRGGLFKGRCQGGLPEGKGRLVLGDGSIYDGMWHNGKRSGLGTFYFKNGDVFQGTWREDLIHGKGWFYLHKGDRWFANFWKGKASGEGRFYSKSGEIFFGHFKDGWRHGQFLCIDLDGTRYSETWDDGVLIDRKQVDAGD

SEQ ID NO: 11368 - protein, 494 aa, Arabidopsis thaliana
MHGNFIDVMHKDLKELEGSEVKTILESYKEAKVGFGVGHNLKTSILRAIYDCPFFRPGLKDLNAIICIVASSVPLQKKDVKTILRTFRQTMEYTGDIIVSTVHEPDLEPKVRVTTFFILSSSEEETSNKGNIFSGLVPFVLNIFTRYRSQLQKETNIGLGETPVSIKDSADSTDIKTSNQNVEEFEIDSEDLLEVSENGDDSEYPLKEGEPSRNSRLDLKDENVEDFGAIQREPIANWSMDQGYQIEQKWQADSGDTAVLSLGIVNLPVGVRPSKKLNSNLSVASQLSRKADSREESFFNPNGSTKDSSDTASTLLSEKYADFTKQRNLSARASSMLEAERDSSKRWSPILEMQYRGGLFKGRCQGGLPEGKGRLVLGDGSIYDGMWHNGKRSGLGTFYFKNGDVFQGTWREDLIHGKGWFYLHKGDRWFANFWKGKASGEGRFYSKSGEIFFGHFKDGWRHGQFLCIDLDGTRYSETWDDGVLIDRKQVDAGD

SEQ ID NO: 11369 - protein, 486 aa, Arabidopsis thaliana
MHKDLKELEGSEVKTILESYKEAKVGFGVGHNLKTSILRAIYDCPFFRPGLKDLNAIICIVASSVPLQKKDVKTILRTFRQTMEYTGDIIVSTVHEPDLEPKVRVTTFFILSSSEEETSNKGNIFSGLVPFVLNIFTRYRSQLQKETNIGLGETPVSIKDSADSTDIKTSNQNVEEFEIDSEDLLEVSENGDDSEYPLKEGEPSRNSRLDLKDENVEDFGAIQREPIANWSMDQGYQIEQKWQADSGDTAVLSLGIVNLPVGVRPSKKLNSNLSVASQLSRKADSREESFFNPNGSTKDSSDTASTLLSEKYADFTKQRNLSARASSMLEAERDSSKRWSPILEMQYRGGLFKGRCQGGLPEGKGRLVLGDGSIYDGMWHNGKRSGLGTFYFKNGDVFQGTWREDLIHGKGWFYLHKGDRWFANFWKGKASGEGRFYSKSGEIFFGHFKDGWRHGQFLCIDLDGTRYSETWDDGVLIDRKQVDAGD

SEQ ID NO: 11370 - DNA, 1645 bp, Arabidopsis thaliana
gatgattctccactttccacttctttgtcttctttcttctccttctcacttacttaacccataagccatcaatcccaaacacaccacaacaatggcttcttctatcttcttcttcttcttccttatcttcctctccgtcgtctccgccgtcaaactacctctctctcccttctcccactccgaccaatcaccaaaagacccttacctctctctccgtcgtctcgctgaatcctcaatcgctagagctcataaactcaaacacggcacctcaataaaacccgacgaagatgctctctcctccaccaccaccgcatccgccaccgtcgtgaaatctcctctctctgctaaaagctacggcggatactcagtctctctcagcttcggcacaccgtcgcaaacaatcccattcgttttcgataccggaagcagtctcgtttggctaccttgtacctcaagatatctctgctccggttgcgatttctccggtttggatccgactctaatccctagatttatccccaagaactcttcctcttcgaagattatcgggtgtcagagtccaaaatgtcagtttctatacggacccaatgttcaatgcagaggatgtgacccgaatacccgaaactgcaccgtcggttgtccaccgtacattcttcaatacggattaggatcaacggctggggttttaataaccgaaaagcttgatttcccggatctaaccgtacccgatttcgtagtcggaagttcaattatctccacccgacaacccgctggtatcgctgggtttgggcgaggacccgtatcgcttccttcacaaatgaatctcaagagattctctcactgtttggtttctcgtcggtttgacgataccaacgtaaccaccgatcttgatttagataccggatcgggtcataattccgggtctaaaactccgggtctcacatacacgccgtttcggaaaaatcccaatgtctccaacaaagcttttctcgagtattattacctcaatctccggcgaatctacgtcggaagaaagcacgtgaagattccgtataagtatctcgcgccgggaactaacggagacggaggatccattgttgattccggatctacattcactttcatggagcgacccgttttcgagctcgttgctgaagaattcgcttcacagatgtcgaactacactcgtgagaaagacttggagaaggaaacaggacttggaccgtgttttaatatctccgggaagggagatgtgacggtgccggagctgatttttgagtttaaaggtggagcgaagttggaattgccgttatccaattacttcacgttcgttgggaatactgataccgtttgtcttacggtggtttcggataaaaccgttaatccctccggcgggactggaccggcgataattctggggagtttccagcaacagaactatttagttgaatacgatttggagaatgacaggtttaggttcgcgaagaagaagtgtagcccgtgagttttcaggggtaaatttgacttttcacaacgatgagatcaatttttatgatttttaattccgttttccgaaataaaagaaaagggtttaaatgtttatagaaatatcagaaatatgtaagagtagtaaaattaataaatt

SEQ ID NO: 11371 - protein, 470 aa, Arabidopsis thaliana
MASSIFFFFFLIFLSVVSAVKLPLSPFSHSDQSPKDPYLSLRRLAESSIARAHKLKHGTSIKPDEDALSSTTTASATVVKSPLSAKSYGGYSVSLSFGTPSQTIPFVFDTGSSLVWLPCTSRYLCSGCDFSGLDPTLIPRFIPKNSSSSKIIGCQSPKCQFLYGPNVQCRGCDPNTRNCTVGCPPYILQYGLGSTAGVLITEKLDFPDLTVPDFVVGSSIISTRQPAGIAGFGRGPVSLPSQMNLKRFSHCLVSRRFDDTNVTTDLDLDTGSGHNSGSKTPGLTYTPFRKNPNVSNKAFLEYYYLNLRRIYVGRKHVKIPYKYLAPGTNGDGGSIVDSGSTFTFMERPVFELVAEEFASQMSNYTREKDLEKETGLGPCFNISGKGDVTVPELIFEFKGGAKLELPLSNYFTFVGNTDTVCLTVVSDKTVNPSGGTGPAIILGSFQQQNYLVEYDLENDRFRFAKKKCSP

SEQ ID NO: 11372 - DNA, 1441 bp, Arabidopsis thaliana
aagttcggttcccttcttctctcctcctccaccttctctccattttcttacctctcaacaagtttacacaaacaaaaaaacaaaaaaaaaacaaaaaaatgacaagttgttttttttaaaattcttttcttagacaaagacagagacagagagaggggaagattttgggtttggtgtttttctccttttcttcattgaaagttgtcttcttttttaatcttctttgattaaaatgggtaatgtgacgtcaaatgtggcggccaagttcgcattcttcccgccggagccagcaacatacggcgtaacgaaggatgacgagaccgggaagctggtcttcgccggagtgtcggctgacaagaacgtggaagtccaccaactcaccacaaagtccggcaacaaagttgttgccacgttttggagacacccttttgcgagattcacgcttctctattcccatggcaatgccgctgatcttggccaaatggtcgagctattcatcgaactccgtgctcatctccgcgtcaacatcatgagttatgattattcaggatatggagcttcaacaggaaagccgtctgaattcaacacgtattatgacatagaggcagtgtacaattgcttgcggagcgattatgggatcaagcaagaggagattattctgtacggacagtctgtaggaagcggtccaacgttgcacatggcttctcggttgaagaggcttagaggagttgttcttcacagcgccattctctctggaatcagagtcttgtatcctgtcaaaatgactctctggttcgatatattcaaaaacatagacaagattcgccatgtcaactcacaagtccttgtcatacatggcacaaatgacgagattgttgatttgtctcacgggaaacgactgtgggagctggcgaaggagaagtatgatccgttatgggtgaagggaggagggcattgcaacctcgagacttaccctgagtacatcaagcacctcaaaaagttcgtaaatgcaatggagaaactctctctaaccaatccaccacccaaacaactaactaatgagcccagtatcaccgagactaagcacaatcggtgcttgaaattcgggaaacggtagtagcagaatcacaagacaattggtttggtagatttcttccttggcatcgcatgtgcagagttatttcctcaatgtgatcaaaaccaatgctaaacacagggtcacagacaacggcgtaacagagatcatctagtgaggtatttcactgtagaatgttgccctgcttttgggtatttgatcgatgttcaatctcctgtaaaaatgtagcttcaagtttgggggtttctgtaacacatcattacttgtaggagaagcaacacagaaaagatgtaatcagcatttccttcgaactatctagtgctccttagcgagacaattaagtac

SEQ ID NO: 11373 - protein, 294 aa, Arabidopsis thaliana
MGNVTSNVAAKFAFFPPEPATYGVTKDDETGKLVFAGVSADKNVEVHQLTTKSGNKVVATFWRHPFARFTLLYSHGNAADLGQMVELFIELRAHLRVNIMSYDYSGYGASTGKPSEFNTYYDIEAVYNCLRSDYGIKQEEIILYGQSVGSGPTLHMASRLKRLRGVVLHSAILSGIRVLYPVKMTLWFDIFKNIDKIRHVNSQVLVIHGTNDEIVDLSHGKRLWELAKEKYDPLWVKGGGHCNLETYPEYIKHLKKFVNAMEKLSLTNPPPKQLTNEPSITETKHNRCLKFGKR

SEQ ID NO: 11374 - protein, 211 aa, Arabidopsis thaliana
MVELFIELRAHLRVNIMSYDYSGYGASTGKPSEFNTYYDIEAVYNCLRSDYGIKQEEIILYGQSVGSGPTLHMASRLKRLRGVVLHSAILSGIRVLYPVKMTLWFDIFKNIDKIRHVNSQVLVIHGTNDEIVDLSHGKRLWELAKEKYDPLWVKGGGHCNLETYPEYIKHLKKFVNAMEKLSLTNPPPKQLTNEPSITETKHNRCLKFGKR

SEQ ID NO: 11375 - protein, 195 aa, Arabidopsis thaliana
MSYDYSGYGASTGKPSEFNTYYDIEAVYNCLRSDYGIKQEEIILYGQSVGSGPTLHMASRLKRLRGVVLHSAILSGIRVLYPVKMTLWFDIFKNIDKIRHVNSQVLVIHGTNDEIVDLSHGKRLWELAKEKYDPLWVKGGGHCNLETYPEYIKHLKKFVNAMEKLSLTNPPPKQLTNEPSITETKHNRCLKFGKR

SEQ ID NO: 11376 - DNA, 3430 bp, Arabidopsis thaliana
aaacccaaccctggtttcttcttcttcctcagtgccgccgtaaacaagcttcgccgtcgattttctcctcctctgaagaagaagataatttaatttctaaatcatcgagaatccagtaccagtaaccatggaggcagatactaagacagactctcgtactctgaaagttaacgacttgttaaaagatgctcgcttagattacgattctctcaggaagcttgttgatgataccgtttcgtcgattaaagaagctattgatggaatccctgaaaaatttcaggttacctcggagttagctcctagttttgttgaggacattggggcagataaagaagtggagttcagttttaagaagccaaatggtttcaatctctgtggaagttactccatttgtggcatggcaaagccggatacttctgttgatcttcttgttcacttgcctaaagaatgtttttatgagaaggattacatgaatcatagataccatgccaaaagatgtctatatctttgtgttattgaaaagcatttgttgtcgtcatcgtccattgagaaggttgtatggtcaaccttacataacgaagctaggaagccagtccttgttgttttcccagctaagaaactttatcagtttcctggattttccataaggttaatcccttccgcaacatcactgtttagtgttgcaaaattgagtattagcagaaacaacgtccgttctgtaactgcagatggtgtccctgagcccacgccaacttacaactcaagcatattggaggacatgtttctggaggaaaattctgagtttctcaagaaaaccttctctgagtggaaggagttgagcgatgctttgattttgctgaagatatgggcaagacaaaggagctcgatatacgtccacgattgcttgaacggatttctaatctctgtgatactttcatatcttgcaacccattccaaaattaacaaggcactaagtgcattagatatattcagagtgacattggatttcatagccacttctaaattatgggagagaggtttgtatcttccgccacagagtgaaattcgtgtctcgaaggaggagaagatgcagttcggagagttgttccctgttgttatatgcgattcatctacgtttgtgaacttggctttccggatgaccagtgttggattcctggagcttcaagatgaggcttctttgacgcttaagtgtatggagaaactcagagatgggggattcgaggagatttttatgactaagattgactatcctgttaagtatgaccactgcataaggttacagctaaaggggaaaacagcagtgtctctgtcagggttttgtttggacaaggaatgttggagactctatgagcagaaagtgcatagcctgcttttagaaggactcggtgacagagctaaatcaatccgtgtagtttggagaaataccaatcaagattggcatgtagagagtggcttgtcagttcttgacagagaacctcttttcattggcatatctgtcagctccactgaaaaggcttatagaacagttgatattgggcagatgctgaaaacaagatagaggcacttagattccggaagttttggggtgagaagtctgatctaaggaggtttaaagatggaagaatatctgaaagcacagtttgggagactcagcagtggaccaaacatcttatcatgaaacaaattgttgaatatatacttaagcggcatctttcactgacgtccgatgacattgtacaattagtggatcaacttgatttctctctaaactatgggggcaaagacccaatatctttatctggaaatttggttcaagcctatgaagttttatcaaagtgcttgcgtgagattgaaggcatacctctcaaagtctctagcgttcagtctttagattcagctctcaggttcacatccgtattccctcctgaacctcacccagtggcttgcgaaaaaatcgattcgcgaagactgcaaaaacttataccatcctgcattccagcaatggaagtcatgattcagctagaaggttctggtaactggcccatggatgatttagcagttgagaaaacaaaatctgccttcctcctgaaaattgcagagagccttcagaacgtcaagggaataccatgcacagctactgaggataatgtcgatgttttcattggtggttacgcatttcgcttgagaatattgcatgaaagaggcctgagtttggtgaagagagaaattggagtggacccggtgaagcatgtttcctctaccgataaaatgctttttattcgtagtcaacatgcaagtatgattaatggtttgcaaggtcgatttcctgtatacgcaccagttgccaggcttgcaaaaagatgggtttctgcgcatctcttttctggttgcctggcagaagaggccattgaacttttggttgcttatctcttcctcacacctctcccactcggtgttccttcctcccggattaatggattcttaaggttcttgcgattactagcagactatgaatggatgttctacccgttgattgttgacataaacaatgactttggtagaaatgacgagaaagagatcaaagataacttcatgtcaagtagaaaaggctacgaagaggacaaacaaaacataagttcagctatgttcttggctgctccttacgacaaggcatcagaggcatggacatcaacttcaccaaatttattggaacaaaaaaggttggtggcttatgctcgaagcagtgcaaacgtgttgagcaagatggtattgcaagaacataatgattctgttcaatgggagtgccttttcaggacacccttgaacaactatgacgcagttattcttctccatagagacaaattaccttatccacgtcgtcttctgtttccatctgaacttaaccaagggaagcatgtagcacggggaaaagcgagtagattgttcaacccatttatgtcgcctggagatttgaagagaagccatgaagagcttaagaataagctaatggtggacttcgagccgaccaagtgcttgttgagtgggttgcaggaagagtttgggacgttgaagccatggtatgatcatataggaggcgacgcaattggtttaacatggaacaaacacaattcaaagaaacgagaacgagatgaagaagaagaagaagaagaagaaagtaatccaatggagatgttaaaggcggtaggcgaaatgggtaaagggttagtgagggatatctatttgctcaagcctccacgctttgtctaaatatcaacttgtcttagtttctttaaaatgtgtttgtcaattttgtttactcatcatcatactcaaactgtctaaagcgactaaacacattaccagttttgcttcattcattgagtttaatgtgtaccaaagcttaatgacc

SEQ ID NO: 11377 - protein, 530 aa, Arabidopsis thaliana
MKQIVEYILKRHLSLTSDDIVQLVDQLDFSLNYGGKDPISLSGNLVQAYEVLSKCLREIEGIPLKVSSVQSLDSALRFTSVFPPEPHPVACEKIDSRRLQKLIPSCIPAMEVMIQLEGSGNWPMDDLAVEKTKSAFLLKIAESLQNVKGIPCTATEDNVDVFIGGYAFRLRILHERGLSLVKREIGVDPVKHVSSTDKMLFIRSQHASMINGLQGRFPVYAPVARLAKRWVSAHLFSGCLAEEAIELLVAYLFLTPLPLGVPSSRINGFLRFLRLLADYEWMFYPLIVDINNDFGRNDEKEIKDNFMSSRKGYEEDKQNISSAMFLAAPYDKASEAWTSTSPNLLEQKRLVAYARSSANVLSKMVLQEHNDSVQWECLFRTPLNNYDAVILLHRDKLPYPRRLLFPSELNQGKHVARGKASRLFNPFMSPGDLKRSHEELKNKLMVDFEPTKCLLSGLQEEFGTLKPWYDHIGGDAIGLTWNKHNSKKRERDEEEEEEEESNPMEMLKAVGEMGKGLVRDIYLLKPPRFV

SEQ ID NO: 11378 - protein, 483 aa, Arabidopsis thaliana
MEADTKTDSRTLKVNDLLKDARLDYDSLRKLVDDTVSSIKEAIDGIPEKFQVTSELAPSFVEDIGADKEVEFSFKKPNGFNLCGSYSICGMAKPDTSVDLLVHLPKECFYEKDYMNHRYHAKRCLYLCVIEKHLLSSSSIEKVVWSTLHNEARKPVLVVFPAKKLYQFPGFSIRLIPSATSLFSVAKLSISRNNVRSVTADGVPEPTPTYNSSILEDMFLEENSEFLKKTFSEWKELSDALILLKIWARQRSSIYVHDCLNGFLISVILSYLATHSKINKALSALDIFRVTLDFIATSKLWERGLYLPPQSEIRVSKEEKMQFGELFPVVICDSSTFVNLAFRMTSVGFLELQDEASLTLKCMEKLRDGGFEEIFMTKIDYPVKYDHCIRLQLKGKTAVSLSGFCLDKECWRLYEQKVHSLLLEGLGDRAKSIRVVWRNTNQDWHVESGLSVLDREPLFIGISVSSTEKAYRTVDIGQMLKTR

SEQ ID NO: 11379 - protein, 421 aa, Arabidopsis thaliana
MEVMIQLEGSGNWPMDDLAVEKTKSAFLLKIAESLQNVKGIPCTATEDNVDVFIGGYAFRLRILHERGLSLVKREIGVDPVKHVSSTDKMLFIRSQHASMINGLQGRFPVYAPVARLAKRWVSAHLFSGCLAEEAIELLVAYLFLTPLPLGVPSSRINGFLRFLRLLADYEWMFYPLIVDINNDFGRNDEKEIKDNFMSSRKGYEEDKQNISSAMFLAAPYDKASEAWTSTSPNLLEQKRLVAYARSSANVLSKMVLQEHNDSVQWECLFRTPLNNYDAVILLHRDKLPYPRRLLFPSELNQGKHVARGKASRLFNPFMSPGDLKRSHEELKNKLMVDFEPTKCLLSGLQEEFGTLKPWYDHIGGDAIGLTWNKHNSKKRERDEEEEEEEESNPMEMLKAVGEMGKGLVRDIYLLKPPRFV

SEQ ID NO: 11380 - DNA, 1300 bp, Arabidopsis thaliana
gatacttgtgtcttgttgtacttgttaaacttgaatcccgtgttcgcgactttgcgatagattctctcaaatccaattccaatggcggatccatcttctcaaaaccctaacctcgccactccccctcctccttcttctccttcaccaacccatcaaattcaatctggaacctcggaattatcgccaccgtctcgaccgccttgctctaccttgtcctttctcaagactgctaaccgaccaaaactccgtgtgacatctgaattcgacagcgatagtctccttttcttaaacaaagtgtcttgtaagctcttcgataaccttgccaagcttaaactctcgtttcagaacaattcccagcgcgagatttcacagcctcaggtctcttttacttccaaacacgtttctgttctctatgatgtcgaagagaagaatactttcattaagagcactctcgatgttcacccgcgtcttcagctccgagctcttcataatgttaaggcacaacaaggagaagttgctatggaggcaaatctgactgaacctggctactctctggagctttcatcacctgtgcctattggttacccaagagcaactcttaaattcccacttggcgaaatttcgttacaagaaaaagatgaggaggaggaggagaagcagaaaagaactttatctgttaatgggatcctcaaacgtcaagttatgaatggtgtttgtaccgctctatacacagatgaagagttgaggctgagatatgcttataaggatgatgcattgtctttcatcccaagtatttcccttccttccaatgctgcatcatttgcattcaaacggcggtttagcccttcagataagttgagctattggtacaactttgattcaaacatgtggagtgctgtgtacaaacgcacatatggtaaagactacaaattaaaagctggctatgattctgatgtacgccttggctgggcatctctctgggttggtgatgaagctggaaaagtgaaaacgacaccaatgaagatgaaagtccagttcatgcttcaagttccacaagatgacatcaaatcatcagtcttgatgttccgagtcaagaaaagatgggacatttgatgaaatctttgaataaatcatctcttagtttcacgttctttaatctctctataaaacccataaaagttgtttgtttctccttatatatcaaatcttttgcaaagtagatacaaaagcttagagtgaataattgcaattgtatttctgtagcttttttttaaatgatctttttcacacgtgtgagact

SEQ ID NO: 11381 - protein, 343 aa, Arabidopsis thaliana
MADPSSQNPNLATPPPPSSPSPTHQIQSGTSELSPPSRPPCSTLSFLKTANRPKLRVTSEFDSDSLLFLNKVSCKLFDNLAKLKLSFQNNSQREISQPQVSFTSKHVSVLYDVEEKNTFIKSTLDVHPRLQLRALHNVKAQQGEVAMEANLTEPGYSLELSSPVPIGYPRATLKFPLGEISLQEKDEEEEEKQKRTLSVNGILKRQVMNGVCTALYTDEELRLRYAYKDDALSFIPSISLPSNAASFAFKRRFSPSDKLSYWYNFDSNMWSAVYKRTYGKDYKLKAGYDSDVRLGWASLWVGDEAGKVKTTPMKMKVQFMLQVPQDDIKSSVLMFRVKKRWDI

SEQ ID NO: 11382 - protein, 197 aa, Arabidopsis thaliana
MEANLTEPGYSLELSSPVPIGYPRATLKFPLGEISLQEKDEEEEEKQKRTLSVNGILKRQVMNGVCTALYTDEELRLRYAYKDDALSFIPSISLPSNAASFAFKRRFSPSDKLSYWYNFDSNMWSAVYKRTYGKDYKLKAGYDSDVRLGWASLWVGDEAGKVKTTPMKMKVQFMLQVPQDDIKSSVLMFRVKKRWDI

SEQ ID NO: 11383 - DNA, 2062 bp, Arabidopsis thaliana
ggtcagttttctttgattctgggtagtaaataatcgggatcaattgtagaagagctcatcgagaaaagagagaacctaaactttaaattcaattctgtattgttctcaaactcgaacccgaaactttaaatccttccttatttgttttctggagttcttgtttagaactgttttggatttgttttttttgaggagatgctttagttaactaggtttgcttcgagctgatcgctgtgtggcataaaccctaatttcgtggaaactgtgctcttttagaaccggtccagtgagtaagggaatccaattggtgaagatgccgcaagttaagatcattgctaaaaatttcatggacatggtggcgtcacttccagccatcaagcttgacaaactctacaacaatgtctttatctgcgaagccattctcaggtctttgccgcctcttgccaagaagtatgtattgcagatgttgtacattgatgttcctgtacctgctacgatgatggaggagtgggtgctcgcagatggcacctctaaacatagagttgctattgatcgactgattcaattaaggattttttcagaaattagtgataggaaaaggggaaccagctacagcctaaatcctacatttcagaacaatcttcagaaacatattatttccggtggagttttgcctagagagcctatgaactccgacaatgccattaaacttccaagcctacaagaactcgaaacctatgcacttaagcaatgggagtgtttcttgctacaacttataaattcgggtcaaggtgaaaaactaactggcatcagttcatccatgatgaaaatttttcagcgaggtttattgagtcagagagacaaagatggcccgagattaactgagagtggctttcagtttttgctgatggatacaaatgcccagctttggtacattattcgagaatacatattgaatgccgaggagcgagatgtagatccagcagacttgatttcgtttttgttggagcttagttttcatgttactggtcaggcatataacttaaataccttgacagaggttcaaaacaataccctcaaggaccttgcagacttgggattagtcaagcttcaacagggaaggaaagacagttggtttattcctactaaactggctacaaatttatcagtcagtctggcagattcatcagcgcgaaaagagggatttgtcgtgatggaaacaaacttcagaatgtatgcgtactccacatctaagttacagtgtgaaattttacgactatttgcgaggatagagtaccaacttccaaaccttattgcttgtgccattacaaaggaaagtttgtacaatgcatttgacaatggcatcacatcagatcagattataactttcctccagcagaattctcatccacgatgtgctgatcgagtcccatctattccagaaaatgtcactgatcagattcggctttgggagacagatctgcagagaattgagatgacccaggctcacttctatgatgaatttccttcaaaagatttgtttgaggcagcttgtgactttgctcgggaatggagaggccttctttgggaagactctaagagaatgcgacttgttgtgaaatccgaagttcacaatcagatgcgtgagtttcttcatacccaaagcaagtaacaagaagaaactcacattttcttctcgtattaaaacaaaacatcatgcttcgattctacaaactatgtctttcgtgaggtttcagcagaaagagaaaaaagagtagccatttgatgtcttgttactctattagttaccatcgttcttatcctgctaacacatgcgcaccccaaacgtaggaaaagtacttggtgttggtacccacgaagttgaaagttgaaacctttaagctgtaagaccgatccattgtaaatcacaatatactttattaggcgaagttaagtttgaaacaacatatattgacaaaacgtggtcgttggggatggtccaaccagggtcacctctataatttcttgtacgctagacagaacacaatctcggttttgattc

SEQ ID NO: 11384 - protein, 452 aa, Arabidopsis thaliana
MPQVKIIAKNFMDMVASLPAIKLDKLYNNVFICEAILRSLPPLAKKYVLQMLYIDVPVPATMMEEWVLADGTSKHRVAIDRLIQLRIFSEISDRKRGTSYSLNPTFQNNLQKHIISGGVLPREPMNSDNAIKLPSLQELETYALKQWECFLLQLINSGQGEKLTGISSSMMKIFQRGLLSQRDKDGPRLTESGFQFLLMDTNAQLWYIIREYILNAEERDVDPADLISFLLELSFHVTGQAYNLNTLTEVQNNTLKDLADLGLVKLQQGRKDSWFIPTKLATNLSVSLADSSARKEGFVVMETNFRMYAYSTSKLQCEILRLFARIEYQLPNLIACAITKESLYNAFDNGITSDQIITFLQQNSHPRCADRVPSIPENVTDQIRLWETDLQRIEMTQAHFYDEFPSKDLFEAACDFAREWRGLLWEDSKRMRLVVKSEVHNQMREFLHTQSK

SEQ ID NO: 11385 - protein, 441 aa, Arabidopsis thaliana
MDMVASLPAIKLDKLYNNVFICEAILRSLPPLAKKYVLQMLYIDVPVPATMMEEWVLADGTSKHRVAIDRLIQLRIFSEISDRKRGTSYSLNPTFQNNLQKHIISGGVLPREPMNSDNAIKLPSLQELETYALKQWECFLLQLINSGQGEKLTGISSSMMKIFQRGLLSQRDKDGPRLTESGFQFLLMDTNAQLWYIIREYILNAEERDVDPADLISFLLELSFHVTGQAYNLNTLTEVQNNTLKDLADLGLVKLQQGRKDSWFIPTKLATNLSVSLADSSARKEGFVVMETNFRMYAYSTSKLQCEILRLFARIEYQLPNLIACAITKESLYNAFDNGITSDQIITFLQQNSHPRCADRVPSIPENVTDQIRLWETDLQRIEMTQAHFYDEFPSKDLFEAACDFAREWRGLLWEDSKRMRLVVKSEVHNQMREFLHTQSK

SEQ ID NO: 11386 - protein, 439 aa, Arabidopsis thaliana
MVASLPAIKLDKLYNNVFICEAILRSLPPLAKKYVLQMLYIDVPVPATMMEEWVLADGTSKHRVAIDRLIQLRIFSEISDRKRGTSYSLNPTFQNNLQKHIISGGVLPREPMNSDNAIKLPSLQELETYALKQWECFLLQLINSGQGEKLTGISSSMMKIFQRGLLSQRDKDGPRLTESGFQFLLMDTNAQLWYIIREYILNAEERDVDPADLISFLLELSFHVTGQAYNLNTLTEVQNNTLKDLADLGLVKLQQGRKDSWFIPTKLATNLSVSLADSSARKEGFVVMETNFRMYAYSTSKLQCEILRLFARIEYQLPNLIACAITKESLYNAFDNGITSDQIITFLQQNSHPRCADRVPSIPENVTDQIRLWETDLQRIEMTQAHFYDEFPSKDLFEAACDFAREWRGLLWEDSKRMRLVVKSEVHNQMREFLHTQSK

SEQ ID NO: 11387 - DNA, 2508 bp, Arabidopsis thaliana
agtttccattctcactctttctctctcaatggttagatctgtcttttacgtcgcttcgaagtcttctttcttcccttcacatacccaacgaatcctctcaaatccctaattatccaatttcacactcgagatctcgaattggagtctctcatcatcaccaatggcgtctccaaatccctacaccaagcgccgctctccgccgaatgtcgttgtaccgccacagcctcggtataaatccataggaggaggaggatttttctgtaagtctgttctattcgctctttttctcctcgccttgccgttgttcccttctcaagctcctgatttcgtcggtgagactgtgctcactaagttctgggaactgattcatctcctattcgtcggcattgctgttgcttatggtttgtttagccgtaggaatgttgaatccgctgttgatttaaggatgactcgtgtagatgagtcttctttgtcttatgtatctagaatcttccaggtttcttctgtttttgacgaagagtttgatgataattcttgtgagtttgttgatgtgaggagtgatgagagtgtgagtgctcgagcttctgtggttgggaaatctgagtcttttgttgttgaaagcggcgaattggaagaatcgtctgaatttggtgaaactaatgaagtccgagcttggaattcgcagtattttcagggtaagtctaaggttgtggttgctcgacctgcttatggtcttgatggtcacgttgtgcatcagccattaggcttgcctattaggaggttaaggtcatctttgagagataatgctgctcctcaagacaaatcttttgctgatagctgtgatggagctgttaatgcggaagctgagtcattattggctgataatttttttgatgaggtcttggctgctccggcttcacctgttccatggcaagctagacctgaaatgatgggaatcggagacaactatccttcaaatttccagcctatatctgtggatgaaacccttaaatcgatatcttctcggtctactggttcttcttcatctcaaactagttatgcatcccagaatcagaacagattctctccttctcgatctgtttccgcagagtcactaaactcaaatgtggaagagttggtcaaggagaagagtcgccagagttcatcacggtctagttcgccatccttgcccccatcaccttcactgtctccatctccaccatcgccagaattagtgcccaatgatactcgcagacgttcgccagaattagtaaccgatgatactcccaggcgtgcgtcacattctcggcattatagtgatggttccttgttagaggaagatgtaaggcgggggtttgaaaatgagttggaggggagtaaagtcagaggcagaaaagcagaattcttcagtaagaaggaacggggatctaaatcacttaatttggcagctgaaagttcccggagagggaacaagtctcgcagatcctatcctcctgagtctatctcatctcccgttggtggtgctgatgactccacaactagaagacaagatcttcagcaaaagagtaattgtcatttgcttgaagaaaatatcaggaaaggagtggaagctgaccataacaatctgagggtcaaaaagggaaggagtcacgactctttggagctaacagcagaagattctgcaaaagatgagaaggtcagtgaatcttttcctgctcttgatgtagtgttccaaccaacaaatgctaaagcttcaaggcgcgccatgcgttcttcacgagggggacgtgacactttgccggagaaggatgttgtcaccagaaaattagaggatgacactgtggattcggataagtccaggaaaaaggaccttcctggtaaagacaaggaaatgaaattagacggtccaagaattgaaccacgttcttggagagcttccagtaatgtatcactgagaggaaagtccgtgaggaccataagatctgatcgtcatgggaaagatgtaaagacagatggagattcatctgaggatcgggcagaagctaaagtagaaagccgaggaagaacgaaatcgagaagaccacgacaagaagaactatcgattgtactacaccaggagaaaagttcagaaactcgcgctaaatccgagccagaagaggttgctatggaagagccccaggccgagcagcaacctgaagtaactttcgaagaggaggaagaagctgcttgggaaagccaaagcaatgcaagccatgatcataatgaggttgatagaaaagccggtgagttcatagccaaattccgagaacaaattaggttgcagaaactcatatccggtgaacaacctagaggaggaggcactggtattttcagaaacagccaattcagatgacactcaccaccatttattgcctcattacttgtattaatattgtaattttaattcatcggcattgttgatgagaatctggttgtcactctctttgtttgaagtttatattgttgaat

SEQ ID NO: 11388 - protein, 743 aa, Arabidopsis thaliana
MASPNPYTKRRSPPNVVVPPQPRYKSIGGGGFFCKSVLFALFLLALPLFPSQAPDFVGETVLTKFWELIHLLFVGIAVAYGLFSRRNVESAVDLRMTRVDESSLSYVSRIFQVSSVFDEEFDDNSCEFVDVRSDESVSARASVVGKSESFVVESGELEESSEFGETNEVRAWNSQYFQGKSKVVVARPAYGLDGHVVHQPLGLPIRRLRSSLRDNAAPQDKSFADSCDGAVNAEAESLLADNFFDEVLAAPASPVPWQARPEMMGIGDNYPSNFQPISVDETLKSISSRSTGSSSSQTSYASQNQNRFSPSRSVSAESLNSNVEELVKEKSRQSSSRSSSPSLPPSPSLSPSPPSPELVPNDTRRRSPELVTDDTPRRASHSRHYSDGSLLEEDVRRGFENELEGSKVRGRKAEFFSKKERGSKSLNLAAESSRRGNKSRRSYPPESISSPVGGADDSTTRRQDLQQKSNCHLLEENIRKGVEADHNNLRVKKGRSHDSLELTAEDSAKDEKVSESFPALDVVFQPTNAKASRRAMRSSRGGRDTLPEKDVVTRKLEDDTVDSDKSRKKDLPGKDKEMKLDGPRIEPRSWRASSNVSLRGKSVRTIRSDRHGKDVKTDGDSSEDRAEAKVESRGRTKSRRPRQEELSIVLHQEKSSETRAKSEPEEVAMEEPQAEQQPEVTFEEEEEAAWESQSNASHDHNEVDRKAGEFIAKFREQIRLQKLISGEQPRGGGTGIFRNSQFR

SEQ ID NO: 11389 - protein, 648 aa, Arabidopsis thaliana
MTRVDESSLSYVSRIFQVSSVFDEEFDDNSCEFVDVRSDESVSARASVVGKSESFVVESGELEESSEFGETNEVRAWNSQYFQGKSKVVVARPAYGLDGHVVHQPLGLPIRRLRSSLRDNAAPQDKSFADSCDGAVNAEAESLLADNFFDEVLAAPASPVPWQARPEMMGIGDNYPSNFQPISVDETLKSISSRSTGSSSSQTSYASQNQNRFSPSRSVSAESLNSNVEELVKEKSRQSSSRSSSPSLPPSPSLSPSPPSPELVPNDTRRRSPELVTDDTPRRASHSRHYSDGSLLEEDVRRGFENELEGSKVRGRKAEFFSKKERGSKSLNLAAESSRRGNKSRRSYPPESISSPVGGADDSTTRRQDLQQKSNCHLLEENIRKGVEADHNNLRVKKGRSHDSLELTAEDSAKDEKVSESFPALDVVFQPTNAKASRRAMRSSRGGRDTLPEKDVVTRKLEDDTVDSDKSRKKDLPGKDKEMKLDGPRIEPRSWRASSNVSLRGKSVRTIRSDRHGKDVKTDGDSSEDRAEAKVESRGRTKSRRPRQEELSIVLHQEKSSETRAKSEPEEVAMEEPQAEQQPEVTFEEEEEAAWESQSNASHDHNEVDRKAGEFIAKFREQIRLQKLISGEQPRGGGTGIFRNSQFR

SEQ ID NO: 11390 - protein, 481 aa, Arabidopsis thaliana
MMGIGDNYPSNFQPISVDETLKSISSRSTGSSSSQTSYASQNQNRFSPSRSVSAESLNSNVEELVKEKSRQSSSRSSSPSLPPSPSLSPSPPSPELVPNDTRRRSPELVTDDTPRRASHSRHYSDGSLLEEDVRRGFENELEGSKVRGRKAEFFSKKERGSKSLNLAAESSRRGNKSRRSYPPESISSPVGGADDSTTRRQDLQQKSNCHLLEENIRKGVEADHNNLRVKKGRSHDSLELTAEDSAKDEKVSESFPALDVVFQPTNAKASRRAMRSSRGGRDTLPEKDVVTRKLEDDTVDSDKSRKKDLPGKDKEMKLDGPRIEPRSWRASSNVSLRGKSVRTIRSDRHGKDVKTDGDSSEDRAEAKVESRGRTKSRRPRQEELSIVLHQEKSSETRAKSEPEEVAMEEPQAEQQPEVTFEEEEEAAWESQSNASHDHNEVDRKAGEFIAKFREQIRLQKLISGEQPRGGGTGIFRNSQFR

SEQ ID NO: 11391 - DNA, 1423 bp, Arabidopsis thaliana
gattctcattccttcctcctgtttccgtaccgggggattttgtgatcatcaaaatcaaaaacaatcagatttcttctaccaaacgattaattgccttttgggatacgattcagggcttcttttggggcctctgtttgaattaacaccttgtttgctgcaaacaataataaggaaagataaacgagatggtgtcggacaatgagatgggtttgatattagctgtgtcgtcgagcgtcttcataggttccagcttcattttgaagaagaaaggtctcaagcgcgctgctgctaatggcacccgcgctggtttcggaggttatacatatttgttagagccactttggtgggtaggcttggtaacaatgacttttggagaaattgctaattttgtggcttacgtttatgaacctgctgtactagtcactcctcttggcgcattaagtataatcatcagtgctgttttggcacatttcttgttagacgaaaaacttaggaaaatgggagtttggggatgtgtttgttgcattgtgggctcagttatgatcgtcatacacgcacctcaggaacagactcccaattctgtagaagaaatctggaaactagcaatgcaaccagcttttctaatttacgtagccatatcaatgtcgatagtcctggctttgattctctactgtgaacctctctgcggccaaaccaacattcttgtttatatcggaatttgttcgttgatgggttctctcacagttatgagcatcaaggctgtagggattgccataaagttaacatttgaagggataaaccagatttggtatccagagacttggttttttgccatggttgcagcaatctgtgtggttatgcaaatgatttacctcaacaaggcgctggacacattcaacgcagcaattgtttctccaatctattatgtgatgttcacaacactcacaattgttgctagtgcaatcatgttcaaggactggaatgggcaaaacacagacagcatagcctctgagatttgtggattcctcacagtgcttacaggaacggttatactccattccacgagagaagaggaacaagcttcgccacgacgaatgagatggcaggattccgggaagagctttgacgaagaacatttgacaagtttgtacagtcctgaatattaggaaggtaacaaagatttaaaccttgtgctgaacggaaggatgttgggatccgaatcagaagatcatctaattaatctcttagtggggaaaagaatgtaaactagctttctgtatatacttgatagttttgtaacagtcttttgtatacaaatttgtccactgtttgttcatattcatttatttttgagctcttaggacagatttgttaccatgtatagatcatataacattgactattattattttgatccaacaat

SEQ ID NO: 11392 - protein, 326 aa, Arabidopsis thaliana
MVSDNEMGLILAVSSSVFIGSSFILKKKGLKRAAANGTRAGFGGYTYLLEPLWWVGLVTMTFGEIANFVAYVYEPAVLVTPLGALSIIISAVLAHFLLDEKLRKMGVWGCVCCIVGSVMIVIHAPQEQTPNSVEEIWKLAMQPAFLIYVAISMSIVLALILYCEPLCGQTNILVYIGICSLMGSLTVMSIKAVGIAIKLTFEGINQIWYPETWFFAMVAAICVVMQMIYLNKALDTFNAAIVSPIYYVMFTTLTIVASAIMFKDWNGQNTDSIASEICGFLTVLTGTVILHSTREEEQASPRRMRWQDSGKSFDEEHLTSLYSPEY

SEQ ID NO: 11393 - protein, 320 aa, Arabidopsis thaliana
MGLILAVSSSVFIGSSFILKKKGLKRAAANGTRAGFGGYTYLLEPLWWVGLVTMTFGEIANFVAYVYEPAVLVTPLGALSIIISAVLAHFLLDEKLRKMGVWGCVCCIVGSVMIVIHAPQEQTPNSVEEIWKLAMQPAFLIYVAISMSIVLALILYCEPLCGQTNILVYIGICSLMGSLTVMSIKAVGIAIKLTFEGINQIWYPETWFFAMVAAICVVMQMIYLNKALDTFNAAIVSPIYYVMFTTLTIVASAIMFKDWNGQNTDSIASEICGFLTVLTGTVILHSTREEEQASPRRMRWQDSGKSFDEEHLTSLYSPEY

SEQ ID NO: 11394 - protein, 267 aa, Arabidopsis thaliana
MTFGEIANFVAYVYEPAVLVTPLGALSIIISAVLAHFLLDEKLRKMGVWGCVCCIVGSVMIVIHAPQEQTPNSVEEIWKLAMQPAFLIYVAISMSIVLALILYCEPLCGQTNILVYIGICSLMGSLTVMSIKAVGIAIKLTFEGINQIWYPETWFFAMVAAICVVMQMIYLNKALDTFNAAIVSPIYYVMFTTLTIVASAIMFKDWNGQNTDSIASEICGFLTVLTGTVILHSTREEEQASPRRMRWQDSGKSFDEEHLTSLYSPEY

SEQ ID NO: 11395 - DNA, 1988 bp, Arabidopsis thaliana
gggaaacaagaacaaccaatgaaaactcgataaatggcttaacacaattgttaagagccgtttgtttttggcaacaaaagtgctcgagagagagagaggaccttgaagaagaaagaagaagagacgagtttaatatctaaaggaatcatttttgacggatttaggatctaagtaaaccctagattgatcgaatatgagtactcaagcgacgggtccttcttcaacatcagggaggagaagcacttctactgtacggcgaggaccaccaccttctaagaaaccagtacaatcagagaatggaagtgttaatgggaacacctcaaaacccaattcacctcctcctcaacctcaatctcaagctccttctaatggagagagaacagtgaagaagcttaggttatcgaaagctcttactattcctgaaggaactactgttttcgatgcttgtcgaagaatggctgctaggcgtgttgatgcttgtttgttgactgattcaagtgcgcttctttccgggattgttactgataaagatgtagctacaagagtgattgctgaagggatgagaccggatcaaactttggtctctaaggttatgactaggaatcctatttttgttacttctgattcgttggcgcttgaggctcttcagaagatggttcaagggaagtttagacacttgcctgttgtggagaatggtgaagtcattgatttgttggatattacaaagtgtttgtatggtgctatttctaggatggagaaagctgcagagcaaggtagtgctttagctgctgcagtggaaggtgtggagaagcaatggggaagcggatattctgcaccgtatgctttcattgaaaccttgagggagagaatgtttaaacccgccttgtcaacgattattacagacaattcgaaggttgcacttgtagcaccatcagatcctgtttcagttgctgcgaaaaggatgagggatttgcgggttaactctgtaatcatttccacggggaacaaaatcagtggaatcttgacttcaaaggacaatctgatgcgagtggtggcacaaaatttatctcctgaattgactcttgtcgagaaggtaatgacaccgaatcctgaatatgcatcgctagagacaacgattctggatgcgttgcatacaatgcatgatggaaagtttctacatcttccaattatagataaagatggatcagctgcagcttgtgtagacgttcttcagattactcacgcagctatttcaatggtggagaacagttctggagctgtaaatgatatggcaaacacgatgatgcagaaattttgggattcagctcttgcgttagagccacctgatgattctgacactcaaagtgaaatgtcggcaatgatgcatcattcagatatagggaagctcagttcttacccatctctaggactagggaattcgttttcgttcaaatttgaagaccttaagggccgtgtacatcggtttacttctggagctgaaaacctcgaagagctgatgggtattgtgatgcaaagaattggcagcgacaataacaatgtggaacaacggcctcagattatatatgaggacgatgaaggtgataaggtattgattacatcggatagtgatttggttggtgctgttactcttgctaggtctacaggacaaaaggttttgaggctgcatctggacttcactgagtcaacaaggagcttgagctcagaaaccacccaactcaagaaaggtgattctcgagacagaggaagcggatgggtttcatggcgtggtggtgtggtggttacaggagctgttgtcctaacaagcatagccatagttgtttacttgaagcgttcaaagaactgatttttgctgaagcaaactgtttgggaggcagaacaaaaactctttttctcttaattttttggtaagtttcatacagtttgtctcttgtcttttggggtcacatgttttgcgaatgcaaacagac

SEQ ID NO: 11396 - protein, 556 aa, Arabidopsis thaliana
MSTQATGPSSTSGRRSTSTVRRGPPPSKKPVQSENGSVNGNTSKPNSPPPQPQSQAPSNGERTVKKLRLSKALTIPEGTTVFDACRRMAARRVDACLLTDSSALLSGIVTDKDVATRVIAEGMRPDQTLVSKVMTRNPIFVTSDSLALEALQKMVQGKFRHLPVVENGEVIDLLDITKCLYGAISRMEKAAEQGSALAAAVEGVEKQWGSGYSAPYAFIETLRERMFKPALSTIITDNSKVALVAPSDPVSVAAKRMRDLRVNSVIISTGNKISGILTSKDNLMRVVAQNLSPELTLVEKVMTPNPEYASLETTILDALHTMHDGKFLHLPIIDKDGSAAACVDVLQITHAAISMVENSSGAVNDMANTMMQKFWDSALALEPPDDSDTQSEMSAMMHHSDIGKLSSYPSLGLGNSFSFKFEDLKGRVHRFTSGAENLEELMGIVMQRIGSDNNNVEQRPQIIYEDDEGDKVLITSDSDLVGAVTLARSTGQKVLRLHLDFTESTRSLSSETTQLKKGDSRDRGSGWVSWRGGVVVTGAVVLTSIAIVVYLKRSKN

SEQ ID NO: 11397 - protein, 469 aa, Arabidopsis thaliana
MAARRVDACLLTDSSALLSGIVTDKDVATRVIAEGMRPDQTLVSKVMTRNPIFVTSDSLALEALQKMVQGKFRHLPVVENGEVIDLLDITKCLYGAISRMEKAAEQGSALAAAVEGVEKQWGSGYSAPYAFIETLRERMFKPALSTIITDNSKVALVAPSDPVSVAAKRMRDLRVNSVIISTGNKISGILTSKDNLMRVVAQNLSPELTLVEKVMTPNPEYASLETTILDALHTMHDGKFLHLPIIDKDGSAAACVDVLQITHAAISMVENSSGAVNDMANTMMQKFWDSALALEPPDDSDTQSEMSAMMHHSDIGKLSSYPSLGLGNSFSFKFEDLKGRVHRFTSGAENLEELMGIVMQRIGSDNNNVEQRPQIIYEDDEGDKVLITSDSDLVGAVTLARSTGQKVLRLHLDFTESTRSLSSETTQLKKGDSRDRGSGWVSWRGGVVVTGAVVLTSIAIVVYLKRSKN

SEQ ID NO: 11398 - protein, 434 aa, Arabidopsis thaliana
MRPDQTLVSKVMTRNPIFVTSDSLALEALQKMVQGKFRHLPVVENGEVIDLLDITKCLYGAISRMEKAAEQGSALAAAVEGVEKQWGSGYSAPYAFIETLRERMFKPALSTIITDNSKVALVAPSDPVSVAAKRMRDLRVNSVIISTGNKISGILTSKDNLMRVVAQNLSPELTLVEKVMTPNPEYASLETTILDALHTMHDGKFLHLPIIDKDGSAAACVDVLQITHAAISMVENSSGAVNDMANTMMQKFWDSALALEPPDDSDTQSEMSAMMHHSDIGKLSSYPSLGLGNSFSFKFEDLKGRVHRFTSGAENLEELMGIVMQRIGSDNNNVEQRPQIIYEDDEGDKVLITSDSDLVGAVTLARSTGQKVLRLHLDFTESTRSLSSETTQLKKGDSRDRGSGWVSWRGGVVVTGAVVLTSIAIVVYLKRSKN

SEQ ID NO: 11399 - DNA, 1426 bp, Arabidopsis thaliana
ggatgtgatcgaaacaaaaagctctttgcttcttcttcgtccatttctcgtagcacacttttcacaaagaagatgggttcttcacaatctacgcaaatggcagacgaagaagaagaagaagaggaaactgacaatgaagaagaagaagaagaagataatggcagatcaaacacaagacaattagacaatctcctagtaaagaaagttctagaacaagagcctgagatgttaccatgtcacgcttcagcttcaccactctcaccacaactatcatctctcggtactccaaggcttggaccatcgattaaagtctgggatccttacaatgtcctttctccgccggcgcaaccgccgtctatcttctctcgaatcgtgtctggtgatgaagatcgagctgtgacagaggtttatctgattagccatggtgagtgtgatcttaatcttagaactgatttgattggtgggagatgtcatgtagctgctcttactgctaatggtaaacgtcaagctagggctcttgctgttttcttcaaatctcaaggtgttcggtttaattcggtttattcgtcacctctagatcgagctagatccatggctgtttctgtttgtcaggaaatgagttttccggaggagcatgtacaatcctcagatgctattattgagatgagtttaggggattgggaaggttgtaatcaagcagagatttatagtcctgaaactttgagtttgattgaaaggtgtcagcctgatttcacagctccatctggagaatcactgaggcaagtagagtttcgaatggttcagtttctaaacgggacagtctcaggagttgcagagaagcttaggtcagattattcttccactacaaatcacaatgaaactcatgagcgtgatggtggtgtgtcacttccttcgactaactgggacttactacacaagcatcgtcccagtctcacaaggaagaaatctggtaaaagcaggcttcaagtgatgactaatcacgaacctgacgatggaaactccccaagggaagaagttaatcataatcacaatgacctaagtgattcgtcttccttaatcttgaattgtgtcggggttttcacgcattctttgcctataaagtgtcttttaaccggaatccttggttgcagtccggtaatgactcataagatctgtgtagaagactcttcagtgactgtgttacaacattcatggagaaacgggtggcagatcaaacgaatgaatgatactgctcatcttcgattgttgtaactttatttaccgataaattatttggaaaaacgaggattcatatatgtttacaccatgaatctgcagaagctcaagaacaaaggttctgcagataatgaaatgccacggcctctttgtactgttttgtttgtgaaatgaggaaaaaaagataaac

SEQ ID NO: 11400 - protein, 423 aa, Arabidopsis thaliana
GCDRNKKLFASSSSISRSTLFTKKMGSSQSTQMADEEEEEEETDNEEEEEEDNGRSNTRQLDNLLVKKVLEQEPEMLPCHASASPLSPQLSSLGTPRLGPSIKVWDPYNVLSPPAQPPSIFSRIVSGDEDRAVTEVYLISHGECDLNLRTDLIGGRCHVAALTANGKRQARALAVFFKSQGVRFNSVYSSPLDRARSMAVSVCQEMSFPEEHVQSSDAIIEMSLGDWEGCNQAEIYSPETLSLIERCQPDFTAPSGESLRQVEFRMVQFLNGTVSGVAEKLRSDYSSTTNHNETHERDGGVSLPSTNWDLLHKHRPSLTRKKSGKSRLQVMTNHEPDDGNSPREEVNHNHNDLSDSSSLILNCVGVFTHSLPIKCLLTGILGCSPVMTHKICVEDSSVTVLQHSWRNGWQIKRMNDTAHLRLL

SEQ ID NO: 11401 - protein, 399 aa, Arabidopsis thaliana
MGSSQSTQMADEEEEEEETDNEEEEEEDNGRSNTRQLDNLLVKKVLEQEPEMLPCHASASPLSPQLSSLGTPRLGPSIKVWDPYNVLSPPAQPPSIFSRIVSGDEDRAVTEVYLISHGECDLNLRTDLIGGRCHVAALTANGKRQARALAVFFKSQGVRFNSVYSSPLDRARSMAVSVCQEMSFPEEHVQSSDAIIEMSLGDWEGCNQAEIYSPETLSLIERCQPDFTAPSGESLRQVEFRMVQFLNGTVSGVAEKLRSDYSSTTNHNETHERDGGVSLPSTNWDLLHKHRPSLTRKKSGKSRLQVMTNHEPDDGNSPREEVNHNHNDLSDSSSLILNCVGVFTHSLPIKCLLTGILGCSPVMTHKICVEDSSVTVLQHSWRNGWQIKRMNDTAHLRLL

SEQ ID NO: 11402 - protein, 391 aa, Arabidopsis thaliana
MADEEEEEEETDNEEEEEEDNGRSNTRQLDNLLVKKVLEQEPEMLPCHASASPLSPQLSSLGTPRLGPSIKVWDPYNVLSPPAQPPSIFSRIVSGDEDRAVTEVYLISHGECDLNLRTDLIGGRCHVAALTANGKRQARALAVFFKSQGVRFNSVYSSPLDRARSMAVSVCQEMSFPEEHVQSSDAIIEMSLGDWEGCNQAEIYSPETLSLIERCQPDFTAPSGESLRQVEFRMVQFLNGTVSGVAEKLRSDYSSTTNHNETHERDGGVSLPSTNWDLLHKHRPSLTRKKSGKSRLQVMTNHEPDDGNSPREEVNHNHNDLSDSSSLILNCVGVFTHSLPIKCLLTGILGCSPVMTHKICVEDSSVTVLQHSWRNGWQIKRMNDTAHLRLL

SEQ ID NO: 11403 - DNA, 2080 bp, Arabidopsis thaliana
aacaatgtctctcctcctacgaactttgcctctccgacctactcgtttcctctccgccacagccatatccatctctaacgctactaatttcttcgtcgtacccaaacggacaaacccacttcccggaactcgaagaaccttctccagttcccctgttgcagctgcctccggcgatgtagtagtgaagccggttccatctcctccgtcggttctccggtgggtgtcacggacagagctatgcggcgagttatcagtcaatgatgttggtaaaagagtccacctttgcggatgggtcgcccttcaccgagttcatggtggcctcactttccttaatcttagagatcataccggcattgtccaggttaggacgcttccggatgagtttcctgaggcacatggcttgatcaatgacatgaggcttgagtacgttgttttggtggaaggtactgtgcgtagtaggccaaatgagtccgtcaacaagaaaatgaaaacgggattcgtcgaggtagttgcagagcatgttgaaatattgaatcctgtgaggacaaagcttcccttcttagttactactgcagacgagaacaaagatttgattaaagaagaaattcgcttaagatttcgatgtcttgatctgcgccgtcagcaaatgaagaataatatagttcttcgccataatgtggtgaagctgattaggagatacctagaagacagacatggttttattgagattgaaactccaatactctctagatctactccagaaggcgcgcgagattatctggttccgtcaagaattcagtcaggaacattctatgctttgccacaaagtccacagctcttcaagcagatgttaatggtctctggttttgacaaatattaccagatagccagatgttttagagatgaagatctaagagctgataggcagcctgaatttactcagcttgatatggaaatggctttcatgcctatggaggacatgctgaagctgaatgaagatcttatccgtaaggtgttttcagagatcaaaggtatccagctacctgatccattcccaaggcttacatatgctgatgcaatggatcgttatggatccgatagacctgatacaagatttgatctcgagttgaaagatgtttcaaacgttttcacagaatcgtccttcagggtttttacagaggcccttgaaagtggtggaatcattaaggtattgtgtgtgcctttgggtgctaaaaagtattcaaactcagctctcaaaaaaggagatatttacaatgaagcaatgaaatccggagcaaagggtctgcctttcttgaaggtcttggataatggcgagatcgagggaattgcagcattagtttctagtttagactcagcaggtaaaataaactttgtgaaacaatgtggagcagcacctggtgatcttatattatttggagtgggtcctgttacttcggttaataaaaccctagataggttaagactctttgtagcccatgacatggatttgattgaccattccaagcactcaattctgtgggtgacagatttcccaatgttcgagtggaatgagccagagcagaggcttgaggcattacatcatccattcacagctcctaagccggaagatatggatgacttgccttctgcacgagctctagcttatgacatggtctataatggggtcgagattggtggaggaagtttgaggatatataagcgggatgttcaagaaaaggttttggagatcattggcatctcacctgaagaggctgaatcaaagtttggctatcttctggaggctcttgacatgggtgctcctcctcatggtggaattgcttatggattggatagaatggtgatgatgctgggaggtgcgagttccataagagatgtaatagcctttccaaagacaaccacagcgcaatgtgccctaacaaggactccctcggaagtcgatccaaagcagcttcaagatctctccatccgcaccaaataatagctctcaacacaaacaattgtatcttctgtttactcttaacatcattggttattgattttaaagaaatttgttatcaag

SEQ ID NO: 11404 - protein, 665 aa, Arabidopsis thaliana
TMSLLLRTLPLRPTRFLSATAISISNATNFFVVPKRTNPLPGTRRTFSSSPVAAASGDVVVKPVPSPPSVLRWVSRTELCGELSVNDVGKRVHLCGWVALHRVHGGLTFLNLRDHTGIVQVRTLPDEFPEAHGLINDMRLEYVVLVEGTVRSRPNESVNKKMKTGFVEVVAEHVEILNPVRTKLPFLVTTADENKDLIKEEIRLRFRCLDLRRQQMKNNIVLRHNVVKLIRRYLEDRHGFIEIETPILSRSTPEGARDYLVPSRIQSGTFYALPQSPQLFKQMLMVSGFDKYYQIARCFRDEDLRADRQPEFTQLDMEMAFMPMEDMLKLNEDLIRKVFSEIKGIQLPDPFPRLTYADAMDRYGSDRPDTRFDLELKDVSNVFTESSFRVFTEALESGGIIKVLCVPLGAKKYSNSALKKGDIYNEAMKSGAKGLPFLKVLDNGEIEGIAALVSSLDSAGKINFVKQCGAAPGDLILFGVGPVTSVNKTLDRLRLFVAHDMDLIDHSKHSILWVTDFPMFEWNEPEQRLEALHHPFTAPKPEDMDDLPSARALAYDMVYNGVEIGGGSLRIYKRDVQEKVLEIIGISPEEAESKFGYLLEALDMGAPPHGGIAYGLDRMVMMLGGASSIRDVIAFPKTTTAQCALTRTPSEVDPKQLQDLSIRTK

SEQ ID NO: 11405 - protein, 664 aa, Arabidopsis thaliana
MSLLLRTLPLRPTRFLSATAISISNATNFFVVPKRTNPLPGTRRTFSSSPVAAASGDVVVKPVPSPPSVLRWVSRTELCGELSVNDVGKRVHLCGWVALHRVHGGLTFLNLRDHTGIVQVRTLPDEFPEAHGLINDMRLEYVVLVEGTVRSRPNESVNKKMKTGFVEVVAEHVEILNPVRTKLPFLVTTADENKDLIKEEIRLRFRCLDLRRQQMKNNIVLRHNVVKLIRRYLEDRHGFIEIETPILSRSTPEGARDYLVPSRIQSGTFYALPQSPQLFKQMLMVSGFDKYYQIARCFRDEDLRADRQPEFTQLDMEMAFMPMEDMLKLNEDLIRKVFSEIKGIQLPDPFPRLTYADAMDRYGSDRPDTRFDLELKDVSNVFTESSFRVFTEALESGGIIKVLCVPLGAKKYSNSALKKGDIYNEAMKSGAKGLPFLKVLDNGEIEGIAALVSSLDSAGKINFVKQCGAAPGDLILFGVGPVTSVNKTLDRLRLFVAHDMDLIDHSKHSILWVTDFPMFEWNEPEQRLEALHHPFTAPKPEDMDDLPSARALAYDMVYNGVEIGGGSLRIYKRDVQEKVLEIIGISPEEAESKFGYLLEALDMGAPPHGGIAYGLDRMVMMLGGASSIRDVIAFPKTTTAQCALTRTPSEVDPKQLQDLSIRTK

SEQ ID NO: 11406 - protein, 528 aa, Arabidopsis thaliana
MRLEYVVLVEGTVRSRPNESVNKKMKTGFVEVVAEHVEILNPVRTKLPFLVTTADENKDLIKEEIRLRFRCLDLRRQQMKNNIVLRHNVVKLIRRYLEDRHGFIEIETPILSRSTPEGARDYLVPSRIQSGTFYALPQSPQLFKQMLMVSGFDKYYQIARCFRDEDLRADRQPEFTQLDMEMAFMPMEDMLKLNEDLIRKVFSEIKGIQLPDPFPRLTYADAMDRYGSDRPDTRFDLELKDVSNVFTESSFRVFTEALESGGIIKVLCVPLGAKKYSNSALKKGDIYNEAMKSGAKGLPFLKVLDNGEIEGIAALVSSLDSAGKINFVKQCGAAPGDLILFGVGPVTSVNKTLDRLRLFVAHDMDLIDHSKHSILWVTDFPMFEWNEPEQRLEALHHPFTAPKPEDMDDLPSARALAYDMVYNGVEIGGGSLRIYKRDVQEKVLEIIGISPEEAESKFGYLLEALDMGAPPHGGIAYGLDRMVMMLGGASSIRDVIAFPKTTTAQCALTRTPSEVDPKQLQDLSIRTK

SEQ ID NO: 11407 - DNA, 2769 bp, Arabidopsis thaliana
gaaaataatttctcgaaagagaaaaaaagagagagagagagagagatggagcttctacagtactaaaagctgagtgaatccgaagaaatctccgccaacggaatattttttttctgggagctgaaaatcgttggtgacgatggcggattctctttctagggtttacggaactctgtttagtggtgttaatatatctctcttctcggatccaccgttgaaaaccccctgaagagtgtttttttttccgggtgtaaggtcttttacgtttcgttttttcttgagatttcgtcttccgctgtgagtttctgttctcgcggcgagtttttgtgtagatctgagggttttcaaggcaagagaaagtgtcggtgatgtcgattttctcactcgcgagctcttctgattcacaaagagatgacctaataatggcgttgaaggcggtggttattgtatattgtgtggtttctctcgtcagtgttcaattagctgatgctcaacatgaaggactgccagtttcaccaacgttatcaccttcaacttcaccagttatcactgatctgcccctaccagctgaatttccgcggtttcacagaaagtatttcgcaccacaacaagcagaagcacctcagcattctcccccttatagtcgtttggtcgcttctgatcatccccctaccagctcacatttctccaaaccttccatgaaaaggaatgctcagtctcctggagccggcttggctgatattgctccagcacaatctagcaatggtgttcttcctgatgccttaactcagccacctttgtcgccctccatttcaaattgttgcaaatcagatatggtgcttaaacgaagaagtattggttgccactgcgtgtatcctataaaactggacatccttctcttgaatgtttcagaaactcctagttggaacatgttcttgaacgaatttgctacccagcttggtctcctacctcaccaaatcgagctgattaacttctatgtgctaagcttatcaaggatgaacatatcgatggatatcacccctcattctggaattagtttctcagctagtcaggcatccgcaataaactcttcccttatcagccacaagattcaatttagccctactttggtgggagattacaaacttctaaaccttacttggtttgaggcccctgcaccttcgcaagcacctctagtggcttcttcacctcataaagcaccatcacaaggatcctcagcaactacgtcagtaagatctccagggaaaaagaggcatcccaatcttattcttatcttttctatagccgctggtgtgcttatacttgccataatcactgtacttgttatttgttcccgcgcactccgagaagagaaagctccagatcctcacaaagaagctgtaaaaccaaggaacctggacgctggttcatttgggggatctcttcctcacccagcaagtacacggtttctgtcatatgaagaactcaaagaggcaactagcaattttgaatctgctagcattctaggagaaggtgggtttggcaaggtttacagaggcatcttagccgatggtactgctgtagcgattaagaagctcacaagtggtgggccacaaggtgataaagaattccaggtggagattgatatgcttagccgtcttcatcatcgtaatcttgtgaaacttgtgggttactatagtagtcgagattcttctcagcacctactttgttatgagcttgttccaaatggcagcctcgaggcttggctccatgggcctctcgggttgaactgtcctcttgattgggacaccagaatgaagattgcacttgatgctgcaagaggacttgcataccttcatgaagactcgcaaccctccgttatacacagagattttaaagcctctaatatactccttgaaaacaacttcaacgccaaagttgcagattttggcctagccaaacaagctcctgaaggcaggggtaatcacttatctactcgtgttatgggcacatttggatatgttgcgcctgaatatgcaatgacgggacacctactcgtcaagagtgatgtttatagttacggtgtggtccttctcgaattgttaactggtagaaaacctgtggatatgtcacaaccttcaggccaagaaaatctcgtcacttggacaaggccagttttaagagacaaagaccggttagaagaactagtcgattcaagacttgaaggaaaatacccgaaagaagatttcataagagtatgcacaatcgctgcagcttgtgttgcacctgaagctagccagagaccaacgatgggcgaagtggttcagtcacttaaaatggttcaacgggtggttgagtatcaagacccggttttaaacacttcaaataaagctcgtcctaaccggagacaatcatcagctacgttcgagtcagaagtaacctcttctatgttctcttctggtccttattctggtctaagcgcttttgatcatgaaaatattacacgaacaactgttttctcagaagatcttcacgaaggccgatgatagaagccagggttttcttctttttatttgtttttctcccacttacggtgagaaaatttccaccagagaagcttttgagtttgggacattattacagctctttggattttggattctcctttattggaggatagaattttgtatatatttttgcgttaattaattaatatttgccacaaccatcagatatacaaatagaatttgaatatactttttccaatat

SEQ ID NO: 11408 - protein, 725 aa, Arabidopsis thaliana
MSIFSLASSSDSQRDDLIMALKAVVIVYCVVSLVSVQLADAQHEGLPVSPTLSPSTSPVITDLPLPAEFPRFHRKYFAPQQAEAPQHSPPYSRLVASDHPPTSSHFSKPSMKRNAQSPGAGLADIAPAQSSNGVLPDALTQPPLSPSISNCCKSDMVLKRRSIGCHCVYPIKLDILLLNVSETPSWNMFLNEFATQLGLLPHQIELINFYVLSLSRMNISMDITPHSGISFSASQASAINSSLISHKIQFSPTLVGDYKLLNLTWFEAPAPSQAPLVASSPHKAPSQGSSATTSVRSPGKKRHPNLILIFSIAAGVLILAIITVLVICSRALREEKAPDPHKEAVKPRNLDAGSFGGSLPHPASTRFLSYEELKEATSNFESASILGEGGFGKVYRGILADGTAVAIKKLTSGGPQGDKEFQVEIDMLSRLHHRNLVKLVGYYSSRDSSQHLLCYELVPNGSLEAWLHGPLGLNCPLDWDTRMKIALDAARGLAYLHEDSQPSVIHRDFKASNILLENNFNAKVADFGLAKQAPEGRGNHLSTRVMGTFGYVAPEYAMTGHLLVKSDVYSYGVVLLELLTGRKPVDMSQPSGQENLVTWTRPVLRDKDRLEELVDSRLEGKYPKEDFIRVCTIAAACVAPEASQRPTMGEVVQSLKMVQRVVEYQDPVLNTSNKARPNRRQSSATFESEVTSSMFSSGPYSGLSAFDHENITRTTVFSEDLHEGR

SEQ ID NO: 11409 - protein, 707 aa, Arabidopsis thaliana
MALKAVVIVYCVVSLVSVQLADAQHEGLPVSPTLSPSTSPVITDLPLPAEFPRFHRKYFAPQQAEAPQHSPPYSRLVASDHPPTSSHFSKPSMKRNAQSPGAGLADIAPAQSSNGVLPDALTQPPLSPSISNCCKSDMVLKRRSIGCHCVYPIKLDILLLNVSETPSWNMFLNEFATQLGLLPHQIELINFYVLSLSRMNISMDITPHSGISFSASQASAINSSLISHKIQFSPTLVGDYKLLNLTWFEAPAPSQAPLVASSPHKAPSQGSSATTSVRSPGKKRHPNLILIFSIAAGVLILAIITVLVICSRALREEKAPDPHKEAVKPRNLDAGSFGGSLPHPASTRFLSYEELKEATSNFESASILGEGGFGKVYRGILADGTAVAIKKLTSGGPQGDKEFQVEIDMLSRLHHRNLVKLVGYYSSRDSSQHLLCYELVPNGSLEAWLHGPLGLNCPLDWDTRMKIALDAARGLAYLHEDSQPSVIHRDFKASNILLENNFNAKVADFGLAKQAPEGRGNHLSTRVMGTFGYVAPEYAMTGHLLVKSDVYSYGVVLLELLTGRKPVDMSQPSGQENLVTWTRPVLRDKDRLEELVDSRLEGKYPKEDFIRVCTIAAACVAPEASQRPTMGEVVQSLKMVQRVVEYQDPVLNTSNKARPNRRQSSATFESEVTSSMFSSGPYSGLSAFDHENITRTTVFSEDLHEGR

SEQ ID NO: 11410 - protein, 615 aa, Arabidopsis thaliana
MKRNAQSPGAGLADIAPAQSSNGVLPDALTQPPLSPSISNCCKSDMVLKRRSIGCHCVYPIKLDILLLNVSETPSWNMFLNEFATQLGLLPHQIELINFYVLSLSRMNISMDITPHSGISFSASQASAINSSLISHKIQFSPTLVGDYKLLNLTWFEAPAPSQAPLVASSPHKAPSQGSSATTSVRSPGKKRHPNLILIFSIAAGVLILAIITVLVICSRALREEKAPDPHKEAVKPRNLDAGSFGGSLPHPASTRFLSYEELKEATSNFESASILGEGGFGKVYRGILADGTAVAIKKLTSGGPQGDKEFQVEIDMLSRLHHRNLVKLVGYYSSRDSSQHLLCYELVPNGSLEAWLHGPLGLNCPLDWDTRMKIALDAARGLAYLHEDSQPSVIHRDFKASNILLENNFNAKVADFGLAKQAPEGRGNHLSTRVMGTFGYVAPEYAMTGHLLVKSDVYSYGVVLLELLTGRKPVDMSQPSGQENLVTWTRPVLRDKDRLEELVDSRLEGKYPKEDFIRVCTIAAACVAPEASQRPTMGEVVQSLKMVQRVVEYQDPVLNTSNKARPNRRQSSATFESEVTSSMFSSGPYSGLSAFDHENITRTTVFSEDLHEGR

SEQ ID NO: 11411 - DNA, 2174 bp, Arabidopsis thaliana
gacgactattttcccttcacttcttcatcttcttcctgcgccgcttttcaaacctattcgaccagacaagctcggaaatttcatattccatgggtaagacgaagttaaaacctgtggaggatgtgaactcggaagtggtggacgaagttgagaaagcagaggaagttgaggaacagagaaacgacagagaacaagaagaagagcaaaaagaagaagaggcacctaaaagtttcgaagagctagggcttgattctcgtctaattcgtgccctaactaaaaagggtatagagaaaccaacccttattcagcaatcagccattccttacattctggaaggaaaagatgtggttgctagggcaaagactggttcaggtaagactttggcttaccttttgccattgctccagaagctattttcagcagattctgtgagcaagaagaagcttgctccttctgcatttattcttgttccatctcgagaactatgtcagcaggtttacacagaggtttcatcgcttattgagctgtgtagagttcagctaaaagcagtgcagttgactagtagcatgtctgcatctgatatgcgtaatgcattggctggactgcctgagattcttgtctccacacctgcttgtattccgaaatgttttgctgccggagttttagagcccactgctgtcagtgaatcactttcaattctggttcttgatgaggcagatcttttgttgtcatatggatatgaagataatctaaggtcggtaacatcaataatcccaaggcgttgccaatgccttcttatgtcggctaccacaagctctgatgtcgaaaaattgaagaaattgattctgcacaacccaatcgttttgaccttgacagaagataatgacaaggaagaggccgtcccaagtaatgttcagcagttttggatctcttgcagtgctcaggataaactgcttcacattcttgctctcttgaagctagaggttgttcagaagaaaattctgattttcatcaatacaattgacatgggattcaggttgaaattattcttggaaaagtttggaatcaagtctgcaattttaaacggggaattgcctcagaattctcgacttcatatccttgagcaattcaatgcaggacttttcgattacttgattgcaacggatgataatagccagactaaaaaacaaaaggaagaggctaaaggtgaggctaacaaggagaacaagaaaaataataagcgtagcaaaccaaagctagatgctgagttcggtgtagttaggggaattgatttcaaaaaagttcacacggttataaactttgatatgcctcaaagtgttactggatatatccatcgaattgagcgtacagggagagcatatagcagcggatcttccgtttctcttatttctcctgatgagatggaagggtttgaagatataaagtccttcttagcaagcgacaagaacaaggatattgatattatcacaccctttcctttgttgaccgaaaatgctgtcgagtctcttagatatagagctgaggatgtggcaaagagtgttacaaagattgcggttcgagagtctcgagctcaggatttgaggaatgagataatcaactctgaaaagttaaaagctcattttgaagctaatccaagagacttagatctgttgagacatgacaagcctctgagtaagactgcacctgcaccacatctaaaggacatccccgagtatctagtggacgcaaagactcaagaagcaagcaagatggtaaagctagctagagccgcaatgggcaacactaggagatctggtggaggtggtggtcgcaacaacaaaaacaagaaacggtctagaaaaggcagcgacccactcaaaaccttcaaccctaatgggtctaagagaggagccgttggccagaaggatggcaaagattctagctcgaccaaaaaacagaagacagtttaagttatttcgtttagctcaagtgtaaccaaattttgactcgttataatcaatcacacaaaagaacggagacgagagcatcaatctttgtagctctattcatgtggcatcaggagacaaagttttgtgagcatattattagccttttgaggtttttattgaaatagatttttgtaaaaaaaaaaaaaaaaaaactagagaactagt

SEQ ID NO: 11412 - protein, 655 aa, Arabidopsis thaliana
RLFSLHFFIFFLRRFSNLFDQTSSEISYSMGKTKLKPVEDVNSEVVDEVEKAEEVEEQRNDREQEEEQKEEEAPKSFEELGLDSRLIRALTKKGIEKPTLIQQSAIPYILEGKDVVARAKTGSGKTLAYLLPLLQKLFSADSVSKKKLAPSAFILVPSRELCQQVYTEVSSLIELCRVQLKAVQLTSSMSASDMRNALAGLPEILVSTPACIPKCFAAGVLEPTAVSESLSILVLDEADLLLSYGYEDNLRSVTSIIPRRCQCLLMSATTSSDVEKLKKLILHNPIVLTLTEDNDKEEAVPSNVQQFWISCSAQDKLLHILALLKLEVVQKKILIFINTIDMGFRLKLFLEKFGIKSAILNGELPQNSRLHILEQFNAGLFDYLIATDDNSQTKKQKEEAKGEANKENKKNNKRSKPKLDAEFGVVRGIDFKKVHTVINFDMPQSVTGYIHRIERTGRAYSSGSSVSLISPDEMEGFEDIKSFLASDKNKDIDIITPFPLLTENAVESLRYRAEDVAKSVTKIAVRESRAQDLRNEIINSEKLKAHFEANPRDLDLLRHDKPLSKTAPAPHLKDIPEYLVDAKTQEASKMVKLARAAMGNTRRSGGGGGRNNKNKKRSRKGSDPLKTFNPNGSKRGAVGQKDGKDSSSTKKQKTV

SEQ ID NO: 11413 - protein, 626 aa, Arabidopsis thaliana
MGKTKLKPVEDVNSEVVDEVEKAEEVEEQRNDREQEEEQKEEEAPKSFEELGLDSRLIRALTKKGIEKPTLIQQSAIPYILEGKDVVARAKTGSGKTLAYLLPLLQKLFSADSVSKKKLAPSAFILVPSRELCQQVYTEVSSLIELCRVQLKAVQLTSSMSASDMRNALAGLPEILVSTPACIPKCFAAGVLEPTAVSESLSILVLDEADLLLSYGYEDNLRSVTSIIPRRCQCLLMSATTSSDVEKLKKLILHNPIVLTLTEDNDKEEAVPSNVQQFWISCSAQDKLLHILALLKLEVVQKKILIFINTIDMGFRLKLFLEKFGIKSAILNGELPQNSRLHILEQFNAGLFDYLIATDDNSQTKKQKEEAKGEANKENKKNNKRSKPKLDAEFGVVRGIDFKKVHTVINFDMPQSVTGYIHRIERTGRAYSSGSSVSLISPDEMEGFEDIKSFLASDKNKDIDIITPFPLLTENAVESLRYRAEDVAKSVTKIAVRESRAQDLRNEIINSEKLKAHFEANPRDLDLLRHDKPLSKTAPAPHLKDIPEYLVDAKTQEASKMVKLARAAMGNTRRSGGGGGRNNKNKKRSRKGSDPLKTFNPNGSKRGAVGQKDGKDSSSTKKQKTV

SEQ ID NO: 11414 - protein, 467 aa, Arabidopsis thaliana
MSASDMRNALAGLPEILVSTPACIPKCFAAGVLEPTAVSESLSILVLDEADLLLSYGYEDNLRSVTSIIPRRCQCLLMSATTSSDVEKLKKLILHNPIVLTLTEDNDKEEAVPSNVQQFWISCSAQDKLLHILALLKLEVVQKKILIFINTIDMGFRLKLFLEKFGIKSAILNGELPQNSRLHILEQFNAGLFDYLIATDDNSQTKKQKEEAKGEANKENKKNNKRSKPKLDAEFGVVRGIDFKKVHTVINFDMPQSVTGYIHRIERTGRAYSSGSSVSLISPDEMEGFEDIKSFLASDKNKDIDIITPFPLLTENAVESLRYRAEDVAKSVTKIAVRESRAQDLRNEIINSEKLKAHFEANPRDLDLLRHDKPLSKTAPAPHLKDIPEYLVDAKTQEASKMVKLARAAMGNTRRSGGGGGRNNKNKKRSRKGSDPLKTFNPNGSKRGAVGQKDGKDSSSTKKQKTV

SEQ ID NO: 11415 - DNA, 1779 bp, Arabidopsis thaliana
gaagacgtttctctctgcttcaccaccagagagatacatccaaaaattcatatctttccttcatttttattggcgttttaagaaaacaaagcttccccaattagggttttgtattagaagaatgggattgtggaatggaaaaggcaccggaggatttatcctctaccttctcgtggctttctccgtcgccgtcttctctgtttcttacgtcggagacacaacaaaccctattcatcatcatctctcttctctctctgccaccgaaaaaatttggccggatttgaagtttagctggaaacttgtgttggctacagtgatagcgtttctaggatcagcttgtgggactgttggtggtgttggaggtggtgggatttttgttcctatgctcactcttatactcgggttcgatacaaaatccgcagctgcaatatcaaaatgtatgataatgggagcatcagcatcatcagtttggtacaatgtacgagttcgtcatccgacaaaagaagtaccaatcttagattatgatcttgctcttctctttcaaccaatgcttcttctcggtatcactgttggtgtttctctcagtgttgtgttcccttattggctcattactgtcctcatcatcattcttttcgtcggtacttcttcgagatctttttttaaaggcattgagatgtggaaggaagagacattgttaaagaacgaaatggcgcagcaacgagctaatatggttaattcccggggagaacttttaatcgatacagagtatgagccgctttaccctagagaagaaaaatcagagctggaaataatacgctccaacctcaaatggaaagggcttctaattctagtaactgtgtggttgactttcttgctcattcaaattgtcaagaacgaaataaaggtctgcagcacaatatattggatactattcatcgtacagttcccagttgctttagcggtgtttgggtttgaagcaagcaaattgtatacagcgaacaaaaagaggttaaacagtggcaacactgaatgtatctgtgaagctacgatcgagtggactcctctgagtctaatcttctgtggtctctgtggtctcattggaggtatcgtaggtggtctccttggatccggtggtggatttgttctcgggcctttgcttcttgagattggagtcatcccacaggttgctagcgcaacagctacctttgtgatgatgttttcttcgtccttatccgtagtcgagttctatctcctcaagagattcccaataccatacgcaatgtacttgatttcggtatcgattcttgccggtttttggggacaatcctttataagaaagctcgtggcgatcctgagaagagcttccataatcgttttcgttctctcaggagtcatttgtgcaagtgctctcacaatgggagtgattgggatagagaagagcataaagatgatacataaccatgaattcatgggattcttaggattctgcagcagtcaatgaatcaaccatctatctgaacaaaaatttcaagtgttttgttttcatttactggacaatttcggttgtccaacaccattattgtgagaagttataaaattagattgttttacttgcagtccaagtcatttgtgctctgttcttggtcaatacatagttgaccatcttcagaaatagagtttgtctaaattgttgtcattgtgttttgcttgtattcaaacgttgtattattatttgcgagacgatagataaaataaaaatggaagtctttttctattcac

SEQ ID NO: 11416 - protein, 499 aa, Arabidopsis thaliana
KTFLSASPPERYIQKFISFLHFYWRFKKTKLPQLGFCIRRMGLWNGKGTGGFILYLLVAFSVAVFSVSYVGDTTNPIHHHLSSLSATEKIWPDLKFSWKLVLATVIAFLGSACGTVGGVGGGGIFVPMLTLILGFDTKSAAAISKCMIMGASASSVWYNVRVRHPTKEVPILDYDLALLFQPMLLLGITVGVSLSVVFPYWLITVLIIILFVGTSSRSFFKGIEMWKEETLLKNEMAQQRANMVNSRGELLIDTEYEPLYPREEKSELEIIRSNLKWKGLLILVTVWLTFLLIQIVKNEIKVCSTIYWILFIVQFPVALAVFGFEASKLYTANKKRLNSGNTECICEATIEWTPLSLIFCGLCGLIGGIVGGLLGSGGGFVLGPLLLEIGVIPQVASATATFVMMFSSSLSVVEFYLLKRFPIPYAMYLISVSILAGFWGQSFIRKLVAILRRASIIVFVLSGVICASALTMGVIGIEKSIKMIHNHEFMGFLGFCSSQ

SEQ ID NO: 11417 - protein, 459 aa, Arabidopsis thaliana
MGLWNGKGTGGFILYLLVAFSVAVFSVSYVGDTTNPIHHHLSSLSATEKIWPDLKFSWKLVLATVIAFLGSACGTVGGVGGGGIFVPMLTLILGFDTKSAAAISKCMIMGASASSVWYNVRVRHPTKEVPILDYDLALLFQPMLLLGITVGVSLSVVFPYWLITVLIIILFVGTSSRSFFKGIEMWKEETLLKNEMAQQRANMVNSRGELLIDTEYEPLYPREEKSELEIIRSNLKWKGLLILVTVWLTFLLIQIVKNEIKVCSTIYWILFIVQFPVALAVFGFEASKLYTANKKRLNSGNTECICEATIEWTPLSLIFCGLCGLIGGIVGGLLGSGGGFVLGPLLLEIGVIPQVASATATFVMMFSSSLSVVEFYLLKRFPIPYAMYLISVSILAGFWGQSFIRKLVAILRRASIIVFVLSGVICASALTMGVIGIEKSIKMIHNHEFMGFLGFCSSQ

SEQ ID NO: 11418 - protein, 372 aa, Arabidopsis thaliana
MLTLILGFDTKSAAAISKCMIMGASASSVWYNVRVRHPTKEVPILDYDLALLFQPMLLLGITVGVSLSVVFPYWLITVLIIILFVGTSSRSFFKGIEMWKEETLLKNEMAQQRANMVNSRGELLIDTEYEPLYPREEKSELEIIRSNLKWKGLLILVTVWLTFLLIQIVKNEIKVCSTIYWILFIVQFPVALAVFGFEASKLYTANKKRLNSGNTECICEATIEWTPLSLIFCGLCGLIGGIVGGLLGSGGGFVLGPLLLEIGVIPQVASATATFVMMFSSSLSVVEFYLLKRFPIPYAMYLISVSILAGFWGQSFIRKLVAILRRASIIVFVLSGVICASALTMGVIGIEKSIKMIHNHEFMGFLGFCSSQ

SEQ ID NO: 11419 - DNA, 2589 bp, Arabidopsis thaliana
ggtgaatgtaaaaaacaagaaaaaaaataaaatttatttttctctctcgcttggttcaaccgtggttgttcatcggaaaaatatcttcggcttcaatttcgttcgatttaccctaaattctcgactagtgttcgtcaatcccacttccaattccacatttcaaaccttttcgggaagttgaaatcaaaagcatgaatgcttaaacagtttacgcattattgcgaaatgcaagccgagctgatacccgaaggtcctaacggtgagggccgtttatcaaaccagaacagcaaccctaatttactctcttctgcttctatcagtattactcagtttcctgctaagaagccgactaggcaatgggctgcttggacacatcaagaagaggaaagtttcttcactgctcttcgtcaagttggaaagaattttgagaagataacttctcgtgttcagagcaaaaacaaggaccaggtcaggcattactattatcgtttagtgaggcgtatgaacaaacttttgggcccggatctgagccttgatgccaagaacccaaaggacaccaatgctgcaatgctacgatggtggtctttgcttgaaaagtatagctgcaaagcttcaaaacttcatctcaagccccggagattcaaactatttatagaggccttggaacaccaattgctgaaagaccgcagaaagagcataagaaaacggacttgccagggagaaaatctctcttctgcttccctcggaaacacctcaagtcatagtagagaaagaggattggataaccgtccatttaaacttattctctccgacggccaaaatgttaaaaagctagggcctggaagagcatctaccaaacatggtgaaagcttaagtgtcaaccttggtgacgaaaaagaagacacagcctttgggagaggtggaaggcaacggcgaaaacaaggttatagaaaatgggaaaaagctgcaatagatggggtctctctggttgctgatgctgcagagcatttggaacgaacatcaattgacaaagatatggatgatcaaacagctggtgaagttcctctcagtgatgccaatatgcagttttctgccaagcttaaacttcagctgttcccgattgatgaatgtactcgaagatccttggaaatggataagcacaatccgcatcttgaacttactcttagtaatcgcaagaagatatcatctgtacttgaacatctcaatcgcaaatggggaagctcaagttgtgcgactggagagctattgctatttccttacaacgcacgaaaagaaactgtaacgtgccatcagaggtggacccatgactcttttctaagcgcagcagaagtgcattcaatggtcggaagtccttcggttttccgcttaaggtatggttggtttgtccatgatgcgtcaggttctattatttctcaagttccaacttcagatccttgcccttcactcgaggatgacatgaatgtggataggttgaacgaggtcaacatgctcctgggtgaatcaggacccttgtctgtgcattcaactgctgaacaaacgacatctgtagagcccagtcagggtctagtatgtgcatctggtgtccatgatcgtcccgcaagatctagagatgattatgaacctgcttcaacgagtattactccacttgagcatttgagcggcggtaatgcacaatcaccaggagaatgggctgatagtcttactaacataagtataggtgatctactttctgaagtgcccgatgacatagatagtgatggtgttgatccacctgccaccgaaggttcacattacctccttcgagatgtcccatttacctctgactcttttgatgctgcaattgctgctcatatactaagacaccagaacaagccaagtgctcaactaccgctgacttctggctcttcctctctgtgggatgatgaagaaacacgtgatgccttctctttccaaaaaaatcgtttcgcaaattccaccgagctggctagtgttgcttctcctaaaggtgttggcagagtaaatggagagccttcacagttggtggaggcttcatccggcgatgagggatcttataaccctcatgacgatggagatccaatggaagagggtccagcagaccctcatacgatggattctccagggaagaccccttgtggacttgcggatgtatactggcccgactcgttaggaccactggatttagacattagaacgtcaaagtatacagatgatttgatccttagtgagagcctcgggggattgagccgtctgatagcaaccagccttgatgcgtttcagaactgctcgctctttgggttcgacaataagaaggacaagtctaacatggtatgaaatggaaccaaagctaaagcatggggtccaaatgttgatagttgaaaaagaaagtgacttcttgccttttgaaaaaagaaacttttatcaccaactgatagcttcactgtacaaaaatttgatgtaaccttttactcttcctttcacacattcttttgtgttgatacatgtttctctgtgtacacttttactgttaatttacatgtttatttggct

SEQ ID NO: 11420 - protein, 725 aa, Arabidopsis thaliana
MLKQFTHYCEMQAELIPEGPNGEGRLSNQNSNPNLLSSASISITQFPAKKPTRQWAAWTHQEEESFFTALRQVGKNFEKITSRVQSKNKDQVRHYYYRLVRRMNKLLGPDLSLDAKNPKDTNAAMLRWWSLLEKYSCKASKLHLKPRRFKLFIEALEHQLLKDRRKSIRKRTCQGENLSSASLGNTSSHSRERGLDNRPFKLILSDGQNVKKLGPGRASTKHGESLSVNLGDEKEDTAFGRGGRQRRKQGYRKWEKAAIDGVSLVADAAEHLERTSIDKDMDDQTAGEVPLSDANMQFSAKLKLQLFPIDECTRRSLEMDKHNPHLELTLSNRKKISSVLEHLNRKWGSSSCATGELLLFPYNARKETVTCHQRWTHDSFLSAAEVHSMVGSPSVFRLRYGWFVHDASGSIISQVPTSDPCPSLEDDMNVDRLNEVNMLLGESGPLSVHSTAEQTTSVEPSQGLVCASGVHDRPARSRDDYEPASTSITPLEHLSGGNAQSPGEWADSLTNISIGDLLSEVPDDIDSDGVDPPATEGSHYLLRDVPFTSDSFDAAIAAHILRHQNKPSAQLPLTSGSSSLWDDEETRDAFSFQKNRFANSTELASVASPKGVGRVNGEPSQLVEASSGDEGSYNPHDDGDPMEEGPADPHTMDSPGKTPCGLADVYWPDSLGPLDLDIRTSKYTDDLILSESLGGLSRLIATSLDAFQNCSLFGFDNKKDKSNMV

SEQ ID NO: 11421 - protein, 715 aa, Arabidopsis thaliana
MQAELIPEGPNGEGRLSNQNSNPNLLSSASISITQFPAKKPTRQWAAWTHQEEESFFTALRQVGKNFEKITSRVQSKNKDQVRHYYYRLVRRMNKLLGPDLSLDAKNPKDTNAAMLRWWSLLEKYSCKASKLHLKPRRFKLFIEALEHQLLKDRRKSIRKRTCQGENLSSASLGNTSSHSRERGLDNRPFKLILSDGQNVKKLGPGRASTKHGESLSVNLGDEKEDTAFGRGGRQRRKQGYRKWEKAAIDGVSLVADAAEHLERTSIDKDMDDQTAGEVPLSDANMQFSAKLKLQLFPIDECTRRSLEMDKHNPHLELTLSNRKKISSVLEHLNRKWGSSSCATGELLLFPYNARKETVTCHQRWTHDSFLSAAEVHSMVGSPSVFRLRYGWFVHDASGSIISQVPTSDPCPSLEDDMNVDRLNEVNMLLGESGPLSVHSTAEQTTSVEPSQGLVCASGVHDRPARSRDDYEPASTSITPLEHLSGGNAQSPGEWADSLTNISIGDLLSEVPDDIDSDGVDPPATEGSHYLLRDVPFTSDSFDAAIAAHILRHQNKPSAQLPLTSGSSSLWDDEETRDAFSFQKNRFANSTELASVASPKGVGRVNGEPSQLVEASSGDEGSYNPHDDGDPMEEGPADPHTMDSPGKTPCGLADVYWPDSLGPLDLDIRTSKYTDDLILSESLGGLSRLIATSLDAFQNCSLFGFDNKKDKSNMV

SEQ ID NO: 11422 - protein, 623 aa, Arabidopsis thaliana
MNKLLGPDLSLDAKNPKDTNAAMLRWWSLLEKYSCKASKLHLKPRRFKLFIEALEHQLLKDRRKSIRKRTCQGENLSSASLGNTSSHSRERGLDNRPFKLILSDGQNVKKLGPGRASTKHGESLSVNLGDEKEDTAFGRGGRQRRKQGYRKWEKAAIDGVSLVADAAEHLERTSIDKDMDDQTAGEVPLSDANMQFSAKLKLQLFPIDECTRRSLEMDKHNPHLELTLSNRKKISSVLEHLNRKWGSSSCATGELLLFPYNARKETVTCHQRWTHDSFLSAAEVHSMVGSPSVFRLRYGWFVHDASGSIISQVPTSDPCPSLEDDMNVDRLNEVNMLLGESGPLSVHSTAEQTTSVEPSQGLVCASGVHDRPARSRDDYEPASTSITPLEHLSGGNAQSPGEWADSLTNISIGDLLSEVPDDIDSDGVDPPATEGSHYLLRDVPFTSDSFDAAIAAHILRHQNKPSAQLPLTSGSSSLWDDEETRDAFSFQKNRFANSTELASVASPKGVGRVNGEPSQLVEASSGDEGSYNPHDDGDPMEEGPADPHTMDSPGKTPCGLADVYWPDSLGPLDLDIRTSKYTDDLILSESLGGLSRLIATSLDAFQNCSLFGFDNKKDKSNMV

SEQ ID NO: 11423 - DNA, 1841 bp, Arabidopsis thaliana
gctttcgaacaaaaggaggaaactttaaaggcgaactctttagtattcgatccgccattgaagctcctctgactctctctcaaagtacttctctgattcgtcattcctctgcttcgtttagtttaaagggtacggaactgacctgagaggtttgatttgaatctaaaaaggtttagttttttgttaagtttgatggggacagggaattctaaagaaaactggagacagtcatcgtttaggtcaacttctgcttcatcagcatcaccatcttcatcttcatgggcttctcaacaaagttatcctcagtatggtgcagaaagctataattaccctcctccaccttcttatgcccaacctcctgagtatacgcaacctcctcctcctttatatagtactcagccttactctgctccgtcttattctgcaccgccttctcaaagttatggtagtgataataagaagaggttggagcgcaagtattcgaaaatttctgatgattactcttctttggagcaggtgacggaggctcttgcacgggcaggtctagaatcttcaaatctcatcgttggtattgatttcactaagagtaacgaatggacaggggccaggtccttcaataggaaaagcttacacttcataggcagtagtcccaatccttatgaacaagcgataactatcataggaagaaccttagccgcctttgacgaggacaacttgattccatgttatggttttggagatgcatcaacacatgatcaagacgtgttcagtttcaattcagaggatagattctgtaatggatttgaggaagtactttcccggtataaggagatcgtgcctcaacttaagcttgcagggccaacatcctttgctccgatcatcgatatggccatgaccattgttgagcagagtggtgggcaatatcacgtcctagtgataatagcagatgggcaggttacaagaagtgttgacacggaaaatggacagttaagtccacaagaacagaagacggtagatgcgatcgtgcaagcgagtaagcttcctctatcaatcgtcttagtcggggtgggggatggaccttgggacatgatgagggaatttgacgataatattccggccagagcgtttgataacttccaattcgtgaacttcacagagatcatggcaaagaacaaagctcaatccttgaaggaaacagagtttgccctttctgctctcatggagattcctcaacaatacaaggcgacaatagagcttaaccttttaggaagaagaaatggatatatcccggagagattccctcttccgcctccaatgcgcggtggatcatcgtcctacaacagtccaaagccttcacgtcttccaagtttcaaaccgagtgttcctcctcatccaactgaaggctatcacgtaaggtctagtcccgtcccaccccctacaagctctgcttctgataaccagctatgtccgatttgtttgagcaacccgaaagacatggcctttggttgtggccatcagacttgttgcgagtgtggaccagatcttcaaatgtgtccgatttgccgtgcaccaatccagacaagaataaagctctactaacaaacaagtagaccagacatcgacgacccttctctctctttcatcttctttcaacttcttttgggaatttagtttgaatctaatcactgaaatttctccgagaaagatcggatctttgtataaagaaaaaaacaatgcttgttcgtttactcactttcctaacttcatcttgtcccaaaacctttgacttctttctttctttctatctttcttctttgcttggagtaaaaaaattgttattc

SEQ ID NO: 11424 - protein, 468 aa, Arabidopsis thaliana
MGTGNSKENWRQSSFRSTSASSASPSSSSWASQQSYPQYGAESYNYPPPPSYAQPPEYTQPPPPLYSTQPYSAPSYSAPPSQSYGSDNKKRLERKYSKISDDYSSLEQVTEALARAGLESSNLIVGIDFTKSNEWTGARSFNRKSLHFIGSSPNPYEQAITIIGRTLAAFDEDNLIPCYGFGDASTHDQDVFSFNSEDRFCNGFEEVLSRYKEIVPQLKLAGPTSFAPIIDMAMTIVEQSGGQYHVLVIIADGQVTRSVDTENGQLSPQEQKTVDAIVQASKLPLSIVLVGVGDGPWDMMREFDDNIPARAFDNFQFVNFTEIMAKNKAQSLKETEFALSALMEIPQQYKATIELNLLGRRNGYIPERFPLPPPMRGGSSSYNSPKPSRLPSFKPSVPPHPTEGYHVRSSPVPPPTSSASDNQLCPICLSNPKDMAFGCGHQTCCECGPDLQMCPICRAPIQTRIKLY

SEQ ID NO: 11425 - protein, 237 aa, Arabidopsis thaliana
MAMTIVEQSGGQYHVLVIIADGQVTRSVDTENGQLSPQEQKTVDAIVQASKLPLSIVLVGVGDGPWDMMREFDDNIPARAFDNFQFVNFTEIMAKNKAQSLKETEFALSALMEIPQQYKATIELNLLGRRNGYIPERFPLPPPMRGGSSSYNSPKPSRLPSFKPSVPPHPTEGYHVRSSPVPPPTSSASDNQLCPICLSNPKDMAFGCGHQTCCECGPDLQMCPICRAPIQTRIKLY

SEQ ID NO: 11426 - protein, 235 aa, Arabidopsis thaliana
MTIVEQSGGQYHVLVIIADGQVTRSVDTENGQLSPQEQKTVDAIVQASKLPLSIVLVGVGDGPWDMMREFDDNIPARAFDNFQFVNFTEIMAKNKAQSLKETEFALSALMEIPQQYKATIELNLLGRRNGYIPERFPLPPPMRGGSSSYNSPKPSRLPSFKPSVPPHPTEGYHVRSSPVPPPTSSASDNQLCPICLSNPKDMAFGCGHQTCCECGPDLQMCPICRAPIQTRIKLY

SEQ ID NO: 11427 - DNA, 1152 bp, Arabidopsis thaliana
tcactagtcccccccccccccccggattagaacgaaaccctaattggtcgacgaaatgaaagggattgcgaggcttgtaacttctctatcgcgaatcggaggtcgtatgattgtttctggaacaagtactgtatcttcttcttcgtcttcctctcttctgctatctcgtcgctcgcttttcatctctatcaccaatttacttaattctcggaccaaggattctgctcttccttcattgaattcttcttcacttgttcagaaatggaacttcctcggagggcagagaagaacaatgtttatccaaacacaatcaactccaaatccttcttctctcatgttttatcctggcaaatcagtcatggaagttggaagtgctgattttccaaatgttcgttctgctctgggttcgccattagccaaatctatttactccattgatggtgtggttcgagttttctttgggtcagattttgtcactgtaactaagtcagatgatgtatcatgggatattctcaagcctgagatatttgcagcagtcatggatttctattcttctggcgagcctttgtttctcgactcacaagctgctgctgccaaggatactgccatcagcgaggatgactctgaaacagtagcaatgatcaaggaactcttagaaacacgcatcagaccagcagttcaagatgatggtggggacattgagtattgtgggtttgatccggaaagcggtatagtgaagctgaggatgcaaggagcttgtagtggttgtccgagctcatctgttactttgaaatcgggaattgaaaatatgctgatgcattatgtatccgaggtgaaaggtgtagaacaagagtttgatggggaagatgaagagggaacgttgtctggagagatgagagtagagtaggagacctcctctttgctctttagtgtacagaaaaataaatcccagtgagtgcacttttttcttcaatccttggtgttgtttctgggcttttgaatcacactcaaggatctgtttactgagagatctgagttgttgtttttttgtagcttttgttgacttacacttgttttgattatttgaggttaagcaacgaaagatgtaccagaatatttgaaatttccgagtattataacacgatttacaag

SEQ ID NO: 11428 - protein, 283 aa, Arabidopsis thaliana
MKGIARLVTSLSRIGGRMIVSGTSTVSSSSSSSLLLSRRSLFISITNLLNSRTKDSALPSLNSSSLVQKWNFLGGQRRTMFIQTQSTPNPSSLMFYPGKSVMEVGSADFPNVRSALGSPLAKSIYSIDGVVRVFFGSDFVTVTKSDDVSWDILKPEIFAAVMDFYSSGEPLFLDSQAAAAKDTAISEDDSETVAMIKELLETRIRPAVQDDGGDIEYCGFDPESGIVKLRMQGACSGCPSSSVTLKSGIENMLMHYVSEVKGVEQEFDGEDEEGTLSGEMRVE

SEQ ID NO: 11429 - protein, 266 aa, Arabidopsis thaliana
MIVSGTSTVSSSSSSSLLLSRRSLFISITNLLNSRTKDSALPSLNSSSLVQKWNFLGGQRRTMFIQTQSTPNPSSLMFYPGKSVMEVGSADFPNVRSALGSPLAKSIYSIDGVVRVFFGSDFVTVTKSDDVSWDILKPEIFAAVMDFYSSGEPLFLDSQAAAAKDTAISEDDSETVAMIKELLETRIRPAVQDDGGDIEYCGFDPESGIVKLRMQGACSGCPSSSVTLKSGIENMLMHYVSEVKGVEQEFDGEDEEGTLSGEMRVE

SEQ ID NO: 11430 - protein, 204 aa, Arabidopsis thaliana
MFIQTQSTPNPSSLMFYPGKSVMEVGSADFPNVRSALGSPLAKSIYSIDGVVRVFFGSDFVTVTKSDDVSWDILKPEIFAAVMDFYSSGEPLFLDSQAAAAKDTAISEDDSETVAMIKELLETRIRPAVQDDGGDIEYCGFDPESGIVKLRMQGACSGCPSSSVTLKSGIENMLMHYVSEVKGVEQEFDGEDEEGTLSGEMRVE

SEQ ID NO: 11431 - DNA, 1309 bp, Arabidopsis thaliana
ggccgtgaaaaaatgaatcatcttctaatcttagcgagaaactcgctgcggcggcggaattttaatctccgaccaccgtctcgttccttcagtagcaccatctcaccggaatcgaatcgctcgtcttttggcatagcattcgatatcgatggagttattcttcttggttcctctcccgttggtggctctcctagcgctctccgacgtctctacgatgattccggtgctttgaagatacctttcttattcttgactaatggaggtggcttgcctgaatctaaacgggcttctgagatgagtcatttattaggtgttcaagtttctccattgcaggtgatacaagcacattcaccttttcggaagctagtaaataggtttggaaatgagctcgttgttgcagcgggaaaaggggaacctgccgcggtgatgtctaattatggtttcaaaaacgtcatttcaatggacgaatatgcctcttactttgacaacattgatcccttggcgccatataagaaattgatgttcaggcaggatggtcacaaggagcttagatcaagagaagatgttctatcccaaagagttcaggcagcattaatagttagtgatccagttgattggagccgagacatccaggttctttgtgacattttacgaactggaggacttcctgggaaagaaattggacctcaacctcatttgtacattgccaatgacgatttagactaccagactgagtttcctactgaacgtcttggcatgggagcttttagaatcgcgttagaatcaatcttcaacagaattcatgaaaaacctctagagtacacatcatttggcaaaccaaatccatttgtgttcaaaaacgcagaagatgttctgaaagaattcgctacatccccttattcttcaaaccaaggaagtcaccacttcaagacactatatatgatcggggacaaccctaaaatcgacatcagaggcgcacgacaggctgggactccttggttttcaatattaacgagaaccggagtattcaaaggaaaagataaccatgccgagtttcctgctgatctggtcgttgacaccgtcgaggaagcagttgatttcattttgacaagagagtccgccaagcaaagcttactgtcatgagttatatcactctcattttttctgaccagtccaagtatttcttgacgatttgagattttatttaacatattggttattttcacggcgaggccaaagaaatggtgtagtaacaagtaaacagaaattagtgaacattatcgaatctagaagacactattttctttac

SEQ ID NO: 11432 - protein, 380 aa, Arabidopsis thaliana
GREKMNHLLILARNSLRRRNFNLRPPSRSFSSTISPESNRSSFGIAFDIDGVILLGSSPVGGSPSALRRLYDDSGALKIPFLFLTNGGGLPESKRASEMSHLLGVQVSPLQVIQAHSPFRKLVNRFGNELVVAAGKGEPAAVMSNYGFKNVISMDEYASYFDNIDPLAPYKKLMFRQDGHKELRSREDVLSQRVQAALIVSDPVDWSRDIQVLCDILRTGGLPGKEIGPQPHLYIANDDLDYQTEFPTERLGMGAFRIALESIFNRIHEKPLEYTSFGKPNPFVFKNAEDVLKEFATSPYSSNQGSHHFKTLYMIGDNPKIDIRGARQAGTPWFSILTRTGVFKGKDNHAEFPADLVVDTVEEAVDFILTRESAKQSLLS

SEQ ID NO: 11433 - protein, 376 aa, Arabidopsis thaliana
MNHLLILARNSLRRRNFNLRPPSRSFSSTISPESNRSSFGIAFDIDGVILLGSSPVGGSPSALRRLYDDSGALKIPFLFLTNGGGLPESKRASEMSHLLGVQVSPLQVIQAHSPFRKLVNRFGNELVVAAGKGEPAAVMSNYGFKNVISMDEYASYFDNIDPLAPYKKLMFRQDGHKELRSREDVLSQRVQAALIVSDPVDWSRDIQVLCDILRTGGLPGKEIGPQPHLYIANDDLDYQTEFPTERLGMGAFRIALESIFNRIHEKPLEYTSFGKPNPFVFKNAEDVLKEFATSPYSSNQGSHHFKTLYMIGDNPKIDIRGARQAGTPWFSILTRTGVFKGKDNHAEFPADLVVDTVEEAVDFILTRESAKQSLLS

SEQ ID NO: 11434 - protein, 282 aa, Arabidopsis thaliana
MSHLLGVQVSPLQVIQAHSPFRKLVNRFGNELVVAAGKGEPAAVMSNYGFKNVISMDEYASYFDNIDPLAPYKKLMFRQDGHKELRSREDVLSQRVQAALIVSDPVDWSRDIQVLCDILRTGGLPGKEIGPQPHLYIANDDLDYQTEFPTERLGMGAFRIALESIFNRIHEKPLEYTSFGKPNPFVFKNAEDVLKEFATSPYSSNQGSHHFKTLYMIGDNPKIDIRGARQAGTPWFSILTRTGVFKGKDNHAEFPADLVVDTVEEAVDFILTRESAKQSLLS

SEQ ID NO: 11435 - DNA, 2276 bp, Arabidopsis thaliana
gaatggaaagaacatataaaatcgaataaaaaataaaggagagagagagagagagaagagaagagaagaggagactacactgctccatcatcttctccttctggggatttttttttggaaaaatcgttctgttaccttttttttgcccattactcaaaccctaaccctaattttctgaaatcgcagagagagagagagagaggtttcttcgaattctttcatcatcaattcgctaactttgtttttttggggttaaatcgattaatcgttattttattagatactgtcgatcggagctaatcgactctctcttaacaaaccctaattttttggtcctctctcatggcttccgccacttccaataaccctgcttcttcttctatgtctcctcgtcgtatcagcgggaatcacggcagccccaccgcttccgtagcacaatcacctcgccgtccttctcggcaggtttcttctccgtggactcaaatcgtccgcggcgaatcagagccgatcgccgccgccgccgctgtagccggtccttcctctcctcaatccagggctccgatcgagccgattgcttctgtatccgttgctgctccaactgctgctgttttgacggtggaggcggcggctggtgatgagaaatcggaagcatctggtggtcaggacaatgctggaaagaaaccagtttggaaaaggccgtctaatggggcttctgaggttggacctgtcatgggagcttcttcgtggcctgctctttctgagaccacccaagctccttccaacaagtcttcttctgattcgttaaaaagtctcggtgatgtaccatcatcatcgtcagcatcatcatctgtccccgttactcagggaattgcaaatgcttctgttcctgcaccaaagcaagctggccgtgcaaaccctaatccaactccaaatcactcgcgccagagatcatttaaacaacgcaatggcgcctctggatcagctaatggtactgtttctcaaccatcagtgcagggttcatttaccgaattgccttcgcacaacccttctcctagaggccaaaaccagaagaatggctttgcgtcacaaaaccatggtggtactgaaaacccatctcaacgagactcctacaggaaccaaaacggtaatcatcaccaaagtcacggtggcaggcgcaatcaggagcacgggaatcaaaattggacttttcaaagaagttttaacgggagagaaggaaatgcgcaatcgcaaagaggtactccagcttttgtaagacatccatcaccaactgtgcagccaattcctcagtttatggcagctcagccttttcccagtcatatacccttccctactgaattggcacagtcgtcgtattatccccgtatgccttacatgacacctattccgcatggtccgcagttcttctaccattatcaagatcctccgttacacatgaaactgcataagcaaatacaatattattttagtgatgaaaatttgattacagacatataccttcgagggttcatgaataatgagggttttgttccgctacgtgtggtagctggtttcaaaaaggttgcagaacttacagataatatccagcagatagtggaggctcttcaaaattcacctcatgttgaagtgcagggtgacttcataaggaagcgcgataattggcaaaattgggtgctaaggaggaaccctacaggttccggcccccaatctgttgatagggcagatgcagtggcaaaacgacttggaaacttgtcaattgatcagagttcggctgatcccattggtggttcgagcagtcagttgcaacctacagaagctctttcagatgatcagcaacagtcttctagtactgctccagtgagcaaccacaacgccccagatggtgcaaaccgttgaaccatcaagtttgggggctgttggttagtgttggacatgaatatattattttgtcttgcccaaaatgaggaaaacaataatgaaggggaatcaaaaaagaaagaaaagagataaaagcataaagagaagagacgcatatgaaaaaaaaaaaaaaaaaaggatcaaacatttgtgattcttctagctagcggaaactttggcatatttatgggttctttttttttggttatttttggatgctaataacttttttttatgtttatgctacatatgctatgatcattattatggttgcttgtagccattgttatggtctgggatttattggttttgcttgctaatactctcttataacccctgtt

SEQ ID NO: 11436 - protein, 523 aa, Arabidopsis thaliana
MASATSNNPASSSMSPRRISGNHGSPTASVAQSPRRPSRQVSSPWTQIVRGESEPIAAAAAVAGPSSPQSRAPIEPIASVSVAAPTAAVLTVEAAAGDEKSEASGGQDNAGKKPVWKRPSNGASEVGPVMGASSWPALSETTQAPSNKSSSDSLKSLGDVPSSSSASSSVPVTQGIANASVPAPKQAGRANPNPTPNHSRQRSFKQRNGASGSANGTVSQPSVQGSFTELPSHNPSPRGQNQKNGFASQNHGGTENPSQRDSYRNQNGNHHQSHGGRRNQEHGNQNWTFQRSFNGREGNAQSQRGTPAFVRHPSPTVQPIPQFMAAQPFPSHIPFPTELAQSSYYPRMPYMTPIPHGPQFFYHYQDPPLHMKLHKQIQYYFSDENLITDIYLRGFMNNEGFVPLRVVAGFKKVAELTDNIQQIVEALQNSPHVEVQGDFIRKRDNWQNWVLRRNPTGSGPQSVDRADAVAKRLGNLSIDQSSADPIGGSSSQLQPTEALSDDQQQSSSTAPVSNHNAPDGANR

SEQ ID NO: 11437 - protein, 510 aa, Arabidopsis thaliana
MSPRRISGNHGSPTASVAQSPRRPSRQVSSPWTQIVRGESEPIAAAAAVAGPSSPQSRAPIEPIASVSVAAPTAAVLTVEAAAGDEKSEASGGQDNAGKKPVWKRPSNGASEVGPVMGASSWPALSETTQAPSNKSSSDSLKSLGDVPSSSSASSSVPVTQGIANASVPAPKQAGRANPNPTPNHSRQRSFKQRNGASGSANGTVSQPSVQGSFTELPSHNPSPRGQNQKNGFASQNHGGTENPSQRDSYRNQNGNHHQSHGGRRNQEHGNQNWTFQRSFNGREGNAQSQRGTPAFVRHPSPTVQPIPQFMAAQPFPSHIPFPTELAQSSYYPRMPYMTPIPHGPQFFYHYQDPPLHMKLHKQIQYYFSDENLITDIYLRGFMNNEGFVPLRVVAGFKKVAELTDNIQQIVEALQNSPHVEVQGDFIRKRDNWQNWVLRRNPTGSGPQSVDRADAVAKRLGNLSIDQSSADPIGGSSSQLQPTEALSDDQQQSSSTAPVSNHNAPDGANR

SEQ ID NO: 11438 - protein, 394 aa, Arabidopsis thaliana
MGASSWPALSETTQAPSNKSSSDSLKSLGDVPSSSSASSSVPVTQGIANASVPAPKQAGRANPNPTPNHSRQRSFKQRNGASGSANGTVSQPSVQGSFTELPSHNPSPRGQNQKNGFASQNHGGTENPSQRDSYRNQNGNHHQSHGGRRNQEHGNQNWTFQRSFNGREGNAQSQRGTPAFVRHPSPTVQPIPQFMAAQPFPSHIPFPTELAQSSYYPRMPYMTPIPHGPQFFYHYQDPPLHMKLHKQIQYYFSDENLITDIYLRGFMNNEGFVPLRVVAGFKKVAELTDNIQQIVEALQNSPHVEVQGDFIRKRDNWQNWVLRRNPTGSGPQSVDRADAVAKRLGNLSIDQSSADPIGGSSSQLQPTEALSDDQQQSSSTAPVSNHNAPDGANR

SEQ ID NO: 11439 - DNA, 1160 bp, Arabidopsis thaliana
gaaattctgagtttccagatgaagaaagataatacaagcaacaatgggacacaaacaaagcgttgactctagaggcaaaggccgaaaaaatcccggttcttcgtcgatggtgcaaaaacatagcggaggagcgatcatctccggaccgtcactgtttgataacttaccggaggattgcatctccaacatcatctctttcacgagtcctcgtgacgcttgcgttgcagcttccgtttcgaaaacctttgaatcggctgttaattccgatagcgtgtgggacaagtttcttccatcggattattcgtctctagttcctccatctcgagttttctcatcgaagaaggagctctatttcgctatatgcgacaatcctgttctagtcgaagatggcggaaagagcttctggttagagaaagagaatgggaaaaagtgtttcatgttatcaccgaagaaatctatgtggatcacatgggttagtactcctcagtattggcgatggatttcgattcctgaagctaggtttgaagaagtaccagagctgctcaatgtgtgttggtttgaggtccgagggggcatgaatactaaagacctatctcctggaacccgttactcggcttacattgtgttcaagacaaagaatggatgtcctaatttgggggatgtgccagcagaagctacagttggattggtgggacaagaatcttctcaaagacacatatactttgttgggcctacggatcaaaggagagacagagaaacgagagatgtaacgagaccaactaaaagaaaagatggttggatggaagctgagcttggtcaattcttcaatgagtcaggttgtgatgtcgttgacacaagtattcttgagattaagaatcctaattggaagcgcggtttgatcattcaaggaatcgaattccgtcccaccaaaagcctgttctatatataagcaagtgaaaaactttgttgtatgggtaacactacctgtttttagtttttggatattgcactgtttgatttggatgttcattatataagcaagtgaaaaactttgttgtatgggtaacactacctgtttctagtttttggatattgcactgtttgatttggatgttcatcattctcacatgaacatattttaataaaggaattgttttttc

SEQ ID NO: 11440 - protein, 301 aa, Arabidopsis thaliana
MGHKQSVDSRGKGRKNPGSSSMVQKHSGGAIISGPSLFDNLPEDCISNIISFTSPRDACVAASVSKTFESAVNSDSVWDKFLPSDYSSLVPPSRVFSSKKELYFAICDNPVLVEDGGKSFWLEKENGKKCFMLSPKKSMWITWVSTPQYWRWISIPEARFEEVPELLNVCWFEVRGGMNTKDLSPGTRYSAYIVFKTKNGCPNLGDVPAEATVGLVGQESSQRHIYFVGPTDQRRDRETRDVTRPTKRKDGWMEAELGQFFNESGCDVVDTSILEIKNPNWKRGLIIQGIEFRPTKSLFYI

SEQ ID NO: 11441 - protein, 280 aa, Arabidopsis thaliana
MVQKHSGGAIISGPSLFDNLPEDCISNIISFTSPRDACVAASVSKTFESAVNSDSVWDKFLPSDYSSLVPPSRVFSSKKELYFAICDNPVLVEDGGKSFWLEKENGKKCFMLSPKKSMWITWVSTPQYWRWISIPEARFEEVPELLNVCWFEVRGGMNTKDLSPGTRYSAYIVFKTKNGCPNLGDVPAEATVGLVGQESSQRHIYFVGPTDQRRDRETRDVTRPTKRKDGWMEAELGQFFNESGCDVVDTSILEIKNPNWKRGLIIQGIEFRPTKSLFYI

SEQ ID NO: 11442 - protein, 170 aa, Arabidopsis thaliana
MLSPKKSMWITWVSTPQYWRWISIPEARFEEVPELLNVCWFEVRGGMNTKDLSPGTRYSAYIVFKTKNGCPNLGDVPAEATVGLVGQESSQRHIYFVGPTDQRRDRETRDVTRPTKRKDGWMEAELGQFFNESGCDVVDTSILEIKNPNWKRGLIIQGIEFRPTKSLFYI

SEQ ID NO: 11443 - DNA, 739 bp, Arabidopsis thaliana
tcactagtcccccccccccccccctgccgattcttcgtccccgcggctaaggagtgtaccgtttccggtggtattttccgatcaaaggcgccggcgaagcatggaacctagcaatgtctatgtggagcaggcaaggctcttgcttatggtgcaaaagaaaagggggccaaagttgtaattgctaatcgaacttacgaacgagcactagaactcgcagaagcaataggaggcaaagcgttatctctgacagatttagataactatcacccagaagatggcatggttttggcaaacaccacatctatgggtatgcaaccaaatgttgaggagactccaatttctaaggatgcattgaagcactatgcactggtctttgatgcggtatacactccgagaatcaccagactgttgagggaagcagaagaaagtggagccataactgtctcagggtcagagatgtttgtcaggcaggcttacgagcagtttgagatcttcaccggtttacccgctccaaaggaactctactggcaaataatgtcaaagtactgagacatagcttaagtgtgtgtgtgtgtacttccatgaaaagtcgtcgattcaataaagctttagattgccatttgtatgttccgagaatgtccttttttgaggccataagctgaatgactggttctctctttgtatttatatatatgtataaactattaagcctaacattaatcttttttaagtttctttg

SEQ ID NO: 11444 - protein, 89 aa, Arabidopsis thaliana
MVLANTTSMGMQPNVEETPISKDALKHYALVFDAVYTPRITRLLREAEESGAITVSGSEMFVRQAYEQFEIFTGLPAPKELYWQIMSKY

SEQ ID NO: 11445 - protein, 81 aa, Arabidopsis thaliana
MGMQPNVEETPISKDALKHYALVFDAVYTPRITRLLREAEESGAITVSGSEMFVRQAYEQFEIFTGLPAPKELYWQIMSKY

SEQ ID NO: 11446 - protein, 79 aa, Arabidopsis thaliana
MQPNVEETPISKDALKHYALVFDAVYTPRITRLLREAEESGAITVSGSEMFVRQAYEQFEIFTGLPAPKELYWQIMSKY

SEQ ID NO: 11447 - DNA, 1531 bp, Arabidopsis thaliana
ggccaaagttgaaagttgaaaccttttctcagaattttctgctcagttctgagtttttttttcccgccatggaaatcgactccgagaaaattcacgaaaggaagcaatccgattacaattcgctggatgagagattcgagatacagaaggagatgtacagaggtcagcaatacagtcagatttactttgctcgtcttcatctcatgagaacacttctctactctcttgctcctacttggaaatctcatttgcctgtgtgtaaggttttgggacttgaaaaaggaaaagaatgcataattgtgggaaccttgttcaaacacatgaagcttaaaccttgtgttctcgatgaatattctaaagagaggtcagttactccgcttgttaaaccacataactttatgcatcctgatgataatctgatcctcgaagacgagagtgggagagttaagcttgctggttccgcactttcacctgcgatttatgtgacaggtgttgttgttgcactgcatgggaaggaaactaatgctggtgaattctttgttgaggatgtactagaagctggtttaccacctcagattgagcggcctatcgatctacaggaagataaatatgtcgtgttattgtcgggcctttgtattggaagcaaatcggctaatcccctgcagtttcagcttcttgttgaccatataactgggcatctcggagatgaggaggaacaaggccttgcagcacagatagttcatgtagtaattgctggaaactcttttgaatttccccgcaaactcattaatggccagaacttggcctcgaaagatcaatcgacactgtatgagcccatcaaagagcttgatatcatgttaagccagatagctgcaggagtttcagtagatatcatgccaggcacgaaagatccagctaacttcgcattgcctcagcagcctctgaatagatgtcttttccctggatcttcaccttataacaccttcagatcatgtacaaatcctcactcatttgatgtcgataatatcagatttcttggaacttctggtcagaacatcgatgaccttggcaagtactcagaggctaagagcaagcttgattttgtggaaagaacgctgaggtggagacatcttgccccaactgcacctaatacactcggttgttatcctttcaccgatagagaccctttcttgattgaaacctgcccgcatgtctacttcgtcgggaatcaagataaatatgacaaccgtttgataaaggggtcagaagggcagcttgtccggttgatctgcattcctaagttctgtgagaccggtattgctgttgcggtgaacctaagaaatctggaatgtcacactttaagctttagcactcagataaaccaatcataacattgagttgctactttggtagattatttcctgtcttgaagatgtaatgttgagctttttcagtaacacactcctatgttctaaccaaatgtttgttaaaaatcctttttcttgagtggaacttccaaatctttggatat

SEQ ID NO: 11448 - protein, 462 aa, Arabidopsis thaliana
PKLKVETFSQNFLLSSEFFFPAMEIDSEKIHERKQSDYNSLDERFEIQKEMYRGQQYSQIYFARLHLMRTLLYSLAPTWKSHLPVCKVLGLEKGKECIIVGTLFKHMKLKPCVLDEYSKERSVTPLVKPHNFMHPDDNLILEDESGRVKLAGSALSPAIYVTGVVVALHGKETNAGEFFVEDVLEAGLPPQIERPIDLQEDKYVVLLSGLCIGSKSANPLQFQLLVDHITGHLGDEEEQGLAAQIVHVVIAGNSFEFPRKLINGQNLASKDQSTLYEPIKELDIMLSQIAAGVSVDIMPGTKDPANFALPQQPLNRCLFPGSSPYNTFRSCTNPHSFDVDNIRFLGTSGQNIDDLGKYSEAKSKLDFVERTLRWRHLAPTAPNTLGCYPFTDRDPFLIETCPHVYFVGNQDKYDNRLIKGSEGQLVRLICIPKFCETGIAVAVNLRNLECHTLSFSTQINQS

SEQ ID NO: 11449 - protein, 440 aa, Arabidopsis thaliana
MEIDSEKIHERKQSDYNSLDERFEIQKEMYRGQQYSQIYFARLHLMRTLLYSLAPTWKSHLPVCKVLGLEKGKECIIVGTLFKHMKLKPCVLDEYSKERSVTPLVKPHNFMHPDDNLILEDESGRVKLAGSALSPAIYVTGVVVALHGKETNAGEFFVEDVLEAGLPPQIERPIDLQEDKYVVLLSGLCIGSKSANPLQFQLLVDHITGHLGDEEEQGLAAQIVHVVIAGNSFEFPRKLINGQNLASKDQSTLYEPIKELDIMLSQIAAGVSVDIMPGTKDPANFALPQQPLNRCLFPGSSPYNTFRSCTNPHSFDVDNIRFLGTSGQNIDDLGKYSEAKSKLDFVERTLRWRHLAPTAPNTLGCYPFTDRDPFLIETCPHVYFVGNQDKYDNRLIKGSEGQLVRLICIPKFCETGIAVAVNLRNLECHTLSFSTQINQS

SEQ ID NO: 11450 - protein, 412 aa, Arabidopsis thaliana
MYRGQQYSQIYFARLHLMRTLLYSLAPTWKSHLPVCKVLGLEKGKECIIVGTLFKHMKLKPCVLDEYSKERSVTPLVKPHNFMHPDDNLILEDESGRVKLAGSALSPAIYVTGVVVALHGKETNAGEFFVEDVLEAGLPPQIERPIDLQEDKYVVLLSGLCIGSKSANPLQFQLLVDHITGHLGDEEEQGLAAQIVHVVIAGNSFEFPRKLINGQNLASKDQSTLYEPIKELDIMLSQIAAGVSVDIMPGTKDPANFALPQQPLNRCLFPGSSPYNTFRSCTNPHSFDVDNIRFLGTSGQNIDDLGKYSEAKSKLDFVERTLRWRHLAPTAPNTLGCYPFTDRDPFLIETCPHVYFVGNQDKYDNRLIKGSEGQLVRLICIPKFCETGIAVAVNLRNLECHTLSFSTQINQS

SEQ ID NO: 11451 - DNA, 3047 bp, Arabidopsis thaliana
gacaatcgcccttgttcttcccctttaactctgaacacatcaggtttggtttcgtgtttcaactttgagatacttctctagatttcaatcggagagtcttttgttccgccaaagtttcaatttttcaataccccacgacggcaaatagggttcatggaagatcaacccattaaccagtgctctagtagcaccaatgcgtcggagaaaactccagaatcaacccttgagcttaacatcaaaacgttagactcgcggacgtatacttaccaagtgaacaagaatgaaactgttttgctattcaaggagaagattgctagtgagacaggggtgccggttggtcagcagcggctcattttccgaggacgggttttgaaagatgatcatcctctctcggagtatcatttggaaaatgggcatactttacacttgattgtgaggcagccagcagaatcagctccttcctctggtacaccttcaccaggggcaactgcaaatgatggaaataatacaaatggtggaccatctcgaaatggaagacatgtctcccacagcgtagttcttgggtcttttaatgttggagatcagacagaaggcattgttccagacctcaaccgggtcattggagcagttctaaattcttttggagttagtggacagcttcctacaaatcacagtactaatggcacgcaatcctctatgccctcaaatcagtcgtctaatgcacctcctggaaatacatctgatggagagcctggcattggtggtcaaagccaagctacgggtcattcacaacctaggcaagcatttcctggtgtatcatttcaaacatcgatgcctcgtgtagttcagattcctgttacagcagccacaacgattcctatcccttcattcttaacgcctattccggattccttagacactctaatggagttcattaatcggatggagcaggcattatcacaaaatggctatcagccagatacctcttctgctggatccggagggcgaccaagggaagagttgcctagaaatagacgaggtgcagcaacacctgaagcactctctgttgtcctaaggaatgcacaacatttactgagtggtctcggtgtctcttctttatcgcatattgcgggacgtctggagcaagatggttcatcttcagatcctactctaaggtcacaaatccagacagaggccgtgcaagtaggtcttgccatgcaacatttaggggccctcctactggagcttggacgcacaattttgacattgagaatggcaccgtcgccggaattatcctatgtgaatgcagggcctgctgtgtatatatctccatcaggaccgaatcctattatggttcagccttttcctcaccaaatcagccctctctttactggtgctactgtctcatcaaatccactaaccggacctgttggtttaggaactgcccaaaggcacattaatattcacatacatgctggcacatcaggttcacctatgttgtcatcagttgggaaccagcgaagcaatggagaaggagcacaaggagaccgtgacagcaatacaagttcagttcctgcggctgttccatcacactctaccggtgagaacgtttctgctggggttcaacctggtttgggtgatgatgtttcagttgctcaaatcaatgcaaggataagagatatggtaaacattatgcaaggaagagaccagattccatcgggtaggtttcctgctgactaaagttttacattgtggacgaaatgttttcaagctcttcttcacgtgtcaatcaggaatagaatctctcgagcgggatatgtctacgggccatggtgttgccactgctatgcctgagcagcctaccaacattgcaactacttgcgcacctgagtcgtctagtggctcactgcatgacttaccatctgagaggagcaactcagtgtgtcaaaatgaaaaagatcttggtggagatttagagcatccagcccgagcaaaagatacctcttatactacaggacaatcatcagctccgtctggagatgctaccggtgatgtcaaagaaaccaataaggctactccagaggtagctacagctacaccacttggattggggcttggcggtttagaccgtaagaaacgaagcaagcagccgaaggtatcaggtaagactgaagatagcgggacttcagctacacttgaaggtgtgcaacaaagcagtgggaccagtggtcagcagcttttgcaatctctcttttctggtagttctcgttcagatgagactggtcttagacgcgggcaaggttcagatgatcgtgtagatgtctcaagtgcaatgtctcaggtcctggagagccctgtattggatggattgctagcaggggtatctcgacaagctggtgttgattcaccaaatatgctgagaaatatgctccagcagtttacccagaatccacagatcatgaacacagtccaacagattgcgcaacaggtggatgggcaagagatagaaaatatgatgtcaggtggagctcaaggcgagggcggcggctttgatttctctagaatggtccaacaaatgatgcctctagtctcacgtgcttttagccaaggagggccattgcctcatcccgcaacaatacagcctgatgatcgtcaaccttctcaggtaaatgttcaatccatggctcaaatgattgagcactctgatccaccagaggatgtcttccgtgcaatggttgaaaatgctgcgataagccaagacgaactagtgaacgagctttgctgtgatgaagctctttctcaagaatatgcggagttgctaagacgtgatatcgaaggccggctaaaagatgatcaaggtctataagatatttggttgaattggttctgtaagtgtcatatctttgaagtatctttgtttatttgctgagatccctcacttatgtattaagaattagggtttgggatggtctatactctgctaaacataagcaaacgtaatttatctggtctctaaagggccgattcaatttgatatttccatcttt

SEQ ID NO: 11452 - protein, 528 aa, Arabidopsis thaliana
MEDQPINQCSSSTNASEKTPESTLELNIKTLDSRTYTYQVNKNETVLLFKEKIASETGVPVGQQRLIFRGRVLKDDHPLSEYHLENGHTLHLIVRQPAESAPSSGTPSPGATANDGNNTNGGPSRNGRHVSHSVVLGSFNVGDQTEGIVPDLNRVIGAVLNSFGVSGQLPTNHSTNGTQSSMPSNQSSNAPPGNTSDGEPGIGGQSQATGHSQPRQAFPGVSFQTSMPRVVQIPVTAATTIPIPSFLTPIPDSLDTLMEFINRMEQALSQNGYQPDTSSAGSGGRPREELPRNRRGAATPEALSVVLRNAQHLLSGLGVSSLSHIAGRLEQDGSSSDPTLRSQIQTEAVQVGLAMQHLGALLLELGRTILTLRMAPSPELSYVNAGPAVYISPSGPNPIMVQPFPHQISPLFTGATVSSNPLTGPVGLGTAQRHINIHIHAGTSGSPMLSSVGNQRSNGEGAQGDRDSNTSSVPAAVPSHSTGENVSAGVQPGLGDDVSVAQINARIRDMVNIMQGRDQIPSGRFPAD

SEQ ID NO: 11453 - protein, 349 aa, Arabidopsis thaliana
MSTGHGVATAMPEQPTNIATTCAPESSSGSLHDLPSERSNSVCQNEKDLGGDLEHPARAKDTSYTTGQSSAPSGDATGDVKETNKATPEVATATPLGLGLGGLDRKKRSKQPKVSGKTEDSGTSATLEGVQQSSGTSGQQLLQSLFSGSSRSDETGLRRGQGSDDRVDVSSAMSQVLESPVLDGLLAGVSRQAGVDSPNMLRNMLQQFTQNPQIMNTVQQIAQQVDGQEIENMMSGGAQGEGGGFDFSRMVQQMMPLVSRAFSQGGPLPHPATIQPDDRQPSQVNVQSMAQMIEHSDPPEDVFRAMVENAAISQDELVNELCCDEALSQEYAELLRRDIEGRLKDDQGL

SEQ ID NO: 11454 - protein, 347 aa, Arabidopsis thaliana
MPSNQSSNAPPGNTSDGEPGIGGQSQATGHSQPRQAFPGVSFQTSMPRVVQIPVTAATTIPIPSFLTPIPDSLDTLMEFINRMEQALSQNGYQPDTSSAGSGGRPREELPRNRRGAATPEALSVVLRNAQHLLSGLGVSSLSHIAGRLEQDGSSSDPTLRSQIQTEAVQVGLAMQHLGALLLELGRTILTLRMAPSPELSYVNAGPAVYISPSGPNPIMVQPFPHQISPLFTGATVSSNPLTGPVGLGTAQRHINIHIHAGTSGSPMLSSVGNQRSNGEGAQGDRDSNTSSVPAAVPSHSTGENVSAGVQPGLGDDVSVAQINARIRDMVNIMQGRDQIPSGRFPAD

SEQ ID NO: 11455 - DNA, 1125 bp, Arabidopsis thaliana
aaaaatcctcttaaaatctcataaagcccttcttatcttcttctcttctcctcaacttgaatacacagaaacaaaactgcttttgtctctcaagtcatttgtcttataaaaaggttctgttcttgaacaagggaaagaaacaaaaggctgataactcctgttttgtagattcctctgatattcagattcttacttctcaggaaaaccctaaagaaaatttctgtttttttttgagaaatatgaagatacaatgtgatgtgtgtgagaaagctccggccacgcttatatgttgtgctgatgaagctgctctctgcgctaaatgtgacgttgaggttcatgctgctaataaactcgctagcaaacaccaacgcctttttcttgactctctctcaactaaattccctccctgcgacatctgccttgagaaggcagctttcatattctgtgtaaaggatagggctctgctctgcagagattgcgatgaggcgacccatgcgccaaatactcgctctgctaatcaccagaggttcttagccactggaatccgagttgctcttagttccactagttgcaatcaagaagtggaaaagaatcactttgacccatctaatcagcagagtctctctaaaccgccaactcagcaacccgctgctccatctcctttgtgggctaccgatgaattcttcagctactctgatcttgactgcagtaataaggagaaagagcaactcgatctcggggagctggattggcttgcagagatgggtctgtttggtgaccagcctgatcaagaggctctaccggtagccgaagttcccgagctttccttttcacatttggctcatgctcattcctacaacagacctatgaagtccaatgtacccaacaagaagcagaggcttgagtaccggtatgatgatgaagaagagcacttcctagtccccgacctaggctaaactatggatgaatctactaagctttataatatatagcacttgattcgcatagtcttcggctcttcgccttgctttctccatgatctgatatgtgtatcactgtaagtagcaggctaaaacttggaaaaaccttatcattttattagcaagtgatgccttaaattgcaac

SEQ ID NO: 11456 - protein, 238 aa, Arabidopsis thaliana
MKIQCDVCEKAPATLICCADEAALCAKCDVEVHAANKLASKHQRLFLDSLSTKFPPCDICLEKAAFIFCVKDRALLCRDCDEATHAPNTRSANHQRFLATGIRVALSSTSCNQEVEKNHFDPSNQQSLSKPPTQQPAAPSPLWATDEFFSYSDLDCSNKEKEQLDLGELDWLAEMGLFGDQPDQEALPVAEVPELSFSHLAHAHSYNRPMKSNVPNKKQRLEYRYDDEEEHFLVPDLG

SEQ ID NO: 11457 - DNA, 541 bp, Arabidopsis thaliana
gctggtctttgattctttcgttgtgtggcatctgaagagttaagaggaagaagaagaacgatggcatggagaggaagcatatcgaagtctatgaaagagcttaggattcttctttgtcaatcttctccagctagtgctcccaccagaacgtttgttgagaagaattacaaagatttgaagtctctaaaccctaaattaccaatcttgatccgtgaatgtagtggagtccagcctcagatgtgggcaagatatgatatgggtgtggagaggtgtgtaaacttggatggtctgacagagccacagattctaaaggcccttgaaaaccttgtgaaatccggagctacaaaggcctaagtttgtttgtttgtttgtttttctctatatgatcccgaataagattaaaccgcaaaacaatcatttgacatttcctgtcattctactactttgtaactccgtggtgtcatatcgccttgcatttgagttggtttttttgtgtaatccttgaacttggaattaaaccattccgtataattgaaatcac

SEQ ID NO: 11458 - protein, 97 aa, Arabidopsis thaliana
MAWRGSISKSMKELRILLCQSSPASAPTRTFVEKNYKDLKSLNPKLPILIRECSGVQPQMWARYDMGVERCVNLDGLTEPQILKALENLVKSGATKA

SEQ ID NO: 11459 - protein, 87 aa, Arabidopsis thaliana
MKELRILLCQSSPASAPTRTFVEKNYKDLKSLNPKLPILIRECSGVQPQMWARYDMGVERCVNLDGLTEPQILKALENLVKSGATKA

SEQ ID NO: 11460 - DNA, 1837 bp, Arabidopsis thaliana
aacctgtgagaaactttggatcaatcaacaatggcggatctctctcttcctcccgattccctcttcctcggcttcgacagctctacccagtcaatgaaagcaactgtgttggattcgaacctgaacattatcaaaaccgaactcgttcatttcgattctgatcttcctcaatacaaaaccaaagacggggtttacagagacactactgtaaacggaagaatcgtatctccaactctcatgtgggtcgaagcatttgatctcattctccagaagctctctaacgccaatttcgatttcgccaaagttatcgctgtttcaggcagcgggcaacaacacggtagtgtgtattggtcaaaaggtagttctgaggtattgagatcattggattcaaagagatcattgaaagaacaactcgaaaacgctttttcggttaaggaatctcctatatggatggatagtagtactacattgcaatgtaaagagattgagaatgctgttggtggagctatggagttgtcgaagatcactggctctcgtgcttatgagcggtttactggtccgcagatacggaagctttttatgactcagggggaggtgtataagagcacggagaggatttcgcttgttagctcttttatggcgtctttgttggttggagattatgcttgtattgatgaaactgatgctgctgggatgaatttgatggatattgagaaacgttgttggtctaaagctgcgttagaggctacagcgacaggtttggaggagaaacttgggaagttagctccagcttatgctactgctggttctatttctcagtattttgttcagaggttcggttttgaaaagaactgtgtggttgtgcagtggtcgggagataatcctaatagcttggcaggtctaactcttagtactcctggagatctggcgatcagtcttggaaccagtgacacggtatttgggattaccaaagaacttcaacccagtcttgagggtcatgtgttacctaatcctgtggaccctgagagttatatggtgatgttggtttacaagaatgcttctctcacccgggaagaaattcgtgaccgttgtgctgagggatcttgggatgtttttaataagtatttgcagcaaacacagccactaaacaatgggaaactcggcttctactacactgaaaatgaaattctgcccccacttcccgttggctctcatcgttacattcttgagaacttctctggtgagtctcttgagggtgtgaaggaacaagaggtcggtgagttcgaccctccctcagaggttagggcattgattgaaggtcagtttctttcaaagcgggctcatactgagagatttggtatgccctcccctcccctccgaataatagcaaccggaggtgcatctgctaacgagaatatcttgagtctgatctcagcaatcttcggatgtgatgtatatactgtccaaaggcctgattcagcatcacttggagctgcactaagagctgctcatggctggctctgcaacaaaaaaggaagctttgtaccaatctcaaatctctacgaagggaaattggaaacaacatctctgaactgcaagctcaaggtaaaagcaggagacgcgaacattgcttccacctatggtttgttgatgaagaagaggatggaaatagagaacaagcttgtggagaagttaggccacttctgagaagaaaaaaactcactactcaataattcaaataactaaagagttgaaagaataacaagttctatctactaaaactaaaagacaagtttgcttgttgctcaaaataaaagcagaatacgatcttacgatt

SEQ ID NO: 11461 - protein, 558 aa, Arabidopsis thaliana
MADLSLPPDSLFLGFDSSTQSMKATVLDSNLNIIKTELVHFDSDLPQYKTKDGVYRDTTVNGRIVSPTLMWVEAFDLILQKLSNANFDFAKVIAVSGSGQQHGSVYWSKGSSEVLRSLDSKRSLKEQLENAFSVKESPIWMDSSTTLQCKEIENAVGGAMELSKITGSRAYERFTGPQIRKLFMTQGEVYKSTERISLVSSFMASLLVGDYACIDETDAAGMNLMDIEKRCWSKAALEATATGLEEKLGKLAPAYATAGSISQYFVQRFGFEKNCVVVQWSGDNPNSLAGLTLSTPGDLAISLGTSDTVFGITKELQPSLEGHVLPNPVDPESYMVMLVYKNASLTREEIRDRCAEGSWDVFNKYLQQTQPLNNGKLGFYYTENEILPPLPVGSHRYILENFSGESLEGVKEQEVGEFDPPSEVRALIEGQFLSKRAHTERFGMPSPPLRIIATGGASANENILSLISAIFGCDVYTVQRPDSASLGAALRAAHGWLCNKKGSFVPISNLYEGKLETTSLNCKLKVKAGDANIASTYGLLMKKRMEIENKLVEKLGHF

SEQ ID NO: 11462 - protein, 537 aa, Arabidopsis thaliana
MKATVLDSNLNIIKTELVHFDSDLPQYKTKDGVYRDTTVNGRIVSPTLMWVEAFDLILQKLSNANFDFAKVIAVSGSGQQHGSVYWSKGSSEVLRSLDSKRSLKEQLENAFSVKESPIWMDSSTTLQCKEIENAVGGAMELSKITGSRAYERFTGPQIRKLFMTQGEVYKSTERISLVSSFMASLLVGDYACIDETDAAGMNLMDIEKRCWSKAALEATATGLEEKLGKLAPAYATAGSISQYFVQRFGFEKNCVVVQWSGDNPNSLAGLTLSTPGDLAISLGTSDTVFGITKELQPSLEGHVLPNPVDPESYMVMLVYKNASLTREEIRDRCAEGSWDVFNKYLQQTQPLNNGKLGFYYTENEILPPLPVGSHRYILENFSGESLEGVKEQEVGEFDPPSEVRALIEGQFLSKRAHTERFGMPSPPLRIIATGGASANENILSLISAIFGCDVYTVQRPDSASLGAALRAAHGWLCNKKGSFVPISNLYEGKLETTSLNCKLKVKAGDANIASTYGLLMKKRMEIENKLVEKLGHF

SEQ ID NO: 11463 - protein, 489 aa, Arabidopsis thaliana
MWVEAFDLILQKLSNANFDFAKVIAVSGSGQQHGSVYWSKGSSEVLRSLDSKRSLKEQLENAFSVKESPIWMDSSTTLQCKEIENAVGGAMELSKITGSRAYERFTGPQIRKLFMTQGEVYKSTERISLVSSFMASLLVGDYACIDETDAAGMNLMDIEKRCWSKAALEATATGLEEKLGKLAPAYATAGSISQYFVQRFGFEKNCVVVQWSGDNPNSLAGLTLSTPGDLAISLGTSDTVFGITKELQPSLEGHVLPNPVDPESYMVMLVYKNASLTREEIRDRCAEGSWDVFNKYLQQTQPLNNGKLGFYYTENEILPPLPVGSHRYILENFSGESLEGVKEQEVGEFDPPSEVRALIEGQFLSKRAHTERFGMPSPPLRIIATGGASANENILSLISAIFGCDVYTVQRPDSASLGAALRAAHGWLCNKKGSFVPISNLYEGKLETTSLNCKLKVKAGDANIASTYGLLMKKRMEIENKLVEKLGHF

SEQ ID NO: 11464 - DNA, 1930 bp, Arabidopsis thaliana
atctgaagaacgagtctcttctcttctccgatgggaacgctacagtcatggagaaaagcctatggagccctaaaagactccaccaaagtcggacttgtccgtgtcaacagcgaatacgccgatttagatgttgccatagtcaaagctaccaatcatgttgagtgtcctcccaaagatcgccatctcagaaaaatcttcgctgcaacatcagtgactcgtgctcgagcagatgttgcttattgtattcacgccctttcacggcgtttgcataaaaccaggaattggacggttgctttgaaaacactaattgtgatacatcggcttctaagggaaggagatccaactttcagagaggaactattgaatttttcgcagagagggcggattttgcaactttctaattttaaggatgattcaagtcctattgcttgggattgttcagcttgggtacgtacttatgcattgtttcttgaggaacggcttgaatgcttcagggttttaaaatatgatactgaggccgaacgtcttccgaaatctaacccagggcaggataaggggtatagtagaaccagggatttagatggtgaagaactcttggagcagttgccagctttgcagcagcttctctatcgtctcatcggttgcaggccggaaggtgccgctaaccacaatcatgttatacaatatgcacttgctctggtgttgaaagagagttttaaagtctattgtgctattaatgatggaatcatcaatctcattgacaagttctttgaaatggcaaaacatgaagccatcacttcccttgaaatatacaagcgtgcgggtcagcaggctcgtagcctttctgatttctatgaagcctgcaaaggattggaacttgcaaggaattttcaatttcctgttctaagagagcctccacaatcttttctgacaacaatggaggagtatattaaagaagcaccgcgtgttgtcgatgtcccagcggaaccactgcttctaacatataggccggatgatggactgactaccgaagatactgaaccgtcgcatgaagaacgtgaaatgttaccttcagatgatgtcgttgttgtatctgaagaaacagaaccttctcccccgcctcctccttcagccaacgctcagaacttcattgataccgatgatctattgggtctgaatactggtgctcctgatacatcagtgatcgaagaccaaaatgcacttgctttagccattgtttcaacagatgctgatcctccaactcctcattttggtcaaccaaataattacgatcctacaggatgggagcttgccttggtgacagcacctagcagcgatatctctgcatccactgagagaaaactggctggagggttagatacgattacacttagcagtctatacgatgatggagcctacatagcttcccaacgtcctgtctacggtgcaccagctcccaatccatttgcgtcccatgacccgtttgcatcgtccaatggcacagctcccccacctcagcagcaagcggtgaacaacccattcggtgcttaccagcagacatatcagcatcagccccagccaacgtatcagcatcagtccaaccctcccactaataatagtaatccatttggtgattttggggaattcccggttaacccggtttcacagcagccaaatacctccggttatggtgatttctcggtaaaccaacataacaacccgttccgtagcactggcctcatttgatcatgttgtctattcatgtttgtatcttcttcattgggttggttgagggaaatggttttatttgtgagtaatagaaccacatgattggtttgttgatgatctttgttgttattgcttgtagaaagattatatatatgggatatatataatgcatatatgagttaaatcccctaaacaacattcg

SEQ ID NO: 11465 - protein, 571 aa, Arabidopsis thaliana
MGTLQSWRKAYGALKDSTKVGLVRVNSEYADLDVAIVKATNHVECPPKDRHLRKIFAATSVTRARADVAYCIHALSRRLHKTRNWTVALKTLIVIHRLLREGDPTFREELLNFSQRGRILQLSNFKDDSSPIAWDCSAWVRTYALFLEERLECFRVLKYDTEAERLPKSNPGQDKGYSRTRDLDGEELLEQLPALQQLLYRLIGCRPEGAANHNHVIQYALALVLKESFKVYCAINDGIINLIDKFFEMAKHEAITSLEIYKRAGQQARSLSDFYEACKGLELARNFQFPVLREPPQSFLTTMEEYIKEAPRVVDVPAEPLLLTYRPDDGLTTEDTEPSHEEREMLPSDDVVVVSEETEPSPPPPPSANAQNFIDTDDLLGLNTGAPDTSVIEDQNALALAIVSTDADPPTPHFGQPNNYDPTGWELALVTAPSSDISASTERKLAGGLDTITLSSLYDDGAYIASQRPVYGAPAPNPFASHDPFASSNGTAPPPQQQAVNNPFGAYQQTYQHQPQPTYQHQSNPPTNNSNPFGDFGEFPVNPVSQQPNTSGYGDFSVNQHNNPFRSTGLI

SEQ ID NO: 11466 - protein, 323 aa, Arabidopsis thaliana
MAKHEAITSLEIYKRAGQQARSLSDFYEACKGLELARNFQFPVLREPPQSFLTTMEEYIKEAPRVVDVPAEPLLLTYRPDDGLTTEDTEPSHEEREMLPSDDVVVVSEETEPSPPPPPSANAQNFIDTDDLLGLNTGAPDTSVIEDQNALALAIVSTDADPPTPHFGQPNNYDPTGWELALVTAPSSDISASTERKLAGGLDTITLSSLYDDGAYIASQRPVYGAPAPNPFASHDPFASSNGTAPPPQQQAVNNPFGAYQQTYQHQPQPTYQHQSNPPTNNSNPFGDFGEFPVNPVSQQPNTSGYGDFSVNQHNNPFRSTGLI

SEQ ID NO: 11467 - DNA, 1254 bp, Arabidopsis thaliana
tctacatttgtttttgattagttcgcgattcatttctatcttgtctccggtcaatatttttgttcgatccgtcgatcggatattttgactggaggtttaagaagtctgaaattgttagatcgcagctatgtcgtactctgactccgattcgtcgtctcatggtggcgagtacaagaatttccgacagattacgcgtgaacgactcttgtatgagatgcttagatctgcaaagacagggagctcaaaatccacctggaaggtactaatcatggacaaacttactgtcaagataatgtcgtacgcctgcaaaatggctgatatcacacaagaaggagtttcattggttgaagacatatttagacgaagacaaccacttccttcaatggatgcaatatacttcatccagccaactaaagagaatgtcatcatgttcttgtcagacatgtctgggaaatcacccttgtacaagaaggcattcgttttcttcagttcaccggtttccaaggaactggttggtcacatcaagaaagattcgagtgtattacctcggattggagcattgagagagatgaatttggagttttttgccattgatagccagggtttcataaccgatcatgagcgagctttagaggatctttttggtgatgaggaaacttctcgaaaaggcgatgcgtgcttgaatgtgatggcttctcgaattgctacagtctttgcttcgttgcgggaattcccagcagtacgataccgagctgcaaagtcacttgatgcatcgacaatgacaactttgcgcgatttaattccaacaaagcttgcagctggaatctggaattgtctggcaaaacataagcagtcgattgaaaattttcctcaaactgaaacatgcgagctactcatccttgacagatccatagaccagattgcccctgttatacatgagtggacatatgatgctatgtgccatgatttactgaacatggaaggaaacaaatatgtacatgtgattccaagcaaatcaggcggacaaccagagaagaaagatgtgctcttagaggaacatgatcctatttggctagagcttcgacatgcacatatagcagatgctagtgaaagattgcatgacaagatgaccaatttcttatcgaaaaacaaagctgctcagcttcagggtaagagagatggagctgagctttctacaagagatttgcagaagatggttcaagcattgccacagtacaggggggggcccggtac

SEQ ID NO: 11468 - protein, 375 aa, Arabidopsis thaliana
MSYSDSDSSSHGGEYKNFRQITRERLLYEMLRSAKTGSSKSTWKVLIMDKLTVKIMSYACKMADITQEGVSLVEDIFRRRQPLPSMDAIYFIQPTKENVIMFLSDMSGKSPLYKKAFVFFSSPVSKELVGHIKKDSSVLPRIGALREMNLEFFAIDSQGFITDHERALEDLFGDEETSRKGDACLNVMASRIATVFASLREFPAVRYRAAKSLDASTMTTLRDLIPTKLAAGIWNCLAKHKQSIENFPQTETCELLILDRSIDQIAPVIHEWTYDAMCHDLLNMEGNKYVHVIPSKSGGQPEKKDVLLEEHDPIWLELRHAHIADASERLHDKMTNFLSKNKAAQLQGKRDGAELSTRDLQKMVQALPQYRGGPG

SEQ ID NO: 11469 - protein, 346 aa, Arabidopsis thaliana
MLRSAKTGSSKSTWKVLIMDKLTVKIMSYACKMADITQEGVSLVEDIFRRRQPLPSMDAIYFIQPTKENVIMFLSDMSGKSPLYKKAFVFFSSPVSKELVGHIKKDSSVLPRIGALREMNLEFFAIDSQGFITDHERALEDLFGDEETSRKGDACLNVMASRIATVFASLREFPAVRYRAAKSLDASTMTTLRDLIPTKLAAGIWNCLAKHKQSIENFPQTETCELLILDRSIDQIAPVIHEWTYDAMCHDLLNMEGNKYVHVIPSKSGGQPEKKDVLLEEHDPIWLELRHAHIADASERLHDKMTNFLSKNKAAQLQGKRDGAELSTRDLQKMVQALPQYRGGPG

SEQ ID NO: 11470 - protein, 328 aa, Arabidopsis thaliana
MDKLTVKIMSYACKMADITQEGVSLVEDIFRRRQPLPSMDAIYFIQPTKENVIMFLSDMSGKSPLYKKAFVFFSSPVSKELVGHIKKDSSVLPRIGALREMNLEFFAIDSQGFITDHERALEDLFGDEETSRKGDACLNVMASRIATVFASLREFPAVRYRAAKSLDASTMTTLRDLIPTKLAAGIWNCLAKHKQSIENFPQTETCELLILDRSIDQIAPVIHEWTYDAMCHDLLNMEGNKYVHVIPSKSGGQPEKKDVLLEEHDPIWLELRHAHIADASERLHDKMTNFLSKNKAAQLQGKRDGAELSTRDLQKMVQALPQYRGGPG

SEQ ID NO: 11471 - DNA, 2708 bp, Arabidopsis thaliana
tctttctctctctcttctctcttctctttgtgtaagcaaagaaccaatctttagataatttaggaaactcttcattattcctcttgcaagctcgaatgatcgccgccttgttcccttgatacctcgaatccttttcttcttccagcctcagtatcacttcaatcttctcggcttgatagttaaatggatcctgttcctgttcgatgtcttcttaacagtatatctcggtatcttcatctggttgcgtgccagactataagatttaatcctattcaaacatgtattggaaatatggttctcttgttgaagctcttgaaaccgttgctcgatgaagttgttgattgcaagataccttctgatgactgtttatataaaggatgtgaagaccttgattctgttgttaaccaggctcgggagttcttagaggactggtcaccaaagttgagcaagttgtttggtgtgtttcaatgcgaggttttgttgggaaaggtccagacttgttcgttggagattagtcgcatacttcttcagttatcacagtcaagtccggttacttcaagcgtacaaagtgttgagcgctgcgtgcaggagactgagagttttaagcaagaggggacattaatggaactcatggagaatgctttacggaatcagaaagatgatattacctctttggataacaatcatctggaaagcataattcaaatgcttggattgatatcaaaccaagatctcttaaaggaaagcattactgtggagaaagagaggataagatcccaggccaataagtcagaagaagatatggaacaaaccgaacagttgatagaactcgtcttgtgcatccgtgaacacatgcttaaaactgagtttcttgaagtggctaaaggtatctcgatacccccgtatttccggtgtcctttgtcaacagaactcatgctggatccggtaatagtagcttcaggacagacatttgacagaacatccattaagaaatggcttgataacgggttagctgtttgtccaaggacgcggcaggtgctgactcatcaagaactcattcccaattacacggttaaggctatgatagcgagttggttggaggcaaacaggatcaaccttgctactaactcttgtcatcagtatgatggtggtgatgcttcatccatggctaataatatgggttctcaagactttaaccgcaccgagagttttcgtttttctttacggagcagcagtttaacctcaagatcatctcttgaaactggaaatgggtttgagaaactgaagattaacgtgtctgccagtttatgcggggaatctaaagcaaggatcttgaaatattcgagcttttgtctccggggcagtcttacactcacagcaggagtgaatcagtttgcagtgttgtctcgtctgttgattatgtaccttcggtgacacatgagacagaaagtatactagggaatcaccaaagctccagtgagacgtctcccaagaaaaacttagaaagttcaaacaatgtaaatcatgagcatagcgcagcaaagacttatgagtgttctgtacatgatttagatgattcaggaacaatgacgacttcacataccataaaattggtagaagatcttaaaagcgggtctaacaaagtgaagactgctgctgcagctgaaatacgtcatctcaccattaacagcattgaaaatcgtgtccacatcgggcgttgtggtgctattactccactgctgtcacttttatactcagaagaaaagctaactcaagaacacgcagtcacggctcttttgaatctttccatcagtgaactaaacaaagccatgattgtggaagtcggggcgatagaaccgcttgttcatgttttgaacacaggaaatgacagagccaaagagaattcagcagcatcattgttcagtctgtctgttctgcaggtcaacagagaacgaataggccagtctaacgcagcgatacaagctctggtgaatcttcttggtaaaggaacatttagaggaaagaaagacgccgcctctgctttgttcaatctatcgattactcatgataacaaggcccgtatcgtgcaagctaaggcggttaagtaccttgtggagctgttagacccagatttagagatggttgataaagcagttgctcttcttgcaaatctttctgcagttggagaagggcgtcaagccatcgtgagggaaggtgggattccattacttgttgaaactgttgacttaggatctcagagagggaaagagaatgcagcttctgtgctgcttcagttgtgtctgaacagtcccaagttttgcactctggtcttgcaagaaggcgccatacctccgcttgttgccttgtctcagtctggtacacagagagcaaaagagaaggcacagcaacttcttagccacttccgaaaccagagagatgcaaggatgaagaaaggtagatcatgattcatgaagagataccattttaacatttccctcgggaaattattttgctagaaatttttattttttctttcattttgccaagaacattagctggagaatagtgtcttctcttctgtctcggtgtctccttttgtgttgggttcttgttatgtaatgtgttaatgttgctgtgtagtagttatatgtatgtgcaatttgtgagtttcgagtatatataggcaatgaagttctaatacaaaagat

SEQ ID NO: 11472 - protein, 416 aa, Arabidopsis thaliana
MDPVPVRCLLNSISRYLHLVACQTIRFNPIQTCIGNMVLLLKLLKPLLDEVVDCKIPSDDCLYKGCEDLDSVVNQAREFLEDWSPKLSKLFGVFQCEVLLGKVQTCSLEISRILLQLSQSSPVTSSVQSVERCVQETESFKQEGTLMELMENALRNQKDDITSLDNNHLESIIQMLGLISNQDLLKESITVEKERIRSQANKSEEDMEQTEQLIELVLCIREHMLKTEFLEVAKGISIPPYFRCPLSTELMLDPVIVASGQTFDRTSIKKWLDNGLAVCPRTRQVLTHQELIPNYTVKAMIASWLEANRINLATNSCHQYDGGDASSMANNMGSQDFNRTESFRFSLRSSSLTSRSSLETGNGFEKLKINVSASLCGESKARILKYSSFCLRGSLTLTAGVNQFAVLSRLLIMYLR

SEQ ID NO: 11473 - protein, 380 aa, Arabidopsis thaliana
MVLLLKLLKPLLDEVVDCKIPSDDCLYKGCEDLDSVVNQAREFLEDWSPKLSKLFGVFQCEVLLGKVQTCSLEISRILLQLSQSSPVTSSVQSVERCVQETESFKQEGTLMELMENALRNQKDDITSLDNNHLESIIQMLGLISNQDLLKESITVEKERIRSQANKSEEDMEQTEQLIELVLCIREHMLKTEFLEVAKGISIPPYFRCPLSTELMLDPVIVASGQTFDRTSIKKWLDNGLAVCPRTRQVLTHQELIPNYTVKAMIASWLEANRINLATNSCHQYDGGDASSMANNMGSQDFNRTESFRFSLRSSSLTSRSSLETGNGFEKLKINVSASLCGESKARILKYSSFCLRGSLTLTAGVNQFAVLSRLLIMYLR

SEQ ID NO: 11474 - protein, 292 aa, Arabidopsis thaliana
MTTSHTIKLVEDLKSGSNKVKTAAAAEIRHLTINSIENRVHIGRCGAITPLLSLLYSEEKLTQEHAVTALLNLSISELNKAMIVEVGAIEPLVHVLNTGNDRAKENSAASLFSLSVLQVNRERIGQSNAAIQALVNLLGKGTFRGKKDAASALFNLSITHDNKARIVQAKAVKYLVELLDPDLEMVDKAVALLANLSAVGEGRQAIVREGGIPLLVETVDLGSQRGKENAASVLLQLCLNSPKFCTLVLQEGAIPPLVALSQSGTQRAKEKAQQLLSHFRNQRDARMKKGRS

SEQ ID NO: 11475 - DNA, 2141 bp, Arabidopsis thaliana
gagattgtaacgcctcacaatccttcctacccgtgagtccgtgaccgattgtgtatcatccatcttctttcttcttctttcttcttctttcttcttcttttatatataaaccaaaatataattcgtgaagactttcactttctccttgccactttttgacgattcacatgcaccatccaatattttagtgcccttttcacgacatatctgtgtctgtatccaattttcttatttactacttcttttttctatttatatatacaaaaagaatcaaagagagagacgaattttcgaggtaaggtatctatcgactttctatcttcctccacctttgtttgttgtcaccaccacactacgctaatcattgccacacacatgcataattctctccaaccatctaaaagtcccactttagcattcttctgtttgtaattttatctcagagcttgcttcatgggcttttgagttttctctctgtttccaaaaaacaatggaaccggagaagaatccgaccacagtattgagagccattacaagaccttcgtgggcgtttcttctccttgttttcaccgtcttagcgattctctctctccaaatctcttccaattcttttctccctctctggatcccgacttctcaatatgacgaccctgttacctgctccgggtttttcaatcacgacccgttccctaaccggatcgttatgtcgattaccgatttcggcggtgttggagacggaaagacgtcgaacacggccgctttccgccgcgccgtaaggcaccttgaaggttttgcggcggagggtggggcccagctcaatgtcccggagggcacgtggctttctggaagcttcaacctcaccagcaatttcacgctctttctcgaacgcggcgctctcattttgggatccaaggacctagacgaatggccgataatagagccattgccttcttatggaagagggagagagagacctggtggtagacacatcagcctcattcatggagacaatctcactaatgttgtcattacaggagaaaatgggacaattgatggacaggggaaaatgtggtgggagttatggtggaacagaacattggtgcatacgagaggccatcttattgaactcaagaactctcataatatcctcatctctaacctcactttgctcaattctcctttctggacaatccatcctgtttattgcagtaatgttgttattagaaatatgaccatccttgctccgatgaatgctcctaacaccgacggtatagatccagactcaagcaccaatgtctgcattgaggattgttacatcgaaagtggtgatgatctagtagctgtaaagagcgggtgggatcaatatggaatggctgtggcacgtccgagttcaaacatcgtaatccgaagaatctctggtactactcgcacttgttcaggagttgggataggcagtgagatgtctggtgggattttcaacataaccgttgaagatattcacgtctgggattctgcggctgggctccgcataaaaacagataaagggagaggtgggtacatttcgaatatcacctttaataatgtgttattggagaaagtgaaagttccgattagattcagcagtggctcaaatgatcactcagacgataaatgggatccgaaagctcttccgagagtaaaagggatttacattagcaatgttgtgagtctgaattcgagaaaggcccctatgttgctcggtgttgaaggcacatcgtttcaagacgtatgcttgaggaatgttacgcttcttgggttaccgaagaccgagaaatggaaatgcaaggatgtttctggttacgcgagtgacgtttttcctctgtcatgtccacagttgttgcagaagaaaggttcaatagctcagtgttcatatagatgaggtttgagaaagtttttttttttgggtaaagatagagagaggaggccatgagttcgatcaagtttttttgagtgaagattcatggtcacttacgaaaaatgttaaatcttggatttcctttttcacatttttttgttcgtgttttgaatcttgattctttttatacatacattgtgtaacgaaatatactttgaattattccataaaagattttttcttattc

SEQ ID NO: 11476 - protein, 475 aa, Arabidopsis thaliana
MEPEKNPTTVLRAITRPSWAFLLLVFTVLAILSLQISSNSFLPLWIPTSQYDDPVTCSGFFNHDPFPNRIVMSITDFGGVGDGKTSNTAAFRRAVRHLEGFAAEGGAQLNVPEGTWLSGSFNLTSNFTLFLERGALILGSKDLDEWPIIEPLPSYGRGRERPGGRHISLIHGDNLTNVVITGENGTIDGQGKMWWELWWNRTLVHTRGHLIELKNSHNILISNLTLLNSPFWTIHPVYCSNVVIRNMTILAPMNAPNTDGIDPDSSTNVCIEDCYIESGDDLVAVKSGWDQYGMAVARPSSNIVIRRISGTTRTCSGVGIGSEMSGGIFNITVEDIHVWDSAAGLRIKTDKGRGGYISNITFNNVLLEKVKVPIRFSSGSNDHSDDKWDPKALPRVKGIYISNVVSLNSRKAPMLLGVEGTSFQDVCLRNVTLLGLPKTEKWKCKDVSGYASDVFPLSCPQLLQKKGSIAQCSYR

SEQ ID NO: 11477 - protein, 404 aa, Arabidopsis thaliana
MSITDFGGVGDGKTSNTAAFRRAVRHLEGFAAEGGAQLNVPEGTWLSGSFNLTSNFTLFLERGALILGSKDLDEWPIIEPLPSYGRGRERPGGRHISLIHGDNLTNVVITGENGTIDGQGKMWWELWWNRTLVHTRGHLIELKNSHNILISNLTLLNSPFWTIHPVYCSNVVIRNMTILAPMNAPNTDGIDPDSSTNVCIEDCYIESGDDLVAVKSGWDQYGMAVARPSSNIVIRRISGTTRTCSGVGIGSEMSGGIFNITVEDIHVWDSAAGLRIKTDKGRGGYISNITFNNVLLEKVKVPIRFSSGSNDHSDDKWDPKALPRVKGIYISNVVSLNSRKAPMLLGVEGTSFQDVCLRNVTLLGLPKTEKWKCKDVSGYASDVFPLSCPQLLQKKGSIAQCSYR

SEQ ID NO: 11478 - protein, 283 aa, Arabidopsis thaliana
MWWELWWNRTLVHTRGHLIELKNSHNILISNLTLLNSPFWTIHPVYCSNVVIRNMTILAPMNAPNTDGIDPDSSTNVCIEDCYIESGDDLVAVKSGWDQYGMAVARPSSNIVIRRISGTTRTCSGVGIGSEMSGGIFNITVEDIHVWDSAAGLRIKTDKGRGGYISNITFNNVLLEKVKVPIRFSSGSNDHSDDKWDPKALPRVKGIYISNVVSLNSRKAPMLLGVEGTSFQDVCLRNVTLLGLPKTEKWKCKDVSGYASDVFPLSCPQLLQKKGSIAQCSYR

SEQ ID NO: 11479 - DNA, 1100 bp, Arabidopsis thaliana
tggtgccgattcggcacgaggagctcactagtccccccccccccccgatggaaaaagttttctccgacgaaaaaatctccggtaaccatcactggtcgtttaatggaacgacgtcgttgaatcgtagtgcatccgaatgggcattcaatcgcttcatacaagaatcctccgccgctgcagacgacggagaatctgcgacggcgtgtggtgtttccgtctcttctcctcctaatgttcctgtagattcagaggaatacagagcatttctcaagagtaaacttaatcttgcttgtgctgctgtcgccatgaaaaggggaactttcatcaaacctcaggatacttctggtagatctgacaatggtggagccaatgcatcagaacaaggctctcttgcttcttccaaagctacaccaatgatgagcagtgctataacaagtggttctgagctctctggtgatgaagaagaagctgatggtgaaactaatatgaaccctactaatgttaaacgcgtgaaaaggatgctctctaatagagaatcagctagacgatccagaagaagaaagcaagcacacttgagtgagctagagacacaagtttcgcagcttcgtgtagagaattcaaaactcatgaagggtctcactgatgtaactcaaacattcaatgatgcatctgtagaaaacagagttttaaaagccaatattgagacactacgagcaaaggtgaaaatggctgaagagacagtgaagagactcactggctttaacccaatgttccacactatgcctcagattgtttcaactgtctctcttccttcagagacatcaaattctctagacactacaagcagccaagtgactacaccagagatcatcagctcggggaacaaaagcaaggccttgatagggtgcaagatgaacagaacagcttcgatgcgtagagttgagagcttggaacatctgcagaaacgtattcgaagcgttggggatcagtagctgttaaagaagaatcttgatttgtaacattatcaagagagttattcgacaaatgttgtatgttttgtaaagaattgttttcagattattttaaactttttttttgtc

SEQ ID NO: 11480 - protein, 329 aa, Arabidopsis thaliana
VPIRHEELTSPPPPPMEKVFSDEKISGNHHWSFNGTTSLNRSASEWAFNRFIQESSAAADDGESATACGVSVSSPPNVPVDSEEYRAFLKSKLNLACAAVAMKRGTFIKPQDTSGRSDNGGANASEQGSLASSKATPMMSSAITSGSELSGDEEEADGETNMNPTNVKRVKRMLSNRESARRSRRRKQAHLSELETQVSQLRVENSKLMKGLTDVTQTFNDASVENRVLKANIETLRAKVKMAEETVKRLTGFNPMFHTMPQIVSTVSLPSETSNSLDTTSSQVTTPEIISSGNKSKALIGCKMNRTASMRRVESLEHLQKRIRSVGDQ

SEQ ID NO: 11481 - protein, 314 aa, Arabidopsis thaliana
MEKVFSDEKISGNHHWSFNGTTSLNRSASEWAFNRFIQESSAAADDGESATACGVSVSSPPNVPVDSEEYRAFLKSKLNLACAAVAMKRGTFIKPQDTSGRSDNGGANASEQGSLASSKATPMMSSAITSGSELSGDEEEADGETNMNPTNVKRVKRMLSNRESARRSRRRKQAHLSELETQVSQLRVENSKLMKGLTDVTQTFNDASVENRVLKANIETLRAKVKMAEETVKRLTGFNPMFHTMPQIVSTVSLPSETSNSLDTTSSQVTTPEIISSGNKSKALIGCKMNRTASMRRVESLEHLQKRIRSVGDQ

SEQ ID NO: 11482 - protein, 228 aa, Arabidopsis thaliana
MKRGTFIKPQDTSGRSDNGGANASEQGSLASSKATPMMSSAITSGSELSGDEEEADGETNMNPTNVKRVKRMLSNRESARRSRRRKQAHLSELETQVSQLRVENSKLMKGLTDVTQTFNDASVENRVLKANIETLRAKVKMAEETVKRLTGFNPMFHTMPQIVSTVSLPSETSNSLDTTSSQVTTPEIISSGNKSKALIGCKMNRTASMRRVESLEHLQKRIRSVGDQ

SEQ ID NO: 11483 - DNA, 1363 bp, Arabidopsis thaliana
aaaatctagagaagcttgtttctagggtttcgactctcgacggccggtacgatttttcaactgcttgttctaaggaatcatgaagcctgtcttttgcggaaactttgagtatgatgctcgtgagagtgatcttgagcggcttttcagaaagtacggcaaggttgagagggttgatatgaaagctgggtttgcttttgtctatatggaagatgaaagggatgctgaagatgcaattcgagcgcttgatcgctttgaatatggtcgcacaggacgcagactccgtgttgagtggacaaagaatgaccgtggaggtgctggaagatcaggtggttcgaggagatcatcttctggcttgagaccttccaagactctgtttgtgatcaacttcgatgcacaaaacactaggactcgggacttggagaggcactttgagccgtatggtaaaattgttaatgttagaatcagaaggaattttgcattcatccaatatgaggcacaagaagatgctaccagagcactggatgctacaaattccagtaagctgatggataaggtgatctcagtggagtatgcagtgaaagatgatgattcaagaggaaatggatacagtcctgaaagacggcgtgataggtcacctgataggagaaggcgatcaccaagtccttacagaagagaaaggggaagtcctgactatggccgaggtgctagtccagtagctcacaaaagggaaaggactagtcctgattatggtcgtggaagacgcagccccagcccttacaagagagccaggcttagcccagattacaagagggatgaccgtaggagggagagagtggctagcccagagaatggagctgtaaggaaccgaagcccaagaaaaggacgtggtgaaagcaggagtcctcctccatatgagaagaggagggaaagcaggagtcctccgccatatgagaagagaagggaaagcaggagtcctcctccatatgagaagaggagggagaggtcaaggtcaaggtcgaagtcaagccctgagaatggtcaagttgagagccctgggcaaataatggaagtagaagctggaagaggatacgatggagcagacagcccgatacgcgagagcagcccctctcgttcgccgccagcagaggaatgattggagatgcagacagataattgtgttggattcacaaacaaaagatgtctctcaaagtagttgtatccgaaactgaagtcttttgctatgtcatgtagtatttagtgtgttattttgggtctttgttaagtgttttgtaaactttattatgactccattcgaaatcgcttgtcgtagtattggttaaaagattgctttttagtttggatt

SEQ ID NO: 11484 - protein, 357 aa, Arabidopsis thaliana
MKPVFCGNFEYDARESDLERLFRKYGKVERVDMKAGFAFVYMEDERDAEDAIRALDRFEYGRTGRRLRVEWTKNDRGGAGRSGGSRRSSSGLRPSKTLFVINFDAQNTRTRDLERHFEPYGKIVNVRIRRNFAFIQYEAQEDATRALDATNSSKLMDKVISVEYAVKDDDSRGNGYSPERRRDRSPDRRRRSPSPYRRERGSPDYGRGASPVAHKRERTSPDYGRGRRSPSPYKRARLSPDYKRDDRRRERVASPENGAVRNRSPRKGRGESRSPPPYEKRRESRSPPPYEKRRESRSPPPYEKRRERSRSRSKSSPENGQVESPGQIMEVEAGRGYDGADSPIRESSPSRSPPAEE

SEQ ID NO: 11485 - protein, 325 aa, Arabidopsis thaliana
MKAGFAFVYMEDERDAEDAIRALDRFEYGRTGRRLRVEWTKNDRGGAGRSGGSRRSSSGLRPSKTLFVINFDAQNTRTRDLERHFEPYGKIVNVRIRRNFAFIQYEAQEDATRALDATNSSKLMDKVISVEYAVKDDDSRGNGYSPERRRDRSPDRRRRSPSPYRRERGSPDYGRGASPVAHKRERTSPDYGRGRRSPSPYKRARLSPDYKRDDRRRERVASPENGAVRNRSPRKGRGESRSPPPYEKRRESRSPPPYEKRRESRSPPPYEKRRERSRSRSKSSPENGQVESPGQIMEVEAGRGYDGADSPIRESSPSRSPPAEE

SEQ ID NO: 11486 - protein, 316 aa, Arabidopsis thaliana
MEDERDAEDAIRALDRFEYGRTGRRLRVEWTKNDRGGAGRSGGSRRSSSGLRPSKTLFVINFDAQNTRTRDLERHFEPYGKIVNVRIRRNFAFIQYEAQEDATRALDATNSSKLMDKVISVEYAVKDDDSRGNGYSPERRRDRSPDRRRRSPSPYRRERGSPDYGRGASPVAHKRERTSPDYGRGRRSPSPYKRARLSPDYKRDDRRRERVASPENGAVRNRSPRKGRGESRSPPPYEKRRESRSPPPYEKRRESRSPPPYEKRRERSRSRSKSSPENGQVESPGQIMEVEAGRGYDGADSPIRESSPSRSPPAEE

SEQ ID NO: 11487 - DNA, 1756 bp, Arabidopsis thaliana
gaaaagaaagatcattagtttctgaggggataaccatttttttttcttcttaaaaagttttttttttgtcaattggtcttcttcttcctcatccgctcgcttatatttaatttaataataataaaaatcggtgttcatttttatataaaagtataaattttgtgtttggttgatccatccgtagtcgtagtagatctacaagctctgaaattccacgcccacatctcctccgtcctcttgagatccttctcttcattcattttcttgctcaacttgagttgcttccaacatcttgcaagattgtctttgagttcattcaggtcttgaagaagagcactcttttaagctgtgtgaaacttgcgccgttcctgtgaagaactacttttggcattgcagatttcagagagctgtgatttgtgctatcttaaaaacggacaagttctatgttgtggcggatgagatgagggatgctatctgggttgatgaattttctgaatgcctgtctctggccacggtcagatcagcaggctcgttctgcctcagattctggtggccgccaagagggtttgctctggttcagagactccggccagcacgtctttggtgacttctccatggccgtcgttcaagccaacagcttgctagaggaccagagccagctcgagtctggctctcttagctcccacgactctggtccctttggcacctttgttggcgtctacgacggccacggtgggcctgagacatctcgcttcatcaatgatcatatgttccaccacctcaagaggtttactgcagagcaacagtgtatgtcatcagaagtgataaaaaaagcgttccaagccactgaagaaggcttcttatccatagttacaaatcaatttcaaactagacctcagatagccacagtgggatcatgctgtcttgtaagtgtcatctgcgatgggaagctatacgtggccaacgcaggggactcacgggccgttctgggacgagtcatgagggtaacaggtgaagctcatgccactcagctctcagcagagcacaacgcatctatagagtcagtgagacgggaacttcaggccctgcatccggatcatccagatattgtggttctgaaacataacgtctggcgagtaaaaggcatcattcaggtttcaagatccattggtgatgtgtatttgaaaaggtcagagttcaacagggaaccactgtatgcaaaattccggctgaggtcaccgttcagcaagccattactgagtgcagagccggcgatcacggtgcatacactggagccgcacgatcagttcattatatgtgcatcagatggactgtgggaacatatgagcaaccaagaagcagtagacatagtccagaatcatccgcgaaacgggatagcaaagaggtggtgaaagtagcgctacaagaagcggcaaagaagagagagatgagatactcagacctgaaaaagatagacagaggagtgaggagacatttccacgatgacataacagtgattgttgtcttctttgatacaaacctagtgagcagaggaagtatgttgagaggaccagccgtgtcagtgagaggagcgggtgtgaatctacctcacaacaccctggcgccttgcaccacgcccactcaagctgctgctgctggcgcctcctgactattgaatttttacggtgtccttaaaattctttccaagatccttcctgtaactatatataaatatatatatttgattattattatc

SEQ ID NO: 11488 - protein, 314 aa, Arabidopsis thaliana
MLSGLMNFLNACLWPRSDQQARSASDSGGRQEGLLWFRDSGQHVFGDFSMAVVQANSLLEDQSQLESGSLSSHDSGPFGTFVGVYDGHGGPETSRFINDHMFHHLKRFTAEQQCMSSEVIKKAFQATEEGFLSIVTNQFQTRPQIATVGSCCLVSVICDGKLYVANAGDSRAVLGRVMRVTGEAHATQLSAEHNASIESVRRELQALHPDHPDIVVLKHNVWRVKGIIQVSRSIGDVYLKRSEFNREPLYAKFRLRSPFSKPLLSAEPAITVHTLEPHDQFIICASDGLWEHMSNQEAVDIVQNHPRNGIAKRW

SEQ ID NO: 11489 - protein, 309 aa, Arabidopsis thaliana
MNFLNACLWPRSDQQARSASDSGGRQEGLLWFRDSGQHVFGDFSMAVVQANSLLEDQSQLESGSLSSHDSGPFGTFVGVYDGHGGPETSRFINDHMFHHLKRFTAEQQCMSSEVIKKAFQATEEGFLSIVTNQFQTRPQIATVGSCCLVSVICDGKLYVANAGDSRAVLGRVMRVTGEAHATQLSAEHNASIESVRRELQALHPDHPDIVVLKHNVWRVKGIIQVSRSIGDVYLKRSEFNREPLYAKFRLRSPFSKPLLSAEPAITVHTLEPHDQFIICASDGLWEHMSNQEAVDIVQNHPRNGIAKRW

SEQ ID NO: 11490 - protein, 265 aa, Arabidopsis thaliana
MAVVQANSLLEDQSQLESGSLSSHDSGPFGTFVGVYDGHGGPETSRFINDHMFHHLKRFTAEQQCMSSEVIKKAFQATEEGFLSIVTNQFQTRPQIATVGSCCLVSVICDGKLYVANAGDSRAVLGRVMRVTGEAHATQLSAEHNASIESVRRELQALHPDHPDIVVLKHNVWRVKGIIQVSRSIGDVYLKRSEFNREPLYAKFRLRSPFSKPLLSAEPAITVHTLEPHDQFIICASDGLWEHMSNQEAVDIVQNHPRNGIAKRW

SEQ ID NO: 11491 - DNA, 1640 bp, Arabidopsis thaliana
gattcattctcttcagtcagagatttcgaaaccctagtcgatttcgagatccaaccaactctgctccttatctcagcttgttgaatttgcgaagtatgggagacgctagagacaacgaagcctacgaggaggagctcttggactatgaagaagaagacgagaaggtcccagattctggaaacaaagttaacggtgaagccgtgaaaaaagggtacgtgggaatacacagttctggattcagagacttccttttaaaaccggagcttctcagagctattgttgactctggatttgaacatccatctgaagtgcaacatgaatgtatccctcaagctatcttgggcatggatgtcatctgccaagcaaagtctggtatggggaagactgctgtgtttgtcctgtctactctacaacagattgaaccatctcctggccaggtttctgcacttgtcttgtgccatacaagagagctagcttaccagatctgcaatgagtttgtgcgattcagtacctatctgcctgatacaaaggtttcggtgttctatggtggagtcaacattaaaattcacaaagacttgctgaagaatgaatgtcctcacattgttgttggtacccctggtcgggtgcttgcacttgccagggagaaagatctctctttgaagaatgtgaggcattttattcttgatgaatgtgataaaatgctcgagtcacttgacatgcgaagggatgtgcaggagattttcaagatgactcctcatgacaaacaagtaatgatgttctcagcaacgctcagcaaagagatacgcccagtctgcaaaaaatttatgcaagatccaatggaaatatatgtcgatgatgaagccaagttgactcttcatgggcttgtccagcactacatcaaactgagcgagatggagaaaaaccggaagttgaatgaccttcttgatgcgttggacttcaatcaagttgtcatttttgtgaagagcgtgagcagggctgctgagctgaacaagttactggtggaatgcaatttcccctcaatatgcatccactctggaatgtctcaagaagagaggttgactcgatacaaaagtttcaaggaagggcacaaaaggatccttgtggcgactgacttggtaggaagagggattgacattgagcgtgtcaacattgtcatcaactatgacatgccagattctgctgatacctatcttcacagggttggcagagctggtagatttggaaccaagggtcttgcaatcacatttgttgcatctgcttcagattcagaggttcttaaccaggtacaagagaggtttgaggttgatataaaggaacttccggagcagattgatacttcaacctacatgccttcttaaacaagtagcacgtccctcaggaaagaagctcttcagatttcaaccttgtaggtgttcgaagggtgatgggggttcacaactatctctcgctccgtttgttttagtgttttctatgacgacatttttttccatatgtttagaacgtctgttgtactctttaaaggagattcgagtcactctccaaatcgcacagttaaaagctgtccagttttttgtacaagagattattatgtttgaaatatcaggatttagtctcgactc

SEQ ID NO: 11492 - protein, 458 aa, Arabidopsis thaliana; identical to SEQ ID NO: 8079

SEQ ID NO: 11493 - protein, 427 aa, Arabidopsis thaliana; identical to SEQ ID NO: 6084

SEQ ID NO: 11494 - protein, 344 aa, Arabidopsis thaliana; identical to SEQ ID NO: 6085

SEQ ID NO: 11495 - DNA, 1457 bp, Arabidopsis thaliana
gaaaccacatgacacatgtgctccctaaacgtcgccgtgaccagatagctccggtcagagtcattatctctctctcgctcgctctctccatcttcatctctcttgctgaaaaatggcgaactcgagaactgtcttaatcttgtgcggtgactacatggaagactacgaggtgatggttccgttccaagctttacaagctttcggaatcaccgtccacaccgtctgccccggaaagaaagctggtgactcttgccccaccgccgttcacgatttttgtggccaccagacatattctgagtcacgaggtcacaatttcacgctcaatgcaacgtttgatgaagttgaccttagcaagtatgatggattggttataccaggaggacgtgctccagaatacctggccttgactgcatctgttgttgagctggttaaagagttctcaagatctggcaagcccattgcctctatttgccatgggcagttgatattggcagctgcagacacagtcaatggtcgaaaatgtacagcttatgcaactgttggaccttcccttgttgctgcaggtgccaagtgggtcgaaccgataactccggatgtctgtgttgttgatggtagtttgattactgcagctacatatgagggtcatcctgaatttatccagctttttgtcaaggctcttggcggtaaaataactaaagcaaataaaaggatcttgtttctttgtggggattatatggaagactatgaagtcaaagtgcctttccagtcccttcaagctttgggatgtcaagttgatgcggtttgtccagagaagaaggctggtgatcgctgcccaactgcaatccatgactttgagggtgaccaaacttacagtgagaaaccaggccacacttttgctttaactactaactttgatgacctagtttcctcgagttatgatgctctggtcattcctggaggcagagcaccagaatatctggccttgaacgaacatgtccttaacatagttaaagagttcatgaattctgagaaaccagttgcgtctatttgccacggacaacagatcttagctgctgctggtgtcctcaagggaaggaaatgcactgcttatccagccgtgaaactgaacgtggtacttggaggaggaacttggctagaaccagatccaatcgacaggtgcttcactgacgggaatctagtaactggcgcagcatggcctggacacccggagtttgtttcacaactaatggctttgttgggcattcaggtttcattctaagttccatgttatgtaaacatcgttatcaagcagaacccatccaacacacttgtctactatggtatatgttactgccatcttttctatctcgtcttttgactagcttactgtcaagtcaatcacttgtgtttcataaagaaccccactgttgatgctttatgtaaagaatgaattctat

SEQ ID NO: 11496 - protein, 388 aa, Arabidopsis thaliana
MANSRTVLILCGDYMEDYEVMVPFQALQAFGITVHTVCPGKKAGDSCPTAVHDFCGHQTYSESRGHNFTLNATFDEVDLSKYDGLVIPGGRAPEYLALTASVVELVKEFSRSGKPIASICHGQLILAAADTVNGRKCTAYATVGPSLVAAGAKWVEPITPDVCVVDGSLITAATYEGHPEFIQLFVKALGGKITKANKRILFLCGDYMEDYEVKVPFQSLQALGCQVDAVCPEKKAGDRCPTAIHDFEGDQTYSEKPGHTFALTTNFDDLVSSSYDALVIPGGRAPEYLALNEHVLNIVKEFMNSEKPVASICHGQQILAAAGVLKGRKCTAYPAVKLNVVLGGGTWLEPDPIDRCFTDGNLVTGAAWPGHPEFVSQLMALLGIQVSF

SEQ ID NO: 11497 - protein, 374 aa, Arabidopsis thaliana
MEDYEVMVPFQALQAFGITVHTVCPGKKAGDSCPTAVHDFCGHQTYSESRGHNFTLNATFDEVDLSKYDGLVIPGGRAPEYLALTASVVELVKEFSRSGKPIASICHGQLILAAADTVNGRKCTAYATVGPSLVAAGAKWVEPITPDVCVVDGSLITAATYEGHPEFIQLFVKALGGKITKANKRILFLCGDYMEDYEVKVPFQSLQALGCQVDAVCPEKKAGDRCPTAIHDFEGDQTYSEKPGHTFALTTNFDDLVSSSYDALVIPGGRAPEYLALNEHVLNIVKEFMNSEKPVASICHGQQILAAAGVLKGRKCTAYPAVKLNVVLGGGTWLEPDPIDRCFTDGNLVTGAAWPGHPEFVSQLMALLGIQVSF

SEQ ID NO: 11498 - protein, 368 aa, Arabidopsis thaliana
MVPFQALQAFGITVHTVCPGKKAGDSCPTAVHDFCGHQTYSESRGHNFTLNATFDEVDLSKYDGLVIPGGRAPEYLALTASVVELVKEFSRSGKPIASICHGQLILAAADTVNGRKCTAYATVGPSLVAAGAKWVEPITPDVCVVDGSLITAATYEGHPEFIQLFVKALGGKITKANKRILFLCGDYMEDYEVKVPFQSLQALGCQVDAVCPEKKAGDRCPTAIHDFEGDQTYSEKPGHTFALTTNFDDLVSSSYDALVIPGGRAPEYLALNEHVLNIVKEFMNSEKPVASICHGQQILAAAGVLKGRKCTAYPAVKLNVVLGGGTWLEPDPIDRCFTDGNLVTGAAWPGHPEFVSQLMALLGIQVSF

SEQ ID NO: 11499 - DNA, 1354 bp, Arabidopsis thaliana
ggatgatagctgagactttgatacagatatttgagatacgagcgcacgttagctaagaccaccgcgtaagccaccgtctcgtcttgaaacgcaccgtattcatgacttcgtcggagccactcgacctggttgtcaccgtcgtctctgccaagcacctgaagaatgtcaactggcgtaacggtgacctgaaaccctacgttgttctgtatcttgaccaagaccaccctctctccacccgctccgatgattcctcctccatcaaaccggtgtggaacgagcggattactcttcctctcacccgatctgtccacgaatcggtcctcaacatcgaggtttttcattccaattcttcggatctggcgaaaaccctcgtcggatcggttaggtttcctctagctcgtttgattgactcggacgggtcaatgattccggaattgatcaactcgctcgagctggttcgtccatcgggtcgaccacaggggaagattcgtttgaagctcgcgatcaaagacagaccaatccctccaccgcagcatcctccgccacgtcctcaatctcaaccactagattactattctgcccctcaaggaaaccattattactcccctagccctcctcctcctcctcctcctcaagcaccgatcaccgctccatctcctcagcgtgactacagagaattctcacagtcaccgtctccgtctccttacgcattcactgatcactactattccgggtattattatccgcctcctccaccacgttcaatgtacgatcgtgcctccaattacggcctcccaagtggcccatctgctcccgttgatgccttctcatcgattgatcacaagcagcctcctttagctcctcctcggttttctaactacggtccaccgcctagtgggccctcagcacccgttgatgcctttctggttaccgagtacaagccacaagctccacctatgggctcgcgattgtctagctacggagtgcctaatggtccatcggcaccagtcgattactctccttatgatcacaggcagttgcagaagacgatgggtggattgagcttagaggaagagagagctgctgcagagaggtctgagagtgatttcggagctaggccaaactacagctatggccgtgattatcgccgtgaatgttgaggatggcaaaaagttgttgaatttcacaagtgtgcggcgtttctaaggctttacttatcatcagatttgttggtgttagaacaccaggaaatggctgatgacaaaatatgaatttggtgaagtatatgttatgtctatatgtatgtctcgtttgtgaattgatttgttgcttctttctaaaaaaaaaaaaaaag

SEQ ID NO: 11500 - protein, 352 aa, Arabidopsis thaliana
MTSSEPLDLVVTVVSAKHLKNVNWRNGDLKPYVVLYLDQDHPLSTRSDDSSSIKPVWNERITLPLTRSVHESVLNIEVFHSNSSDLAKTLVGSVRFPLARLIDSDGSMIPELINSLELVRPSGRPQGKIRLKLAIKDRPIPPPQHPPPRPQSQPLDYYSAPQGNHYYSPSPPPPPPPQAPITAPSPQRDYREFSQSPSPSPYAFTDHYYSGYYYPPPPPRSMYDRASNYGLPSGPSAPVDAFSSIDHKQPPLAPPRFSNYGPPPSGPSAPVDAFLVTEYKPQAPPMGSRLSSYGVPNGPSAPVDYSPYDHRQLQKTMGGLSLEEERAAAERSESDFGARPNYSYGRDYRREC

SEQ ID NO: 11501 - protein, 245 aa, Arabidopsis thaliana
MIPELINSLELVRPSGRPQGKIRLKLAIKDRPIPPPQHPPPRPQSQPLDYYSAPQGNHYYSPSPPPPPPPQAPITAPSPQRDYREFSQSPSPSPYAFTDHYYSGYYYPPPPPRSMYDRASNYGLPSGPSAPVDAFSSIDHKQPPLAPPRFSNYGPPPSGPSAPVDAFLVTEYKPQAPPMGSRLSSYGVPNGPSAPVDYSPYDHRQLQKTMGGLSLEEERAAAERSESDFGARPNYSYGRDYRREC

SEQ ID NO: 11502 - DNA, 1110 bp, Arabidopsis thaliana
ggaaacctcctcccgcagtcacacaactgcgcagagccaaaaataaacgaaacctccggcgaaagctacggcgaagagactgcgtctaactccgtttacacgccgattgtcttggagagagagagagagcacgaggtaaatcacgcaagggttagatgggaaaccagaaactaaagttgacggcggaggaagaggaggcgttactcgccggaatcagaaagcacggtcctggaaagtggaagaatattctccgggatccagaattcgctgatcagctcatccatcgctccaacattgacctaaaggataagtggcgtaacttgagtgttccccctggtactcaaagtttaactaataaggcacggccagcaaaagtcaaagaggaaggcgacactccggctgcagatgcaaatgatgctgtcactattccacggcctattcctactattccacctcctcccggtcggcgtactttaccttctgagttgatccctgatgaaaatacaaagaatgctcctaggtatgactgggtgatatttgaagctctctctgctttagccgatggtaatggatctgatgtcagttccatttatcatttcattgagcccaggcatgaagtaccgccaaattttagaagaatccttagtacaagactgaggaggcttgcagctcagagcaaacttgaaaaggttagcaccttcaaatctatacagaacttctataagatacccgatccatcaggaacaaaaataggtgtcccaaaaccaaaggagacacatacgaagctgcgccaagcaaacaatcagacctctgctgattcacaacagatgatcgaggaagctgcaataaccgcagcctgtaaagtcgtagaggcggagaataaaatagacgttgccaaactagcagcagaagagtttgagaagatgacaaagattgcagaagaaaatagaaaactcctggtcatagctactgagatgcatgaactatgttcctgtggggagactatgctcttggcttgaattgaatctatgggacattccttgtagctctcttcagttatctccgtaatggtgttgataataatatataaaaagaaaactaaattaattt

SEQ ID NO: 11503 - protein, 287 aa, Arabidopsis thaliana
MGNQKLKLTAEEEEALLAGIRKHGPGKWKNILRDPEFADQLIHRSNIDLKDKWRNLSVPPGTQSLTNKARPAKVKEEGDTPAADANDAVTIPRPIPTIPPPPGRRTLPSELIPDENTKNAPRYDWVIFEALSALADGNGSDVSSIYHFIEPRHEVPPNFRRILSTRLRRLAAQSKLEKVSTFKSIQNFYKIPDPSGTKIGVPKPKETHTKLRQANNQTSADSQQMIEEAAITAACKVVEAENKIDVAKLAAEEFEKMTKIAEENRKLLVIATEMHELCSCGETMLLA

SEQ ID NO: 11504 - DNA, 634 bp, Arabidopsis thaliana
gcgcggccatcatcccgccagaggctgaagatgttagttacgaccgggtaaccgaaaaaaaaccggcacgccccgaacgttgccatgaaagtttcgtgctaattcggcttccgtaccggttaacccgattcatctaacaaatgaatgaatcggcaatttgcaaacatcgaccgtctgcgctttaccttcggtgtacaggcactggtggaaaccacctcaaagggtgacaggaatccgtcggaagtccgcctgctggttcagatacaacgtaacggtggctgggtgacggaaaaagacatcaccattaagggcaaaaccacctcgcagtatctggcctcggtggtgatgggtaacctgccgccgcgcccgtttaatatccggatgcgcaggatgacgccggacagcaccacagaccagctgcagaacaaaacgctctggtcgtcatacactgaaatcatcgatgtgaaacagtgctacccgaacacggcactggtcggcgtgcaggtggactcggagcagttcggcagccagcaggtgagccgtaattatcatctgcgcgggcgtattctgcaggtgccgtcgaactataacccgcagacgcggcaatacagcggtatctgggacggcccggtac

SEQ ID NO: 11505 - protein, 163 aa, Arabidopsis thaliana
MNRQFANIDRLRFTFGVQALVETTSKGDRNPSEVRLLVQIQRNGGWVTEKDITIKGKTTSQYLASVVMGNLPPRPFNIRMRRMTPDSTTDQLQNKTLWSSYTEIIDVKQCYPNTALVGVQVDSEQFGSQQVSRNYHLRGRILQVPSNYNPQTRQYSGIWDGPV

SEQ ID NO: 11506 - protein, 96 aa, Arabidopsis thaliana
MGNLPPRPFNIRMRRMTPDSTTDQLQNKTLWSSYTEIIDVKQCYPNTALVGVQVDSEQFGSQQVSRNYHLRGRILQVPSNYNPQTRQYSGIWDGPV

SEQ ID NO: 11507 - protein, 84 aa, Arabidopsis thaliana
MRRMTPDSTTDQLQNKTLWSSYTEIIDVKQCYPNTALVGVQVDSEQFGSQQVSRNYHLRGRILQVPSNYNPQTRQYSGIWDGPV

SEQ ID NO: 11508 - DNA, 794 bp, Arabidopsis thaliana
agaagattttgttccgaggaagacacggatacgcagaaagcggtaaaatcctccttcttcgtcgtccttgtaaaaaccctttctcatttttggaaggttctttcaaaatcctttcttcgattgctttcggattctcgctcgcttcttcgatttttggttttgattcatggtgaatgtgtttcctccgctaaggttaaacgctcttcttcttcatgacagtactttcagtgacgtcatgacgctgcatctgtatcatcactcccgttttctatggaggaatctctgttttcctcggagtgttggaaacttgtgtaatcggaactgttctctcatctctccttcccttgcacgctctgcgaagtactattgcagttccgtagctgtttctgaattctcaaatgaagcagctagtggcagcatattgacttctataagtgaagatgttacgccacagtcgataaaatatcctttcaagtcagaagaaagagtagctagtactgctgcttcttcaaatggcagagtgatgcttattgatgggacatcgattatatacagggcttattataagctattagcaaggttgaatcatggtcatctggctcatgctgatggaaatgcggactgggttttaacaatattttcatctctttctcttctgattgatgttttgaaatttctcccatcccatgtggcggtggtgttcgaccatgatggagttccttatggcactacttctaattcatctacaggttatcgttctgcaaaaggcatgaacttccgtcatactctctacc

SEQ ID NO: 11509 - protein, 209 aa, Arabidopsis thaliana
MVNVFPPLRLNALLLHDSTFSDVMTLHLYHHSRFLWRNLCFPRSVGNLCNRNCSLISPSLARSAKYYCSSVAVSEFSNEAASGSILTSISEDVTPQSIKYPFKSEERVASTAASSNGRVMLIDGTSIIYRAYYKLLARLNHGHLAHADGNADWVLTIFSSLSLLIDVLKFLPSHVAVVFDHDGVPYGTTSNSSTGYRSAKGMNFRHTLY

SEQ ID NO: 11510 - protein, 186 aa, Arabidopsis thaliana
MTLHLYHHSRFLWRNLCFPRSVGNLCNRNCSLISPSLARSAKYYCSSVAVSEFSNEAASGSILTSISEDVTPQSIKYPFKSEERVASTAASSNGRVMLIDGTSIIYRAYYKLLARLNHGHLAHADGNADWVLTIFSSLSLLIDVLKFLPSHVAVVFDHDGVPYGTTSNSSTGYRSAKGMNFRHTLY

SEQ ID NO: 11511 - DNA, 1863 bp, Arabidopsis thaliana
gaatgctcttctgcttcgtactagctgcttcagcttcttcttcttcttccttagattcaaaatctctcttcttctgagtttctgattttcaagtttgagaactactcttttccttctaaatctttgatttttttctctcgtgatttttgtggttcactgctaattgtgaaccaaagatggtgaaatcagcagcttctcagtcaccatctccggtgactataacggtgacaccatgtaaaggatccggcgacagaagcttaggattgacgagtcctatcccacgcgcctccgtcatcaccaaccaaaactctcctctaagctcaagagccacgcgtcgcacttccattagcagcgggaatcggagatctaacggtgatgaaggaagatactgttctatgtctgtggaagatctaacggcggagacgactaattcagagtgcgttctgagctatactgttcatatcccacctacgccggatcatcagacggtgttcgcttcacaggagagtgaagaagacgagatgctaaaagggaattcgaatcaaaaaagtttcctctctgggacgattttcaccggtgggtttaaatcggtgacacgtggtcatgtgatcgattgttctatggatagagctgatccggagaagaagtcaggtcagatctgctggttaaaaggttgtgatgagaaagttgttcacgggagatgtgagtgtggtttccgaatctgtagagattgttactttgattgtatcacaagtggtggaggcaattgtcctggttgcaaagagccttatagggatatcaacgatgatccagagactgaggaagaagacgaagaagatgaggcgaaaccacttcctcagatgggtgaatcaaagcttgacaagaggctttcggttgtgaagtcgtttaaagcgcagaatcaagctggagattttgatcatactcggtggttgtttgagactaaaggtacttatgggtatgggaacgctgtttggcctaaagatgggtatggaatcgggtcgggtggtggtggaaacgggtatgaaacgccacctgagtttggggagagaagcaagaggcctcttactaggaaagtcagtgtctctgctgcaattatcagtccttacagattactcattgcactgcgtctggtggctcttggtttgttcctgacatggagggttcgccacccaaaccgagaagcaatgtggttgtggggaatgtcaacgacctgtgagctttggtttgccttgtcttggcttttggatcagcttccaaaactctgtccggttaacagattaactgatttaggtgttcttaaagaacgctttgagtctccaaacctcaggaaccccaaaggaagatctgatcttccgggtatcgatgtgtttgtctcaactgcagaccctgagaaagaaccacctctggtcacagccaacaccattctctcgatccttgctgttgattaccctgtggagaaacttgcttgctacttgtcagacgatggaggagctttgctaacatttgaagccttggctcaaacagctagctttgcaagtacatgggtgccattttgcaggaaacacaatatagagccaaggaaccctgaggcctactttggacagaagcgtaactttctcaagaacaaagtcaggctggattttgtgagggaaaggaggagagtgaagagagaatatgatgagtttaaggtcagaatcaactcattgcctgaagcgataaggagaaggtctgatgcttataacgtgcacgaagagctaagggctaagaagaaacagatggaaatgatgatgggaaacaatccacaagaaactgttatagttccaaaggccactagagaactat

SEQ ID NO: 11512 - protein, 562 aa, Arabidopsis thaliana
MVKSAASQSPSPVTITVTPCKGSGDRSLGLTSPIPRASVITNQNSPLSSRATRRTSISSGNRRSNGDEGRYCSMSVEDLTAETTNSECVLSYTVHIPPTPDHQTVFASQESEEDEMLKGNSNQKSFLSGTIFTGGFKSVTRGHVIDCSMDRADPEKKSGQICWLKGCDEKVVHGRCECGFRICRDCYFDCITSGGGNCPGCKEPYRDINDDPETEEEDEEDEAKPLPQMGESKLDKRLSVVKSFKAQNQAGDFDHTRWLFETKGTYGYGNAVWPKDGYGIGSGGGGNGYETPPEFGERSKRPLTRKVSVSAAIISPYRLLIALRLVALGLFLTWRVRHPNREAMWLWGMSTTCELWFALSWLLDQLPKLCPVNRLTDLGVLKERFESPNLRNPKGRSDLPGIDVFVSTADPEKEPPLVTANTILSILAVDYPVEKLACYLSDDGGALLTFEALAQTASFASTWVPFCRKHNIEPRNPEAYFGQKRNFLKNKVRLDFVRERRRVKREYDEFKVRINSLPEAIRRRSDAYNVHEELRAKKKQMEMMMGNNPQETVIVPKATREL

SEQ ID NO: 11513 - protein, 489 aa, Arabidopsis thaliana
MSVEDLTAETTNSECVLSYTVHIPPTPDHQTVFASQESEEDEMLKGNSNQKSFLSGTIFTGGFKSVTRGHVIDCSMDRADPEKKSGQICWLKGCDEKVVHGRCECGFRICRDCYFDCITSGGGNCPGCKEPYRDINDDPETEEEDEEDEAKPLPQMGESKLDKRLSVVKSFKAQNQAGDFDHTRWLFETKGTYGYGNAVWPKDGYGIGSGGGGNGYETPPEFGERSKRPLTRKVSVSAAIISPYRLLIALRLVALGLFLTWRVRHPNREAMWLWGMSTTCELWFALSWLLDQLPKLCPVNRLTDLGVLKERFESPNLRNPKGRSDLPGIDVFVSTADPEKEPPLVTANTILSILAVDYPVEKLACYLSDDGGALLTFEALAQTASFASTWVPFCRKHNIEPRNPEAYFGQKRNFLKNKVRLDFVRERRRVKREYDEFKVRINSLPEAIRRRSDAYNVHEELRAKKKQMEMMMGNNPQETVIVPKATREL

SEQ ID NO: 11514 - protein, 447 aa, Arabidopsis thaliana
MLKGNSNQKSFLSGTIFTGGFKSVTRGHVIDCSMDRADPEKKSGQICWLKGCDEKVVHGRCECGFRICRDCYFDCITSGGGNCPGCKEPYRDINDDPETEEEDEEDEAKPLPQMGESKLDKRLSVVKSFKAQNQAGDFDHTRWLFETKGTYGYGNAVWPKDGYGIGSGGGGNGYETPPEFGERSKRPLTRKVSVSAAIISPYRLLIALRLVALGLFLTWRVRHPNREAMWLWGMSTTCELWFALSWLLDQLPKLCPVNRLTDLGVLKERFESPNLRNPKGRSDLPGIDVFVSTADPEKEPPLVTANTILSILAVDYPVEKLACYLSDDGGALLTFEALAQTASFASTWVPFCRKHNIEPRNPEAYFGQKRNFLKNKVRLDFVRERRRVKREYDEFKVRINSLPEAIRRRSDAYNVHEELRAKKKQMEMMMGNNPQETVIVPKATREL

SEQ ID NO: 11515 - DNA, 1436 bp, Arabidopsis thaliana
gaccaattcctcattcttccaatcgcacttcctttaccagatcagacgtcaatttcaactcttcagtgaagagatttctttcaccgagttttctactccgatcgatcaattgaagattgaaatggaagctaattcaggcggaggaggaggagctgaaggcggaagagcggtaaccggaggaggaggagggagcgatgtggaattggtgagcaagacgttgcaagtggagcataagctattctattttgatcttaaggagaatcctcgtggaaggtatctaaagatatcggagaagacgtcggcgacgaggtcaaccatcattgttccttcctccggcatctcttggttccttgatctcttcaactactatgtcaattctgaggaacacgagctttttagcaaagaattgcagcttgattccaaggtgttttacttcgatatcggtgagaacagaagaggacgcttcttgaaggtgtcagaagcatcggttagtagaaatcgaagtaccattattgttccagctggaagctctcctgatgaaggatgggcagctttcaggaatatattggctgagatacatgaagcatcaggactttttgtgatgccaaatcagaaaccttctgatggacaggaacacttggttgatgatgttggagctggttttatacctggacatggtagtcagcagccatcttcttcagaacataatgtggatcgaacaattgactcgccaggccaggaagaaaccggaatgactggtgtttctaaagtaatcagagctgaccagaaacggttcttctttgatcttgggaacaataacaggggccatttcttaaggatatctgaggtggcaggttctgacaggtcttccatcattctaccgttatcgggtcttaagcagtttcacgaagtaattggtcactttgtggagatcaccaaagataaaattgaaggtatgacaggtgcaaatgtcaggacagttgatcctcctcagagataagtattgattctcttagaggatggaaattttcaatcctctaaccatttgaatctggcaacttcaagtcgactgcctgatcgcggtgtgcaatagtttcacgtaatatctctcgccccttcacatcttctaaaaataattcagcaggatcatcatttgccttaatagtagataaaacaaactttggagtccgcaactgggaataagctgaaaatcatccaccatgtgtatctctctctctctgtatctctctctctctctctccctccctccctcatttgcttctgttctgttttaactttttttgtttttgttcagtttgggtcattgggtgtatatctgttgacggcttgatgcatttcaattgtaaaagaatattggggtttatatgtttgggctaatgcctgttggaataaaagatgaagtgtaagttctatcc

SEQ ID NO: 11516 - protein, 332 aa, Arabidopsis thaliana
TNSSFFQSHFLYQIRRQFQLFSEEISFTEFSTPIDQLKIEMEANSGGGGGAEGGRAVTGGGGGSDVELVSKTLQVEHKLFYFDLKENPRGRYLKISEKTSATRSTIIVPSSGISWFLDLFNYYVNSEEHELFSKELQLDSKVFYFDIGENRRGRFLKVSEASVSRNRSTIIVPAGSSPDEGWAAFRNILAEIHEASGLFVMPNQKPSDGQEHLVDDVGAGFIPGHGSQQPSSSEHNVDRTIDSPGQEETGMTGVSKVIRADQKRFFFDLGNNNRGHFLRISEVAGSDRSSIILPLSGLKQFHEVIGHFVEITKDKIEGMTGANVRTVDPPQR

SEQ ID NO: 11517 - protein, 292 aa, Arabidopsis thaliana
MEANSGGGGGAEGGRAVTGGGGGSDVELVSKTLQVEHKLFYFDLKENPRGRYLKISEKTSATRSTIIVPSSGISWFLDLFNYYVNSEEHELFSKELQLDSKVFYFDIGENRRGRFLKVSEASVSRNRSTIIVPAGSSPDEGWAAFRNILAEIHEASGLFVMPNQKPSDGQEHLVDDVGAGFIPGHGSQQPSSSEHNVDRTIDSPGQEETGMTGVSKVIRADQKRFFFDLGNNNRGHFLRISEVAGSDRSSIILPLSGLKQFHEVIGHFVEITKDKIEGMTGANVRTVDPPQR

SEQ ID NO: 11518 - DNA, 1295 bp, Arabidopsis thaliana
gatcctcctgttctctgtactcaatagccgacgacactctgagagagagagccaatcgcgattttgaattttgcatcgacggcgaaaaatgcgatcgttagaagagctatctccgatagaaactctagatatcgaagagaacggtctcgctctcgtctcacgcgtcaagctcaatctcacaatccacccagtagtcccatccgtatccaaatccatcgacgaatggcaactcaagcgatccttaatagattacctcaaaaactctgtcgtaacctccgtcacagttccggaggaagacatcgtagttcgtcgtcacaaggacttgaagaaacggaagcgtgaggagccagttgctcatggatcgttgtttatacgcgatttagggtttctcgatgggaagaagaagaagaaggagaatgatggagagagagatgtgaaggaattggagaagaagtttttggattggaggaagagtttggtggagaagatgaatggtattgagcttaatttggaaggagttaagtataagcttagtgttgtgcttccgatttcagatgatttcgagaggttgaagaaagattgggaggagttttacgcttttggacattcaagggaaggaaggagagaggctgatacgattatacttagaggtgtgccatcaagatggtttgctgagccacgagtttcatcgaagccttctatgttggttacgcatacaatcttctctagctttgggaaaattaggaatcttaatgttgctgaggacgatgatctaggtaaggacgcagatgaggacagtggagacctcatatcaggtctccattgtaagattgtggttcagtttgagaagtataatgatttcgtgaatgccatgaaggctttttgtggtcgctcaatggaaaaggaaggcactcggctaaaggcagactatgaactaacatgggacaagattggattcttcagaaactcgagaaagacgttggataacagagatggcggatacagaaacgagtcttttggatacaatcaggatgatttacgccgaaaaagattcagggagtagagaacactgagagtaaggtctagagggaacttgggagatgttgtcagctctctctctgtcttgtaggtctataacggtgtatttgtattttagataatgttttgaagatttctaagttcagatctgatttttgttcttatgcaaaaatacaatcacgcagaatttgacttactcagaatttagttttggaaatatattccctttcaaaaacatgtgggaagaaattttggcc

SEQ ID NO: 11519 - protein, 324 aa, Arabidopsis thaliana
MRSLEELSPIETLDIEENGLALVSRVKLNLTIHPVVPSVSKSIDEWQLKRSLIDYLKNSVVTSVTVPEEDIVVRRHKDLKKRKREEPVAHGSLFIRDLGFLDGKKKKKENDGERDVKELEKKFLDWRKSLVEKMNGIELNLEGVKYKLSVVLPISDDFERLKKDWEEFYAFGHSREGRREADTIILRGVPSRWFAEPRVSSKPSMLVTHTIFSSFGKIRNLNVAEDDDLGKDADEDSGDLISGLHCKIVVQFEKYNDFVNAMKAFCGRSMEKEGTRLKADYELTWDKIGFFRNSRKTLDNRDGGYRNESFGYNQDDLRRKRFRE

SEQ ID NO: 11520 - protein, 191 aa, Arabidopsis thaliana
MNGIELNLEGVKYKLSVVLPISDDFERLKKDWEEFYAFGHSREGRREADTIILRGVPSRWFAEPRVSSKPSMLVTHTIFSSFGKIRNLNVAEDDDLGKDADEDSGDLISGLHCKIVVQFEKYNDFVNAMKAFCGRSMEKEGTRLKADYELTWDKIGFFRNSRKTLDNRDGGYRNESFGYNQDDLRRKRFRE

SEQ ID NO: 11521 - DNA, 1623 bp, Arabidopsis thaliana
ggcattgacttaatgacttgacactccataatatattgcttcctatagtgtctttatccctctcaatctttcttttctctctccctctcccacaatcacaagataggaaaattgatccacaaagaatcgtctgaatgaagacaacagttgtttatctggtgattctatgtctcattgtttcatgtaccaatggagaaaccaaacatgtaagaaaaagtaactccgatggatccgaagcttggggatacgtcgaagttagaccaaaagcacacatgttttggtggcattataaaagtccatatagagttgaaaatccttccaagccatggcctatcatcctctggctccaaggtggacctggagcttcaggggttggtatagggaattttcaggaggttggaccattagacacatttctcaagcccagaaactcaacttggttgaagaaagccgatcttttgtttgtggatagtccagttggggcagggtacagtttcgtggagggcaatcaaaaggatttgtatgtgaaaagtgatgaagaagcagcacaagatttgaccaaactgttgcaacaactcttcaacaaaaaccagactttaaaccaaagccctctcttcattgttgctgaatcttatggtggcaaaatcgcggttaagctcggtttatcggttattgacgcagttcaatctggcaaattgaagcttcatcttggaggagtgattttgggagatagttggatatcccctgaagattttgtgttttcatggggacctcttctcaagcatgtctctaggcttgatgacaatggcttggatagctctaatagcttagcagagaagattaaaacacaaattaaaaatggtgaatacgttggagcgacgcaaacatggatggacctcgaaaacttgattagttccaaatccaatttcgtcgatttttacaattttctattggatactggtatggaccctgtctcgctcacaacgagtctaaaaatcaaaaaggaagagaaaataaaaaagtattcaagatatttaaatgatatgagaagtttaagtgacgtagaagatgttgaaggagaccttgataaattaatgaatggcgttattaagaagaagctcaagattattcccaacgacctcatatggggaaacaattcggatgatgtgtttacagcaatggaggctgcttttatgaaacccgtaattgaagacgtcgatgagcttcttgccacgggggtagatgtgaccatctataatggacaacttgatgttatctgttcaacaagtggaactgaagcatgggttcacaaactcaggtgggaggggctagaagaattcaagaaaatggaaagagagccattattctgcgaaagtgacagagcaacaagaggctttaccaaatcatacaaaaatctccatttttattggattcttggtgctggtcattttgtaccagtagatgagccatgtgtagcattaaaaatggttggagagataaccaagtcaccacaactttgacccattctttcttccaaactctcacatcacaatatgactcctttcacatctgattgattttattactcaaacgttaaaaataataataaaagagtctacagtg

SEQ ID NO: 11522 - protein, 461 aa, Arabidopsis thaliana
MKTTVVYLVILCLIVSCTNGETKHVRKSNSDGSEAWGYVEVRPKAHMFWWHYKSPYRVENPSKPWPIILWLQGGPGASGVGIGNFQEVGPLDTFLKPRNSTWLKKADLLFVDSPVGAGYSFVEGNQKDLYVKSDEEAAQDLTKLLQQLFNKNQTLNQSPLFIVAESYGGKIAVKLGLSVIDAVQSGKLKLHLGGVILGDSWISPEDFVFSWGPLLKHVSRLDDNGLDSSNSLAEKIKTQIKNGEYVGATQTWMDLENLISSKSNFVDFYNFLLDTGMDPVSLTTSLKIKKEEKIKKYSRYLNDMRSLSDVEDVEGDLDKLMNGVIKKKLKIIPNDLIWGNNSDDVFTAMEAAFMKPVIEDVDELLATGVDVTIYNGQLDVICSTSGTEAWVHKLRWEGLEEFKKMEREPLFCESDRATRGFTKSYKNLHFYWILGAGHFVPVDEPCVALKMVGEITKSPQL

SEQ ID NO: 11523 - protein, 415 aa, Arabidopsis thaliana
MFWWHYKSPYRVENPSKPWPIILWLQGGPGASGVGIGNFQEVGPLDTFLKPRNSTWLKKADLLFVDSPVGAGYSFVEGNQKDLYVKSDEEAAQDLTKLLQQLFNKNQTLNQSPLFIVAESYGGKIAVKLGLSVIDAVQSGKLKLHLGGVILGDSWISPEDFVFSWGPLLKHVSRLDDNGLDSSNSLAEKIKTQIKNGEYVGATQTWMDLENLISSKSNFVDFYNFLLDTGMDPVSLTTSLKIKKEEKIKKYSRYLNDMRSLSDVEDVEGDLDKLMNGVIKKKLKIIPNDLIWGNNSDDVFTAMEAAFMKPVIEDVDELLATGVDVTIYNGQLDVICSTSGTEAWVHKLRWEGLEEFKKMEREPLFCESDRATRGFTKSYKNLHFYWILGAGHFVPVDEPCVALKMVGEITKSPQL

SEQ ID NO: 11524 - DNA, 1536 bp, Arabidopsis thaliana
gagaaacaaaaaaaaaatctcaaatctggcaaaaaatggcgacgattccaatggatatcgtcaacgacatattcctccgattaccagcaaaaactctagttcgttgccgtgctctctctaagccatgttatcatctaatcaacgatccagatttcatcgaatctcatcttcatcgcgttcttcaaaccggtgatcatctcatgattcttctcagaggagctcttcgtctctactctgtagatctcgattcacttgattccgtctccgacgttgagcatccgatgaaacgtggtggtccgaccgaagtttttggttcttccaacggtttaatcgggttatcgaattctccaactgatttagcggtttttaatccttcgactcgacagattcatcgattacctccttcgtctatcgatctccccgatggttcgagtactcgtggttacgtgttttacggattaggttatgattctgttagtgatgattataaagttgtgaggatggttcagtttaagatagattcagaagatgaacttggttgtagttttccttatgaggttaaagtgtttagtttgaagaagaattcatggaagagaatcgaatcagtggcgtcgtcgattcagcttttgttttacttttattatcatctcttgtatcgtcgtggttatggtgttcttgctggtaatagtcttcattgggttttacctagaagacctggtttgattgcgtttaatctcattgttagatttgatcttgccttggaagagtttgagattgttcggtttcctgaagcggttgcgaatggtaatgttgatattcagatggatataggtgttttagatggttgtctttgcttgatgtgtaactatgatcagagttatgttgatgtttggatgatgaaagaatacaatgtgagggattcttggactaaggtttttacggttcagaaaccgaaaagtgtgaagtcgttttcgtatatgagacctttggtttattctaaggataagaaaaaggttcttttggagcttaataatacaaagctagtctggtttgatttagagagtaagaagatgagtactcttaggattaaggattgccctagctcgtatagtgcggaactcgttgtgagtagccttgtcttggggtgtaaaggagatcttaataacattaagtatcgaaaagaacaacaagctaaagaagctagagaagctaaaattatgcagaacactaaaaggagggatgatttcctgtccaaaggattcaagctggtcttataagccaaaaacaagagacaggagctaaagctgcacaagggaggagaaacgagaaggggaacaaacaataacttcaaccaaaaagctctaatataccaaaggagaataatatacaacttacctacgtatatgtgcttatagaagagaggacaaatgtttttggtttgtaaataactctttttaagtttgatatatataacttactagtactaacgctttgtatacttgcttttttaagtttctgcataaaaaaaaaaaaaac

SEQ ID NO: 11525 - protein, 424 aa, Arabidopsis thaliana
ETKKKSQIWQKMATIPMDIVNDIFLRLPAKTLVRCRALSKPCYHLINDPDFIESHLHRVLQTGDHLMILLRGALRLYSVDLDSLDSVSDVEHPMKRGGPTEVFGSSNGLIGLSNSPTDLAVFNPSTRQIHRLPPSSIDLPDGSSTRGYVFYGLGYDSVSDDYKVVRMVQFKIDSEDELGCSFPYEVKVFSLKKNSWKRIESVASSIQLLFYFYYHLLYRRGYGVLAGNSLHWVLPRRPGLIAFNLIVRFDLALEEFEIVRFPEAVANGNVDIQMDIGVLDGCLCLMCNYDQSYVDVWMMKEYNVRDSWTKVFTVQKPKSVKSFSYMRPLVYSKDKKKVLLELNNTKLVWFDLESKKMSTLRIKDCPSSYSAELVVSSLVLGCKGDLNNIKYRKEQQAKEAREAKIMQNTKRRDDFLSKGFKLVL

SEQ ID NO: 11526 - protein, 413 aa, Arabidopsis thaliana
MATIPMDIVNDIFLRLPAKTLVRCRALSKPCYHLINDPDFIESHLHRVLQTGDHLMILLRGALRLYSVDLDSLDSVSDVEHPMKRGGPTEVFGSSNGLIGLSNSPTDLAVFNPSTRQIHRLPPSSIDLPDGSSTRGYVFYGLGYDSVSDDYKVVRMVQFKIDSEDELGCSFPYEVKVFSLKKNSWKRIESVASSIQLLFYFYYHLLYRRGYGVLAGNSLHWVLPRRPGLIAFNLIVRFDLALEEFEIVRFPEAVANGNVDIQMDIGVLDGCLCLMCNYDQSYVDVWMMKEYNVRDSWTKVFTVQKPKSVKSFSYMRPLVYSKDKKKVLLELNNTKLVWFDLESKKMSTLRIKDCPSSYSAELVVSSLVLGCKGDLNNIKYRKEQQAKEAREAKIMQNTKRRDDFLSKGFKLVL

SEQ ID NO: 11527 - protein, 408 aa, Arabidopsis thaliana
MDIVNDIFLRLPAKTLVRCRALSKPCYHLINDPDFIESHLHRVLQTGDHLMILLRGALRLYSVDLDSLDSVSDVEHPMKRGGPTEVFGSSNGLIGLSNSPTDLAVFNPSTRQIHRLPPSSIDLPDGSSTRGYVFYGLGYDSVSDDYKVVRMVQFKIDSEDELGCSFPYEVKVFSLKKNSWKRIESVASSIQLLFYFYYHLLYRRGYGVLAGNSLHWVLPRRPGLIAFNLIVRFDLALEEFEIVRFPEAVANGNVDIQMDIGVLDGCLCLMCNYDQSYVDVWMMKEYNVRDSWTKVFTVQKPKSVKSFSYMRPLVYSKDKKKVLLELNNTKLVWFDLESKKMSTLRIKDCPSSYSAELVVSSLVLGCKGDLNNIKYRKEQQAKEAREAKIMQNTKRRDDFLSKGFKLVL

SEQ ID NO: 11528 - DNA, 1451 bp, Arabidopsis thaliana
gcaccagtccccccccccccgaccgtacacacatccccatacgaacactcacaatcgttaaaaagaagagaagagaagagagagaaagcttaaatcggaaaaaatggtttcgtggatgatgacaaccaaggcggtgctaatctcaagcggcgtcgccaccgtggctctgttactgaaactctctgttccggtagctgttgatttctccgtgtcacgagctccgatcttgtggagctccttgttgtcatggctgaaaccaccgtatctttacgttgttaccaacggaatcatcatcactatcgttgcttcttctaagtattaccgaagtcaccatgaccgtgatgaagaagatgagatcgtcgtgtacggtggtggaggttataaggtccagacgggggagccgattgtgaatcaacatcaagcttctccgaggattctggaggttaaggatttggatactggtgcgcattttggtttcgttatggcgaatccggaagcggaggaactggaatcagaggcggttacggcggttgtgtttgatgatgaggaggaggagaacaagattatagatgaggcggcgacggtggaggatggaattgaagaggagcttaagagtgtgattatggctgagaattcagatctggttgaatccgatgtcataccgccgccgatcccaatcgaatcggagaatattcctccgattgagaagcctctcgttacttcaaggttcgggtcaccggaaattgatgaaagcaagtcacgaaggtggaagagctctgagagtgacgaagccgaagaagaacgagacgttggagaatacgtggaagatgataacggaagggaagtcaacgccgttgactagacagttataccggagatctgacacgtttggacgtggagattccgggggagttgacggtgaggtgaaaccggtttataagaaatcggatacgtttagggacaggactaattattatcagttggcggagacggcgaaggtgaggaaagagccgtcgctgagtcaggaagagttgaatcggcgagttgaagcgtttataaagaagtttaatgaggagatgaagttgcagagaatggagtctctcagacagtacaaagagataactagccgtggggtttagttaactgtttttattttctggttaaaatttttttattggcttttttatacacagaaaaaaatagaaaaagaagattagtcagagtggatttaacttaaaagaaaaaaaagttacagtagaaaaaaaatctctttattaatttgtgaagcttgaaggttttttttttgtcaacgctttgaagttacataggttttttttctttgctttgttgttgtgtgtgtgattttactgagatatagtttggtttgtatatattaatgtgttggttttacaagtaaaaattagatatatatacacttgtggttttgttgc

SEQ ID NO: 11529 - protein, 252 aa, Arabidopsis thaliana
MVSWMMTTKAVLISSGVATVALLLKLSVPVAVDFSVSRAPILWSSLLSWLKPPYLYVVTNGIIITIVASSKYYRSHHDRDEEDEIVVYGGGGYKVQTGEPIVNQHQASPRILEVKDLDTGAHFGFVMANPEAEELESEAVTAVVFDDEEEENKIIDEAATVEDGIEEELKSVIMAENSDLVESDVIPPPIPIESENIPPIEKPLVTSRFGSPEIDESKSRRWKSSESDEAEEERDVGEYVEDDNGREVNAVD

SEQ ID NO: 11530 - protein, 248 aa, Arabidopsis thaliana
MMTTKAVLISSGVATVALLLKLSVPVAVDFSVSRAPILWSSLLSWLKPPYLYVVTNGIIITIVASSKYYRSHHDRDEEDEIVVYGGGGYKVQTGEPIVNQHQASPRILEVKDLDTGAHFGFVMANPEAEELESEAVTAVVFDDEEEENKIIDEAATVEDGIEEELKSVIMAENSDLVESDVIPPPIPIESENIPPIEKPLVTSRFGSPEIDESKSRRWKSSESDEAEEERDVGEYVEDDNGREVNAVD

SEQ ID NO: 11531 - protein, 247 aa, Arabidopsis thaliana
MTTKAVLISSGVATVALLLKLSVPVAVDFSVSRAPILWSSLLSWLKPPYLYVVTNGIIITIVASSKYYRSHHDRDEEDEIVVYGGGGYKVQTGEPIVNQHQASPRILEVKDLDTGAHFGFVMANPEAEELESEAVTAVVFDDEEEENKIIDEAATVEDGIEEELKSVIMAENSDLVESDVIPPPIPIESENIPPIEKPLVTSRFGSPEIDESKSRRWKSSESDEAEEERDVGEYVEDDNGREVNAVD

SEQ ID NO: 11532 - DNA, 1862 bp, Arabidopsis thaliana
gattgccaaatttaaactcgaaatctctctctcactcactcaatgagcgaattcattttgatctccgacggcgaggatgaagctactccaccaccgtcgaagagggctcgaaagaatcgtacacccacggatttgaacttggataccgaaccatcactgcagaagcaaccgccaggatctgcttctactccgtttttcctcgacgagacacctctctctgacgatgtcactgtcctaaagtcttcctttggttccggaaccggagcttcttcaggccgcgagaacaatttttatggtaaacgagttatatctcttgaatcggattctgaagacagtcctggacctgagagttcaaaaaagtatgaacctgtttatactgattcttggaagaaaccttgcagattggaatttggatccagtgatgctaattctgatgatgatcctagttggatgcggagagctagttttcaatcttcgctgtctaaagatgctatcgaggtagattctgaccatgagaaagaagatacaggcgttgagaagatgggtcgaaaaaagcagaccataacttctaaaagtacatctctttctgctgattcattgcctaaaaagaagatgtcaaaagatgaaaaaacccgcgcggcagaggaaaagaagttacaaaaagaacaagaaaaattacagaaagctgcctcgaaagcagaagatgctgagcataaaaagttggagagggaaaagcagaaatgggcaaaggaaaaggataaagcacttaaatgtattgttgcctggattgacaataaagtgcttgaaggatcttttggaggacttctcatttcgggattgaaagagaaaggtattacataccatgtcaccactaatccgattcagagatccattgtgtggacaatgacacttccagaagatattgctcagtcattgcctctagggtccaatattccatatgttttactcttgtatgaggctgaagacttttgtaatcttgttgctaagaaagaacttctagaaaacgtctacagagttcgtgacgaatacccatcttatacaatgtgctacctcaccaataagttactgtcctacgtaaacaaaaaggaaagggttgagtacaaggaccctgtaaatggctgtggttggcgaaagcctcctattgatgaggcaattgcgaagttatcaactcactatattggagtacattcccggcattgtgtagacgaggctgaggtggctgaccatgttgttcggttaacaagtagtctggcccattgccaagtcaggaagaagttaactcggttatcagtatacgctgatggtacattaatgtccaagaatgcagctgataagcacttgattagagagagcatatggttgaaagtgttggtagcaataccaaaggtacagccaagatacgctatagcagtgtcaaagaaatacccatccttgaagtcacttcttaaggtttatatggatcctaacatatcggttcatgagaaggagtttctactgaaagacttgaaagtggaaaatttagtaggaagagacacaagtgtaggtgaggcctgttcgaagcggatatacagagtgcttatgtctttagatggaaccattaagactgatgacgtcgaaaatggtgctgcttccttcacacttcctccatctgacttaatttagaactagagagaacatcaaataggtttttaactttctatgtcaaacaaaacagaagaatgattgtgtctgagatttttttttgtatatgcatgcaaagttcattatgttgtttgaagtctttaatgtgtgtagtcctgactcgttttctaaagagtaaagataatgatatattttctggc

SEQ ID NO: 11533 - protein, 546 aa, Arabidopsis thaliana
MSEFILISDGEDEATPPPSKRARKNRTPTDLNLDTEPSLQKQPPGSASTPFFLDETPLSDDVTVLKSSFGSGTGASSGRENNFYGKRVISLESDSEDSPGPESSKKYEPVYTDSWKKPCRLEFGSSDANSDDDPSWMRRASFQSSLSKDAIEVDSDHEKEDTGVEKMGRKKQTITSKSTSLSADSLPKKKMSKDEKTRAAEEKKLQKEQEKLQKAASKAEDAEHKKLEREKQKWAKEKDKALKCIVAWIDNKVLEGSFGGLLISGLKEKGITYHVTTNPIQRSIVWTMTLPEDIAQSLPLGSNIPYVLLLYEAEDFCNLVAKKELLENVYRVRDEYPSYTMCYLTNKLLSYVNKKERVEYKDPVNGCGWRKPPIDEAIAKLSTHYIGVHSRHCVDEAEVADHVVRLTSSLAHCQVRKKLTRLSVYADGTLMSKNAADKHLIRESIWLKVLVAIPKVQPRYAIAVSKKYPSLKSLLKVYMDPNISVHEKEFLLKDLKVENLVGRDTSVGEACSKRIYRVLMSLDGTIKTDDVENGAASFTLPPSDLI

SEQ ID NO: 11534 - protein, 410 aa, Arabidopsis thaliana
MRRASFQSSLSKDAIEVDSDHEKEDTGVEKMGRKKQTITSKSTSLSADSLPKKKMSKDEKTRAAEEKKLQKEQEKLQKAASKAEDAEHKKLEREKQKWAKEKDKALKCIVAWIDNKVLEGSFGGLLISGLKEKGITYHVTTNPIQRSIVWTMTLPEDIAQSLPLGSNIPYVLLLYEAEDFCNLVAKKELLENVYRVRDEYPSYTMCYLTNKLLSYVNKKERVEYKDPVNGCGWRKPPIDEAIAKLSTHYIGVHSRHCVDEAEVADHVVRLTSSLAHCQVRKKLTRLSVYADGTLMSKNAADKHLIRESIWLKVLVAIPKVQPRYAIAVSKKYPSLKSLLKVYMDPNISVHEKEFLLKDLKVENLVGRDTSVGEACSKRIYRVLMSLDGTIKTDDVENGAASFTLPPSDLI

SEQ ID NO: 11535 - protein, 380 aa, Arabidopsis thaliana
MGRKKQTITSKSTSLSADSLPKKKMSKDEKTRAAEEKKLQKEQEKLQKAASKAEDAEHKKLEREKQKWAKEKDKALKCIVAWIDNKVLEGSFGGLLISGLKEKGITYHVTTNPIQRSIVWTMTLPEDIAQSLPLGSNIPYVLLLYEAEDFCNLVAKKELLENVYRVRDEYPSYTMCYLTNKLLSYVNKKERVEYKDPVNGCGWRKPPIDEAIAKLSTHYIGVHSRHCVDEAEVADHVVRLTSSLAHCQVRKKLTRLSVYADGTLMSKNAADKHLIRESIWLKVLVAIPKVQPRYAIAVSKKYPSLKSLLKVYMDPNISVHEKEFLLKDLKVENLVGRDTSVGEACSKRIYRVLMSLDGTIKTDDVENGAASFTLPPSDLI

SEQ ID NO: 11536 - DNA, 1732 bp, Arabidopsis thaliana
gaatatcttcctttgtcaatctcttgagagtttttgcttcctcgtcttcttcgattcatcaaacagcgtgtgttttttgtttagagttggaagagacgaatcgaattttgaagctttcttttatgtctgacaagatatctccgttttgttgtcaatctggttgcttggaaaacacagtcctacatccagaattaaggactactactagttcctccatcactttagggtctcgcatcttcaaaccggagatccctcctctttctctccacttttttagctaagaagaatggcgctgcagaacattggtgcttccaaccgtaacgatgccttctacaggtacaagatgcctaagatggttaccaaaaccgaaggcaaaggtaatggcattaagaccaacattatcaacaatgttgagattgccaaagccttggctagaccgccttcttatacgaccaagtactttggttgtgagcttggagcgcagtctaagtttgatgagaagactgggacgtcgcttgtgaatggagctcacaacacgtctaagcttgctgggcttttggagaattttattaagaagtttgttcagtgttatggatgtggtaacccggagactgagattattattacgaagacgcagatggtgaatctcaagtgtgctgcttgtgggtttatctctgaggtcgacatgagggataagttgactaatttcattctcaagaacccacctgagcagaagaaggtgtcaaaggataagaaagcaatgaggaaagctgagaaggagaggcttaaagaaggcgagctagctgatgaggagcagagaaagctgaaagctaagaagaaagcattgtctaacggcaaggattctaagacgtctaagaaccattcttctgatgaggatataagcccgaagcatgatgagaatgctctagaggtggatgaggatgaagatgatgatgatggtgtcgagtggcaaactgatacttcccgagaagctgctgagaaaagaatgatggaacagttgagtgctaaaactgccgaaatggtgatgctctctgcaatggaagtagaagagaaaaaggcgcccaaaagcaaatctaacgggaacgttgtgaaaactgagaatcctcctccgcaagagaagaatctcgtgcaggatatgaaagagtatctgaagaaagggtcaccaataagcgcgctcaaaagtttcatctcgtctctctctgaacctcctcaagacatcatggacgcactcttcaatgctctctttgatggtgtgggaaagggattcgccaaagaagtgactaagaagaagaattacttagcggctgctgcaacaatgcaagaggatggatcacagatgcatctgctcaattcgattgggacattctgtggaaagaatggaaacgaagaagctttgaaagaggtggctctggttcttaaagcattgtacgaccaagacatcattgaggaagaggtagtgttggattggtacgaaaagggtctcaccggagctgacaaaagctcgccggtttggaagaatgttaagccttttgtggagtggcttcagagcgctgagtctgagtccgaagaggaggattgagtcacttttttcttccctcctaacttttctttgcggcatttcttataatacttcgtcagttttcagaattcttaaatctttttgctgtgttcttataaagaaacatcatctattaaagttgtcttcgtttgg

SEQ ID NO: 11537 - protein, 437 aa, Arabidopsis thaliana
MALQNIGASNRNDAFYRYKMPKMVTKTEGKGNGIKTNIINNVEIAKALARPPSYTTKYFGCELGAQSKFDEKTGTSLVNGAHNTSKLAGLLENFIKKFVQCYGCGNPETEIIITKTQMVNLKCAACGFISEVDMRDKLTNFILKNPPEQKKVSKDKKAMRKAEKERLKEGELADEEQRKLKAKKKALSNGKDSKTSKNHSSDEDISPKHDENALEVDEDEDDDDGVEWQTDTSREAAEKRMMEQLSAKTAEMVMLSAMEVEEKKAPKSKSNGNVVKTENPPPQEKNLVQDMKEYLKKGSPISALKSFISSLSEPPQDIMDALFNALFDGVGKGFAKEVTKKKNYLAAAATMQEDGSQMHLLNSIGTFCGKNGNEEALKEVALVLKALYDQDIIEEEVVLDWYEKGLTGADKSSPVWKNVKPFVEWLQSAESESEEED

SEQ ID NO: 11538 - protein, 418 aa, Arabidopsis thaliana
MPKMVTKTEGKGNGIKTNIINNVEIAKALARPPSYTTKYFGCELGAQSKFDEKTGTSLVNGAHNTSKLAGLLENFIKKFVQCYGCGNPETEIIITKTQMVNLKCAACGFISEVDMRDKLTNFILKNPPEQKKVSKDKKAMRKAEKERLKEGELADEEQRKLKAKKKALSNGKDSKTSKNHSSDEDISPKHDENALEVDEDEDDDDGVEWQTDTSREAAEKRMMEQLSAKTAEMVMLSAMEVEEKKAPKSKSNGNVVKTENPPPQEKNLVQDMKEYLKKGSPISALKSFISSLSEPPQDIMDALFNALFDGVGKGFAKEVTKKKNYLAAAATMQEDGSQMHLLNSIGTFCGKNGNEEALKEVALVLKALYDQDIIEEEVVLDWYEKGLTGADKSSPVWKNVKPFVEWLQSAESESEEED

SEQ ID NO: 11539 - protein, 415 aa, Arabidopsis thaliana
MVTKTEGKGNGIKTNIINNVEIAKALARPPSYTTKYFGCELGAQSKFDEKTGTSLVNGAHNTSKLAGLLENFIKKFVQCYGCGNPETEIIITKTQMVNLKCAACGFISEVDMRDKLTNFILKNPPEQKKVSKDKKAMRKAEKERLKEGELADEEQRKLKAKKKALSNGKDSKTSKNHSSDEDISPKHDENALEVDEDEDDDDGVEWQTDTSREAAEKRMMEQLSAKTAEMVMLSAMEVEEKKAPKSKSNGNVVKTENPPPQEKNLVQDMKEYLKKGSPISALKSFISSLSEPPQDIMDALFNALFDGVGKGFAKEVTKKKNYLAAAATMQEDGSQMHLLNSIGTFCGKNGNEEALKEVALVLKALYDQDIIEEEVVLDWYEKGLTGADKSSPVWKNVKPFVEWLQSAESESEEED

SEQ ID NO: 11540 - DNA, 2415 bp, Arabidopsis thaliana
gatcggcggtctcaccacatttggttgattcaaaagtctccaaaccctttggaatcttcaagttgttcttcatcaattccacaaacccagaaacaatctttcttccacagagataacccactaatcaatttctctccttttccaattcactcagtgcagctaactttctgtacctaaggatttgactggtcgctgcttcaagctttgattcgtctgtgtacagcatttgccaggagagccattagcatcactatggttgaataaatctgattgtgtgggtttaggcagtgagagctgtttagttgaattcagtttttaaaggtgatggctagtaatgtatttgatcatccacttcaagaattagagggtgaagataatggtgtaaagagcgagaaagcgagtttattggaaacatctggttctgtagatactactcctgaggattctggtcatcgttcttctgatgggcataggggactagaccactgtgaaactgcacctgttggtctctatggagatatgcttatcaatgacagtgagattcagtactctcggtccttgacagagaaagggtctcctgcgattcataatcttaaattagatagattatcggagcaagaaaagcaaaaactcattgttgagctagtcagaatacaaaatgacgggacagtggaagttatagataacggtactccggtgtcggagttatgggagtttgagccaacgaaagggcagtccacaatcacatatgaaaagtccttaactgagtcctttagatccattccaaggttaaaaattgctatacttgtggttggaactcgaggcgatgtgcagccttttctggccatggcaaagcgcctccaggagtttggtcatcgtgttaggttggcaactcatgcaaatttccgctcttttgtacgggctgctggagtagagttttatcccttgggcggtgatccccgagagttagctgcctatatggctagaaataaaggtctcattccctctgggccttcagaaatatcaaaacagagaaaacagttgaaggcaattatagagtctcttcttccggcatgcatagagcctgatttggaaactgctacgtctttcagagctcaagcgataattgcaaatcctcctgcatatggacatgtgcatgttgctgaagctcttggagtaccaattcatatttttttcacaatgccttggacgccaaccaatgaatttccccacccgttggcgcgtgttcctcaaagtgctgcatattggctgtcatatatagttgttgatctgatggtatggtggagcataaggacatatataaatgattttaggaagagaaagctaaaccttgcacctatcgcatattttagcacataccatggctcaatttcgcacttgcctactggttacatgtggagtccccatgttgtgccaaaaccaagtgattggggtcctttagttgatgttgttggctactgtttcctgaaccttggatcgaagtaccagcctcgcgaagagtttctccactggatagaaagaggatcaccgcccgtatatattggttttggaagcatgcctcttgatgatccaaaacaaacaatggacattatactggaaacattgaaagatacagaacagagagggatagttgatcgaggttggggtggccttggaaaccttgctactgaagttcctgaaaatgtattcttagtggaggactgtcctcacgattggttgtttcctcaatgttcagctgtggttcatcatggcggtgctggaaccacagcgactggactaaaagctgggtgtccaacaacgatcgtgccattctttggggatcagttcttctggggtgacaggatctatgagaaaggacttgggcctgcgccaataccgatagctcagctcagtgttgagaacctcagtagctccataagattcatgctacaaccagaggtgaaatcacaagtgatggagctagcgaaagtactggagaacgaggatggtgtagctgcagcagttgatgcattccacaggcatttgccaccagagctgccactgcccgagtcctcgtccgagaaaaaagatgaagatgatcgaccagacctgttacagtggttctttattcagattggcaagaagtgttgtcttccatgtggtggcgtgtgatatcaaagttccttagtcgtgtgtttaagttgcataatctatgtctctgcaactcaattcatttcattcaatggtcaggaatataattagatttcttttgcacagttgcataaaatggatgtaataaaattattgttatgggtttgttcatctttataagtttgtggtccaatgagaatgactttgaaggatgatcaataaaattcaaaactatatttattcaagagcttgttacaaagctag

SEQ ID NO: 11541 - protein, 615 aa, Arabidopsis thaliana
MASNVFDHPLQELEGEDNGVKSEKASLLETSGSVDTTPEDSGHRSSDGHRGLDHCETAPVGLYGDMLINDSEIQYSRSLTEKGSPAIHNLKLDRLSEQEKQKLIVELVRIQNDGTVEVIDNGTPVSELWEFEPTKGQSTITYEKSLTESFRSIPRLKIAILVVGTRGDVQPFLAMAKRLQEFGHRVRLATHANFRSFVRAAGVEFYPLGGDPRELAAYMARNKGLIPSGPSEISKQRKQLKAIIESLLPACIEPDLETATSFRAQAIIANPPAYGHVHVAEALGVPIHIFFTMPWTPTNEFPHPLARVPQSAAYWLSYIVVDLMVWWSIRTYINDFRKRKLNLAPIAYFSTYHGSISHLPTGYMWSPHVVPKPSDWGPLVDVVGYCFLNLGSKYQPREEFLHWIERGSPPVYIGFGSMPLDDPKQTMDIILETLKDTEQRGIVDRGWGGLGNLATEVPENVFLVEDCPHDWLFPQCSAVVHHGGAGTTATGLKAGCPTTIVPFFGDQFFWGDRIYEKGLGPAPIPIAQLSVENLSSSIRFMLQPEVKSQVMELAKVLENEDGVAAAVDAFHRHLPPELPLPESSSEKKDEDDRPDLLQWFFIQIGKKCCLPCGGV

SEQ ID NO: 11542 - protein, 550 aa, Arabidopsis thaliana
MLINDSEIQYSRSLTEKGSPAIHNLKLDRLSEQEKQKLIVELVRIQNDGTVEVIDNGTPVSELWEFEPTKGQSTITYEKSLTESFRSIPRLKIAILVVGTRGDVQPFLAMAKRLQEFGHRVRLATHANFRSFVRAAGVEFYPLGGDPRELAAYMARNKGLIPSGPSEISKQRKQLKAIIESLLPACIEPDLETATSFRAQAIIANPPAYGHVHVAEALGVPIHIFFTMPWTPTNEFPHPLARVPQSAAYWLSYIVVDLMVWWSIRTYINDFRKRKLNLAPIAYFSTYHGSISHLPTGYMWSPHVVPKPSDWGPLVDVVGYCFLNLGSKYQPREEFLHWIERGSPPVYIGFGSMPLDDPKQTMDIILETLKDTEQRGIVDRGWGGLGNLATEVPENVFLVEDCPHDWLFPQCSAVVHHGGAGTTATGLKAGCPTTIVPFFGDQFFWGDRIYEKGLGPAPIPIAQLSVENLSSSIRFMLQPEVKSQVMELAKVLENEDGVAAAVDAFHRHLPPELPLPESSSEKKDEDDRPDLLQWFFIQIGKKCCLPCGGV

SEQ ID NO: 11543 - protein, 441 aa, Arabidopsis thaliana
MAKRLQEFGHRVRLATHANFRSFVRAAGVEFYPLGGDPRELAAYMARNKGLIPSGPSEISKQRKQLKAIIESLLPACIEPDLETATSFRAQAIIANPPAYGHVHVAEALGVPIHIFFTMPWTPTNEFPHPLARVPQSAAYWLSYIVVDLMVWWSIRTYINDFRKRKLNLAPIAYFSTYHGSISHLPTGYMWSPHVVPKPSDWGPLVDVVGYCFLNLGSKYQPREEFLHWIERGSPPVYIGFGSMPLDDPKQTMDIILETLKDTEQRGIVDRGWGGLGNLATEVPENVFLVEDCPHDWLFPQCSAVVHHGGAGTTATGLKAGCPTTIVPFFGDQFFWGDRIYEKGLGPAPIPIAQLSVENLSSSIRFMLQPEVKSQVMELAKVLENEDGVAAAVDAFHRHLPPELPLPESSSEKKDEDDRPDLLQWFFIQIGKKCCLPCGGV

SEQ ID NO: 11544 - DNA, 1316 bp, Arabidopsis thaliana
gagaaaaaacagaggaagaagcgagagagagagaggaataacagattaggagggaggcggctcggacgatgaagctgtggaaacgagctgccgccgcaatcaaagaccggaaaagcttactagccgttggtttctcacggcgaaacagctcttaccggaacgcagatctcgaagcagctatcatcaaagccacctcccacgacgattcctccgtcgactattccaacgctcaccgtgtctacaaatggatccgttcttctcctcttaatctcaagactctcgtctacgcaatctcttctcgcgttaaccacacgcgtagctggatcgttgctcttaaatccttaatgcttcttcatggtgttctctgttgtaaagtaccttccgttgtcggagagtttcgtcgtcttcctttcgatctttcagatttctccgatggtcattcttgtcttagcaagacttggggattcgacgtctttgttcgaacttacttcgcttttcttcatcattactcttccttcttgtccgatcagattcatcgtctccgtggtaacaacagaagatcgttggagaagacatctgattctgttatccaagagcttgaacggattcagaaactccagtctctcctagatatgattcttcagattcgacctgttgctgacaacatgaagaagactttgatcttagaagctatggattgtctcgtcatcgaaagtatcaacatctacggtagaatttgcggcgcggttatgaaagtccttccgttggctggaaaaacagatgctgcaacggttttgaaaatcgtcaacaagaccacatctcagggagaagatctcatcgtctatttcgaattctgcaaaggtttcggtgtctcaaacgcgcgggaaatccctcaattcgttaggatacctgaggaggaagttgaagcaatcgagaaaatgatcgataccgtccaagagaagccgaagccagagaaagacgaagaaaaagaggatgtgaaagctatggtggtgttggagcagccgaagaagctgcagacgatcatcacggacaaatgggagattttcgaagacgattatcggtgtttcgatagaaaagacaaatgggagattttcgaaaacgaatatcatcaaaatcatctgcctcttataacaatgaaccaaccagtttacatcacttatacaatgccagatttgattacattctagtggtcattacaacaatctggataaggttaatttttgtttggttctgtacataaacacttttttacctgttgtatctgagtaaattcaaaaagaggtacattttgagat

SEQ ID NO: 11545 - protein, 379 aa, Arabidopsis thaliana
MKLWKRAAAAIKDRKSLLAVGFSRRNSSYRNADLEAAIIKATSHDDSSVDYSNAHRVYKWIRSSPLNLKTLVYAISSRVNHTRSWIVALKSLMLLHGVLCCKVPSVVGEFRRLPFDLSDFSDGHSCLSKTWGFDVFVRTYFAFLHHYSSFLSDQIHRLRGNNRRSLEKTSDSVIQELERIQKLQSLLDMILQIRPVADNMKKTLILEAMDCLVIESINIYGRICGAVMKVLPLAGKTDAATVLKIVNKTTSQGEDLIVYFEFCKGFGVSNAREIPQFVRIPEEEVEAIEKMIDTVQEKPKPEKDEEKEDVKAMVVLEQPKKLQTIITDKWEIFEDDYRCFDRKDKWEIFENEYHQNHLPLITMNQPVYITYTMPDLITF

SEQ ID NO: 11546 - protein, 287 aa, Arabidopsis thaliana
MLLHGVLCCKVPSVVGEFRRLPFDLSDFSDGHSCLSKTWGFDVFVRTYFAFLHHYSSFLSDQIHRLRGNNRRSLEKTSDSVIQELERIQKLQSLLDMILQIRPVADNMKKTLILEAMDCLVIESINIYGRICGAVMKVLPLAGKTDAATVLKIVNKTTSQGEDLIVYFEFCKGFGVSNAREIPQFVRIPEEEVEAIEKMIDTVQEKPKPEKDEEKEDVKAMVVLEQPKKLQTIITDKWEIFEDDYRCFDRKDKWEIFENEYHQNHLPLITMNQPVYITYTMPDLITF

SEQ ID NO: 11547 - protein, 191 aa, Arabidopsis thaliana
MILQIRPVADNMKKTLILEAMDCLVIESINIYGRICGAVMKVLPLAGKTDAATVLKIVNKTTSQGEDLIVYFEFCKGFGVSNAREIPQFVRIPEEEVEAIEKMIDTVQEKPKPEKDEEKEDVKAMVVLEQPKKLQTIITDKWEIFEDDYRCFDRKDKWEIFENEYHQNHLPLITMNQPVYITYTMPDLITF

SEQ ID NO: 11548 - DNA, 1379 bp, Arabidopsis thaliana
gacggcaaaggatctctctctttcccagcatcaccatctcttgtaccagtttctgattagattcaacaatgaacggcgcattaggtaactcctccgtctccgttagcggcggagaaggagccggaggaccagcgcctttcttggtgaaaacctacgagatggtcgacgattcatcaacggaccagatcgtatcgtggagcgctaacaacaacagcttcatcgtttggaatcatgccgaattttcacgcctccttcttccaacctacttcaaacacaataacttctcttccttcattcgtcagctcaatacctatgggtttaggaagattgatcccgagaggtgggagtttttgaatgatgattttattaaggatcagaagcatcttctcaagaatatacatagaaggaaaccaatacacagccatagtcatccacctgctttgtcgactgatcaagaaagagcagtgttgcaagagcagatggacaagctttcacgtgagaaagctgcaattgaagctaagcttttaaagttaaaacaacagaaggttgtagcaaagcatcagtttgaagaaatgactgagcatgttgatgatatggagaataggcagaagaagctgctgaatttcttggaaactgcgattcggaatcctacttttgttaagaattttggtcgtaaagtcgagcagttggatatttcagcttacaacaaaaagcgaaggctccctgtagttgagcaatcaaagccaccttcagaagattctcatctggataatagtagtggtagctcgagacgcgagtctggaaacattttccatcaaagtttctctaataaattgcgattagagctttctcctgctgtttcagatatgaacatggtttcacacagtatacaaagttccaatgaagaaggtgcgagtcccaaagggatactgtcaggaggtgatccaaatactacactaacaagaagagaaggcctagcatttgcacctgaagctctagagcttgcggataccggaacatgcccgaggagattactgttaaatgacaatacaagggtggagaccttgcagcagaggctaacttcttcagaggagactgatggtagtttttcatgtcatttaaatctaaccctggcttctgctccgttaccggacaaaacagcttcacagatagctaagacgactcttaaaagtcaggagttaaactttaactcaatagagacaagtgcaagtgagaaaaatcggggtagacaagaggtggcagttggaggtagccaagcaaatgcagctcctccagcaagagtgaatgatgtattctgggaacagttcctaacagaaaggccagggtcttcagataatgaggaggcatagagaactagt

SEQ ID NO: 11549 - protein, 433 aa, Arabidopsis thaliana
MNGALGNSSVSVSGGEGAGGPAPFLVKTYEMVDDSSTDQIVSWSANNNSFIVWNHAEFSRLLLPTYFKHNNFSSFIRQLNTYGFRKIDPERWEFLNDDFIKDQKHLLKNIHRRKPIHSHSHPPALSTDQERAVLQEQMDKLSREKAAIEAKLLKLKQQKVVAKHQFEEMTEHVDDMENRQKKLLNFLETAIRNPTFVKNFGRKVEQLDISAYNKKRRLPVVEQSKPPSEDSHLDNSSGSSRRESGNIFHQSFSNKLRLELSPAVSDMNMVSHSIQSSNEEGASPKGILSGGDPNTTLTRREGLAFAPEALELADTGTCPRRLLLNDNTRVETLQQRLTSSEETDGSFSCHLNLTLASAPLPDKTASQIAKTTLKSQELNFNSIETSASEKNRGRQEVAVGGSQANAAPPARVNDVFWEQFLTERPGSSDNEEA

SEQ ID NO: 11550 - protein, 403 aa, Arabidopsis thaliana
MVDDSSTDQIVSWSANNNSFIVWNHAEFSRLLLPTYFKHNNFSSFIRQLNTYGFRKIDPERWEFLNDDFIKDQKHLLKNIHRRKPIHSHSHPPALSTDQERAVLQEQMDKLSREKAAIEAKLLKLKQQKVVAKHQFEEMTEHVDDMENRQKKLLNFLETAIRNPTFVKNFGRKVEQLDISAYNKKRRLPVVEQSKPPSEDSHLDNSSGSSRRESGNIFHQSFSNKLRLELSPAVSDMNMVSHSIQSSNEEGASPKGILSGGDPNTTLTRREGLAFAPEALELADTGTCPRRLLLNDNTRVETLQQRLTSSEETDGSFSCHLNLTLASAPLPDKTASQIAKTTLKSQELNFNSIETSASEKNRGRQEVAVGGSQANAAPPARVNDVFWEQFLTERPGSSDNEEA

SEQ ID NO: 11551 - protein, 296 aa, Arabidopsis thaliana
MDKLSREKAAIEAKLLKLKQQKVVAKHQFEEMTEHVDDMENRQKKLLNFLETAIRNPTFVKNFGRKVEQLDISAYNKKRRLPVVEQSKPPSEDSHLDNSSGSSRRESGNIFHQSFSNKLRLELSPAVSDMNMVSHSIQSSNEEGASPKGILSGGDPNTTLTRREGLAFAPEALELADTGTCPRRLLLNDNTRVETLQQRLTSSEETDGSFSCHLNLTLASAPLPDKTASQIAKTTLKSQELNFNSIETSASEKNRGRQEVAVGGSQANAAPPARVNDVFWEQFLTERPGSSDNEEA

SEQ ID NO: 11552 - DNA, 1239 bp, Arabidopsis thaliana
aagcaaaacaatcggagaaagttgatggaggagatgttcgttttgtgaacgcttcaatggcataaatttccggccatcacatttcttctactttctctttctctctcccttgttgttgttctctagaattcgattcatcgttgttaacgtcgtccattcttcttctttgatcccttctttgatctctcacatttccgattccaatttagggtttcctctcttttcacatttctagggtttttcttgttccctttgtaccggagatggtgaattgaaaggaaaaataaaacgcttttgagagcttatatttgaggttgtttcctcaagttttgtagatctgaggttgctatttttgaattagagattctttttttttttcaaaattttgtttgttgtgatcatacatagacgtacgtagctccatttctggtggagaaggaagaagaagagaaatgagcgcttcgaggttcataaagtgtgtcaccgttggcgacggagctgttggtaaaacctgtttgctgatttcttacaccagcaacacttttcctacggattatgtaccgactgttttcgataactttagcgcaaatgtggttgttaatggagccactgtgaatcttgggctatgggataccgcagggcaggaggattataacagattaagacctttgagttaccgcggtgctgatgttttcatcttagcattctctcttatcagtaaggctagttatgagaatgtctccaagaagtggatcccagagctgaagcattatgcccctggtgtccctatagttcttgttggaaccaaactagatcttcgggatgacaaacagttcttcattgaccaccctggcgctgtaccaattactactgctcagggagaggaactgaagaaactaattggagctcccgcatacatcgagtgcagttcaaaaacacaagagaacgtgaaaggagtatttgatgcagcgatccgagtggttcttcaacctccaaagcagaagaaaaagaaaagcaaagcacaaaaagcctgctccattttgtaatttctctacgcttctcttacgtatctctctctgtctctctgtctcttccactcttctagtgaaggcttaagaagaaaacacattgggcttaaaaattgttccagagttcgttgtgataagctctcttaatccttaaaaaaacgattatttctgtttattgatgaatagtttccagctttagctgagacctaac

SEQ ID NO: 11553 - protein, 197 aa, Arabidopsis thaliana; identical to SEQ ID NO: 10398

SEQ ID NO: 11554 - DNA, 1554 bp, Arabidopsis thaliana
ggccacccagaaaaaaccctcaagtcttcttcttcttcctcaatctctccacctcttttcaaaccttcttcacactctctctcaatcaatcctttttcttctcaaatctttcagttttgatctctaaatttccagaaaatgagcaacgataaggacagtttcaatgtcagcgatctcacttctgctcttaaagatgaggatcgagctggtcttgtcaacgctcttaagaacaagctccagaatctagctggacaacattctgatgtgctcgagaatctgactcctaaaattagaaggcgtgttgaggttttgcgggagattcagggcaaacatgatgaaatagagacaaaattccgcgaggagagagctgctcttgaagccaagtatcaaaagttatatcagcctttgtataacaagcgttatgagattgtgaatggagctactgaagttgaaggggctccagaggatgctaagatggaccaaggagacgagaaaactgcagaagagaaaggagtccctagtttctggctgactgctctgaaaaataatgatgttatatctgaagagatcacagagcgtgatgaaggagcccttatatatcttaaagatatcaagtggtgcaagattgaagaaccaaagggattcaaacttgagtttttcttcgaccagaatccttacttcaaaaacaccctattaacaaaggcgtatcatatgattgatgaagatgagcctctgcttgagaaggctattgggacagagattgattggtatcctggaaaatgcttaactcagaagattcttaagaagaagcctaagaaaggtgcaaagaatgccaagccaattaccaaaactgaagattgtgaaagcttcttcaacttcttcaatcctccccaagttcctgatgatgatgaagacattgacgaagaaagagccgaggaacttcagaatctgatggaacaagattatgacattggttctacaatccgggagaagatcatacctcatgctgtctcatggtttactggtgaggctattgagggagaggagtttgaaatagacaatgatgatgaagatgatatcgatgaggatgaagatgaggatgaagaagatgaagacgaagatgaggaagaagacgacgaagatgaggaggaagaagtaagcaagaccaaaaagaagccatcagtcttacacaagaaaagagggagacctcaggttaccgatgatcaacaaggagagaggcctcctgaatgcaaacaacagtaaacaaaatcgaaaagtctaaacgaaaaccagtaaaaaaaaaacaaatgttttgggttttgagtgaagttccatggcctagttttttgcttccatgtaaggcaaaatgttttgaagactgctcataggaatgttgctgtaggcaaaagcgtgagtttctccatgtggagatacttgataaattatttttggtgcatttgttttttttttctttaatcactaagttgaattttggtgtgttcgtcaaaattatatccttttaccacttgaattaaagtctcttttggtttcttt

SEQ ID NO: 11555 - protein, 374 aa, Arabidopsis thaliana
MSNDKDSFNVSDLTSALKDEDRAGLVNALKNKLQNLAGQHSDVLENLTPKIRRRVEVLREIQGKHDEIETKFREERAALEAKYQKLYQPLYNKRYEIVNGATEVEGAPEDAKMDQGDEKTAEEKGVPSFWLTALKNNDVISEEITERDEGALIYLKDIKWCKIEEPKGFKLEFFFDQNPYFKNTLLTKAYHMIDEDEPLLEKAIGTEIDWYPGKCLTQKILKKKPKKGAKNAKPITKTEDCESFFNFFNPPQVPDDDEDIDEERAEELQNLMEQDYDIGSTIREKIIPHAVSWFTGEAIEGEEFEIDNDDEDDIDEDEDEDEEDEDEDEEEDDEDEEEEVSKTKKKPSVLHKKRGRPQVTDDQQGERPPECKQQ

SEQ ID NO: 11556 - protein, 262 aa, Arabidopsis thaliana
MDQGDEKTAEEKGVPSFWLTALKNNDVISEEITERDEGALIYLKDIKWCKIEEPKGFKLEFFFDQNPYFKNTLLTKAYHMIDEDEPLLEKAIGTEIDWYPGKCLTQKILKKKPKKGAKNAKPITKTEDCESFFNFFNPPQVPDDDEDIDEERAEELQNLMEQDYDIGSTIREKIIPHAVSWFTGEAIEGEEFEIDNDDEDDIDEDEDEDEEDEDEDEEEDDEDEEEEVSKTKKKPSVLHKKRGRPQVTDDQQGERPPECKQQ

SEQ ID NO: 11557 - DNA, 1582 bp, Arabidopsis thaliana
ggtgcacatatttttataagatatcttcacatacacaaaaacatttagtgtacagtgcacaagtgatcgaatatttgattctttttcatgatcagagatctgatctaaatggagtatgaccgtacgttgaacttgattccatacggactacaaggagtaagagaggaggaagaaatcgaagaagacgatgaagagagcatgacgttgtcgtcagtaccagaaaacgaaacgtcggagtgttcttcgcctccggcgacgtatcctccaatccctcctcggcctaaaacaccgagagagccgatggagtttctatgcagatcatggagtctttctacttctgagatctctttagctttatcatctcagaaatctgataaacaactcaacaaaaaccctaatatttctcagttggccgatgtcacttctctggctccggtagcaccaccaccgccgctacaaacgggaaagctagcgagtgcggttcacgcgcggagaacgggaacgatcggaaaatggttccaccaccgagaattcgtcggcgggaaggtctccgccgtgaagaagagagatagagttcgcgtggagaaagctcatctgcattccgccgtgtccattgcgtctctggcgacggcaatcgccgcagtgaccgcttcaggcaatcaagacggcttcgctggatcaaagatgagctcagcccttgcctcggcgtcggagttgttagcttctcactgcctcgaattggcggagcttgccggcgccgatcacaatcgcgtcgtctctgctgtccgatcagctgttgatgttcgtggacctggcgatttgttgactctaactgctgcagctgcaacagcattgagaggagaagcagctttgagggttagactaccaaaggaagctaagaacagtgcagctataagcccctgtgagagagttttaccagagactcatagttgctcttctgagctcgatcgcactagcacgaccgatgaactcatatctgcaaaaggagttgaagaatcaactggagagctaatgcagtgcacacgaaacggtgttctgcggtggaagcatgtaaaagtgtacatcaacaaaaaatctcaggtcatagtagaaatcaaaagcaaacacgttgtaggagcattctccatgaaaagcaaaggcattgtaaatgatgtatgcgagacagtctcaggcctgcaaaatggaaaagacacggaaaacacagaagaagagctctatttcggaatcagtacagggaaaggtctgacaaagttcaagtgcaagagcaaggctgataagcagacatgggtggatagcatccggaatcttctccatcgagtaactgctgttgaggtcgacacttctcttgaaactataaacattaacgatagcacataaatcatgatgtcttgtgttaacggtgttagtgttggttattttcattacaagccaatgatatgtattgtttcaagaacatatacatatctgcaagtaggtgtagtgtttttcatcttcgtcacttgtttttatttcagtcaaattgtaaacattgttttgtggaaataatgaagaagattttttt

SEQ ID NO: 11558 - protein, 429 aa, Arabidopsis thaliana
MEYDRTLNLIPYGLQGVREEEEIEEDDEESMTLSSVPENETSECSSPPATYPPIPPRPKTPREPMEFLCRSWSLSTSEISLALSSQKSDKQLNKNPNISQLADVTSLAPVAPPPPLQTGKLASAVHARRTGTIGKWFHHREFVGGKVSAVKKRDRVRVEKAHLHSAVSIASLATAIAAVTASGNQDGFAGSKMSSALASASELLASHCLELAELAGADHNRVVSAVRSAVDVRGPGDLLTLTAAAATALRGEAALRVRLPKEAKNSAAISPCERVLPETHSCSSELDRTSTTDELISAKGVEESTGELMQCTRNGVLRWKHVKVYINKKSQVIVEIKSKHVVGAFSMKSKGIVNDVCETVSGLQNGKDTENTEEELYFGISTGKGLTKFKCKSKADKQTWVDSIRNLLHRVTAVEVDTSLETININDST

SEQ ID NO: 11559 - protein, 399 aa, Arabidopsis thaliana
MTLSSVPENETSECSSPPATYPPIPPRPKTPREPMEFLCRSWSLSTSEISLALSSQKSDKQLNKNPNISQLADVTSLAPVAPPPPLQTGKLASAVHARRTGTIGKWFHHREFVGGKVSAVKKRDRVRVEKAHLHSAVSIASLATAIAAVTASGNQDGFAGSKMSSALASASELLASHCLELAELAGADHNRVVSAVRSAVDVRGPGDLLTLTAAAATALRGEAALRVRLPKEAKNSAAISPCERVLPETHSCSSELDRTSTTDELISAKGVEESTGELMQCTRNGVLRWKHVKVYINKKSQVIVEIKSKHVVGAFSMKSKGIVNDVCETVSGLQNGKDTENTEEELYFGISTGKGLTKFKCKSKADKQTWVDSIRNLLHRVTAVEVDTSLETININDST

SEQ ID NO: 11560 - protein, 365 aa, Arabidopsis thaliana
MEFLCRSWSLSTSEISLALSSQKSDKQLNKNPNISQLADVTSLAPVAPPPPLQTGKLASAVHARRTGTIGKWFHHREFVGGKVSAVKKRDRVRVEKAHLHSAVSIASLATAIAAVTASGNQDGFAGSKMSSALASASELLASHCLELAELAGADHNRVVSAVRSAVDVRGPGDLLTLTAAAATALRGEAALRVRLPKEAKNSAAISPCERVLPETHSCSSELDRTSTTDELISAKGVEESTGELMQCTRNGVLRWKHVKVYINKKSQVIVEIKSKHVVGAFSMKSKGIVNDVCETVSGLQNGKDTENTEEELYFGISTGKGLTKFKCKSKADKQTWVDSIRNLLHRVTAVEVDTSLETININDST

SEQ ID NO: 11561 - DNA, 1727 bp, Arabidopsis thaliana
aatcaatagatcatcactcttcactttactctctctctcttactcataatggcctcattctctcttccccactccgccacctactttccttcccactctgaaacctcacttaaacctcactccgccgcttcattcaccgtccgttgcacctccgcctctcccgccgttcctccacaaactccacagaaaccccgtcgttcacccgatgagaacattcgagacgaagctcgtcgccgtcctcatcaactccaaaacctctccgcacgttacgtccctttcaacgctccaccttcttcaacagaatcctactccctcgacgagatcgtctaccgttcacaatccggtgctctcctcgacgtccagcatgatttcgccgccttgaaacgctacgacggagaattctggcgtaaccttttcgattctcgcgtcggtaaaacaaattggccgtacggatcaggcgtgtggtcgaagaaagagtgggtactccccgagatcgacgatgacgacatcgtctctgcttttgaaggaaactcaaatctcttctgggctgagagatttggtaaacagtatctgcaaatgaacgatctttggataaaacattgtggaatcagccacactggctcctttaaagatctgggcatgagtgttctcgtttctcaggtgaatcgtctccggaaaatgaacaaaccagtcatcggagttggttgcgcttctactggagatacctccgctgctctctctgcttactgtgcttccgctggaatcccctcgattgtcttcttacctgcggataaaatctccatggctcagcttgtgcagccgattgcaaacggagcgtttgtgcttagtattgacactgattttgacggatgtatgcatttgatcagagaagttacggcggagcttcctatttacttggcgaactctctcaacagcctccgtctcgaaggtcaaaagacggcggcgattgagattctgcagcagtttaattggcaagttcctgattgggtcattgttcctggaggcaatcttggtaacatctatgcgttttacaaagggtttcatatgtgtaaagagttaggtcttgttgatcgtatccctaggcttgtttgtgctcaagctgctaatgcaaatccactttacttgcattacaaatctgggtttaaagaagatttcaatccattgaaagcaaacactacatttgcttctgctattcagattggtgaccctgtttcgattgatagagctgtgtatgcgttgaagaaatctaatgggattgttgaggaagctacagaggaagagttgatggatgcaacagctcttgctgattctactggtatgtttatatgtccacatactggtgttgcattgacggcgttgatgaagctgagaaagtcaggagttattggagcgaatgatcggactgtggtggtgagtacagctcatggattgaagtttacacagagtaagattgattatcattctaagaacataaaggagatggcttgtagattggcgaatccaccagtgaaggttaaggcaaagtttggttcagttatggatgttctcaaggagtatttgaagagcaatgataaataagctttgtgtgtttgtttcttctaaagctcttcacgtcctatgatgatattgttggctttgttattagaggaagtaatgaaatttcgtttctttggacttgtggaataaaacgactggttggttcaaag

SEQ ID NO: 11562 - protein, 516 aa, Arabidopsis thaliana
MASFSLPHSATYFPSHSETSLKPHSAASFTVRCTSASPAVPPQTPQKPRRSPDENIRDEARRRPHQLQNLSARYVPFNAPPSSTESYSLDEIVYRSQSGALLDVQHDFAALKRYDGEFWRNLFDSRVGKTNWPYGSGVWSKKEWVLPEIDDDDIVSAFEGNSNLFWAERFGKQYLQMNDLWIKHCGISHTGSFKDLGMSVLVSQVNRLRKMNKPVIGVGCASTGDTSAALSAYCASAGIPSIVFLPADKISMAQLVQPIANGAFVLSIDTDFDGCMHLIREVTAELPIYLANSLNSLRLEGQKTAAIEILQQFNWQVPDWVIVPGGNLGNIYAFYKGFHMCKELGLVDRIPRLVCAQAANANPLYLHYKSGFKEDFNPLKANTTFASAIQIGDPVSIDRAVYALKKSNGIVEEATEEELMDATALADSTGMFICPHTGVALTALMKLRKSGVIGANDRTVVVSTAHGLKFTQSKIDYHSKNIKEMACRLANPPVKVKAKFGSVMDVLKEYLKSNDK

SEQ ID NO: 11563 - protein, 340 aa, Arabidopsis thaliana
MNDLWIKHCGISHTGSFKDLGMSVLVSQVNRLRKMNKPVIGVGCASTGDTSAALSAYCASAGIPSIVFLPADKISMAQLVQPIANGAFVLSIDTDFDGCMHLIREVTAELPIYLANSLNSLRLEGQKTAAIEILQQFNWQVPDWVIVPGGNLGNIYAFYKGFHMCKELGLVDRIPRLVCAQAANANPLYLHYKSGFKEDFNPLKANTTFASAIQIGDPVSIDRAVYALKKSNGIVEEATEEELMDATALADSTGMFICPHTGVALTALMKLRKSGVIGANDRTVVVSTAHGLKFTQSKIDYHSKNIKEMACRLANPPVKVKAKFGSVMDVLKEYLKSNDK

SEQ ID NO: 11564 - protein, 319 aa, Arabidopsis thaliana
MSVLVSQVNRLRKMNKPVIGVGCASTGDTSAALSAYCASAGIPSIVFLPADKISMAQLVQPIANGAFVLSIDTDFDGCMHLIREVTAELPIYLANSLNSLRLEGQKTAAIEILQQFNWQVPDWVIVPGGNLGNIYAFYKGFHMCKELGLVDRIPRLVCAQAANANPLYLHYKSGFKEDFNPLKANTTFASAIQIGDPVSIDRAVYALKKSNGIVEEATEEELMDATALADSTGMFICPHTGVALTALMKLRKSGVIGANDRTVVVSTAHGLKFTQSKIDYHSKNIKEMACRLANPPVKVKAKFGSVMDVLKEYLKSNDK

SEQ ID NO: 11565 - DNA, 990 bp, Arabidopsis thaliana
atactcagtaagcgagtccgagtcaacaatggacgtctacggcatgtcttcaccggacttgcttcgtatcgacgaccttctcgatttctccaacgacgaaatcttctcttcctcttccaccgtcacttcctccgctgcttcctccgccgcttcttctgaaaaccctttcagctttccttcttccgcctacacttctcctactctcctcaccgacttcactcaggatctctgcgttcccagtgacgacgcagctcatctcgaatggttatcgcgattcgttgacgattcattctctgacttcccagcgaatcctttaaccacgaacgttagacctgagatttcattcaccggaaaacctagaagtcgccgatcaagagcaccagcaccatccgtagctggaacttgggctccgatgtctgaatccgagctttgtcactccgtcgctaaacttaaaccgaagaaagtctacaacgctgaatcagttacggcggatggagcgaggcggtgcacgcactgtgcctcggagaaaacgccacagtggagaactggaccgcttggacctaaaacgctttgtaacgcttgtggagttcgttacaaatcagggaggcttgtaccggaatacagaccggcgtcgagtcctacgtttgtgttgactcagcattcgaactctcaccggaaagttatggagctccggcgacagaaggaacaacaagaatcttgcgttcgaattccgccgtttcagccgcagtaaatttgggggttttcttttcaaggggttttgtgatttggtgacgtgtcgtaatcttaacggtgatgatcacgtgaccgaagggaggggttaaggacttaattatcagtattagtttaaagtttgcaaatctctgctaattaatttgttggtaatttctattgattttttttttcttgcttttgttttttggtttcacggctctccttaaagttatatcattaaatgatttcattggcggc

SEQ ID NO: 11566 - protein, 249 aa, Arabidopsis thaliana
YSVSESESTMDVYGMSSPDLLRIDDLLDFSNDEIFSSSSTVTSSAASSAASSENPFSFPSSAYTSPTLLTDFTQDLCVPSDDAAHLEWLSRFVDDSFSDFPANPLTTNVRPEISFTGKPRSRRSRAPAPSVAGTWAPMSESELCHSVAKLKPKKVYNAESVTADGARRCTHCASEKTPQWRTGPLGPKTLCNACGVRYKSGRLVPEYRPASSPTFVLTQHSNSHRKVMELRRQKEQQESCVRIPPFQPQ

SEQ ID NO: 11567 - protein, 240 aa, Arabidopsis thaliana
MDVYGMSSPDLLRIDDLLDFSNDEIFSSSSTVTSSAASSAASSENPFSFPSSAYTSPTLLTDFTQDLCVPSDDAAHLEWLSRFVDDSFSDFPANPLTTNVRPEISFTGKPRSRRSRAPAPSVAGTWAPMSESELCHSVAKLKPKKVYNAESVTADGARRCTHCASEKTPQWRTGPLGPKTLCNACGVRYKSGRLVPEYRPASSPTFVLTQHSNSHRKVMELRRQKEQQESCVRIPPFQPQ

SEQ ID NO: 11568 - protein, 235 aa, Arabidopsis thaliana
MSSPDLLRIDDLLDFSNDEIFSSSSTVTSSAASSAASSENPFSFPSSAYTSPTLLTDFTQDLCVPSDDAAHLEWLSRFVDDSFSDFPANPLTTNVRPEISFTGKPRSRRSRAPAPSVAGTWAPMSESELCHSVAKLKPKKVYNAESVTADGARRCTHCASEKTPQWRTGPLGPKTLCNACGVRYKSGRLVPEYRPASSPTFVLTQHSNSHRKVMELRRQKEQQESCVRIPPFQPQ

SEQ ID NO: 11569 - DNA, 1278 bp, Arabidopsis thaliana
tttctggattctcttggttttttccatctcaatggcttcttgctccacgattccatcgcttgtaggtccacaaatcggaatcaactacggagaatacagctccaatcttgaagatagtagtccagtgatcggaatcaactatggtcgttacggctcaaacctaccaccaccagaagcaataccatcgctagtcaactctctctccatcaaacatgtcaaaacctttgacttggatccaagaatcaccaaatctttcgccaacactggaatcactctctccctctgtatccccaacgacaagatcccatctctagccaccaatctctccgaagctgaatcaatcatcagaaacttcatcttaccttaccacaagaacacaatcatcacagcaatctccgtcggaaacgaagtctccttactcccgcaattctccaaccacctagtctcagctatggtcaacgttcacaaagcaatcaagagatacagattacacaagaagatcaaagtctccacaacgcattctctcgcgattctttccagaagattccctccttcgactgctgttttccatcaatcgatcggtgattcggttttggaaccactcataaggtttctacaaagaacaaattcacctctcatggtgaacgtttacccttacctcgcttataaacaatcattcccttcgattcctctggattttgctctgtttcagccgatgaacagccccagacgccggagatacatagatccgtacactggagttgcatacaccaatctgttcgacataatgctggattctgttgactccgccgtgaaatccttagggttacctgaaattccggtggttgtatcggagattgggtggcagacgaggggagatccgggtgaaacagctgctaatttggagaacgctagggtttttaaccaacggctcgttgagcatctgagaagaagatggaataaagttccggtgtatatctttgctctgttcgatgaagaccagaaaactggaaacgccgtggagaagcactggggattgcttcacggtaacggatcgaggaagtatgatctgaatttctcgccgccgatttgaagtttgaacggcgcaaagatggaagaagatttatgaggtaatgggcctattgttttgttttattatgggcctattgaattgtttttagaccaggccagtattacgacatattaatccaccgggcttacttgtaaataatacaaagttgataaagaaataataaaaagtggagatgattgaaggcc

SEQ ID NO: 11570 - protein, 363 aa, Arabidopsis thaliana
FWILLVFSISMASCSTIPSLVGPQIGINYGEYSSNLEDSSPVIGINYGRYGSNLPPPEAIPSLVNSLSIKHVKTFDLDPRITKSFANTGITLSLCIPNDKIPSLATNLSEAESIIRNFILPYHKNTIITAISVGNEVSLLPQFSNHLVSAMVNVHKAIKRYRLHKKIKVSTTHSLAILSRRFPPSTAVFHQSIGDSVLEPLIRFLQRTNSPLMVNVYPYLAYKQSFPSIPLDFALFQPMNSPRRRRYIDPYTGVAYTNLFDIMLDSVDSAVKSLGLPEIPVVVSEIGWQTRGDPGETAANLENARVFNQRLVEHLRRRWNKVPVYIFALFDEDQKTGNAVEKHWGLLHGNGSRKYDLNFSPPI

SEQ ID NO: 11571 - protein, 353 aa, Arabidopsis thaliana
MASCSTIPSLVGPQIGINYGEYSSNLEDSSPVIGINYGRYGSNLPPPEAIPSLVNSLSIKHVKTFDLDPRITKSFANTGITLSLCIPNDKIPSLATNLSEAESIIRNFILPYHKNTIITAISVGNEVSLLPQFSNHLVSAMVNVHKAIKRYRLHKKIKVSTTHSLAILSRRFPPSTAVFHQSIGDSVLEPLIRFLQRTNSPLMVNVYPYLAYKQSFPSIPLDFALFQPMNSPRRRRYIDPYTGVAYTNLFDIMLDSVDSAVKSLGLPEIPVVVSEIGWQTRGDPGETAANLENARVFNQRLVEHLRRRWNKVPVYIFALFDEDQKTGNAVEKHWGLLHGNGSRKYDLNFSPPI

SEQ ID NO: 11572 - protein, 213 aa, Arabidopsis thaliana
MVNVHKAIKRYRLHKKIKVSTTHSLAILSRRFPPSTAVFHQSIGDSVLEPLIRFLQRTNSPLMVNVYPYLAYKQSFPSIPLDFALFQPMNSPRRRRYIDPYTGVAYTNLFDIMLDSVDSAVKSLGLPEIPVVVSEIGWQTRGDPGETAANLENARVFNQRLVEHLRRRWNKVPVYIFALFDEDQKTGNAVEKHWGLLHGNGSRKYDLNFSPPI

SEQ ID NO: 11573 - DNA, 1919 bp, Arabidopsis thaliana
ggattggaaacatatctcaagcttcttcttcgtgttacgcactttcttcttcttcttctctctctctctttcttcttcgtcttcgatcacagaagacagaattcaatgtcgtcgacctacaagctcaatcatactgattcatttgcaaatggagatgcaaagagtttgttgccgaacccagagaatggtttcactcatttgacttcacttgctcaatcagagaaggctgttcaggagcttcttcttcaacagactcctatgcaggctactgacgaccatctcgttgagttctctgaggctttgagaactgttgcaaaggcactaaggggagctgctgaaggaaaggcgttggctcaagctgaggctgctgaatggaagcgtagatacgagttagagaggtctaagaacgtggagttgcagcataaagaactgtcaaatggagtgtgtgccgatgaatctaatggtcaaaggatggagcacttagcaaagtctccgcggctttatgctcaggaaatcagttctaatggcatggagactatttgctctcatgaagtgctccaagatggtggatttaacagttttaataacaaattgaagaggaaggcatcatttaaactttcatggggatgtaaggggatggctaatgatcaacacaaaaaagaaattgtttcgtttgagagagggaatatcagcacagcagagcgcagtagtaaacagatttcactgacatgggagtctgatccacaaactgtacttattatcactaagcctaattcaacttccgtgcgagttctctctgtggatatggtcagatggttgagaacgcaaaaaggactaaatatttatgtggaacctcgagtaaaggaagaactcttatcagagtcaagttccttcaacttcgtacaaacttgggaagatgacaaggaaatttcacttctacacacaaaggttgaccttcttataactcttggtggggatggcacagtgctatgggctgcatcgatgtttaaaggaccagtgcctccaattgttccattctccatgggatctcttggatttatgactccttttcacagcgaacaataccgagattgtcttgaagcgattttgaagggtcctatcagtataacactacgacacaggttgcagtgtcacatcatcagagataaagcaacacatgaatatgaaccagaagagactatgcttgttctgaatgaagtcaccattgaccgtggaatatcttcttacctcacaaaccttgaatgctactgtgacaactcattcgtcacatgtgtgcaaggcgatggacttatactgtctacaacatctggtagcaccgcgtattcacttgctgctggagggtcaatggtccatcctcaggttcctgggatcttattcacgcctatctgtccgcattctctatcattccgcccactaatattaccggaacacgtgacagtgagagtccaagtgccattcaacagcagaagctccgcttgggtctcctttgatgggaaagaccggaaacagcttgaagcaggggatgcactagtgtgtagcatggcaccatggcccgtctcaaccgcttgtcaagttgaatccactaacgacttcttacgcagcatccacgatggtcttcactggaacctaagaaagactcaatctgctgatggaccttagaaacaaattcctccagcttttttctctttcattcttaaccaataaccatatatagtctcgacgtctatctatctatctatatgcatatagataaatgtgaaatggaaagtgatgggttctgtgagagaatgtggtctgtatccattgttgtgtagagaatgtaataatgtagctgctatgacccataattctgttgatgtgataatcactcaaagttaatgaataaaagatatttctgc

SEQ ID NO: 11574 - protein, 559 aa, Arabidopsis thaliana
GLETYLKLLLRVTHFLLLLLSLSFFFVFDHRRQNSMSSTYKLNHTDSFANGDAKSLLPNPENGFTHLTSLAQSEKAVQELLLQQTPMQATDDHLVEFSEALRTVAKALRGAAEGKALAQAEAAEWKRRYELERSKNVELQHKELSNGVCADESNGQRMEHLAKSPRLYAQEISSNGMETICSHEVLQDGGFNSFNNKLKRKASFKLSWGCKGMANDQHKKEIVSFERGNISTAERSSKQISLTWESDPQTVLIITKPNSTSVRVLSVDMVRWLRTQKGLNIYVEPRVKEELLSESSSFNFVQTWEDDKEISLLHTKVDLLITLGGDGTVLWAASMFKGPVPPIVPFSMGSLGFMTPFHSEQYRDCLEAILKGPISITLRHRLQCHIIRDKATHEYEPEETMLVLNEVTIDRGISSYLTNLECYCDNSFVTCVQGDGLILSTTSGSTAYSLAAGGSMVHPQVPGILFTPICPHSLSFRPLILPEHVTVRVQVPFNSRSSAWVSFDGKDRKQLEAGDALVCSMAPWPVSTACQVESTNDFLRSIHDGLHWNLRKTQSADGP

SEQ ID NO: 11575 - protein, 524 aa, Arabidopsis thaliana
MSSTYKLNHTDSFANGDAKSLLPNPENGFTHLTSLAQSEKAVQELLLQQTPMQATDDHLVEFSEALRTVAKALRGAAEGKALAQAEAAEWKRRYELERSKNVELQHKELSNGVCADESNGQRMEHLAKSPRLYAQEISSNGMETICSHEVLQDGGFNSFNNKLKRKASFKLSWGCKGMANDQHKKEIVSFERGNISTAERSSKQISLTWESDPQTVLIITKPNSTSVRVLSVDMVRWLRTQKGLNIYVEPRVKEELLSESSSFNFVQTWEDDKEISLLHTKVDLLITLGGDGTVLWAASMFKGPVPPIVPFSMGSLGFMTPFHSEQYRDCLEAILKGPISITLRHRLQCHIIRDKATHEYEPEETMLVLNEVTIDRGISSYLTNLECYCDNSFVTCVQGDGLILSTTSGSTAYSLAAGGSMVHPQVPGILFTPICPHSLSFRPLILPEHVTVRVQVPFNSRSSAWVSFDGKDRKQLEAGDALVCSMAPWPVSTACQVESTNDFLRSIHDGLHWNLRKTQSADGP

SEQ ID NO: 11576 - protein, 473 aa, Arabidopsis thaliana
MQATDDHLVEFSEALRTVAKALRGAAEGKALAQAEAAEWKRRYELERSKNVELQHKELSNGVCADESNGQRMEHLAKSPRLYAQEISSNGMETICSHEVLQDGGFNSFNNKLKRKASFKLSWGCKGMANDQHKKEIVSFERGNISTAERSSKQISLTWESDPQTVLIITKPNSTSVRVLSVDMVRWLRTQKGLNIYVEPRVKEELLSESSSFNFVQTWEDDKEISLLHTKVDLLITLGGDGTVLWAASMFKGPVPPIVPFSMGSLGFMTPFHSEQYRDCLEAILKGPISITLRHRLQCHIIRDKATHEYEPEETMLVLNEVTIDRGISSYLTNLECYCDNSFVTCVQGDGLILSTTSGSTAYSLAAGGSMVHPQVPGILFTPICPHSLSFRPLILPEHVTVRVQVPFNSRSSAWVSFDGKDRKQLEAGDALVCSMAPWPVSTACQVESTNDFLRSIHDGLHWNLRKTQSADGP

SEQ ID NO: 11577 - DNA, 1885 bp, Arabidopsis thaliana
gaacgaagattctcttgctcgaacaaaaaaattctctccgcgatacttacaaagcacaagtgagctagctttgagaaagattcaatttttgagccttaagattgtgatgggagttgtgtctatttcaagttcagcttcaagatctccactcgggttgggcaacgatcttttgacacatcggtcttcacttaaaaagccatccattgttgcttttaaagccgatgattccagcaattcagctttgatcattcctcctcgtgagcaagttttgattcctgctgaaaagcataatgagaagaagagagaagtaacgaggagaaagccttgtaaaaccccgaaaaaaccgctttccttggaacataattcggctccttcgtgttcgttaggagtagattacaatgaagctgctgcaagacttgaaagcatatacaagcttagtcctgcaacaaccacattagtcgaggatgatgttgaagatggcggctctaaagccaaagtttcacggaggagaaaaaggaaagaaagtggtgaggagaagaaagtggttgtgaggaataatgtgaagaaggaaaaacgtatgagtcttgataaacggattgctttgaagagaaacgttcaagagaaaccagtcgttgcttctgttgataagaaagtaacaaagaggcagcaagaagaggagaagatcgagaggcttgtgcgggactattcagcttctaatgatatagtgagcttggactggaaaaaaatgaagatacctcctgttctttcttctactgaacatgcttggttgttcaagttgatgcaacctatgaaggctcttcttgaagtgaaagatgtattgcaaaagagcttgggaagagagcctagggaagctgaaatagccggggagatcaatatgactgcgggtgaagtaaaaaagaaaatcgaaataggtagagctgcaagaaacaaacttattaagcacaatctccggcttgtcttgtttgttatgaacaaatactttcatgagtttaccaacggaccaaaattccaagacctttgtcaagcgggtatgagagggcttatcacagcaattgaccgctttgagccgaaaaggaagtttcgtctttcgacttatggtttgttttggattagacatgccatcatacggtcaatgacaacttcaaacttcactcgtgtcccatttggacttgaatcggttagagtggagatatataaagcaaagactgagctatggtttgagatgggaagacctccaacggaggacgaggtagttgagagactcaagataacacctgagagataccgtgaagtattgagggctgcaaaaccggttttgtcactaaattcaaaacattcggttactcaagaagaattcatcaacggaatcacagatgttgatggtgttggagctaataacagcagacagcctgctcttctcaggctcgctctcgacgatgtgctcgattcattgaagccgaaagagagtctggttattcgacagaggtacggtcttgatggaaaaggcgacaggactctaggagagatagctggaaatctcaacatctctagagaaatggttaggaaacatgaagtcaaggccttgatgaagcttaagcatcaggccagagttgattaccttcgtcaatacatcgtctaaaaccaaaccgaaccgaactgagccgcctcactcaaccatttgtgcatacttggtatgatttcccgactttacgagatacttcacaccctcttataaccgttgtatagtagtgtatgtaatagcggagttacttatagctgcgttaaatcgatcagtgaatcgcaatcgttgtattatatcattagtatactcatactgaaaagttatacatgtaaagtttgagat

SEQ ID NO: 11578 - protein, 552 aa, Arabidopsis thaliana
NEDSLARTKKFSPRYLQSTSELALRKIQFLSLKIVMGVVSISSSASRSPLGLGNDLLTHRSSLKKPSIVAFKADDSSNSALIIPPREQVLIPAEKHNEKKREVTRRKPCKTPKKPLSLEHNSAPSCSLGVDYNEAAARLESIYKLSPATTTLVEDDVEDGGSKAKVSRRRKRKESGEEKKVVVRNNVKKEKRMSLDKRIALKRNVQEKPVVASVDKKVTKRQQEEEKIERLVRDYSASNDIVSLDWKKMKIPPVLSSTEHAWLFKLMQPMKALLEVKDVLQKSLGREPREAEIAGEINMTAGEVKKKIEIGRAARNKLIKHNLRLVLFVMNKYFHEFTNGPKFQDLCQAGMRGLITAIDRFEPKRKFRLSTYGLFWIRHAIIRSMTTSNFTRVPFGLESVRVEIYKAKTELWFEMGRPPTEDEVVERLKITPERYREVLRAAKPVLSLNSKHSVTQEEFINGITDVDGVGANNSRQPALLRLALDDVLDSLKPKESLVIRQRYGLDGKGDRTLGEIAGNLNISREMVRKHEVKALMKLKHQARVDYLRQYIV

SEQ ID NO: 11579 - protein, 517 aa, Arabidopsis thaliana
MGVVSISSSASRSPLGLGNDLLTHRSSLKKPSIVAFKADDSSNSALIIPPREQVLIPAEKHNEKKREVTRRKPCKTPKKPLSLEHNSAPSCSLGVDYNEAAARLESIYKLSPATTTLVEDDVEDGGSKAKVSRRRKRKESGEEKKVVVRNNVKKEKRMSLDKRIALKRNVQEKPVVASVDKKVTKRQQEEEKIERLVRDYSASNDIVSLDWKKMKIPPVLSSTEHAWLFKLMQPMKALLEVKDVLQKSLGREPREAEIAGEINMTAGEVKKKIEIGRAARNKLIKHNLRLVLFVMNKYFHEFTNGPKFQDLCQAGMRGLITAIDRFEPKRKFRLSTYGLFWIRHAIIRSMTTSNFTRVPFGLESVRVEIYKAKTELWFEMGRPPTEDEVVERLKITPERYREVLRAAKPVLSLNSKHSVTQEEFINGITDVDGVGANNSRQPALLRLALDDVLDSLKPKESLVIRQRYGLDGKGDRTLGEIAGNLNISREMVRKHEVKALMKLKHQARVDYLRQYIV

SEQ ID NO: 11580 - protein, 360 aa, Arabidopsis thaliana
MSLDKRIALKRNVQEKPVVASVDKKVTKRQQEEEKIERLVRDYSASNDIVSLDWKKMKIPPVLSSTEHAWLFKLMQPMKALLEVKDVLQKSLGREPREAEIAGEINMTAGEVKKKIEIGRAARNKLIKHNLRLVLFVMNKYFHEFTNGPKFQDLCQAGMRGLITAIDRFEPKRKFRLSTYGLFWIRHAIIRSMTTSNFTRVPFGLESVRVEIYKAKTELWFEMGRPPTEDEVVERLKITPERYREVLRAAKPVLSLNSKHSVTQEEFINGITDVDGVGANNSRQPALLRLALDDVLDSLKPKESLVIRQRYGLDGKGDRTLGEIAGNLNISREMVRKHEVKALMKLKHQARVDYLRQYIV

SEQ ID NO: 11581 - DNA, 2259 bp, Arabidopsis thaliana
aaaccaaaccaaaccccaacaaaatgtttcttcattttctttaaaattaagatcaacccgtttttgattttcttgatcgtaaccagtttcgttatccatgggtgatctagccaagcagatattgtctcgcccgattcaacttgcagaccaagtggtgaaagccggagatgaagccacaatcaacaaacaagaatgtgccgatatcaagtccaaaacggaaaagctcgcagctcttctccgtcaagcggcccgtgcaagctccgacctctacgaacgtcccacgcgccgtatcctcgacgacactgaaaacgttcttgaaaaagcattgacgatggtccaaagatgccgtgacgatggctacataatgcgacttttcaacataatccccgccgcagcattccgtaaaatgatttctcaactagaaaactccgtcggcgacgtctcttggctcctccgtgtctcaactccagccggtaacgatgacgacgaagggtttggttacttaggtctcccgccaatcgcagccaacgaaccaatcatgtgcttaatttgggaacaaatcgcggttctgatgaccggttcgccggaagataaatcagacgccgccgcgtcgttggcttctttagcaagagataacgatagatacgtgaaactgatagttgaagaaggcggagtcaaccctttgttgaaacttgtaaaagaaggtaaaatcgacggtcaagaaaacgcagcgagaacaatcgggttactgggtcgtgacccggaaagtgttgagcatatgattcagcttggtgtttgttcagtgctttcaagtattcttaaagaaggttcgatgaaggttcaagccgttgtggcttgggctgtttcagagcttgtttctggtaatcacgccaaatgtcaagaactgtttgcgcaaaacaacgtgattaggcttcttgtgagtcatttagcgtttgaaacggttcaagaacatagcaaatacgcggttgttgcgggtagagcaacgtcgatgcatcacgccgtcgtaatggcgagtaaaatcagtagtagtaaagagaatttaccggcgttgaacgaggaggaggacgacgataatcatatcggagtctcgagtccgatgacgaatcagatgcatagcatcgttgcaacaacaatggcgatgaaagcggttggatcaggatcgaaatcgaatctttctagccgatttgttaccggcgacgacgataaacccccggaaaagataccggagaagagttatagtatgagttcacagatcaaggcttacggtagtatcgcacatcaatcgcgaaacgcgtcggtgacgagagggagagagcttgaagatccggtgacgaagacttatatgaaagcgatggcggcgagagcgttatggaaactcgctgtaggaaactcatcgatctgccgagtcatcaccgagtcacgagctttactctgttttgcggttttactagacaaaggagacgaagagactaagtataacacagctatggctatcatggagataaccgccgtggctgaggaaaacgcagatctgagaagatccgcgttcagacgcacttcaccggcgtgcaaagcggtggttgaacagttattccgaatcgttgaaaacgccgacgccggatccgatttactcatcccctgtgtaagatccatcggaaacctagcgagaacgttcaaatcagcggaaacgcatatgatcgtgcctctggtaaaactcctcgacgacggagaaccagatttagcggcggaggtagcgatcgcgttagcgaaattcgcgacggaggataactttttagggaaagaacactcgaggacaatcatcgaagctggaggatcaaagcttctggttcagttagcgtatttcggagagaacggagcacagattccggcgatggttttgctgagctacgtggcgatgaatgttccagacagtgaacagttagcgaaagacgaagtgttaacggtattggaatggtcatcgaagcaagctaatgtacttgaagatgaagatatggaagctttgttgtatgaagctaagagcagactcgagctttaccaatcaagaggatctagaggctttcacttgtaattttcccattgaatgaattattagaaaatactaggatttgatttccacgtgtgttccaatgattttttatgtaggtgactctgttttttaaccactatcaaaatgttgtataaagttttatttttcaatacctaattttgtgtattgac

SEQ ID NO: 11582 - protein, 670 aa, Arabidopsis thaliana
MGDLAKQILSRPIQLADQVVKAGDEATINKQECADIKSKTEKLAALLRQAARASSDLYERPTRRILDDTENVLEKALTMVQRCRDDGYIMRLFNIIPAAAFRKMISQLENSVGDVSWLLRVSTPAGNDDDEGFGYLGLPPIAANEPIMCLIWEQIAVLMTGSPEDKSDAAASLASLARDNDRYVKLIVEEGGVNPLLKLVKEGKIDGQENAARTIGLLGRDPESVEHMIQLGVCSVLSSILKEGSMKVQAVVAWAVSELVSGNHAKCQELFAQNNVIRLLVSHLAFETVQEHSKYAVVAGRATSMHHAVVMASKISSSKENLPALNEEEDDDNHIGVSSPMTNQMHSIVATTMAMKAVGSGSKSNLSSRFVTGDDDKPPEKIPEKSYSMSSQIKAYGSIAHQSRNASVTRGRELEDPVTKTYMKAMAARALWKLAVGNSSICRVITESRALLCFAVLLDKGDEETKYNTAMAIMEITAVAEENADLRRSAFRRTSPACKAVVEQLFRIVENADAGSDLLIPCVRSIGNLARTFKSAETHMIVPLVKLLDDGEPDLAAEVAIALAKFATEDNFLGKEHSRTIIEAGGSKLLVQLAYFGENGAQIPAMVLLSYVAMNVPDSEQLAKDEVLTVLEWSSKQANVLEDEDMEALLYEAKSRLELYQSRGSRGFHL

SEQ ID NO: 11583 - protein, 592 aa, Arabidopsis thaliana
MVQRCRDDGYIMRLFNIIPAAAFRKMISQLENSVGDVSWLLRVSTPAGNDDDEGFGYLGLPPIAANEPIMCLIWEQIAVLMTGSPEDKSDAAASLASLARDNDRYVKLIVEEGGVNPLLKLVKEGKIDGQENAARTIGLLGRDPESVEHMIQLGVCSVLSSILKEGSMKVQAVVAWAVSELVSGNHAKCQELFAQNNVIRLLVSHLAFETVQEHSKYAVVAGRATSMHHAVVMASKISSSKENLPALNEEEDDDNHIGVSSPMTNQMHSIVATTMAMKAVGSGSKSNLSSRFVTGDDDKPPEKIPEKSYSMSSQIKAYGSIAHQSRNASVTRGRELEDPVTKTYMKAMAARALWKLAVGNSSICRVITESRALLCFAVLLDKGDEETKYNTAMAIMEITAVAEENADLRRSAFRRTSPACKAVVEQLFRIVENADAGSDLLIPCVRSIGNLARTFKSAETHMIVPLVKLLDDGEPDLAAEVAIALAKFATEDNFLGKEHSRTIIEAGGSKLLVQLAYFGENGAQIPAMVLLSYVAMNVPDSEQLAKDEVLTVLEWSSKQANVLEDEDMEALLYEAKSRLELYQSRGSRGFHL

SEQ ID NO: 11584 - protein, 581 aa, Arabidopsis thaliana
MRLFNIIPAAAFRKMISQLENSVGDVSWLLRVSTPAGNDDDEGFGYLGLPPIAANEPIMCLIWEQIAVLMTGSPEDKSDAAASLASLARDNDRYVKLIVEEGGVNPLLKLVKEGKIDGQENAARTIGLLGRDPESVEHMIQLGVCSVLSSILKEGSMKVQAVVAWAVSELVSGNHAKCQELFAQNNVIRLLVSHLAFETVQEHSKYAVVAGRATSMHHAVVMASKISSSKENLPALNEEEDDDNHIGVSSPMTNQMHSIVATTMAMKAVGSGSKSNLSSRFVTGDDDKPPEKIPEKSYSMSSQIKAYGSIAHQSRNASVTRGRELEDPVTKTYMKAMAARALWKLAVGNSSICRVITESRALLCFAVLLDKGDEETKYNTAMAIMEITAVAEENADLRRSAFRRTSPACKAVVEQLFRIVENADAGSDLLIPCVRSIGNLARTFKSAETHMIVPLVKLLDDGEPDLAAEVAIALAKFATEDNFLGKEHSRTIIEAGGSKLLVQLAYFGENGAQIPAMVLLSYVAMNVPDSEQLAKDEVLTVLEWSSKQANVLEDEDMEALLYEAKSRLELYQSRGSRGFHL

SEQ ID NO: 11585 - DNA, 1670 bp, Arabidopsis thaliana
atacgtgactcatcgtctttttcactcccacacgttctgctccagcgatactgtgagagaatctctgtgtggttctgaattcttaggctggaattgaattctgaaatggcggaggagtacaaggaagcgttgttggagaagcagaactatcacgacggatgtcccggctgtaaggtggagcagatgaagcagctccggcgaggatatccttacctcgagctttccttcgtttggattatcgtcctctccacttctctaccaatttcctcactctatcccttcctctactatatgattgaggattttggtgtcgcaaagacggagaaagatattgggttttatgctggttttgttggttgctcttttatgcttggaagagcactgacttctgtgttctggggaattgtggctgatcgttatggaagaaaacccattatactcttgggaactatctcaattgcaattttcaacgctctttttggcttgagctcaaatttttggatagcaattggcacaaggtttcttcttgggagtttcaactgtttgcttggaacaatgaaggcctatgcatcagaaatatttcgtgatgaatatcaagctaccgcaatgtcagctgttagtactgcttggggcattggactgatcattggccctgctcttggtggttttttagctcagccggcagacaaatatccaaatgtgttctcccaagaatctctttttggcagattccggtatgcattgccttgctttacgatttcagcttttgccttgcttgtgacagtactatgctgcttcatcccggagacactgcacaatcataagctggacagcttatcacatgatgattcatacgatatacttgaagctgcatctcatgaatcatctccttctaccgggaaggcaggaaaaaacgaaagaaaggcttctcagtctctcttgaagaattggccgctgatgtcatctatcattgtgtattgtgttctgtgtcttcatgatactgcatactcggagatatttgcactatgggctaacagtccaaggaagtatggaggtctgagctactcaacgaatgaagtcggtacagttcttgctatctcaggtctcggcctattctcttttcaggtatttgtttatcctttggctgagaaactgctaggacctgttctggtcacccgatatgctggggcactgatgatacctatacaaatgagttatccatttatagcaggcttgtcaggtctcagtctaagcttgatgttaaattgtgcatcaatcctcataaatgtcttaagtgtgtctgccataaccggcctgttgatccttcaaaatagagcagtggatcagagccaaagaggggcggctaatggaatagctatgactgcgatgtctctatttaagacagttggaccagctggtgctggcatcttattttcttggagtgagaggcgactaaacgctgcatttctaccaggatcgcatatggtattcttcgtcttgaatgtgatagtagtggtcggagtagctctgacattcaagccatttctaacgacgggtcgaagatgaaattcatttgaattggtaagatagggaatgtatggacaagttgattcttttcatttcagatacgaaagaaaccggtaataaaatttcactaaccttaggatttc

SEQ ID NO: 11586 - protein, 486 aa, Arabidopsis thaliana
MAEEYKEALLEKQNYHDGCPGCKVEQMKQLRRGYPYLELSFVWIIVLSTSLPISSLYPFLYYMIEDFGVAKTEKDIGFYAGFVGCSFMLGRALTSVFWGIVADRYGRKPIILLGTISIAIFNALFGLSSNFWIAIGTRFLLGSFNCLLGTMKAYASEIFRDEYQATAMSAVSTAWGIGLIIGPALGGFLAQPADKYPNVFSQESLFGRFRYALPCFTISAFALLVTVLCCFIPETLHNHKLDSLSHDDSYDILEAASHESSPSTGKAGKNERKASQSLLKNWPLMSSIIVYCVLCLHDTAYSEIFALWANSPRKYGGLSYSTNEVGTVLAISGLGLFSFQVFVYPLAEKLLGPVLVTRYAGALMIPIQMSYPFIAGLSGLSLSLMLNCASILINVLSVSAITGLLILQNRAVDQSQRGAANGIAMTAMSLFKTVGPAGAGILFSWSERRLNAAFLPGSHMVFFVLNVIVVVGVALTFKPFLTTGRR

SEQ ID NO: 11587 - protein, 460 aa, Arabidopsis thaliana
MKQLRRGYPYLELSFVWIIVLSTSLPISSLYPFLYYMIEDFGVAKTEKDIGFYAGFVGCSFMLGRALTSVFWGIVADRYGRKPIILLGTISIAIFNALFGLSSNFWIAIGTRFLLGSFNCLLGTMKAYASEIFRDEYQATAMSAVSTAWGIGLIIGPALGGFLAQPADKYPNVFSQESLFGRFRYALPCFTISAFALLVTVLCCFIPETLHNHKLDSLSHDDSYDILEAASHESSPSTGKAGKNERKASQSLLKNWPLMSSIIVYCVLCLHDTAYSEIFALWANSPRKYGGLSYSTNEVGTVLAISGLGLFSFQVFVYPLAEKLLGPVLVTRYAGALMIPIQMSYPFIAGLSGLSLSLMLNCASILINVLSVSAITGLLILQNRAVDQSQRGAANGIAMTAMSLFKTVGPAGAGILFSWSERRLNAAFLPGSHMVFFVLNVIVVVGVALTFKPFLTTGRR

SEQ ID NO: 11588 - protein, 424 aa, Arabidopsis thaliana
MIEDFGVAKTEKDIGFYAGFVGCSFMLGRALTSVFWGIVADRYGRKPIILLGTISIAIFNALFGLSSNFWIAIGTRFLLGSFNCLLGTMKAYASEIFRDEYQATAMSAVSTAWGIGLIIGPALGGFLAQPADKYPNVFSQESLFGRFRYALPCFTISAFALLVTVLCCFIPETLHNHKLDSLSHDDSYDILEAASHESSPSTGKAGKNERKASQSLLKNWPLMSSIIVYCVLCLHDTAYSEIFALWANSPRKYGGLSYSTNEVGTVLAISGLGLFSFQVFVYPLAEKLLGPVLVTRYAGALMIPIQMSYPFIAGLSGLSLSLMLNCASILINVLSVSAITGLLILQNRAVDQSQRGAANGIAMTAMSLFKTVGPAGAGILFSWSERRLNAAFLPGSHMVFFVLNVIVVVGVALTFKPFLTTGRR

SEQ ID NO: 11589 - DNA, 1398 bp, Arabidopsis thaliana
gattaaacactatacaaacgaccaaaccaagaagaagaagatggtgaaactggagaactcgaggaaacccgaaaacatttcgaacaagaacatccccatgtccgatttcgtggtcaatctggatcatggtgatccaacggcgtacgaagaatactggaggaagatgggtgacaggtgtacggtgacgatacgtggttgtgatctcatgagttacttcagcgacatgacgaacttgtgttggttccttgagccagagcttgaagatgcgatcaaggacttgcacggtgttgttggtaacgctgcgacggaggatcggtacatagtggttgggaccggttcgacgcagctttgtcaagccgccgtccacgcactctcttcactagccaggagtcaacctgtcagcgtcgtcgccgccgctcctttttactccacatatgtggaggagacgacatatgttcggtcgggtatgtacaagtgggaaggagacgcatggggtttcgacaaaaagggtccgtacatcgagctagtgacgtcacctaataaccctgacggaaccatcagagagacggtggtgaaccgtccagacgacgacgaagccaaagtgatccatgactttgcttattactggccccactacactcccatcactcgccgtcaagaccatgacatcatgctcttcactttctccaagatcacaggccacgctgggtcccgtattgggtgggcattggtgaaggacaaggaggtagctaagaagatggttgagtatattattgtgaactcgattggtgtgtctaaggagtcacaggttcgaacagctaagatactcaacgttctaaaggagacttgtaagagcgagtccgagtctgagaatttcttcaagtatggtcgtgagatgatgaagaatcggtgggagaagctacgtgaagttgtgaaagagagcaatgctttcactcttcccaagtaccctgaagcattttgcaactactttggaaaatcactcgaatcttaccctgcgtttgcgtggctagggacgaaggaagagacggatctggtaagtgaattgaggagacacaaggtaatgagcagagctggagaccgttgtggatctgacaagaagcatgtccgagtcagcatgcttagtcgtgaagacgttttcaatgtctttctcgagagactcgccaacatgaagctcattaaaagcattgacctttagataagcaagcgaatataacgcatataacgccttatatataaaagactttttagtttttagcttaccctaaagttatctatatataagtatgtagaactaaagaggtagaacctctctctctctctatgtttatggccttttggccctatgtgaaatatgaaggtgaaactgttctagttctt

SEQ ID NO: 11590 - protein, 404 aa, Arabidopsis thaliana
IKHYTNDQTKKKKMVKLENSRKPENISNKNIPMSDFVVNLDHGDPTAYEEYWRKMGDRCTVTIRGCDLMSYFSDMTNLCWFLEPELEDAIKDLHGVVGNAATEDRYIVVGTGSTQLCQAAVHALSSLARSQPVSVVAAAPFYSTYVEETTYVRSGMYKWEGDAWGFDKKGPYIELVTSPNNPDGTIRETVVNRPDDDEAKVIHDFAYYWPHYTPITRRQDHDIMLFTFSKITGHAGSRIGWALVKDKEVAKKMVEYIIVNSIGVSKESQVRTAKILNVLKETCKSESESENFFKYGREMMKNRWEKLREVVKESNAFTLPKYPEAFCNYFGKSLESYPAFAWLGTKEETDLVSELRRHKVMSRAGDRCGSDKKHVRVSMLSREDVFNVFLERLANMKLIKSIDL

SEQ ID NO: 11591 - protein, 391 aa, Arabidopsis thaliana
MVKLENSRKPENISNKNIPMSDFVVNLDHGDPTAYEEYWRKMGDRCTVTIRGCDLMSYFSDMTNLCWFLEPELEDAIKDLHGVVGNAATEDRYIVVGTGSTQLCQAAVHALSSLARSQPVSVVAAAPFYSTYVEETTYVRSGMYKWEGDAWGFDKKGPYIELVTSPNNPDGTIRETVVNRPDDDEAKVIHDFAYYWPHYTPITRRQDHDIMLFTFSKITGHAGSRIGWALVKDKEVAKKMVEYIIVNSIGVSKESQVRTAKILNVLKETCKSESESENFFKYGREMMKNRWEKLREVVKESNAFTLPKYPEAFCNYFGKSLESYPAFAWLGTKEETDLVSELRRHKVMSRAGDRCGSDKKHVRVSMLSREDVFNVFLERLANMKLIKSIDL

SEQ ID NO: 11592 - protein, 372 aa, Arabidopsis thaliana
MSDFVVNLDHGDPTAYEEYWRKMGDRCTVTIRGCDLMSYFSDMTNLCWFLEPELEDAIKDLHGVVGNAATEDRYIVVGTGSTQLCQAAVHALSSLARSQPVSVVAAAPFYSTYVEETTYVRSGMYKWEGDAWGFDKKGPYIELVTSPNNPDGTIRETVVNRPDDDEAKVIHDFAYYWPHYTPITRRQDHDIMLFTFSKITGHAGSRIGWALVKDKEVAKKMVEYIIVNSIGVSKESQVRTAKILNVLKETCKSESESENFFKYGREMMKNRWEKLREVVKESNAFTLPKYPEAFCNYFGKSLESYPAFAWLGTKEETDLVSELRRHKVMSRAGDRCGSDKKHVRVSMLSREDVFNVFLERLANMKLIKSIDL

SEQ ID NO: 11593 - DNA, 2459 bp, Arabidopsis thaliana
gagaactttttgataagagagaaagagatagagaaattcgtaacggagacgaagcaacgatgtcaggatgggacgaaggagcagtttactacagcgaccagccgcagttcccggaggccggagacgccgcaaccatcagtccccacgccgtcttaaccaaatttaaggaattcattcgaaacttcgagatcgaacagaattgtttcccctacagagaagctctcctcgataaccctaagcgacttgttgtccacctcgaagatctcctctcctttgattccgatctcccctccttaatccgatctgctcctgccgattatctccctgtgtttgagaaagcagctggtgaagtgttgactggattgaaaatgagggaggctaatgagggaggggtaatggaggaacctctgactagagatgtgcagattttgctcacttcaagagaggatccagtatcaatgagattacttggggcacagtacatctcaaagttggtgaaaatctctgggattagtattgcagcttcgagagtgaaagcaaaggcgacttatgtgtttttggtatgtaagaattgtaaaaagacaagggaagttccatgtcgtccgggtcttggtggggcaattgttcctcgatcatgtgataatattccacagcctggagaggagccttgccctcttgatccttggatggtggttcctgataggagccagtatgttgatcaacagaccttaaagctacaggagaatccggaggatgttcctactggagagcttccaagaaatatgcttctctcagttgatcggcatcttgtacaaacaattgtacctggaaccagactgacagtaatgggtatctacagcattttccaagcttcttcatcatctaactcgcataaaggagcagttgcaattcgccagccttatatccgagttgttggactggaagacacaaatgaggccagttcccgtggccctgccaacttcactcctgacgaagaggaagaattcaaaaagtttgctgatagtcaagatgtatacaagaacatttgcaccaagatcgctccttctatatttggccatgaggatgtgaagagagcagctgcgtgtcttctctttggaggatccaggaagagcctgcccgatggagtgaaactaagaggtgatattaatgttttgcttttgggagacccatcaactgcaaaatcacagtttcttaagtttgtggagaagacggctccaattgctgtttatacatctggaaagggatcatcggctgctgggctcacagcttcggtgattcgagatagcagcactcgagagttctatcttgaaggtggtgctatggttttggctgatggaggtgttgtgtgtattgatgaatttgacaagatgagaccggaagatagggttgctattcatgaggcaatggagcagcagacaatctccattgcaaaagctgggataacaactgtccttaattctagaacctcggtgcttgctgctgctaacccgccatctggtcgatatgatgaccttaagactgctcaggacaatatcgatctgcagacaacaattctttctagatttgatcttatcttcattgtcaaggacatcaggaagtattcccaagacaaggaaatagccagccatattataagggttcatgcatctgcaaacaaattttcggatgaaaacacagattctaaagaagataattggctcaaaaggtatatacaatactgtcgagcaaggtgtcatccccgtctctcaaaagacgctgctgagaacctgcagcggaaatatgtcacaatcagaatggatatgaagagacgtgcacatgaaacaggagaggctgctccgatacctatcacagtgagacaactcgaagctattgtcagactgagtgagtcacttgcaaaaatgagactgtcacacgaggccacaccagatgatgtagacaaagcttttaaactttttgatacctcgacaatggatgcagcaagatcagggataaatcaacagataaacataacaggcgagatggccaatgaaatcaagcaagcggaaacacagataaagagaagaatggggatcggagctcgattatcagagagaagactgatagaggatctggctagaatgggaatgaacgattcaatggtgaggagagctttgttgataatgcaccagagaggtgaagttgagtaccagcgagagagacgttctattgtccgcaaagcttgatcgtctaggcatgcaatctctcttctttagtagcagcgatgaccaaacaaaacaaaatatttaatattatcaagttaatttgtaggcaaaaagtagaaagagaagcttatgtcatgtgtatttgatgaagattcttagtaaacttttacgcttgcttcaaactaatgtattctccacctttgttgtccttagttaaaatgtcacgccaatgttagg

SEQ ID NO: 11594 - protein, 746 aa, Arabidopsis thaliana
ELFDKRERDREIRNGDEATMSGWDEGAVYYSDQPQFPEAGDAATISPHAVLTKFKEFIRNFEIEQNCFPYREALLDNPKRLVVHLEDLLSFDSDLPSLIRSAPADYLPVFEKAAGEVLTGLKMREANEGGVMEEPLTRDVQILLTSREDPVSMRLLGAQYISKLVKISGISIAASRVKAKATYVFLVCKNCKKTREVPCRPGLGGAIVPRSCDNIPQPGEEPCPLDPWMVVPDRSQYVDQQTLKLQENPEDVPTGELPRNMLLSVDRHLVQTIVPGTRLTVMGIYSIFQASSSSNSHKGAVAIRQPYIRVVGLEDTNEASSRGPANFTPDEEEEFKKFADSQDVYKNICTKIAPSIFGHEDVKRAAACLLFGGSRKSLPDGVKLRGDINVLLLGDPSTAKSQFLKFVEKTAPIAVYTSGKGSSAAGLTASVIRDSSTREFYLEGGAMVLADGGVVCIDEFDKMRPEDRVAIHEAMEQQTISIAKAGITTVLNSRTSVLAAANPPSGRYDDLKTAQDNIDLQTTILSRFDLIFIVKDIRKYSQDKEIASHIIRVHASANKFSDENTDSKEDNWLKRYIQYCRARCHPRLSKDAAENLQRKYVTIRMDMKRRAHETGEAAPIPITVRQLEAIVRLSESLAKMRLSHEATPDDVDKAFKLFDTSTMDAARSGINQQINITGEMANEIKQAETQIKRRMGIGARLSERRLIEDLARMGMNDSMVRRALLIMHQRGEVEYQRERRSIVRKA

SEQ ID NO: 11595 - protein, 727 aa, Arabidopsis thaliana
MSGWDEGAVYYSDQPQFPEAGDAATISPHAVLTKFKEFIRNFEIEQNCFPYREALLDNPKRLVVHLEDLLSFDSDLPSLIRSAPADYLPVFEKAAGEVLTGLKMREANEGGVMEEPLTRDVQILLTSREDPVSMRLLGAQYISKLVKISGISIAASRVKAKATYVFLVCKNCKKTREVPCRPGLGGAIVPRSCDNIPQPGEEPCPLDPWMVVPDRSQYVDQQTLKLQENPEDVPTGELPRNMLLSVDRHLVQTIVPGTRLTVMGIYSIFQASSSSNSHKGAVAIRQPYIRVVGLEDTNEASSRGPANFTPDEEEEFKKFADSQDVYKNICTKIAPSIFGHEDVKRAAACLLFGGSRKSLPDGVKLRGDINVLLLGDPSTAKSQFLKFVEKTAPIAVYTSGKGSSAAGLTASVIRDSSTREFYLEGGAMVLADGGVVCIDEFDKMRPEDRVAIHEAMEQQTISIAKAGITTVLNSRTSVLAAANPPSGRYDDLKTAQDNIDLQTTILSRFDLIFIVKDIRKYSQDKEIASHIIRVHASANKFSDENTDSKEDNWLKRYIQYCRARCHPRLSKDAAENLQRKYVTIRMDMKRRAHETGEAAPIPITVRQLEAIVRLSESLAKMRLSHEATPDDVDKAFKLFDTSTMDAARSGINQQINITGEMANEIKQAETQIKRRMGIGARLSERRLIEDLARMGMNDSMVRRALLIMHQRGEVEYQRERRSIVRKA

SEQ ID NO: 11596 - protein, 624 aa, Arabidopsis thaliana
MREANEGGVMEEPLTRDVQILLTSREDPVSMRLLGAQYISKLVKISGISIAASRVKAKATYVFLVCKNCKKTREVPCRPGLGGAIVPRSCDNIPQPGEEPCPLDPWMVVPDRSQYVDQQTLKLQENPEDVPTGELPRNMLLSVDRHLVQTIVPGTRLTVMGIYSIFQASSSSNSHKGAVAIRQPYIRVVGLEDTNEASSRGPANFTPDEEEEFKKFADSQDVYKNICTKIAPSIFGHEDVKRAAACLLFGGSRKSLPDGVKLRGDINVLLLGDPSTAKSQFLKFVEKTAPIAVYTSGKGSSAAGLTASVIRDSSTREFYLEGGAMVLADGGVVCIDEFDKMRPEDRVAIHEAMEQQTISIAKAGITTVLNSRTSVLAAANPPSGRYDDLKTAQDNIDLQTTILSRFDLIFIVKDIRKYSQDKEIASHIIRVHASANKFSDENTDSKEDNWLKRYIQYCRARCHPRLSKDAAENLQRKYVTIRMDMKRRAHETGEAAPIPITVRQLEAIVRLSESLAKMRLSHEATPDDVDKAFKLFDTSTMDAARSGINQQINITGEMANEIKQAETQIKRRMGIGARLSERRLIEDLARMGMNDSMVRRALLIMHQRGEVEYQRERRSIVRKA

SEQ ID NO: 11597 - DNA, 2004 bp, Arabidopsis thaliana
aaaaaaccctaaaatatacaaaaccctcaaattcagtctaccagcgaggatcgatgtcggagctcacagtatctcctttcacgcattaactcaatttatctgctaaaccctaaatagcttcacgccgtttttctaattctcaatcaaagcttcaccgccgccgtgtgttgttctttctccgagtcgtgttctctaatctcaggtgataaggatcaagatggagattagttcagaggataacaatcttatggagaaagttttgcctcctgttgagcaggagagtgatgttgagctggagactaaagttaagaaatatcttagaggagaaggtgctaatcttgagacattgaaagataagaaactaaagactcaacttgcttcacgagaaaagttgtatgggaagtctgccaaagctgctgctaaaatcgagaagtggctcttgcctgctgaggcaggttacttggagactgaaggtctagagaagacatggcgagtaaagcagacagatattgccaacgaagtagatatattaagttcaagaaaccaatatgacatagtgctcccagattttggcccgtacaaacttgattttactgcaagtggtcggcatatgttagctggtggtcgcaaaggtcaccttgctcttttagacatgatgaatatgagcttaattaaagagattcaggtaagagaaacagtacgcgatgttgcattcctgcacaatgatcaattctttgcagctgcacagaaaaagtatgcttatatttatgggagagatggaactgagctgcattgtttgaaggaacgtggtccagtggccagacttcggttcctaaagaaccatttcctgcttgcatcagtaaacatgtctgggcagctacattatcaagatgtaacccatggaggcatggtcgctagtatccgaacaggtaaaggccgaacagatgtaatggaagtgaatccttacaatagtgttgttggcttgggacattccggtggaactgtcacaatgtggaaacccactagccaagcacctcttgtccagatgcagtgtcaccctgggccagtgtcatctgtcgcatttcatccaaatggtcatctcatggctacatccggtaaagagcgtaaaatcaagatctgggatttacgtaaattcgaggaagttcagactattcacagttttcatgcaaaaacgctgagtttcagtcagaaaggtttgctagcagctggaactggatcgtttgttcagattttaggagattcgagtggtggttcttcacataactacactagatacatgaaccactcgatggtgaaaggttataatcgagaaggttatgttcagaccatatgaggatgttattggaattggtcactcgatgggttggtctagcattctaattccagggtctggagaacccaatttcgattcttgggtggctaatccatttgaaacatcgaaacagagacgggagaaggaagtccattcgcttcttgataaacttccacctgagacaatcatgctggacccttcaaagattggtgcgatgagaccctctaggaggaaagagaagccatcaagaggagagatagaagctgagaaggaggtggccatagaagcagcaaagagcactgagctgaagaacaagacgaaaggaaggaataagccgagcaagcggactaagaagaagaaagagatggtggagaatgcaaagcgaacattcccggagcaagagcacaataccgcgattaagaagagaagaatcgtagaagatgctgctgctgagctaccaacgagtttaaaaaggtttgccaggaaaaactgaatgggttttccaccttgaggcttgagcgttttgattatctttctcctcacttttggcaattttgtagtatgggaattgttacgaacttacgatattgaagttttgtttttagacaggaagacagaacatcgaactatgtaatgaggctatgttatattttctaattctattcaatatg

SEQ ID NO: 11598 - protein, 378 aa, Arabidopsis thaliana
MEISSEDNNLMEKVLPPVEQESDVELETKVKKYLRGEGANLETLKDKKLKTQLASREKLYGKSAKAAAKIEKWLLPAEAGYLETEGLEKTWRVKQTDIANEVDILSSRNQYDIVLPDFGPYKLDFTASGRHMLAGGRKGHLALLDMMNMSLIKEIQVRETVRDVAFLHNDQFFAAAQKKYAYIYGRDGTELHCLKERGPVARLRFLKNHFLLASVNMSGQLHYQDVTHGGMVASIRTGKGRTDVMEVNPYNSVVGLGHSGGTVTMWKPTSQAPLVQMQCHPGPVSSVAFHPNGHLMATSGKERKIKIWDLRKFEEVQTIHSFHAKTLSFSQKGLLAAGTGSFVQILGDSSGGSSHNYTRYMNHSMVKGYNREGYVQTI

SEQ ID NO: 11599 - protein, 368 aa, Arabidopsis thaliana
MEKVLPPVEQESDVELETKVKKYLRGEGANLETLKDKKLKTQLASREKLYGKSAKAAAKIEKWLLPAEAGYLETEGLEKTWRVKQTDIANEVDILSSRNQYDIVLPDFGPYKLDFTASGRHMLAGGRKGHLALLDMMNMSLIKEIQVRETVRDVAFLHNDQFFAAAQKKYAYIYGRDGTELHCLKERGPVARLRFLKNHFLLASVNMSGQLHYQDVTHGGMVASIRTGKGRTDVMEVNPYNSVVGLGHSGGTVTMWKPTSQAPLVQMQCHPGPVSSVAFHPNGHLMATSGKERKIKIWDLRKFEEVQTIHSFHAKTLSFSQKGLLAAGTGSFVQILGDSSGGSSHNYTRYMNHSMVKGYNREGYVQTI

SEQ ID NO: 11600 - protein, 247 aa, Arabidopsis thaliana
MLAGGRKGHLALLDMMNMSLIKEIQVRETVRDVAFLHNDQFFAAAQKKYAYIYGRDGTELHCLKERGPVARLRFLKNHFLLASVNMSGQLHYQDVTHGGMVASIRTGKGRTDVMEVNPYNSVVGLGHSGGTVTMWKPTSQAPLVQMQCHPGPVSSVAFHPNGHLMATSGKERKIKIWDLRKFEEVQTIHSFHAKTLSFSQKGLLAAGTGSFVQILGDSSGGSSHNYTRYMNHSMVKGYNREGYVQTI

SEQ ID NO: 11601 - DNA, 1739 bp, Arabidopsis thaliana
aacaaaaaatggcagaacttattccttggtactacacttcagggtcagggatcgtacttgtacttcaaaccatttttctcttctcgatcgtacgtgctgatttaccaggctcatgggaactcattgtacaagacgccggtatagcttctatgcacacggcggtgacccggttcaacacggtcatccttctagaccgaactaacatcggaccgtcgagaaaggctcttgaccgtcaccggtgccggagagacccaaaagacgccgctttgaaacgcgattgttacgctcactcggttctgttcgaccttggtacaaatcagatcagaccactgatgatacaaaccgacacgtggtgctcgtcgggccagtttttatccgacggatcgttgctacaaacgggtggggataaagacgggtttaaaaagatacgtaaattcgaaccctgtgacccgaacgaaacgtgcgattgggtggagcttcaagataccgaattgataaccggacgctggtacgcttctaaccagatattaccggatggttcggttatcatcgtcggtggtagaggaactaatacggttgagtattaccctccacgcgaaaacggtgccgttccgtttcagtttcttgctgacgtggaagacaaacaaatggataatctctatccgtacgttcatctcctccccgacgacgacggtggcaatctcttcatcttcgccaacagtcgcgccgttaaatacgatcaccggataaacgccgtcgtgaaagagtatccaccgttagacggtggtccgaggaattatccgtcaggtggatcatcggcgatgctagctatccaaggagatttcaccacagcggagattctaatctgcggcggagcacaatccggagccttcacagcacgtgcaattgatgctccggcgcatggaacctgcggacgaatcgtagctaccgcggcggatcctgtttgggtgacggaggagatgccgttcgggagaatcatgggagatatggtgaatttaccgacgggagagattctgatcataaacggagctcaagacggaagccaaggattcgaaatgggatccgatccgtgtttatacccgcttttataccgacccgatcaaccaattggtttacgattcatgacgttgaacccaggaactgtaccgagaatgtaccattccacggcgaatcttttaccggacggtagaattcttctcgccggaagcaatcctcactatttctacaaattcaacgccgaattcccaacggagctacggatcgaagcgttttcaccggagtatctgtcaccggatcgagctaatctccgaccagagatccaagaaatcccgcagatcatacggtacggagaggttttcgacgtgttcgtgaccgtgccgttgccggtggtggggataattcagatgaattggggaagtgcgccttttgcgactcattcgttttctcaaggtcaacggctcgttaagttgaccgttgctccgtctgtgcctgacggagtaggtcgttataggattcagtgtacggctccacctaacggcgccgtttctccgcctgggtattatatggccttcgctgttaaccagggagttcctagcattgctcgatggatacgaatagtttcttgatttaaaaccagaggagatatttaaaatgttaatttgttaaatagttaaacacatcatgtaatataaatattttcatggaaaaacttactccgc

SEQ ID NO: 11602 - protein, 547 aa, Arabidopsis thaliana
QKMAELIPWYYTSGSGIVLVLQTIFLFSIVRADLPGSWELIVQDAGIASMHTAVTRFNTVILLDRTNIGPSRKALDRHRCRRDPKDAALKRDCYAHSVLFDLGTNQIRPLMIQTDTWCSSGQFLSDGSLLQTGGDKDGFKKIRKFEPCDPNETCDWVELQDTELITGRWYASNQILPDGSVIIVGGRGTNTVEYYPPRENGAVPFQFLADVEDKQMDNLYPYVHLLPDDDGGNLFIFANSRAVKYDHRINAVVKEYPPLDGGPRNYPSGGSSAMLAIQGDFTTAEILICGGAQSGAFTARAIDAPAHGTCGRIVATAADPVWVTEEMPFGRIMGDMVNLPTGEILIINGAQDGSQGFEMGSDPCLYPLLYRPDQPIGLRFMTLNPGTVPRMYHSTANLLPDGRILLAGSNPHYFYKFNAEFPTELRIEAFSPEYLSPDRANLRPEIQEIPQIIRYGEVFDVFVTVPLPVVGIIQMNWGSAPFATHSFSQGQRLVKLTVAPSVPDGVGRYRIQCTAPPNGAVSPPGYYMAFAVNQGVPSIARWIRIVS

SEQ ID NO: 11603 - protein, 545 aa, Arabidopsis thaliana
MAELIPWYYTSGSGIVLVLQTIFLFSIVRADLPGSWELIVQDAGIASMHTAVTRFNTVILLDRTNIGPSRKALDRHRCRRDPKDAALKRDCYAHSVLFDLGTNQIRPLMIQTDTWCSSGQFLSDGSLLQTGGDKDGFKKIRKFEPCDPNETCDWVELQDTELITGRWYASNQILPDGSVIIVGGRGTNTVEYYPPRENGAVPFQFLADVEDKQMDNLYPYVHLLPDDDGGNLFIFANSRAVKYDHRINAVVKEYPPLDGGPRNYPSGGSSAMLAIQGDFTTAEILICGGAQSGAFTARAIDAPAHGTCGRIVATAADPVWVTEEMPFGRIMGDMVNLPTGEILIINGAQDGSQGFEMGSDPCLYPLLYRPDQPIGLRFMTLNPGTVPRMYHSTANLLPDGRILLAGSNPHYFYKFNAEFPTELRIEAFSPEYLSPDRANLRPEIQEIPQIIRYGEVFDVFVTVPLPVVGIIQMNWGSAPFATHSFSQGQRLVKLTVAPSVPDGVGRYRIQCTAPPNGAVSPPGYYMAFAVNQGVPSIARWIRIVS

SEQ ID NO: 11604 - protein, 498 aa, Arabidopsis thaliana
MHTAVTRFNTVILLDRTNIGPSRKALDRHRCRRDPKDAALKRDCYAHSVLFDLGTNQIRPLMIQTDTWCSSGQFLSDGSLLQTGGDKDGFKKIRKFEPCDPNETCDWVELQDTELITGRWYASNQILPDGSVIIVGGRGTNTVEYYPPRENGAVPFQFLADVEDKQMDNLYPYVHLLPDDDGGNLFIFANSRAVKYDHRINAVVKEYPPLDGGPRNYPSGGSSAMLAIQGDFTTAEILICGGAQSGAFTARAIDAPAHGTCGRIVATAADPVWVTEEMPFGRIMGDMVNLPTGEILIINGAQDGSQGFEMGSDPCLYPLLYRPDQPIGLRFMTLNPGTVPRMYHSTANLLPDGRILLAGSNPHYFYKFNAEFPTELRIEAFSPEYLSPDRANLRPEIQEIPQIIRYGEVFDVFVTVPLPVVGIIQMNWGSAPFATHSFSQGQRLVKLTVAPSVPDGVGRYRIQCTAPPNGAVSPPGYYMAFAVNQGVPSIARWIRIVS

SEQ ID NO: 11605 - DNA, 2054 bp, Arabidopsis thaliana
tcactagtcccccccccccccccggttgtttacgagaaaagcggattacgggtacgcttcttctaagataaatctctccccgattctctctttttctcgctagatactctttttcttcaattagggtttcttctcgcttgccttttaattctctccagctgatcagatctccgttaccgatggagtctactgctaacgcactcgtcgtcaaggtgagctatggaggtgtgcttaggcgtttcagggtgcctgttaaagctaatggacagcttgatcttgaaatggctggtcttaaggaaaagatcgctgctctctttaacctctctgcggatgctgaattgagtctgacttactctgatgaggatggggatgtggttgcccttgttgatgacaacgatctctttgatgttactaatcagcgtcttaagttcttaaagatcaatgtgaacgctggcgtgtccactaactctgctgctccagagagtagtgggagttccacacctgcgggtatgcctaacccggtttccaaaatccagaagggtataaatgatgttctgatggctgtacctaatccgatgcgtgacaccatatcaaaggtgtacatggaccttgcatccaaggcctcaacttctagtcctgtagttggtgagatgcttgattgcatttccaagctagggcagctctcaattcctcaggaaagtagtccttgctcacctgttaccaagcctggttcttcaggtgcttccctgagcagggatgttccttccgctggtggaaagaaggatatctctgagaggacccagaccggaaggaaacctgttaatctgaatgaacccactggcgctcattcaaagacttctggtcatgtaccaaactcgtctggactgggtgctaatttcaacgagtgtccctttagtggcagtaccatgaattactcctgtccaaatccagttaacctcaacaagcatcctcgtcgtgtttgtcattccaaaaagagcaccaatggtgattactggacttcattgggtgtattccataagggcatccgttgtgacggatgtggagttcttccaattactgggcctagatttaagtcgaaagttaaagaagactatgatctgtgcaccatctgctattcggtgatgggtaacgagggggattacacaagaatggataagcctgtatccgttcaacatctgcatccttttagaggaccgtttacccaatttcctaatccttggttgagccaccctgtgccacgagcaaccaatggaggtgcacctctcaggtgtactcgccctaaactagacagtcggtttgtccttgatgtgaatgtaattgatggaaccgttgttgctccatccgccccatttactaagatttggaaaatgaggaacagtggttcgctggtgtggccacagggcacacagattgtctggatcggtggggacaggttctgcaactccttgtcagttgatttacagattccaaaggagggtgtgcctatctatagtgaacttgacgtcaaagttgattttgttgcaccagagttacctggtcgatacatttcttattggaggatggctacctctgacggtgctaagtttgggcaacgtgtttgggtgttgatacatgttgatgcatctctgaagaattctgttgtgaatgagtttcatggactgaaccttaatgcctccccctcccatgatgagaattttccaagcgaatttctagggattatgaattatgagtcagctcaaccgggcagctccagtgtcaatcctgggaccgtgaaaggtactgatctagagggcgaagttggtgaaacacaggccgtggaaaaagaaaaccttttggttggtgaagctcatcctgctatccctcacggtcattctccttcatcttcatcttcttcatttaacatggtcgacttcccaagcatgcctgctgttgaggtcttgtctggtggttcttcatctactacaaaagacgtgccagttcctcttcaggaggatatagaaaagaatgacgtggagataaccatgctcaaggag

SEQ ID NO: 11606 - protein, 625 aa, Arabidopsis thaliana
MESTANALVVKVSYGGVLRRFRVPVKANGQLDLEMAGLKEKIAALFNLSADAELSLTYSDEDGDVVALVDDNDLFDVTNQRLKFLKINVNAGVSTNSAAPESSGSSTPAGMPNPVSKIQKGINDVLMAVPNPMRDTISKVYMDLASKASTSSPVVGEMLDCISKLGQLSIPQESSPCSPVTKPGSSGASLSRDVPSAGGKKDISERTQTGRKPVNLNEPTGAHSKTSGHVPNSSGLGANFNECPFSGSTMNYSCPNPVNLNKHPRRVCHSKKSTNGDYWTSLGVFHKGIRCDGCGVLPITGPRFKSKVKEDYDLCTICYSVMGNEGDYTRMDKPVSVQHLHPFRGPFTQFPNPWLSHPVPRATNGGAPLRCTRPKLDSRFVLDVNVIDGTVVAPSAPFTKIWKMRNSGSLVWPQGTQIVWIGGDRFCNSLSVDLQIPKEGVPIYSELDVKVDFVAPELPGRYISYWRMATSDGAKFGQRVWVLIHVDASLKNSVVNEFHGLNLNASPSHDENFPSEFLGIMNYESAQPGSSSVNPGTVKGTDLEGEVGETQAVEKENLLVGEAHPAIPHGHSPSSSSSSFNMVDFPSMPAVEVLSGGSSSTTKDVPVPLQEDIEKNDVEITMLKE

SEQ ID NO: 11607 - protein, 591 aa, Arabidopsis thaliana
MAGLKEKIAALFNLSADAELSLTYSDEDGDVVALVDDNDLFDVTNQRLKFLKINVNAGVSTNSAAPESSGSSTPAGMPNPVSKIQKGINDVLMAVPNPMRDTISKVYMDLASKASTSSPVVGEMLDCISKLGQLSIPQESSPCSPVTKPGSSGASLSRDVPSAGGKKDISERTQTGRKPVNLNEPTGAHSKTSGHVPNSSGLGANFNECPFSGSTMNYSCPNPVNLNKHPRRVCHSKKSTNGDYWTSLGVFHKGIRCDGCGVLPITGPRFKSKVKEDYDLCTICYSVMGNEGDYTRMDKPVSVQHLHPFRGPFTQFPNPWLSHPVPRATNGGAPLRCTRPKLDSRFVLDVNVIDGTVVAPSAPFTKIWKMRNSGSLVWPQGTQIVWIGGDRFCNSLSVDLQIPKEGVPIYSELDVKVDFVAPELPGRYISYWRMATSDGAKFGQRVWVLIHVDASLKNSVVNEFHGLNLNASPSHDENFPSEFLGIMNYESAQPGSSSVNPGTVKGTDLEGEVGETQAVEKENLLVGEAHPAIPHGHSPSSSSSSFNMVDFPSMPAVEVLSGGSSSTTKDVPVPLQEDIEKNDVEITMLKE

SEQ ID NO: 11608 - protein, 515 aa, Arabidopsis thaliana
MPNPVSKIQKGINDVLMAVPNPMRDTISKVYMDLASKASTSSPVVGEMLDCISKLGQLSIPQESSPCSPVTKPGSSGASLSRDVPSAGGKKDISERTQTGRKPVNLNEPTGAHSKTSGHVPNSSGLGANFNECPFSGSTMNYSCPNPVNLNKHPRRVCHSKKSTNGDYWTSLGVFHKGIRCDGCGVLPITGPRFKSKVKEDYDLCTICYSVMGNEGDYTRMDKPVSVQHLHPFRGPFTQFPNPWLSHPVPRATNGGAPLRCTRPKLDSRFVLDVNVIDGTVVAPSAPFTKIWKMRNSGSLVWPQGTQIVWIGGDRFCNSLSVDLQIPKEGVPIYSELDVKVDFVAPELPGRYISYWRMATSDGAKFGQRVWVLIHVDASLKNSVVNEFHGLNLNASPSHDENFPSEFLGIMNYESAQPGSSSVNPGTVKGTDLEGEVGETQAVEKENLLVGEAHPAIPHGHSPSSSSSSFNMVDFPSMPAVEVLSGGSSSTTKDVPVPLQEDIEKNDVEITMLKE

SEQ ID NO: 11609 - DNA, 1607 bp, Arabidopsis thaliana
gaacgacctctgcctctcatgacaaatattcaactgattccttcttcatcttcaaattctctctaattcgaatctctcaaagttcaaatttcaaattccgaagaagaagaagaagaaacactcgaaggtttttgtgatggatccatgtccatttgtacggctaacaatagattcactagctttgagactaccggagacagcgacgaacaagcaaatcggcggcgaagtacatccttcttctacgccgtgttactgcaaactccggatcaaacatttcccttcacagaaagcacttctccctctctcttccttctccgacgcttcatctccaccggaatcttccacttcagctccgggatttcacctcgacgccgacgcgatccgacgaatttccggtaagaagatctcactccgtgtctctgtttacgccggtcgtactggtcacacttgcggcgtcgcttcagggaaacttctaggtaaagtcgaagtagcggtggatctcgcggcggcgttgtctagaaccgtcgcgtttcataacggatggaagaaactcggtggagatggagataaaccgtcggctagattacatctattggtttgtgatgaaccggatcctcggtttgtgtttcaatttggaggtgaaccggaatgtagtcctgtggtttaccagattcaagataatctcaaacaacctgtcttcagctgcaaattcagctccgatcgtaacggaagatctcggtctctaccatcaggatttacatatagtagtagaggatggattacaagaacattatcaggtgaccagtgggaaaagaaacaagcgagagaacgtaaaggttggatgataacgatccatgatctttcgggatcacctgtagcagcagcttcaatgatcactcctttcgtggcatctccagggtctgatcgtgtttctagatcaaaccctggtgcgtggctaatccttaggcctcatgggacttgtgtcagtagttggaaaccgtggggacgtcttgaggcttggcgtgagagaggagctattgatggattgggttacaagttcgagctcgtgagggataacagtactagcaccgaaggagaagggaaagtgagcaagcctgtggtccacgtgggagcacagcatgtgacttgcatggccgacgcagctctcttcgttgctctctctgccgccgttgatctaagtgtcgacgcgtgtcagctcttctctcgtaagcttcgtaaagagctctgtcacgacgaccaaagctccctcacgtgaaaatatgttatctcatcagtgaagatacatacgtacattttgacttgacaaaagaccaatccatgaacttatgacaaagctctcttcgtcgctagctatctcggtttttcattttttttgagggatcaatttgatatgaaagtcgacaaagctgtacagacaacaatgatctttgtgttgtttgcaactttgtatcatatttatttattttttaattctttttcttctgattctctccatatgtgtgttgattatttttattatttcatatcttcattctttttaatacattggggttattcttataccaaatatactcactttctttgtg

SEQ ID NO: 11610 - protein, 379 aa, Arabidopsis thaliana
MDPCPFVRLTIDSLALRLPETATNKQIGGEVHPSSTPCYCKLRIKHFPSQKALLPLSSFSDASSPPESSTSAPGFHLDADAIRRISGKKISLRVSVYAGRTGHTCGVASGKLLGKVEVAVDLAAALSRTVAFHNGWKKLGGDGDKPSARLHLLVCDEPDPRFVFQFGGEPECSPVVYQIQDNLKQPVFSCKFSSDRNGRSRSLPSGFTYSSRGWITRTLSGDQWEKKQARERKGWMITIHDLSGSPVAAASMITPFVASPGSDRVSRSNPGAWLILRPHGTCVSSWKPWGRLEAWRERGAIDGLGYKFELVRDNSTSTEGEGKVSKPVVHVGAQHVTCMADAALFVALSAAVDLSVDACQLFSRKLRKELCHDDQSSLT

SEQ ID NO: 11611 - DNA, 1511 bp, Arabidopsis thaliana
ggtgacaacaattgaggttttccggaggaacagccattgactctctcgataactgtatccgtgttcttgttagaagatggaattggacccagacgatgttttcagagatgaagacgaagacccagaaaacgatttctttcaggaaaaagaggcttccaaagaatttgtagtctatctaattgatgcttctcccaaaatgttctgctctacttgcccctctgaggaagaggacaaacaagaaagtcattttcacattgctgttagttgcattgctcagtcactcaaggctcatattatcaatcggtcaaatgatgaaatagctatatgtttctttaacactcgtgaaaagaagaatcttcaggatctaaatggtgtttatgtctttaatgttccagagagggatagtattgaccgtccaacagcgaggctgattaaagaattcgatctcatagaagaatcatttgataaggaaattggcagtcaaactggtattgtctcagattctcgggagaattccctttatagtgctctctgggttgcacaagcactactgcgcaaaggatctttaaagacagcagataaacgcatgtttctattcactaatgaagatgatccttttgggagtatgaggatctctgttaaagaggatatgacgaggacgacgttgcagagagctaaggatgcacaagaccttggcatctcaatcgagcttctaccactcagtcaacctgataagcaattcaatataactctcttctacaaggatctaattggattaaacagtgatgaacttacggagttcatgccatcagttggacagaaattagaggacatgaaggaccaactgaagaagcgtgtacttgccaagagaatagcaaaaagaattacgtttgtgatctgtgatggcttgtctattgaactgaatggttatgctttactccgtccggctattcctggcagcataacctggcttgactctacaactaatcttcctgtgaaggtggaaagatcatatatctgtacggacactggagctataatgcaagatcctatacaacggattcagccttacaaaaatcagaatatcatgtttactgtggaagagctatcccaagtaaaaagaatctcaactggacacttaagactgctggggttcaagccacttagttgcctcaaagattatcacaatttgaagccttctacatttctctatccaagtgataaggaagttatagggagcactcgtgcattcattgccttgcatagatccatgatacagcttgaacgttttgctgttgcattttatggcggtactacacctccgagattggttgctcttgttgctcaggatgaaatcgagagtgatggtggtcaagtggagccaccagggataaacatgatatatcttccatatgataatgatattagagatatcgacgagttgcattcaaaaccaggtgtagctgctcctcgcgcatcagatgatcagcttaaaaaagcatagaactagt

SEQ ID NO: 11612 - protein, 475 aa, Arabidopsis thaliana
MELDPDDVFRDEDEDPENDFFQEKEASKEFVVYLIDASPKMFCSTCPSEEEDKQESHFHIAVSCIAQSLKAHIINRSNDEIAICFFNTREKKNLQDLNGVYVFNVPERDSIDRPTARLIKEFDLIEESFDKEIGSQTGIVSDSRENSLYSALWVAQALLRKGSLKTADKRMFLFTNEDDPFGSMRISVKEDMTRTTLQRAKDAQDLGISIELLPLSQPDKQFNITLFYKDLIGLNSDELTEFMPSVGQKLEDMKDQLKKRVLAKRIAKRITFVICDGLSIELNGYALLRPAIPGSITWLDSTTNLPVKVERSYICTDTGAIMQDPIQRIQPYKNQNIMFTVEELSQVKRISTGHLRLLGFKPLSCLKDYHNLKPSTFLYPSDKEVIGSTRAFIALHRSMIQLERFAVAFYGGTTPPRLVALVAQDEIESDGGQVEPPGINMIYLPYDNDIRDIDELHSKPGVAAPRASDDQLKKA

SEQ ID NO: 11613 - protein, 435 aa, Arabidopsis thaliana
MFCSTCPSEEEDKQESHFHIAVSCIAQSLKAHIINRSNDEIAICFFNTREKKNLQDLNGVYVFNVPERDSIDRPTARLIKEFDLIEESFDKEIGSQTGIVSDSRENSLYSALWVAQALLRKGSLKTADKRMFLFTNEDDPFGSMRISVKEDMTRTTLQRAKDAQDLGISIELLPLSQPDKQFNITLFYKDLIGLNSDELTEFMPSVGQKLEDMKDQLKKRVLAKRIAKRITFVICDGLSIELNGYALLRPAIPGSITWLDSTTNLPVKVERSYICTDTGAIMQDPIQRIQPYKNQNIMFTVEELSQVKRISTGHLRLLGFKPLSCLKDYHNLKPSTFLYPSDKEVIGSTRAFIALHRSMIQLERFAVAFYGGTTPPRLVALVAQDEIESDGGQVEPPGINMIYLPYDNDIRDIDELHSKPGVAAPRASDDQLKKA

SEQ ID NO: 11614 - protein, 305 aa, Arabidopsis thaliana
MFLFTNEDDPFGSMRISVKEDMTRTTLQRAKDAQDLGISIELLPLSQPDKQFNITLFYKDLIGLNSDELTEFMPSVGQKLEDMKDQLKKRVLAKRIAKRITFVICDGLSIELNGYALLRPAIPGSITWLDSTTNLPVKVERSYICTDTGAIMQDPIQRIQPYKNQNIMFTVEELSQVKRISTGHLRLLGFKPLSCLKDYHNLKPSTFLYPSDKEVIGSTRAFIALHRSMIQLERFAVAFYGGTTPPRLVALVAQDEIESDGGQVEPPGINMIYLPYDNDIRDIDELHSKPGVAAPRASDDQLKKA

SEQ ID NO: 11615 - DNA, 1242 bp, Arabidopsis thaliana
gggcaacaatacaaacaaatctcctctcttctctatcttcttccccatttctctgaaaaccctaatttctccatctctcaatctctctgtgtttgtatctctcatctctgtttgagagatgataaggtaacttcaaagcatcctcgtgaattcatcttgtaattacaggattttaattcgagataaatggcgacaaatgcgtgccttgagtccgattcgcttctacctccacggaagcgtttactcgccggattcaagaaccagaactcgagaatcagcaatgaatctccgagtcctcctttcgcttcttcgtcctcgtctactacaacttcaaatggttcctctgcttcagcagttgtgcacactcatcatctcgaccatctactcaatgaccagactcggtccccggaagagcttgctcaggcgtcgaaagcaaccgctgctttagctgttaaggttgcaaaggcggcgagagctactgctaatgagaaggccatcattgcttctaaagcagtggctgcagccaagaatgcgttggaattgtttgcttcttttcccgcagctgagacggtttcttgtgaagagcctaggttgattcgagctataaacaattctcctagagtcttgacggattgttctggtcacagaaacaagaagcaaaagactctgactagtactatgtacgatgttgctggtgttgcggattcagatgacggaagcagagtaaacgggaagctgctcttatgcgataacacgctaaaggagaaaacagaggaagagagtagctcattagggaaaagaagaggaagagtgaagctccctttgagcatgtgtgcctacaaggatcaagaaaacggtatcacattagaggaaaacaatctaagtgtaagtaagtcggaaggttataatggtggtgtggctcaggttatagaacgaccatcatggaagtgtcaggacttaaagtcaccggaatgtgtgaagcagaacaaagttgtacgttcatagtcttcttatatgtatttacacctaaaagaggtaagaaggtgcagattcaacagcattgtcattttcagtacaatcttaatgttgtttatttttatcttgttttgcttttttgggtaatgtgtttgattttatgttgtatattttgggaataatatctagatacatagattttgtatatgtatgttggttgtttaatcagtgtaagtgttgttattaaagtgatgactttttgttgtt

SEQ ID NO: 11616 - protein, 272 aa, Arabidopsis thaliana
MATNACLESDSLLPPRKRLLAGFKNQNSRISNESPSPPFASSSSSTTTSNGSSASAVVHTHHLDHLLNDQTRSPEELAQASKATAALAVKVAKAARATANEKAIIASKAVAAAKNALELFASFPAAETVSCEEPRLIRAINNSPRVLTDCSGHRNKKQKTLTSTMYDVAGVADSDDGSRVNGKLLLCDNTLKEKTEEESSSLGKRRGRVKLPLSMCAYKDQENGITLEENNLSVSKSEGYNGGVAQVIERPSWKCQDLKSPECVKQNKVVRS

SEQ ID NO: 11617 - DNA, 1694 bp, Arabidopsis thaliana
gcaccaggagctcactaatccccccccccccccccatcgcttcttccgaaagctttcacatttgatatcaaaatcgagaaacaaaaattgaaaacaatctgtttcaccaaaaaaagaacaaaatgcatgggttcgatttcaaagagatccaggagaagatctccgatagctttcgtccatggcaacgctcttttcaattctgggttcgagctactaatatctacacaggctacaaggtgtttcaacttcgagtaagtttagtgaaagatgcaaagaagcaagaggaaatgtgggaaagacaacatgaacaagctgctgataagatttacttcatgtgctctgatcttggtggtttcttccttaagattgctcaacttttagcaaaacctgacatggcaccagctgcgtgggtgaaaaagcttgtcactttgtgtgatcaagctcctgcgacgccgtttgatgcgattcaacttgttctagagaaggagttaggtaaaagcattggtgaaatctttgaaacgtttgatgaaaagcctcttggttctgcttctattgctcaggttcaacatcctggcattgaaagattgatgatgacagacataagaaacttgcaactattcgccttatacatgcagagaacagatatcaaatttgacctgcattccataacaaaggaaatggagaaacagattggttatgaatttgacttcaaaagggaggccaatgcaatggaaagaattcgatgttttctttatgagaacaacaaaaagtctcctgttttggtaccaagagttctgcgagatatggtgactaagagggttttggtgatggaatacattaatggaattccaatcctgagcattggtgatgagatggctaaaagagggataaatcctcatggtaagattgcagaggcagcaaagcacaatatacttaacagtttatcccgtgcgtatggccaaatgatactgaaaagtggtttctttcatgcggatccacatcctggaaatatcttgatttgcaaaggtcaagaggttgcattgctggactatggtcaagtgaaggaactacccaacaagttgagacttggttatgcaaatttggtcattgccatggctgataacaatgcttcacgagtatcacagagcttttgggaaatgggtttacatacagtggccaagtgtgagaatgagcagcaagaacttctgcggttagcacaaacactttttgatacaaagatgcctactggtcagacagttttgcaacctttctcagatgactcttcgattaaaaagatagccgttgagacatttccagaggaactgttctctgtacttcgcactgtggttctgttaagaggactcagtgttgggatgggagttaattattcgtgtgcagaacaatggagagcaatggccgaagaggctttacttgcatctggaagagtgacaagagatggcaaagaaagatctcgtagacgggcttctctacgaaggctacgcacaggaagttaggaaaaagataggagtatttctcatcacttagactctcccatgagcaggatctgagcttttttcatttattgttctttcttttgtgagaatttgaatgataggagaagttggataacacttgaatgtaattggctgatataaaattatgatggaagatttgtaaatcaagatttaattcgc

SEQ ID NO: 11618 - protein, 463 aa, Arabidopsis thaliana
MHGFDFKEIQEKISDSFRPWQRSFQFWVRATNIYTGYKVFQLRVSLVKDAKKQEEMWERQHEQAADKIYFMCSDLGGFFLKIAQLLAKPDMAPAAWVKKLVTLCDQAPATPFDAIQLVLEKELGKSIGEIFETFDEKPLGSASIAQVQHPGIERLMMTDIRNLQLFALYMQRTDIKFDLHSITKEMEKQIGYEFDFKREANAMERIRCFLYENNKKSPVLVPRVLRDMVTKRVLVMEYINGIPILSIGDEMAKRGINPHGKIAEAAKHNILNSLSRAYGQMILKSGFFHADPHPGNILICKGQEVALLDYGQVKELPNKLRLGYANLVIAMADNNASRVSQSFWEMGLHTVAKCENEQQELLRLAQTLFDTKMPTGQTVLQPFSDDSSIKKIAVETFPEELFSVLRTVVLLRGLSVGMGVNYSCAEQWRAMAEEALLASGRVTRDGKERSRRRASLRRLRTGS

SEQ ID NO: 11619 - protein, 408 aa, Arabidopsis thaliana
MWERQHEQAADKIYFMCSDLGGFFLKIAQLLAKPDMAPAAWVKKLVTLCDQAPATPFDAIQLVLEKELGKSIGEIFETFDEKPLGSASIAQVQHPGIERLMMTDIRNLQLFALYMQRTDIKFDLHSITKEMEKQIGYEFDFKREANAMERIRCFLYENNKKSPVLVPRVLRDMVTKRVLVMEYINGIPILSIGDEMAKRGINPHGKIAEAAKHNILNSLSRAYGQMILKSGFFHADPHPGNILICKGQEVALLDYGQVKELPNKLRLGYANLVIAMADNNASRVSQSFWEMGLHTVAKCENEQQELLRLAQTLFDTKMPTGQTVLQPFSDDSSIKKIAVETFPEELFSVLRTVVLLRGLSVGMGVNYSCAEQWRAMAEEALLASGRVTRDGKERSRRRASLRRLRTGS

SEQ ID NO: 11620 - protein, 393 aa, Arabidopsis thaliana
MCSDLGGFFLKIAQLLAKPDMAPAAWVKKLVTLCDQAPATPFDAIQLVLEKELGKSIGEIFETFDEKPLGSASIAQVQHPGIERLMMTDIRNLQLFALYMQRTDIKFDLHSITKEMEKQIGYEFDFKREANAMERIRCFLYENNKKSPVLVPRVLRDMVTKRVLVMEYINGIPILSIGDEMAKRGINPHGKIAEAAKHNILNSLSRAYGQMILKSGFFHADPHPGNILICKGQEVALLDYGQVKELPNKLRLGYANLVIAMADNNASRVSQSFWEMGLHTVAKCENEQQELLRLAQTLFDTKMPTGQTVLQPFSDDSSIKKIAVETFPEELFSVLRTVVLLRGLSVGMGVNYSCAEQWRAMAEEALLASGRVTRDGKERSRRRASLRRLRTGS

SEQ ID NO: 11621 - DNA, 1299 bp, Arabidopsis thaliana
cttccttattttctcggcaacgaagcaaaaagggtaatttttgtcggttcaattcacaagctagttttctcgatctctctctggatctatagctgatctgcattgcggcttgtagctggtatttgttccatagttgtaagctatggtgacaatcaggagtggttcaatcgtgattttggttctgctggctgtatcatttctggccttggttgccaatggagaggacaaaacgattaaagtgaagaaagtgaggggaaataaggtgtgcacgcaaggatgggaatgcagctggtggtctaaatactgctgtaaccagacgatatcagattactttcaggtttatcagtttgagcaactcttttccaaaaggaacactcccattgctcatgctgttggtttctgggactaccagtctttcattactgctgctgccctctttgagcctcttggttttggtaccactggaggaaagctcatgggacagaaagaaatggctgcctttctcggtcatgtagccagcaaaacgtcctgtggctatggagttgcaacaggagggcctttagcttggggtctgtgctacaacagggaaatgagcccaatgcaatcctactgtgacgagtcctggaaattcaagtacccctgcagccctggagctgaatactacggacgcggtgccttacccatttactggaacttcaactacggagcagctggggaagccctgaaagctgatctcttgaaccaccctgagtacattgagcaaaacgcgacacttgcattccaagctgcaatctggagatggatgactccaatcaagagagctcagccctcagctcacgacatctttgtcggaaactggaaacctacgaagaacgacactttgtccaagcgtggcccgacttttggcagcaccatgaacgtcctctacggagagtacacatgtggtcaaggttccattgatccaatgaacaacataatctcacactacttatacttccttgacctcatgggtattggaagagaagacgcgggaccaaacgatgagctcagctgcgcagaacagaaacctttcaacccttcaactgtaccttcctcttcctcttcgtaagtcttatgatatatcgccgttgctctcaagtctctcttgcttaatgttacgtaataagtgaaattgcttgtggtaaaaaagaagaagtgtgtttttgtccctctagaacttataatgcaaacaacattacattttatatttttctgtatgtaaaaccatatttaattattgtattggaagaatgtgtgtac

SEQ ID NO: 11622 - protein, 321 aa, Arabidopsis thaliana
MVTIRSGSIVILVLLAVSFLALVANGEDKTIKVKKVRGNKVCTQGWECSWWSKYCCNQTISDYFQVYQFEQLFSKRNTPIAHAVGFWDYQSFITAAALFEPLGFGTTGGKLMGQKEMAAFLGHVASKTSCGYGVATGGPLAWGLCYNREMSPMQSYCDESWKFKYPCSPGAEYYGRGALPIYWNFNYGAAGEALKADLLNHPEYIEQNATLAFQAAIWRWMTPIKRAQPSAHDIFVGNWKPTKNDTLSKRGPTFGSTMNVLYGEYTCGQGSIDPMNNIISHYLYFLDLMGIGREDAGPNDELSCAEQKPFNPSTVPSSSSS

SEQ ID NO: 11623 - protein, 210 aa, Arabidopsis thaliana
MGQKEMAAFLGHVASKTSCGYGVATGGPLAWGLCYNREMSPMQSYCDESWKFKYPCSPGAEYYGRGALPIYWNFNYGAAGEALKADLLNHPEYIEQNATLAFQAAIWRWMTPIKRAQPSAHDIFVGNWKPTKNDTLSKRGPTFGSTMNVLYGEYTCGQGSIDPMNNIISHYLYFLDLMGIGREDAGPNDELSCAEQKPFNPSTVPSSSSS

SEQ ID NO: 11624 - protein, 205 aa, Arabidopsis thaliana
MAAFLGHVASKTSCGYGVATGGPLAWGLCYNREMSPMQSYCDESWKFKYPCSPGAEYYGRGALPIYWNFNYGAAGEALKADLLNHPEYIEQNATLAFQAAIWRWMTPIKRAQPSAHDIFVGNWKPTKNDTLSKRGPTFGSTMNVLYGEYTCGQGSIDPMNNIISHYLYFLDLMGIGREDAGPNDELSCAEQKPFNPSTVPSSSSS

SEQ ID NO: 11625 - DNA, 1678 bp, Arabidopsis thaliana
aaaaaatctaaactctctctgcaaaatttctgctaacttctttctcccattttcttgccatggaaatcgattccgccaccaacggaaactctgacaccgtcatgacggattccgccgctacgatcactccgtcgccggtcgtcgtctcgtcttcgagatcgaatcaatttacggaatctctcaagcttgagcaccagctcctccgcgttcctttcgagcattacaagaagacgatccgtaccaatcaccgttctttcgagaaagaggtctcaaccattgttaacggcgtcggagaattggctgattccgattggtctaaagacgataccgtttcgcgtcttacttgccttgttactcgattacaaggcctcaaacgaaagttggaagaagggagcaatgtggagaatttgcaagcccagagatgtcgtgctcgcatcgatcatttggattcagtagatgtggaaaatattactgaatggaataataccaaactgaaacggattcttgtagactacatgctgcggatgtcatatttcgagactgctacaaagctttcggaaagcagcaatattatggaccttgtcgacattgacatatttcgagaagctaagaaggtgattgatgcccttaaaaatagggaggtagcttctgcattgacatggtgtgctgataacaaaacgcggttgaaaaagtcaaagagcaaatttgagttccaactaaggctgcaagaattcatcgagttggtacgagttgatacagctgagagctacaaaaaggcaatccagtatgctcgaaagcatctggcatcatggggaacaacccatatgaaagaattgcagcatgttctggccactttggcttttaaaagtaccacagaatgctcaaaatataaggttttgtttgaactacgacagtgggatgttttagttgatcagtttaaacaagaattttgcaagttatatggcatgacgatggaacccttattgaacatctacttacaggcaggcttgtctgcgctgaaaactccgtaacgatcaaactctatcaaaattgatgtttttgattgtctattttctgcatctgaatataaaggggcagaaagtaagttttcgaaatgacaccctaatgtgattcttactggtgggttgcgtttgtaccttgatatgactcagatatggtttagaagaaggttgtaccaaagaggaccctctctcacaagagaactttcggaagctagctttgcctttaccgttctccaagcagcaccattcaaagcttgtttgctatatttctaaggagctaatggacacagagaacccaccacaggtgctgcccaatggctacgtctacagcaccaaggctctcaaggaaatggcggaaaagaatggaggtaaaataacatgtccaaggacagggcttgtctgcaactacacggagttagttaaggcatatatatcatgaacccatatgctcataatcctcactttggtcaccttttcaatggatgactgggaggacagtattaaggccaaagaaactgaaatttccaactttctccattactctttgtgaatatgcacttgcagataaaactttgcatcactttagaaacagctcgttcctttgtatatcaagccatttcttcatttcagtcttatgacaattttctagtcaaaag

SEQ ID NO: 11626 - protein, 323 aa, Arabidopsis thaliana
MEIDSATNGNSDTVMTDSAATITPSPVVVSSSRSNQFTESLKLEHQLLRVPFEHYKKTIRTNHRSFEKEVSTIVNGVGELADSDWSKDDTVSRLTCLVTRLQGLKRKLEEGSNVENLQAQRCRARIDHLDSVDVENITEWNNTKLKRILVDYMLRMSYFETATKLSESSNIMDLVDIDIFREAKKVIDALKNREVASALTWCADNKTRLKKSKSKFEFQLRLQEFIELVRVDTAESYKKAIQYARKHLASWGTTHMKELQHVLATLAFKSTTECSKYKVLFELRQWDVLVDQFKQEFCKLYGMTMEPLLNIYLQAGLSALKTP

SEQ ID NO: 11627 - protein, 309 aa, Arabidopsis thaliana
MTDSAATITPSPVVVSSSRSNQFTESLKLEHQLLRVPFEHYKKTIRTNHRSFEKEVSTIVNGVGELADSDWSKDDTVSRLTCLVTRLQGLKRKLEEGSNVENLQAQRCRARIDHLDSVDVENITEWNNTKLKRILVDYMLRMSYFETATKLSESSNIMDLVDIDIFREAKKVIDALKNREVASALTWCADNKTRLKKSKSKFEFQLRLQEFIELVRVDTAESYKKAIQYARKHLASWGTTHMKELQHVLATLAFKSTTECSKYKVLFELRQWDVLVDQFKQEFCKLYGMTMEPLLNIYLQAGLSALKTP

SEQ ID NO: 11628 - protein, 171 aa, Arabidopsis thaliana
MLRMSYFETATKLSESSNIMDLVDIDIFREAKKVIDALKNREVASALTWCADNKTRLKKSKSKFEFQLRLQEFIELVRVDTAESYKKAIQYARKHLASWGTTHMKELQHVLATLAFKSTTECSKYKVLFELRQWDVLVDQFKQEFCKLYGMTMEPLLNIYLQAGLSALKTP

SEQ ID NO: 11629 - DNA, 2425 bp, Arabidopsis thaliana
ggtaatgtctcataagtctttggatctcaattcgtccgggaagttgcatctttattgacctcatctgaagttcaatttatttcgtcttcgggaaatcaatccttttggtggctgtaaggtttaatgggcattgaaggtgtatcaacgtatttgaaatctggaaatatggacacaatttctgctcctcctggttttgtatctcaaacatcgtttgtgctgaggaatgtacgccgagacaaaaaaagtcccaggtccgtgtcgagacaagagcagacaactggattcggcacagatgataaagatagttgcaatatgtttcttaaaagccgaccgtggatagtgcatgatcacacaattcccagctcagaggccttaaggccgaaaaaaactgaggtacggagaagacggcccctcaaagtgtctgagaccaaagtccttgaggaagctcctgtgttcaacccaaccgaagaggaattcagggacacactctcatatatatcaagcttgcgtgacagagctgagccgtatggaatctgttgtgttgttcctccaccttcatggaaacctccatgtcttctcaaggagaaacaaatatgggaggcttctacatttttccctcaagttcagctctttggaattcagaccgagaaccgaaagattaaaaaggaggttgatgcagatagtaatgatgctgcatctgaaggggttcagttatgtagagtagaacgtggtcctgggtatactttgaagtcctttaaaaactttgcagatacatacaagaagagtcattttggcatgaaggatgaggttttgggttcagagaactcatctccatcacttaaaccaaatgagctaattgtggcagacattgaaaaagagtacagacaaattgttgagagtccacttattgaaattggggtgctttatggcaatgatttagacactgcaacgtttggaagtggatttcccttatctgcaccatctgaatctagcaaatattcatcaggttggaatctgaacagtacggctaagcttcctggttctcttctatcattagaagactgcgaatcagtttgtgttcctcgtctaagtgtaggaatgtgcttgtcttcccagttctggaaatctgagaaggagagactctactctctctgctatttgcatgtgggcgctcctagagtgtggtattccgtagcaggatgtcatcgatcaaagtttaaggctgccatgaaaagcttcatccttgagatgtcaggagaacagccaaagaagagtcataatcctgtgatgatgatgtctccatatcaattgagcgtggagggtataccagtgacccgctgtgtccagcaccctggccagtatgttattatatttccagggtcgtattactctgcctttgactgtggcttcaactgtttggagaaagcaaactttgctccccttgattggttgccccatggggatattgctgttcaggtgaatcaagagatgagtaaaacgtcgctgatatcgtatgataagctattatttagtgctgcaagggaagctgtaaaatgtcttaaggaatatgggttgtcgaagaaaaacacagcatgttacacgagatggaatgattcttgtgggacggatgggttgttctccaacataatcaagtcacggatcaaactggagaaaaatagacgtgaatttcttatcagttcactagaatcgcaaaggatggacaagagttatgatgctgtgaacaaaagggaatgctgtgtatgtcttggggatttgtatctttccgcggttaactgttcatgctctgctgatcgttactcgtgtctgaaccacatgaggaagctctgtgcatgtccgtgtgacagaaagagttttctctataggtacactatggatgagttgaatcttctcgttgaagccctggaaggtaaaaagctcagctctatgttcagatgggcaggcatagatcaaaaattctgtgcttctccagccaccacaagttcaaaacccgaagaagacaaaggcaaggaaacagatgaggttacaccctgtaatatcacgaggaaagatgtcgcagctggaactaaggaccagacaagagtgaaggcgagatctttggctgatatactgaatgttaaagatggaaacaatgatgcaaaggagactttgaaatcttgttctaagaaatcaaacaggccatgcgataacgattcctctgaggccaacgcgccaaagaaacagaagcagtgatgaataatgaaggagattgtagtttagtcacaaaatgcaagacgataaaaacacttttgtcttcttcttaaatcgatatatgaagcaacttttttttttggtaggcgatatatgaagcaacttgatatgtgttttgtttgttttggctaatagacaaaaacatttttttggtttc

SEQ ID NO: 11630 - protein, 708 aa, Arabidopsis thaliana
MGIEGVSTYLKSGNMDTISAPPGFVSQTSFVLRNVRRDKKSPRSVSRQEQTTGFGTDDKDSCNMFLKSRPWIVHDHTIPSSEALRPKKTEVRRRRPLKVSETKVLEEAPVFNPTEEEFRDTLSYISSLRDRAEPYGICCVVPPPSWKPPCLLKEKQIWEASTFFPQVQLFGIQTENRKIKKEVDADSNDAASEGVQLCRVERGPGYTLKSFKNFADTYKKSHFGMKDEVLGSENSSPSLKPNELIVADIEKEYRQIVESPLIEIGVLYGNDLDTATFGSGFPLSAPSESSKYSSGWNLNSTAKLPGSLLSLEDCESVCVPRLSVGMCLSSQFWKSEKERLYSLCYLHVGAPRVWYSVAGCHRSKFKAAMKSFILEMSGEQPKKSHNPVMMMSPYQLSVEGIPVTRCVQHPGQYVIIFPGSYYSAFDCGFNCLEKANFAPLDWLPHGDIAVQVNQEMSKTSLISYDKLLFSAAREAVKCLKEYGLSKKNTACYTRWNDSCGTDGLFSNIIKSRIKLEKNRREFLISSLESQRMDKSYDAVNKRECCVCLGDLYLSAVNCSCSADRYSCLNHMRKLCACPCDRKSFLYRYTMDELNLLVEALEGKKLSSMFRWAGIDQKFCASPATTSSKPEEDKGKETDEVTPCNITRKDVAAGTKDQTRVKARSLADILNVKDGNNDAKETLKSCSKKSNRPCDNDSSEANAPKKQKQ

SEQ ID NO: 11631 - protein, 694 aa, Arabidopsis thaliana
MDTISAPPGFVSQTSFVLRNVRRDKKSPRSVSRQEQTTGFGTDDKDSCNMFLKSRPWIVHDHTIPSSEALRPKKTEVRRRRPLKVSETKVLEEAPVFNPTEEEFRDTLSYISSLRDRAEPYGICCVVPPPSWKPPCLLKEKQIWEASTFFPQVQLFGIQTENRKIKKEVDADSNDAASEGVQLCRVERGPGYTLKSFKNFADTYKKSHFGMKDEVLGSENSSPSLKPNELIVADIEKEYRQIVESPLIEIGVLYGNDLDTATFGSGFPLSAPSESSKYSSGWNLNSTAKLPGSLLSLEDCESVCVPRLSVGMCLSSQFWKSEKERLYSLCYLHVGAPRVWYSVAGCHRSKFKAAMKSFILEMSGEQPKKSHNPVMMMSPYQLSVEGIPVTRCVQHPGQYVIIFPGSYYSAFDCGFNCLEKANFAPLDWLPHGDIAVQVNQEMSKTSLISYDKLLFSAAREAVKCLKEYGLSKKNTACYTRWNDSCGTDGLFSNIIKSRIKLEKNRREFLISSLESQRMDKSYDAVNKRECCVCLGDLYLSAVNCSCSADRYSCLNHMRKLCACPCDRKSFLYRYTMDELNLLVEALEGKKLSSMFRWAGIDQKFCASPATTSSKPEEDKGKETDEVTPCNITRKDVAAGTKDQTRVKARSLADILNVKDGNNDAKETLKSCSKKSNRPCDNDSSEANAPKKQKQ

SEQ ID NO: 11632 - protein, 645 aa, Arabidopsis thaliana
MFLKSRPWIVHDHTIPSSEALRPKKTEVRRRRPLKVSETKVLEEAPVFNPTEEEFRDTLSYISSLRDRAEPYGICCVVPPPSWKPPCLLKEKQIWEASTFFPQVQLFGIQTENRKIKKEVDADSNDAASEGVQLCRVERGPGYTLKSFKNFADTYKKSHFGMKDEVLGSENSSPSLKPNELIVADIEKEYRQIVESPLIEIGVLYGNDLDTATFGSGFPLSAPSESSKYSSGWNLNSTAKLPGSLLSLEDCESVCVPRLSVGMCLSSQFWKSEKERLYSLCYLHVGAPRVWYSVAGCHRSKFKAAMKSFILEMSGEQPKKSHNPVMMMSPYQLSVEGIPVTRCVQHPGQYVIIFPGSYYSAFDCGFNCLEKANFAPLDWLPHGDIAVQVNQEMSKTSLISYDKLLFSAAREAVKCLKEYGLSKKNTACYTRWNDSCGTDGLFSNIIKSRIKLEKNRREFLISSLESQRMDKSYDAVNKRECCVCLGDLYLSAVNCSCSADRYSCLNHMRKLCACPCDRKSFLYRYTMDELNLLVEALEGKKLSSMFRWAGIDQKFCASPATTSSKPEEDKGKETDEVTPCNITRKDVAAGTKDQTRVKARSLADILNVKDGNNDAKETLKSCSKKSNRPCDNDSSEANAPKKQKQ

SEQ ID NO: 11633 - DNA, 2611 bp, Arabidopsis thaliana
gaaaagtcccttaacatggcggttaagcacggcgtcgacggcgacggcagcgtaatcgaatcgagaactctggcggtagatcgaaaaagcggtttctgcgaatcaacatcgatattctacagcaaacgtgagccaatggctctcccgccaaaccaatttctcgacgtcacgtctttcattgcatcacagcctcatcgcggcaaaaccgtattcgtcgacgccgtaaccggtcgtcaactaagcttccctgagctctggctcggtgtcgaaagagtcgcgggttgtctttacgcattaggtgtacgcaaaggaaatgtcgtcattatactctctccaaactcaatcctcttcccgatcgtctccctctccgtaatgtcactcggcgcaatcataaccaccgctaatccgatcaacacgtccgacgaaatctccaaacagataggcgattcgcgtcctgttctcgccttcaccacatgcaaactcgtctccaaactcgccgccgcgtcgaattttaatctcccggtggttctcatggacgactaccacgttccttcgcaaacttacggtgaccgcgtgaaactagtcgggaggttagagacgatgattgaaacagaaccgagtgagtcacgagttaagcaacgagtcaaccaggacgacacggcggctctgttatactcatcaggtacgacggggacgagtaaaggagtaatgctgagtcaccgtaacctaatcgcattggtacaagcataccgggcccggttcggtttagagcagcgaaccatttgcacaatcccaatgtgtcacatcttcggattcggtggtttcgcgacggggctaatcgcgttaggatggacaatcgttgttcttcctaaattcgacatggctaagcttctctcggcggtggagactcatcgttcttcgtacctttctcttgtaccgccgattgtagtagctatggttaacggagcaaatgagattaattccaagtatgatctgagctcgttgcacactgtggtggctggaggagctccgttgagtagagaggtgacggagaagttcgttgagaattatcccaagtttaagatcctacaagggtatggtttgactgagtcaacggctatagctgcttctatgtttaataaagaggagactaagaggtatggagcttctggcttactggctccgaatgtggaaggtaagattgtggatccggatacgggtcgggttttgggtgtgaatcaaacgggtgagctgtggattcgaagtcctactgtgatgaaaggttatttcaagaataaagaagctactgcttctaccattgattcagaaggatggttgaaaactggagatttgtgttacattgacgatgatgggtttgtctttgttgttgatagattaaaggagctcatcaaatgcaatggttatcaggttgctccagctgaactagaggcattgttgcttgctcatccagagattgctgatgcagcagtaatacccatccctgacatgaaagctgggcaatatccagtggcatatatcgtaagaaaagttggaagtaacttatccgagagcgaaatcatgggatttgtcgcaaaacaggttttttttaacaatgcagttcatgttttctgactaatatgacagtggttcattatgtatttaggtttaaccggaattctggttgggttacataggtatcaccgtacaagaagattcgcaaagtcacatttttggcttcaatccccaaaaatccttcgggcaagattttaagaagagaacttacaaagctcacaacttcaaaactctagcaggaggctctgtcaccatccttatctcgcacttcacgaaaagatttttgtgtataaaaagcgctctccacaaccataaactgttaaaaaactagagactggagcttgctctgatcatgggctgcgttgcaacgaaagagagggaagaaatatgaaaccgatgaagctcccttgcacgacgtgctcatgggggacacatcctggttcatcgtcttcttcacaccatcatcaccaccatcatcatcatggtcagacaaactcttgttcctcaacaacatgaggatgtgatccatcaaacctccgtcgcaaggaacctgtaaagggccacaaatagtggagccaaactcttcctctgccatctccaataagacctgaaagattggatgtttgagataatccaagggtaaaacaaacctcctgccttctctggtatacacagcgaagtgtcctttcttacacttcctccacttctccatcaaatcggtgagtctaagcctcgagcaagatcttttcttcagagagagagctttgatatgttaccaatataataccgttgtgtatacggttagtatgttactgtctgaactatacttgcctctctctccacatatatatactataaaatctgattagtgtatgtggtagttgtcttgcggctcaaaaagaggattaggaatgtgtggaaggagtaaggtagccgtgtgattcttcattatttgggttaaaaagatataactgtgagattaaatgtgtggatgtattattgtcttgcatctctaggtctaaacaatattttttttggc

SEQ ID NO: 11634 - protein, 543 aa, Arabidopsis thaliana
EKSLNMAVKHGVDGDGSVIESRTLAVDRKSGFCESTSIFYSKREPMALPPNQFLDVTSFIASQPHRGKTVFVDAVTGRQLSFPELWLGVERVAGCLYALGVRKGNVVIILSPNSILFPIVSLSVMSLGAIITTANPINTSDEISKQIGDSRPVLAFTTCKLVSKLAAASNFNLPVVLMDDYHVPSQTYGDRVKLVGRLETMIETEPSESRVKQRVNQDDTAALLYSSGTTGTSKGVMLSHRNLIALVQAYRARFGLEQRTICTIPMCHIFGFGGFATGLIALGWTIVVLPKFDMAKLLSAVETHRSSYLSLVPPIVVAMVNGANEINSKYDLSSLHTVVAGGAPLSREVTEKFVENYPKFKILQGYGLTESTAIAASMFNKEETKRYGASGLLAPNVEGKIVDPDTGRVLGVNQTGELWIRSPTVMKGYFKNKEATASTIDSEGWLKTGDLCYIDDDGFVFVVDRLKELIKCNGYQVAPAELEALLLAHPEIADAAVIPIPDMKAGQYPVAYIVRKVGSNLSESEIMGFVAKQVFFNNAVHVF

SEQ ID NO: 11635 - protein, 538 aa, Arabidopsis thaliana
MAVKHGVDGDGSVIESRTLAVDRKSGFCESTSIFYSKREPMALPPNQFLDVTSFIASQPHRGKTVFVDAVTGRQLSFPELWLGVERVAGCLYALGVRKGNVVIILSPNSILFPIVSLSVMSLGAIITTANPINTSDEISKQIGDSRPVLAFTTCKLVSKLAAASNFNLPVVLMDDYHVPSQTYGDRVKLVGRLETMIETEPSESRVKQRVNQDDTAALLYSSGTTGTSKGVMLSHRNLIALVQAYRARFGLEQRTICTIPMCHIFGFGGFATGLIALGWTIVVLPKFDMAKLLSAVETHRSSYLSLVPPIVVAMVNGANEINSKYDLSSLHTVVAGGAPLSREVTEKFVENYPKFKILQGYGLTESTAIAASMFNKEETKRYGASGLLAPNVEGKIVDPDTGRVLGVNQTGELWIRSPTVMKGYFKNKEATASTIDSEGWLKTGDLCYIDDDGFVFVVDRLKELIKCNGYQVAPAELEALLLAHPEIADAAVIPIPDMKAGQYPVAYIVRKVGSNLSESEIMGFVAKQVFFNNAVHVF

SEQ ID NO: 11636 - protein, 498 aa, Arabidopsis thaliana
MALPPNQFLDVTSFIASQPHRGKTVFVDAVTGRQLSFPELWLGVERVAGCLYALGVRKGNVVIILSPNSILFPIVSLSVMSLGAIITTANPINTSDEISKQIGDSRPVLAFTTCKLVSKLAAASNFNLPVVLMDDYHVPSQTYGDRVKLVGRLETMIETEPSESRVKQRVNQDDTAALLYSSGTTGTSKGVMLSHRNLIALVQAYRARFGLEQRTICTIPMCHIFGFGGFATGLIALGWTIVVLPKFDMAKLLSAVETHRSSYLSLVPPIVVAMVNGANEINSKYDLSSLHTVVAGGAPLSREVTEKFVENYPKFKILQGYGLTESTAIAASMFNKEETKRYGASGLLAPNVEGKIVDPDTGRVLGVNQTGELWIRSPTVMKGYFKNKEATASTIDSEGWLKTGDLCYIDDDGFVFVVDRLKELIKCNGYQVAPAELEALLLAHPEIADAAVIPIPDMKAGQYPVAYIVRKVGSNLSESEIMGFVAKQVFFNNAVHVF

SEQ ID NO: 11637 - DNA, 1788 bp, Arabidopsis thaliana
gaaacgatcattttctaggaaaacgaacgaacagaggacaaatatattagataaacagagggaaacaagaacaaaaacgtttgcttcattctctaatggcagccaccacgagacggttgctttactctgtgtccaaaagattctctaccgccggagtgcggcggagctatggcggtctgccacaatcgaattccaaatctcctccgtcttcttctcaacgattgatggaattggaatctgaattcagtgcccacaattaccatcctgttccggttgtgttttctcgcgcgaatggctcaactatatgggaccctgaaggaaagagatacattgattttcttgcagcttactctgcagttaatcagggacattgtcatcctaagatcatgaaggcattgcaggaacaagtggagaagctcactttaagttcacgagcgttttacaacgataaattcccggtatttgctgagcgtctcacaaacatgttcggttatgatatggtgcttcctatgaacacgggtgctgaaggtgtcgaaaccgctttgaaactagcaagaaaatggggtcatgaaaagaaaaatattcccaaagacgaggctatcattgtctcttgttgtggctgctttcatggacgtacattagcaattgtttccatgagttgtgacaatgatgctactcgtggattcgggccattgttgccagggaatcttaaagttgattttggtgatgcggattcacttgagaaaatcattaaagaaaagggagatagaatagcgggatttctattcgagcctattcaaggcgaagctggagttattattcctcccgacggttacttgaaagctgttagagaactctgcacaaaatacaatgttttgatgatagcggatgaagtacaaagcggtctggctagatccgggaagatgctagcttgtgattgggaagaaattcgtcctgacatggtgatacttgggaaagcattaggtggaggagtaattccagtaagtgcagtgcttgctgataaagacgtgatgcttcatataaaacctggtcaacacggaagcacatttggtggtaaccctttagctagtgctgtagctatggcttctttagacgttatcgtggaagaaaaactcgttgaaagatcagcaagtcttggagaggaactgaggattcaattgaatgaaatcaagaaacagtttccgaagtacataaaggaagtacgaggaagaggcttgtttaatgcgattgagttcaatagcgaaagcttgtccccggtttcagcttacgatatttgcttgagcttgaaggagagaggagtcttggctaaacctactcacaacactattgtccggttaactccaccactctctataagctctgatgaactccgagaaggatctgaggctcttcacgatgtcctcgagctcgatcttccaaatctgctgaaaatcaattccggtaaaactccggtttctcatataaccgagtgtgatcgctgtggaagaaacctctatgcttgaaccggtttgaaacttgattaggttctggtataattagattctttgtatcttgtgatttccataggacacagcaccggtttggtataagaaatatattaaagtataaggccgaaccggattgtaccgagcttggtagaaataactctggtttatttctggtttggcattaaataaaaccaacataaaataatatgatgcctgttttcataggtgttatacatgatatctcaacaaacaaataaatgttacataacaatatgtatgg

SEQ ID NO: 11638 - protein, 475 aa, Arabidopsis thaliana
MAATTRRLLYSVSKRFSTAGVRRSYGGLPQSNSKSPPSSSQRLMELESEFSAHNYHPVPVVFSRANGSTIWDPEGKRYIDFLAAYSAVNQGHCHPKIMKALQEQVEKLTLSSRAFYNDKFPVFAERLTNMFGYDMVLPMNTGAEGVETALKLARKWGHEKKNIPKDEAIIVSCCGCFHGRTLAIVSMSCDNDATRGFGPLLPGNLKVDFGDADSLEKIIKEKGDRIAGFLFEPIQGEAGVIIPPDGYLKAVRELCTKYNVLMIADEVQSGLARSGKMLACDWEEIRPDMVILGKALGGGVIPVSAVLADKDVMLHIKPGQHGSTFGGNPLASAVAMASLDVIVEEKLVERSASLGEELRIQLNEIKKQFPKYIKEVRGRGLFNAIEFNSESLSPVSAYDICLSLKERGVLAKPTHNTIVRLTPPLSISSDELREGSEALHDVLELDLPNLLKINSGKTPVSHITECDRCGRNLYA

SEQ ID NO: 11639 - protein, 432 aa, Arabidopsis thaliana
MELESEFSAHNYHPVPVVFSRANGSTIWDPEGKRYIDFLAAYSAVNQGHCHPKIMKALQEQVEKLTLSSRAFYNDKFPVFAERLTNMFGYDMVLPMNTGAEGVETALKLARKWGHEKKNIPKDEAIIVSCCGCFHGRTLAIVSMSCDNDATRGFGPLLPGNLKVDFGDADSLEKIIKEKGDRIAGFLFEPIQGEAGVIIPPDGYLKAVRELCTKYNVLMIADEVQSGLARSGKMLACDWEEIRPDMVILGKALGGGVIPVSAVLADKDVMLHIKPGQHGSTFGGNPLASAVAMASLDVIVEEKLVERSASLGEELRIQLNEIKKQFPKYIKEVRGRGLFNAIEFNSESLSPVSAYDICLSLKERGVLAKPTHNTIVRLTPPLSISSDELREGSEALHDVLELDLPNLLKINSGKTPVSHITECDRCGRNLYA

SEQ ID NO: 11640 - protein, 378 aa, Arabidopsis thaliana
MKALQEQVEKLTLSSRAFYNDKFPVFAERLTNMFGYDMVLPMNTGAEGVETALKLARKWGHEKKNIPKDEAIIVSCCGCFHGRTLAIVSMSCDNDATRGFGPLLPGNLKVDFGDADSLEKIIKEKGDRIAGFLFEPIQGEAGVIIPPDGYLKAVRELCTKYNVLMIADEVQSGLARSGKMLACDWEEIRPDMVILGKALGGGVIPVSAVLADKDVMLHIKPGQHGSTFGGNPLASAVAMASLDVIVEEKLVERSASLGEELRIQLNEIKKQFPKYIKEVRGRGLFNAIEFNSESLSPVSAYDICLSLKERGVLAKPTHNTIVRLTPPLSISSDELREGSEALHDVLELDLPNLLKINSGKTPVSHITECDRCGRNLYA

SEQ ID NO: 11641 - DNA, 1449 bp, Arabidopsis thaliana
tttccggaattcggaatagttctttgttgttgtgcttattatactggttagtttgtgagaatgtgcattgttggaaacaagaagggaaaccgatcattgaaggaaataggaacttttatgatgactacatgtttcattgctaattaccaatccgttcaagtttgccaggctgaatatttcagacagttgcttaagcctgtaacgtagtctagcgtctggagttttcggaaattggggttttgagcggctatctacttttgatttcgaaaaaatttactgtgagttgttaaagagtctggtattctgaagagctgtctgtgggggagcttctggtttggggggtaagggctctggtggaaactcgtgatatctatagtatgatggccataacttgatatagcatttggttccgtgtgtcaacttagtgtagtagtaactgagcagctggaagcttacaaaggcgacaaatcggtagtagaaatattcaagcagcttgcagtttgagatgaagtgggtgacagaaatatgcacaacccgtatgcatcagggtcatcctatgatgctttgttcccaccatgtgcaaagttgccataccatggtgttgaacttcaaccgtctgcggtctgtccaaagaactttgtcatcttcgatcaaacatatgaccgcagccaagtgaagtaccatcctgagctgactcataagctcatgaataccccttcgttgaacaatttagcttcgacgtttcagaacgagtatgttgggggaagttatggtaactatggtaactatgagcaagaagtatcctcttcttatcaagaagatccaaatgagatcgatgctctcttgagcgcagatgaagattatgaagagaatgatgataatgaaggtgaagaggatggtggtgattcagaagaagtcagcactgctcgtacttcttccagggattatggaaacaccacagcagaatcttgttgttccagttatggttacaacaacaacaacaacaacaactcaaggaagcagagtttatcgggcagtgctagtagtagtaacaatgatgggaaaggacgtaaaaagatgaagaagatgatgggagtattgaggagaattgtccctggaggagaacagatgaatacagcttgcgttcttgatgaagctgttcagtatctcaagtcacttaaaatcgaagctcagaaacttggcgttggacatttctcaaaccaatcttgaatgctaccgatatttggttcttccatcactattgtttctcgggaggatggtatctattttatgtttgaatctctctatgtattttgctttttgtgtgttactgcttcgatgaagaagcaaggtttgaacaagtacttgtggatttgatttgagattttaatttgtatggttttactttcactgtaatcatttgactatgaactacaattatcattatgt

SEQ ID NO: 11642 - protein, 234 aa, Arabidopsis thaliana
MHNPYASGSSYDALFPPCAKLPYHGVELQPSAVCPKNFVIFDQTYDRSQVKYHPELTHKLMNTPSLNNLASTFQNEYVGGSYGNYGNYEQEVSSSYQEDPNEIDALLSADEDYEENDDNEGEEDGGDSEEVSTARTSSRDYGNTTAESCCSSYGYNNNNNNNSRKQSLSGSASSSNNDGKGRKKMKKMMGVLRRIVPGGEQMNTACVLDEAVQYLKSLKIEAQKLGVGHFSNQS

SEQ ID NO: 11643 - protein, 174 aa, Arabidopsis thaliana
MNTPSLNNLASTFQNEYVGGSYGNYGNYEQEVSSSYQEDPNEIDALLSADEDYEENDDNEGEEDGGDSEEVSTARTSSRDYGNTTAESCCSSYGYNNNNNNNSRKQSLSGSASSSNNDGKGRKKMKKMMGVLRRIVPGGEQMNTACVLDEAVQYLKSLKIEAQKLGVGHFSNQS

SEQ ID NO: 11644 - DNA, 1454 bp, Arabidopsis thaliana
gagcttcttgaagcagatcaagatcaagaaagaacacttttgtgaacttcttcttccccacatctcctaaaagcttcacacacaccaaaccaagcgtttcttttcttatctactcgattatcaacacatcttttcctgaaactccttccacatctttgtctgatcatggtgaaggaaacagtgtattatgatgttcttggtgtcactccctctgcttctgaggaagagattcgcaaggcttattacatcaaggcaagacaagttcatcctgacaagaatcaaggtgatcctctagctgctgaaaagtttcaggttcttggtgaagcttaccaggttctaagtgatcctgttcatcgtgaagcgtatgatcggactggaaaattctcagctcccaaagaaacaatggttgatccaacggctgttttcgctcttcttttcggaagtgaactattcgaggattatatcggtcacttggctgttgcatcaatggcttccactcaaatggcttctgaaatcgaaaactctgatcagtttcaagacaaactaaaggctgttcagaaagaaagagaagaaaacctttcaaggtttctcaaagattttctgagtcaatatgtccacggagacaaagaaggattcataagccgcgcagaatctgaagccaagagactttcagatgcagcttttggagcggatatgttgcatacaattggatatgtatacacaagacaagcagctcaagaacttgggaagagagctctttacttaggagttccatttgtagctgaatgggttaggaacaaaggtcattcttggaaatcacagattagtgcagctaaaggagctttacagttacttcagctgcaagaagagagtaaccggagattaaagaaagatgggactagtccagcaaatgagttagagtctcatattcagaccaacaaagaaacattgatgggatctttgtggaaacttaatgttgtcgacattgaagtgactctgttacatgtgtgtcagatggtcttgcgcgaaaacaatttgagaaaggaggagctcaagtctagagcaatggctctcaagattcttgggaagatttttcagcaagaaaagcaatcgaagaacggtacaacatcaagaaaagaagatgaagacagcgacgatgatgacagtagcagcgatgacgattcttcacaaccactttcatacagaactcctctgcttactcaggggattggtagacttttcagatgtctctgcaatccagcattcgatgtagacgatgatgaaattgtatacaaaggcaaatgatcaataccacactcaaatatttcaatttgatgggtctcacatgtgaaatgtgatgcagcttcttaagttattaattctttataaatatatgtaatgatgataattgatgggatcaaacttaacaaattgttaaaataagtttattttcc

SEQ ID NO: 11645 - protein, 379 aa, Arabidopsis thaliana
MVKETVYYDVLGVTPSASEEEIRKAYYIKARQVHPDKNQGDPLAAEKFQVLGEAYQVLSDPVHREAYDRTGKFSAPKETMVDPTAVFALLFGSELFEDYIGHLAVASMASTQMASEIENSDQFQDKLKAVQKEREENLSRFLKDFLSQYVHGDKEGFISRAESEAKRLSDAAFGADMLHTIGYVYTRQAAQELGKRALYLGVPFVAEWVRNKGHSWKSQISAAKGALQLLQLQEESNRRLKKDGTSPANELESHIQTNKETLMGSLWKLNVVDIEVTLLHVCQMVLRENNLRKEELKSRAMALKILGKIFQQEKQSKNGTTSRKEDEDSDDDDSSSDDDSSQPLSYRTPLLTQGIGRLFRCLCNPAFDVDDDEIVYKGK

SEQ ID NO: 11646 - protein, 300 aa, Arabidopsis thaliana
MVDPTAVFALLFGSELFEDYIGHLAVASMASTQMASEIENSDQFQDKLKAVQKEREENLSRFLKDFLSQYVHGDKEGFISRAESEAKRLSDAAFGADMLHTIGYVYTRQAAQELGKRALYLGVPFVAEWVRNKGHSWKSQISAAKGALQLLQLQEESNRRLKKDGTSPANELESHIQTNKETLMGSLWKLNVVDIEVTLLHVCQMVLRENNLRKEELKSRAMALKILGKIFQQEKQSKNGTTSRKEDEDSDDDDSSSDDDSSQPLSYRTPLLTQGIGRLFRCLCNPAFDVDDDEIVYKGK

SEQ ID NO: 11647 - protein, 272 aa, Arabidopsis thaliana
MASTQMASEIENSDQFQDKLKAVQKEREENLSRFLKDFLSQYVHGDKEGFISRAESEAKRLSDAAFGADMLHTIGYVYTRQAAQELGKRALYLGVPFVAEWVRNKGHSWKSQISAAKGALQLLQLQEESNRRLKKDGTSPANELESHIQTNKETLMGSLWKLNVVDIEVTLLHVCQMVLRENNLRKEELKSRAMALKILGKIFQQEKQSKNGTTSRKEDEDSDDDDSSSDDDSSQPLSYRTPLLTQGIGRLFRCLCNPAFDVDDDEIVYKGK

SEQ ID NO: 11648 - DNA, 1261 bp, Arabidopsis thaliana
tcttctctaagggtagagagactccaaaatacatcaacttaatttttgggtttcttctgcaataatgtctcggcttctctccaagctctctcctctccctaacttggcagattcacaaaagcagtaggaacattcgttcgttttcatcctcaacgaccggcccatgtgtttctatttgtaccgttgtggaaccctctccggacggcaacctcggacaagtcctgttgttcaacataccagatatgaagttagtcacagcggacaaaatatatcccgacgagctttatgacgcccagttggtgggagcttcccatggatggggacttttctccgatagaacaaatcggtcggcacttatcagcgactatttgaacccctatgcttccaagtcaaaaccaaagatgattcatctacctttttttactccaatgtactctggccaaaccgaagtcgtgtgcaacgtggcaatgtcctctcctcctcctgatcaagacgacgaccatgaagattgggtagttggcatcaagttcttgggtagacagcttagcctctgcaggcctcgtcatgaccttcgttggactaacatcctaaccccttttgagtcgtgggaagtctcagaactcatgtattctaaaaaagaccaacggttctatttgcttgctcctggaggcaactacttatgctcctgggatctcaacttcaaggaagacaagaagcctaagttccatgagttggtcttgcacaaccttcccaacatgccacgttccctctggaagcagttagattcctacggcagagaggatcattgggtggagtcaccttccggcgaaagtttccttgtcaaatggttttgtgaatactcgcctgaaaacaccagtaactggtgcaagtcaccgattgtaatggtgttcagagaggaagagacgaaagatggaaggaaaaacatgcgttacacagatgacattggagatctatgcattttcatttcgaagggagaggatttctgcgtcaaggctagctcttgccctggactccaacctaactccatctctttacatggccgtttgtttgcgattcttaatctcacgaaaagaaccatgggttgctacgaatatccccaaggcataccaaaaaggattccctatttaccctactggcttcctccgttttctccttagcgctctagttgcttcattagtccttattgtgtggtttgttcttttaggtttggattactaagatcatataattatatttttct

SEQ ID NO: 11649 - protein, 311 aa, Arabidopsis thaliana
MKLVTADKIYPDELYDAQLVGASHGWGLFSDRTNRSALISDYLNPYASKSKPKMIHLPFFTPMYSGQTEVVCNVAMSSPPPDQDDDHEDWVVGIKFLGRQLSLCRPRHDLRWTNILTPFESWEVSELMYSKKDQRFYLLAPGGNYLCSWDLNFKEDKKPKFHELVLHNLPNMPRSLWKQLDSYGREDHWVESPSGESFLVKWFCEYSPENTSNWCKSPIVMVFREEETKDGRKNMRYTDDIGDLCIFISKGEDFCVKASSCPGLQPNSISLHGRLFAILNLTKRTMGCYEYPQGIPKRIPYLPYWLPPFSP

SEQ ID NO: 11650 - protein, 258 aa, Arabidopsis thaliana
MIHLPFFTPMYSGQTEVVCNVAMSSPPPDQDDDHEDWVVGIKFLGRQLSLCRPRHDLRWTNILTPFESWEVSELMYSKKDQRFYLLAPGGNYLCSWDLNFKEDKKPKFHELVLHNLPNMPRSLWKQLDSYGREDHWVESPSGESFLVKWFCEYSPENTSNWCKSPIVMVFREEETKDGRKNMRYTDDIGDLCIFISKGEDFCVKASSCPGLQPNSISLHGRLFAILNLTKRTMGCYEYPQGIPKRIPYLPYWLPPFSP

SEQ ID NO: 11651 - protein, 249 aa, Arabidopsis thaliana
MYSGQTEVVCNVAMSSPPPDQDDDHEDWVVGIKFLGRQLSLCRPRHDLRWTNILTPFESWEVSELMYSKKDQRFYLLAPGGNYLCSWDLNFKEDKKPKFHELVLHNLPNMPRSLWKQLDSYGREDHWVESPSGESFLVKWFCEYSPENTSNWCKSPIVMVFREEETKDGRKNMRYTDDIGDLCIFISKGEDFCVKASSCPGLQPNSISLHGRLFAILNLTKRTMGCYEYPQGIPKRIPYLPYWLPPFSP

SEQ ID NO: 11652 - DNA, 1808 bp, Arabidopsis thaliana
gaagagaaccacgagaggacacagcatctgaaatcgtacaagtatctgaagaacataaattaaaattctttactttgtaataatggcatcagagttttgatcggagaatctaaaagtctcgacttttcgaattttgttggccgccttcttaaggacatgaatctcgcggtggctagttttcgcggcaatttcggcgtcttgtcgcaatgcagctcatgttgtagtcttcagtttcagccttttgtagctgctacttccagtctcaattttgggcaaacaggaacatctcgaaggaagaaggatctgaagcttgaaagagttttcagaaagagagagactttggttagagtgaccgagacgcaaacggaaccagaaggcaatgatgatgaggataataaagaaggcaaagagagctctgcagatgatcctcctacagaaattcctactgagttgaattcactgtcaacggttgtgaatgaagcgccgagcaatgaggaggaaaacaaagctcagttcagttctcaggacggtgataaattagaagttagcagtgggtctcctcttcctggtgtgaatccattacaattggaagattccatgagactccccaaggaaaccattgatattctcaggggccaagtatttggatttgacaccttcttcgtaactagcaagaaccatatgagggtggggtattgttcaaaggaaatctaagaggcaagcctgctacaagttacgagaagataaagacgaggatggagaataattttggtgaccagtacaagcttttccttctcacgaatcctgaggatgataaacctgtggccgttgttgttccaagaaggtccttagaacctgagacaacagctgttcctgaatggtttgctgctggttcttttggattggtggcattgtttacattgtttcttcgtaatgtgcctgccttgcaatccgacttactatcggcatttgacaaccttgaactgttgaaagatggcttaccaggagctcttgtcaccgctcttgtccttggagtacatgaactgggacacattttagttgcaaatagcttaggaataaagcttggtgttccattctttgttccaagttggcagataggctctttcggtgctataacgagaatcaaaaatatcgtagccaagcgagaagatcttttgaaggttgcagctgcaggacctttggctggcttttctctaggcttgattctgtttcttatagggttactcgtgcctcccagtgacggcattggcgttgtagttgacgcatcagtgtttcacgagtccttccttgctggtggtattgcaaagctcctactaggtgatgcactcaaagaaggaacttcaatatctcttaacccacttgtgatctgggcatgggctggacttctcatcaacggcattaacagtatccctgcgggggagctcgatgggggcaaaatagctttctccatttggggaagaaagaccgcaacacggctcacgggtgcatccatagcgcttttgggcttatcggcgttgttcagcgacgtggcattctactgggtggttctgatattcttcctgcagcgtggaccgattgcgccgctggctgaagaaatcacggtgcctgatgataagtatgtgtctctaggaatcctggttttgtttctctcctggcttgtgtgtttgccttacccatttgctttcacgggcaatgaagccatgatgattggcttgtgaagtgactcatatcattacaccgcacaataagaaatcagagttatagttgtaactttttgttttggtctc

SEQ ID NO: 11653 - protein, 327 aa, Arabidopsis thaliana
MENNFGDQYKLFLLTNPEDDKPVAVVVPRRSLEPETTAVPEWFAAGSFGLVALFTLFLRNVPALQSDLLSAFDNLELLKDGLPGALVTALVLGVHELGHILVANSLGIKLGVPFFVPSWQIGSFGAITRIKNIVAKREDLLKVAAAGPLAGFSLGLILFLIGLLVPPSDGIGVVVDASVFHESFLAGGIAKLLLGDALKEGTSISLNPLVIWAWAGLLINGINSIPAGELDGGKIAFSIWGRKTATRLTGASIALLGLSALFSDVAFYWVVLIFFLQRGPIAPLAEEITVPDDKYVSLGILVLFLSWLVCLPYPFAFTGNEAMMIGL

SEQ ID NO: 11654 - protein, 185 aa, Arabidopsis thaliana
MNLAVASFRGNFGVLSQCSSCCSLQFQPFVAATSSLNFGQTGTSRRKKDLKLERVFRKRETLVRVTETQTEPEGNDDEDNKEGKESSADDPPTEIPTELNSLSTVVNEAPSNEEENKAQFSSQDGDKLEVSSGSPLPGVNPLQLEDSMRLPKETIDILRGQVFGFDTFFVTSKNHMRVGYCSKEI

SEQ ID NO: 11655 - DNA, 2624 bp, Arabidopsis thaliana
tagtccccccccccccccccccttctcttctctctccattttgggaactttcatccataaacttctatttttctcatcgcaaacttgaaccgtcgtaaccctaaatcaccatcttcatcatcggcaaatcgaatctccgattatatatcaaatagcttaccaaatccgacatgacccaggccctcgttttcggaggactataatgatcggactcttcgtgtcccgtctcgattgcatggggtttgagctatgccggagcttcgccgtggagtccgccgtggccgtgttactgatgctgtagctcccaatcagcttccgcaaacacctacagaaaagaaaccgaagaagagtaccgttaaagctccaaaaccggttgccggcggagttacaggagttgcagagaggccgaggactagattagcggcgaggaaattaaaggaggaagataaagagatacctcaggagattccggttgttgtgccgtctaaggatagcgatatcgataaaaacaagggtaaagaggtagtcgttgaagaagagaagaaagatatggctattggtaatgatagtggtggctctaacaaggcggctgctcaggaagaagaaggaaatactgatcctttccctgagagggttcaagttggaggatcaccactatataaagttgagagaaagctggtgaagggtggttttggacaagtatttgtcggacgtcgtattagtggcggtaatgatcgtagtgcaggagctagcatcttggaggttgctctaaagtttgagcataggagcagcaagggttgcaactatggtcctccacatgagtggcaggtttacaacaccttgggtggtagccatggagtccctagagtacatttcaaaggcaggcaaggagactattatgtcatggttatggacatgcttgggcctagcttatgggatttatggaatacttcagggcaagcaatgtcctcggaaatggtagcttgcattgcggttgaatcactttccatccttgaaaagatgcatgcaaaaggttatgtgcatggggatgttaagccagaaaatttcttactcggccagccttcaacgtctcaagagaaaaaactgtttcttgttgatttgggactagctacaaagtggagagaaggtggtagcggacaacatgttgaatatgatcaacgtcctgatatgtttagagggacagttagatacgcaagtgcacatgctcatttagggagaactgctagcagaagggatgatctggaatcattagcatatacactgatctttcttcaccgaggtagattgccatggcaaggatatcagggagataacaagtcattccttgtttgcaaaaagaagatggcaacatcgccggatatgctttgttgtttttgtccccctcctttcaaacaatttcttgagatcgtggtaaatatgaaatttgatgaagaacccaactatggaaagttagtatctctgtttcaagacctcttgggcgaaaatccggcaattaggcctataaacacagagggtgctcaaaagatcatattccaagttggccagaagcgaggtaggttgagcattggggaggaagaagaagatgcccctaggaaaaaggtccgtctaggagtccctgcaacgcaatggatatcgatttacaatgccaggcaaccaatgaagcagaggtatcattataatgtggctgatataagactggcacagcatattgagagaggtattgcagatggtttgttgataagctgtgtatcatcatgttcgaatctctgggcattgataatggatgctggaactggcttcacgcaccaagtctatgaactctctcctgtattcttgcacaaggaatggattatggagcagtgggagaagaactactacattagttctattgctggtgcaagcaatggaagctccttagttgtcatgtcaaaaggtacgcagtatacacagcagtcttacaaagtaagcgattcattcccgttcaagtggataaacaagaaatggagagaaggcttccatgtaacctcaatggcaacagctggaaatcgatggggtgttgttatgtcccgcaattctggctacagtgaacaggttgtggaacttgattttctgtatccaagtgaaggcatccacaggcgttgggatggtggattcagaatcacatcaacagcagccacaaccgatcaagctgctctcatcctaagcatcccacgtcgtagacttgttgatgagacacaagagacgttacgtacctctcaattccccagcacacacgtcaaggaaaaatggggaaagaatctctaccttgcatcgttaagctatggccgaactgtatcttgagacttattagtaaaaactgttgaaggacgagagaaatatgtttctaagtctcggctcctattccttatccaaccctatggcctctcaggctctgttgtgcttcttcttttttttcagttgaattgtgaagcaaaaatgtggtgattgtgttgtttattccccccttgtgaaggggattgagccataatcaccagtttacctacacatttccctcgaaattgctatatttaatttttaaatcaagaaaagatatttttgtcacc

SEQ ID NO: 11656 - protein, 703 aa, Arabidopsis thaliana
MPELRRGVRRGRVTDAVAPNQLPQTPTEKKPKKSTVKAPKPVAGGVTGVAERPRTRLAARKLKEEDKEIPQEIPVVVPSKDSDIDKNKGKEVVVEEEKKDMAIGNDSGGSNKAAAQEEEGNTDPFPERVQVGGSPLYKVERKLVKGGFGQVFVGRRISGGNDRSAGASILEVALKFEHRSSKGCNYGPPHEWQVYNTLGGSHGVPRVHFKGRQGDYYVMVMDMLGPSLWDLWNTSGQAMSSEMVACIAVESLSILEKMHAKGYVHGDVKPENFLLGQPSTSQEKKLFLVDLGLATKWREGGSGQHVEYDQRPDMFRGTVRYASAHAHLGRTASRRDDLESLAYTLIFLHRGRLPWQGYQGDNKSFLVCKKKMATSPDMLCCFCPPPFKQFLEIVVNMKFDEEPNYGKLVSLFQDLLGENPAIRPINTEGAQKIIFQVGQKRGRLSIGEEEEDAPRKKVRLGVPATQWISIYNARQPMKQRYHYNVADIRLAQHIERGIADGLLISCVSSCSNLWALIMDAGTGFTHQVYELSPVFLHKEWIMEQWEKNYYISSIAGASNGSSLVVMSKGTQYTQQSYKVSDSFPFKWINKKWREGFHVTSMATAGNRWGVVMSRNSGYSEQVVELDFLYPSEGIHRRWDGGFRITSTAATTDQAALILSIPRRRLVDETQETLRTSQFPSTHVKEKWGKNLYLASLSYGRTVS

SEQ ID NO: 11657 - protein, 603 aa, Arabidopsis thaliana
MAIGNDSGGSNKAAAQEEEGNTDPFPERVQVGGSPLYKVERKLVKGGFGQVFVGRRISGGNDRSAGASILEVALKFEHRSSKGCNYGPPHEWQVYNTLGGSHGVPRVHFKGRQGDYYVMVMDMLGPSLWDLWNTSGQAMSSEMVACIAVESLSILEKMHAKGYVHGDVKPENFLLGQPSTSQEKKLFLVDLGLATKWREGGSGQHVEYDQRPDMFRGTVRYASAHAHLGRTASRRDDLESLAYTLIFLHRGRLPWQGYQGDNKSFLVCKKKMATSPDMLCCFCPPPFKQFLEIVVNMKFDEEPNYGKLVSLFQDLLGENPAIRPINTEGAQKIIFQVGQKRGRLSIGEEEEDAPRKKVRLGVPATQWISIYNARQPMKQRYHYNVADIRLAQHIERGIADGLLISCVSSCSNLWALIMDAGTGFTHQVYELSPVFLHKEWIMEQWEKNYYISSIAGASNGSSLVVMSKGTQYTQQSYKVSDSFPFKWINKKWREGFHVTSMATAGNRWGVVMSRNSGYSEQVVELDFLYPSEGIHRRWDGGFRITSTAATTDQAALILSIPRRRLVDETQETLRTSQFPSTHVKEKWGKNLYLASLSYGRTVS

SEQ ID NO: 11658 - protein, 485 aa, Arabidopsis thaliana
MVMDMLGPSLWDLWNTSGQAMSSEMVACIAVESLSILEKMHAKGYVHGDVKPENFLLGQPSTSQEKKLFLVDLGLATKWREGGSGQHVEYDQRPDMFRGTVRYASAHAHLGRTASRRDDLESLAYTLIFLHRGRLPWQGYQGDNKSFLVCKKKMATSPDMLCCFCPPPFKQFLEIVVNMKFDEEPNYGKLVSLFQDLLGENPAIRPINTEGAQKIIFQVGQKRGRLSIGEEEEDAPRKKVRLGVPATQWISIYNARQPMKQRYHYNVADIRLAQHIERGIADGLLISCVSSCSNLWALIMDAGTGFTHQVYELSPVFLHKEWIMEQWEKNYYISSIAGASNGSSLVVMSKGTQYTQQSYKVSDSFPFKWINKKWREGFHVTSMATAGNRWGVVMSRNSGYSEQVVELDFLYPSEGIHRRWDGGFRITSTAATTDQAALILSIPRRRLVDETQETLRTSQFPSTHVKEKWGKNLYLASLSYGRTVS

SEQ ID NO: 11659 - DNA, 1619 bp, Arabidopsis thaliana
ggttgtctttctcttgcactctctctagttccaaaccctagcaattcctctgttttcaccattttcggagattatcaccttctccccgattcgccgccttgtgattacatctacgtaaagagtttctggtagaaattttccctcttttagctgcagattggcatcagattccgttctggatgtgtaggtgatcgattttacgcgtcggtgatgatagctaacggattcgagagtatggataaagaacgagtcaggaaacgtcctcgtatgacctgggacgaggccccagctgaaccagaggctaaaagggctgtgattaaaggacatggaagcgatgggaggattttgtcaccaccattaagggacgatgatcgtgatggtcattatgttttcagtttgagggacaatctcactcctagatataaaatacttagcaagatgggtgaaggcacatttggtcgggttttggaatgttgggatcgtgatacaaaagaatatgtggcaataaagataattcgaagcattaagaaataccgggatgcagcaatgattgaaattgatgtacttcagaaacttgttaagagtgataaaggccgcacacgctgtgtacagatgaagaactggtttgattaccgaaatcatatttgcattgtgttcgagaagcttgggccaagtttgtttgactttctaaagagaaataaatactccgcatttcctctggcccttgttcgggattttggatgccagcttttggaatctgtagcatatatgcacgagttacagttagttcacaccgacctcaagcctgagaacattctgttggtgtcttctgaaaatgtaaagcttcctgacaataagaggagtgctgcaaatgagacacatttcaggtgcttaccaaagtcaagcgccattaaactgattgattttggcagtactgtttgtgataaccggattcatcactccattgtccaaacaagacattacagatcccccgaggtcattttaggtctaggatggagttaccagtgtgacttatggagtataggttgtatactatttgaactatgcacgggtgaggctctctttcagacgcatgataacctagaacatctagctatgatggagagggcgcttggacctttacctgaacatatgactcgaaaagccagccggggtgctgagaaatatttcaggagagggtgtcggttgaattggccagaaggagccaactctagagaaagtattagggctgtaaaaagacttgatcgtctcaaggatatggtatcgaaacatgttgacaacacgagatctagatttgcagatctattgtatggtttattggcatatgatccatctgagcgtctcacagcaaacgaagctcttgaccatcctttctttaagagctcaagttgagaagaagcaaaatcagaaccataaaatgtagaattttacttggtaacaagtttttttgttagattcctctaaagctcccgttctcagtagcaccaaacagtagtattcctatttcagttacgagtttggctacgtttattctggaaaatacctctgttgtacattgtgttgttgagaatataaaacttgcatcatattttgaaacc

SEQ ID NO: 11660 - protein, 400 aa, Arabidopsis thaliana
MIANGFESMDKERVRKRPRMTWDEAPAEPEAKRAVIKGHGSDGRILSPPLRDDDRDGHYVFSLRDNLTPRYKILSKMGEGTFGRVLECWDRDTKEYVAIKIIRSIKKYRDAAMIEIDVLQKLVKSDKGRTRCVQMKNWFDYRNHICIVFEKLGPSLFDFLKRNKYSAFPLALVRDFGCQLLESVAYMHELQLVHTDLKPENILLVSSENVKLPDNKRSAANETHFRCLPKSSAIKLIDFGSTVCDNRIHHSIVQTRHYRSPEVILGLGWSYQCDLWSIGCILFELCTGEALFQTHDNLEHLAMMERALGPLPEHMTRKASRGAEKYFRRGCRLNWPEGANSRESIRAVKRLDRLKDMVSKHVDNTRSRFADLLYGLLAYDPSERLTANEALDHPFFKSSS

SEQ ID NO: 11661 - protein, 392 aa, Arabidopsis thaliana
MDKERVRKRPRMTWDEAPAEPEAKRAVIKGHGSDGRILSPPLRDDDRDGHYVFSLRDNLTPRYKILSKMGEGTFGRVLECWDRDTKEYVAIKIIRSIKKYRDAAMIEIDVLQKLVKSDKGRTRCVQMKNWFDYRNHICIVFEKLGPSLFDFLKRNKYSAFPLALVRDFGCQLLESVAYMHELQLVHTDLKPENILLVSSENVKLPDNKRSAANETHFRCLPKSSAIKLIDFGSTVCDNRIHHSIVQTRHYRSPEVILGLGWSYQCDLWSIGCILFELCTGEALFQTHDNLEHLAMMERALGPLPEHMTRKASRGAEKYFRRGCRLNWPEGANSRESIRAVKRLDRLKDMVSKHVDNTRSRFADLLYGLLAYDPSERLTANEALDHPFFKSSS

SEQ ID NO: 11662 - protein, 381 aa, Arabidopsis thaliana
MTWDEAPAEPEAKRAVIKGHGSDGRILSPPLRDDDRDGHYVFSLRDNLTPRYKILSKMGEGTFGRVLECWDRDTKEYVAIKIIRSIKKYRDAAMIEIDVLQKLVKSDKGRTRCVQMKNWFDYRNHICIVFEKLGPSLFDFLKRNKYSAFPLALVRDFGCQLLESVAYMHELQLVHTDLKPENILLVSSENVKLPDNKRSAANETHFRCLPKSSAIKLIDFGSTVCDNRIHHSIVQTRHYRSPEVILGLGWSYQCDLWSIGCILFELCTGEALFQTHDNLEHLAMMERALGPLPEHMTRKASRGAEKYFRRGCRLNWPEGANSRESIRAVKRLDRLKDMVSKHVDNTRSRFADLLYGLLAYDPSERLTANEALDHPFFKSSS

SEQ ID NO: 11663 - DNA, 1504 bp, Arabidopsis thaliana
gatcagcaataacataactgccgctcttcattctctctcatttctttcgctctacattggctctgtgttttttgaattatctattgatttccattagggttttctcacttctttgatcgattgaattatatatgttccgtcaatccatggcgtttcctccaccgatccatggttccgatgcaccgccgccgccacagccgccgtcggtggtgaacgggattgaaacctctagacggcagcagcaacagattgcagcagcttcttcttcgccggtgaaatctcatccgcttcataacttccctttgtctgatctcagatgggctatgaatcacgccaatacacaccggctccgcaaagcatcgagtagatctccgcttcgtgaagctaatactgggaaaggaaatctggtgattgaggaggtgaacgaagcttcaggttcttcgtttgaattgagaccggagaagaagaagggaaacgcgtctggtgttagcgattccgccgcagatagatccgcgacgaagtcaacgacgccggacggtagatcgaagatctttatacggatccgcacgaagaacaacgaagaaacagctgtatcgactgatatcgtcacctccgtcgccgcctctgttcaagtgactgatgattcagctggtccggcgatcgatgctgaaggtgaacggatctccgatggtggtggtcaggaagcagacgagtttggaccgaagacttggaatctgaggccgaggagaccaccgccgacgaagaagcggtcaattggacacggcggtggggtattgaagagctgtaacggtgctttaccggagaataaatctctgggaacggtaagaacagagtcaatacgatcgaggaacggtgtagatgctaagatggcgacgacggaaagaaaggagaagaaaccgaggttatcgatatcgctctcaaagctggagatagatgaagatatctacgcgttgactggatcaaaacctagtagaagaccaaagaagagagccaagaacgtgcagaagcagctcgatgttcttttccctggtttgtggatgggtaacgtttcttcagaagcatataaggtctcagaacatgcttgaagggttgaatgagaatgatgtgaagttaatcttgttgaatcggattcgactgaaatcagataggagcgtcgaagaagcttcttccattgattgagaactgcgaatgatttgtttcttcaagttttggcttcattactggctcgtcggtttcaagagccgaattcaacttcaacttcagatacggtcttaagtcctaactgtcggcagtataaaatgtgaatcaaactagttttctgatccagtcgtcttatttgttaccactgatgtgaggtgttgatacggcctctatttttttttttctgtttaattcattcactttgtgtaataagattagtgggatagcctgactttttgtaaaggtggaaaaataaaatcagaattatcaacataatttattt

SEQ ID NO: 11664 - protein, 324 aa, Arabidopsis thaliana
MFRQSMAFPPPIHGSDAPPPPQPPSVVNGIETSRRQQQQIAAASSSPVKSHPLHNFPLSDLRWAMNHANTHRLRKASSRSPLREANTGKGNLVIEEVNEASGSSFELRPEKKKGNASGVSDSAADRSATKSTTPDGRSKIFIRIRTKNNEETAVSTDIVTSVAASVQVTDDSAGPAIDAEGERISDGGGQEADEFGPKTWNLRPRRPPPTKKRSIGHGGGVLKSCNGALPENKSLGTVRTESIRSRNGVDAKMATTERKEKKPRLSISLSKLEIDEDIYALTGSKPSRRPKKRAKNVQKQLDVLFPGLWMGNVSSEAYKVSEHA

SEQ ID NO: 11665 - protein, 319 aa, Arabidopsis thaliana
MAFPPPIHGSDAPPPPQPPSVVNGIETSRRQQQQIAAASSSPVKSHPLHNFPLSDLRWAMNHANTHRLRKASSRSPLREANTGKGNLVIEEVNEASGSSFELRPEKKKGNASGVSDSAADRSATKSTTPDGRSKIFIRIRTKNNEETAVSTDIVTSVAASVQVTDDSAGPAIDAEGERISDGGGQEADEFGPKTWNLRPRRPPPTKKRSIGHGGGVLKSCNGALPENKSLGTVRTESIRSRNGVDAKMATTERKEKKPRLSISLSKLEIDEDIYALTGSKPSRRPKKRAKNVQKQLDVLFPGLWMGNVSSEAYKVSEHA

SEQ ID NO: 11666 - protein, 260 aa, Arabidopsis thaliana
MNHANTHRLRKASSRSPLREANTGKGNLVIEEVNEASGSSFELRPEKKKGNASGVSDSAADRSATKSTTPDGRSKIFIRIRTKNNEETAVSTDIVTSVAASVQVTDDSAGPAIDAEGERISDGGGQEADEFGPKTWNLRPRRPPPTKKRSIGHGGGVLKSCNGALPENKSLGTVRTESIRSRNGVDAKMATTERKEKKPRLSISLSKLEIDEDIYALTGSKPSRRPKKRAKNVQKQLDVLFPGLWMGNVSSEAYKVSEHA

SEQ ID NO: 11667 - DNA, 2127 bp, Arabidopsis thaliana
aagtgataaagagaacaaaaccgaaacaaaatctgaagaaaaaaaggttgaaaattttgatttggaacaatcaaaacctcaagaccagctgaagctggttaagcccgaagccacggtccaagaagatgatgattctgacgaaggatggcaagaagctgtccccaaaaatcgtttttcttctgggcgtagaacacggcccagcctggcaaagctgaacaccaacttcatgaacatgccccagcagccatcaagaagcagaggaaaatccaccaatttcacatccccaagaaccagttctaatgagctttcaatttctgttgctggttccacttcttccccagcctcgaagatgtttgtaaagagcccattgaacaaaaagcaaaacaattccagtgtggtgggagaaagaccagtcaacgataaatcagccctggcaagctcggcttgcactgaacagatcaacaagccaactccgatgttgagtcctgtgagtgtcaaagctggaaaactgttttcctataaggaggttgcactggctccccctggaacgattgtaaaaatagttgcagagcagttgccagaagaaacaaaggccccacagaatttggatgcggcaaaaattgcagtagatggtcctgaaaaagttaatgctcaggatgctgagagcgagaataagcatgtggctacagaaacggaggcggaaaacagtgattgcaatgaacaaggaagagttgttggtggtggatcggagttgactagttctccaaaggaaatcaagaatgtggaggccgaaaaggcagctgaaaaagcatttccaatagaaacagccgtatcaaatgcaagaccaggaaaatctaagagtgcacaaatggctgaggattcagatacatgtctcttgaataagtcaccaacagcaaatgattcaaatggcagtgaatcagttattggagtgaagcttcaaaaggatttatgtgatgctgaactgaaaacagtagatggtgaaaccgaaaatctgcccaatggagactcaagcccaaagtcatcagtagctgcagatggagaaaagcaagatgcatgtgaggcacaaaaagagatgagcaagaagctctctgcttctgcaccgccgtataccccaacaaccattccaatatttggatcaattgcagttccaggattcaaagaccacggtggaatcctcccctctccattgaatatgccaccaatgcttcctattaaccatgtccgcagatcaactcctcatcagtctgtaacagctcgagttccttatgggcctagactctctggtggtggttacaaccgatctggaaacagggttccgcgtaacaaaccaagcttccccaatagcaccgagtccaatggtgaggctaatcaattcaatggcccaagaataatgaacccccatgctgctgagttcataccgagtcaaccttgggtttctaatgggtatccagtgtcaccaaatggctatttagcatccccaaatggtgcagaaataacacagaatgggtaccctttgtcaccagtagcaggtggatatccgtgtaacatgtccgttacacagcctcaggatggacttgtttcagaggaattacctggtgctggaagctctgaggagaagagcggaagcgaagaagaaagcaacaacgacaacaatgctggagaggatgacgaagccgttggacaagaaactacagatacacctgaaaatggacattcgacagtaggtgaagtggaaaccacatcacatgagacttgtgatgagaaaaatggagaacgacaaggaggcaagtgctggggagattacagcgataatgaaatcgagcaaattgaagttacaagttgaagacgcaactgtctgttactgaagtattaacattgaggctaaaggaatgcggagacattttggctccattgatgaggttaaaggtaaacaatcatcatagtcgagaaaagcatttttacatgtgaatgttttgtgttgtagcgcaggaccaaggctcgtcactcctgctttaacaacttttctcctgctttcagtttttggtttcatagctgaaaactagatatattcaactccttaataaaagatttgtccctttgtttttc

SEQ ID NO: 11668 - protein, 620 aa, Arabidopsis thaliana
SDKENKTETKSEEKKVENFDLEQSKPQDQLKLVKPEATVQEDDDSDEGWQEAVPKNRFSSGRRTRPSLAKLNTNFMNMPQQPSRSRGKSTNFTSPRTSSNELSISVAGSTSSPASKMFVKSPLNKKQNNSSVVGERPVNDKSALASSACTEQINKPTPMLSPVSVKAGKLFSYKEVALAPPGTIVKIVAEQLPEETKAPQNLDAAKIAVDGPEKVNAQDAESENKHVATETEAENSDCNEQGRVVGGGSELTSSPKEIKNVEAEKAAEKAFPIETAVSNARPGKSKSAQMAEDSDTCLLNKSPTANDSNGSESVIGVKLQKDLCDAELKTVDGETENLPNGDSSPKSSVAADGEKQDACEAQKEMSKKLSASAPPYTPTTIPIFGSIAVPGFKDHGGILPSPLNMPPMLPINHVRRSTPHQSVTARVPYGPRLSGGGYNRSGNRVPRNKPSFPNSTESNGEANQFNGPRIMNPHAAEFIPSQPWVSNGYPVSPNGYLASPNGAEITQNGYPLSPVAGGYPCNMSVTQPQDGLVSEELPGAGSSEEKSGSEEESNNDNNAGEDDEAVGQETTDTPENGHSTVGEVETTSHETCDEKNGERQGGKCWGDYSDNEIEQIEVTS

SEQ ID NO: 11669 - protein, 545 aa, Arabidopsis thaliana
MNMPQQPSRSRGKSTNFTSPRTSSNELSISVAGSTSSPASKMFVKSPLNKKQNNSSVVGERPVNDKSALASSACTEQINKPTPMLSPVSVKAGKLFSYKEVALAPPGTIVKIVAEQLPEETKAPQNLDAAKIAVDGPEKVNAQDAESENKHVATETEAENSDCNEQGRVVGGGSELTSSPKEIKNVEAEKAAEKAFPIETAVSNARPGKSKSAQMAEDSDTCLLNKSPTANDSNGSESVIGVKLQKDLCDAELKTVDGETENLPNGDSSPKSSVAADGEKQDACEAQKEMSKKLSASAPPYTPTTIPIFGSIAVPGFKDHGGILPSPLNMPPMLPINHVRRSTPHQSVTARVPYGPRLSGGGYNRSGNRVPRNKPSFPNSTESNGEANQFNGPRIMNPHAAEFIPSQPWVSNGYPVSPNGYLASPNGAEITQNGYPLSPVAGGYPCNMSVTQPQDGLVSEELPGAGSSEEKSGSEEESNNDNNAGEDDEAVGQETTDTPENGHSTVGEVETTSHETCDEKNGERQGGKCWGDYSDNEIEQIEVTS

SEQ ID NO: 11670 - protein, 543 aa, Arabidopsis thaliana
MPQQPSRSRGKSTNFTSPRTSSNELSISVAGSTSSPASKMFVKSPLNKKQNNSSVVGERPVNDKSALASSACTEQINKPTPMLSPVSVKAGKLFSYKEVALAPPGTIVKIVAEQLPEETKAPQNLDAAKIAVDGPEKVNAQDAESENKHVATETEAENSDCNEQGRVVGGGSELTSSPKEIKNVEAEKAAEKAFPIETAVSNARPGKSKSAQMAEDSDTCLLNKSPTANDSNGSESVIGVKLQKDLCDAELKTVDGETENLPNGDSSPKSSVAADGEKQDACEAQKEMSKKLSASAPPYTPTTIPIFGSIAVPGFKDHGGILPSPLNMPPMLPINHVRRSTPHQSVTARVPYGPRLSGGGYNRSGNRVPRNKPSFPNSTESNGEANQFNGPRIMNPHAAEFIPSQPWVSNGYPVSPNGYLASPNGAEITQNGYPLSPVAGGYPCNMSVTQPQDGLVSEELPGAGSSEEKSGSEEESNNDNNAGEDDEAVGQETTDTPENGHSTVGEVETTSHETCDEKNGERQGGKCWGDYSDNEIEQIEVTS

SEQ ID NO: 11671 - DNA, 2240 bp, Arabidopsis thaliana
aacactagtcaccaacttattataactcttcatccattttctctctctcaaagtcaccccccaaatttttttttttttttttaactttgaatgtgactcaggatagagagagggcgagacagataaagagagcttgaggaagggtttaagcagatctgcaagaaacactctctcagaatcaaaccggcggcgacagtgacggcggcgaaaagcggcggtgttggccgcaaaaacgatgcaaaaccagctatggtcattaccgctaacgatttatcaaaatgggaaaattttcctaaaggacttaaggttcttcttctcctcaacggctgtgacagcgacggagatggctcctcagccgccgagactcgatcagagctcgaatcaatggattatatcgttactacattcaccgatgaaactgaagcactctctgcggttgtcaagaacccggagagcttccacattgccatcgtcgaggtgaatatgagcgctgagagtgagagtttcaagtttcttgaggctgccaaagacgttcttcctactataatgatttcaaccgatcattgcatcacttctacaatgaaatgcatagcgcttggtgcagttgagttcctacaaaaaccgctctcaccggagaaattaaagaacatttggcagcatgttgttcataaggcattcaatgatggtggaagtaatgtttcggtatcacttaaaccagtgaaagaatccgttgtctcgatgcttcatcttgaaaccgacatgacaatcgatgagaaagatccagcgccatctacaccgcaattgaaacaagattcacggttactagacggtgattgccaagagaacataaatttctcgatggaaaatgtaaattcctcgatcgagaaagataacatggaagatcaagacatcggtgaatctaaatcagtcgacactacaaaccgcaaattagatgacgacaaagtggttgtcaaagaagagagaggagacagtgaaaaagaagaagaaggtgaaaccggagatctcataagcgagaagacagattcagttgatattcataagaaagaagatgggactaaaccgattaataaatcatccgggatcaagaacgtgtctggtaacaaaactagtcgaaagaaggtggattggacaccagagctgcacaagaagtttgtgcaagcagttgagcaactcggcgttgatcaagcgataccctcgcggattcttgagttgatgaaagtaggcaccttaacaagacacaatgtagctagtcaccttcagaaatttcggcagcataggaagaatattcttccaaaggatgatcataaccatagatggatacaatctagagagaaccatagaccaagtcaacgtaattataacggttttcaacagcaacaccgtcccgtgatggcttatcccgtttggggtcttcccggtgtttatccgccgggagcgattccacctttgtggccgccgccgctgcagtccattggtcaaccacctccgtggcattggaaaccaccttatccaacggtgaacggtaatgcatggggttgtccggttggaccgcctgtgaccggatcatatattactccttcgaatactaccggcggcggatttcaatatcccaacggagctgaaaccggcttcaaaataatgccggcgagtcagccggacgaggaaatgttagatcaagtggttaaagaagcgataagcaaaccgtggctgccgctaccgctcgggctaaaaccgccgtccgcggagagcgttttggctgagctaacgcgtcaaggcatctcagccgtcccttcttcttcttgtctaatcaacggctctcatcgtctccgctgacgtgtccatgatgaaacagaacccgtagatatgatgacgtcatgcgtggcgtacttgtccgtgtctgacgatccgaagcgggaactgattcggatcctgagagttgttttttaattgttgtttttaattttttgttgtcataaaaacatttgtttctattggtattattaaagaagatcggacggtggagatagaggcaacgatgttagtttgaggaccacaagtggactctgcggctgtaagtagatctcggacacgggattttgacaagtcggaatctgacgtgtgtgcgtactcgcttttgtgggttgtcgagaatttaatagttgacactgttttaggtggatatgagatatgatgatgataataataaaaaggtacaactc

SEQ ID NO: 11672 - protein, 534 aa, Arabidopsis thaliana
MVITANDLSKWENFPKGLKVLLLLNGCDSDGDGSSAAETRSELESMDYIVTTFTDETEALSAVVKNPESFHIAIVEVNMSAESESFKFLEAAKDVLPTIMISTDHCITSTMKCIALGAVEFLQKPLSPEKLKNIWQHVVHKAFNDGGSNVSVSLKPVKESVVSMLHLETDMTIDEKDPAPSTPQLKQDSRLLDGDCQENINFSMENVNSSIEKDNMEDQDIGESKSVDTTNRKLDDDKVVVKEERGDSEKEEEGETGDLISEKTDSVDIHKKEDGTKPINKSSGIKNVSGNKTSRKKVDWTPELHKKFVQAVEQLGVDQAIPSRILELMKVGTLTRHNVASHLQKFRQHRKNILPKDDHNHRWIQSRENHRPSQRNYNGFQQQHRPVMAYPVWGLPGVYPPGAIPPLWPPPLQSIGQPPPWHWKPPYPTVNGNAWGCPVGPPVTGSYITPSNTTGGGFQYPNGAETGFKIMPASQPDEEMLDQVVKEAISKPWLPLPLGLKPPSAESVLAELTRQGISAVPSSSCLINGSHRLR

SEQ ID NO: 11673 - protein, 489 aa, Arabidopsis thaliana
MDYIVTTFTDETEALSAVVKNPESFHIAIVEVNMSAESESFKFLEAAKDVLPTIMISTDHCITSTMKCIALGAVEFLQKPLSPEKLKNIWQHVVHKAFNDGGSNVSVSLKPVKESVVSMLHLETDMTIDEKDPAPSTPQLKQDSRLLDGDCQENINFSMENVNSSIEKDNMEDQDIGESKSVDTTNRKLDDDKVVVKEERGDSEKEEEGETGDLISEKTDSVDIHKKEDGTKPINKSSGIKNVSGNKTSRKKVDWTPELHKKFVQAVEQLGVDQAIPSRILELMKVGTLTRHNVASHLQKFRQHRKNILPKDDHNHRWIQSRENHRPSQRNYNGFQQQHRPVMAYPVWGLPGVYPPGAIPPLWPPPLQSIGQPPPWHWKPPYPTVNGNAWGCPVGPPVTGSYITPSNTTGGGFQYPNGAETGFKIMPASQPDEEMLDQVVKEAISKPWLPLPLGLKPPSAESVLAELTRQGISAVPSSSCLINGSHRLR

SEQ ID NO: 11674 - protein, 456 aa, Arabidopsis thaliana
MSAESESFKFLEAAKDVLPTIMISTDHCITSTMKCIALGAVEFLQKPLSPEKLKNIWQHVVHKAFNDGGSNVSVSLKPVKESVVSMLHLETDMTIDEKDPAPSTPQLKQDSRLLDGDCQENINFSMENVNSSIEKDNMEDQDIGESKSVDTTNRKLDDDKVVVKEERGDSEKEEEGETGDLISEKTDSVDIHKKEDGTKPINKSSGIKNVSGNKTSRKKVDWTPELHKKFVQAVEQLGVDQAIPSRILELMKVGTLTRHNVASHLQKFRQHRKNILPKDDHNHRWIQSRENHRPSQRNYNGFQQQHRPVMAYPVWGLPGVYPPGAIPPLWPPPLQSIGQPPPWHWKPPYPTVNGNAWGCPVGPPVTGSYITPSNTTGGGFQYPNGAETGFKIMPASQPDEEMLDQVVKEAISKPWLPLPLGLKPPSAESVLAELTRQGISAVPSSSCLINGSHRLR

SEQ ID NO: 11675 - DNA, 2390 bp, Arabidopsis thaliana
aaaaaaattgattctgtaatttcagcgagtcgtctcgtctagctctcacttttgttcgtctcttctgcgtcaaacatttccaccattttcgtttcttaaacctttcttcagctcttctcttcgtcaatctgcgatagtggaattgaagtctcttcggtgagtttctttactaatggagaccgccgcttcgagcgtagctacaactcgtggcggttcccttcagaatccgtcgccgacggctccgtcaagaaaagagtggcgcgccgtttcggattcacaagacaccacagattatgtggatttggaacagttaaagctgaacaggacagatgagagaacgatttatgagaatggaagagaacaggatggttattcaaatagtgagatgttgcagcaacagattcttaatgtttctagaaagaaaggagaattacagcagttggagattgagcttcgagctcagatgattgcgagacatgagatcatggagatccagagcaactatgaatctcaattcacagagtatgctaatgctgctgctagaatgcaggagcaacttcatgagaatgagagatctattcgggaggcagagaggaagttagaagagaaagacagagagctacatgcgattaaactagataatgaagcggcttgggccaaagagggtatcctaagagaacaaaataaagaacttgccacattcagaagagagcgtgatcactctgaagatgagaggtcccagaatatacataaaatatctgaacttcaggagcatattcaagagaaagagagtcagctcagtgaattgcaggaacaaaataggattgctcaagaaactatcctgtacaaggatgagcaactaagagaagcacaaggttggattgctcgtgcccaagagattgatgctttacaatcatctacaaatcattcgttgcaggctgaattgcgagaacgtactgagcagtataaccagctctggcatggttgtcagaggcagtttgcagagatggagagattgcatgtgcacacagtgcaacagcttcagcaagagcttgctaatgtaagggaagctggtggttccaaaacaaactccggtggagcctcccagactattcagaacagcgggaaccaatttgatgctcatggaaacagcgcagaaagtgcaaacattagtgtccattcaaatggaaaaagcgcagataacatctcatcttttacttcaactgatgataaggctacccagaacaaccgtgttgatgggatatcagcttccaatcttgcgacacatgggttccttcaagctggtcagatgacccctctgcattcatttgtcatgcatcaacaagagatttctcagcttgttcagcctcaggtcccttcacaacatattgaacaatcagtgttgctacagcaaaaggctcaggctgtaccagatagttcacagatgcctatgcagaatcatgtgcatccatctcaaggtgttcatggcttggtacaatcctttggtcaagggtacggagatattcaaactagccaagtagcacaatacggaactacgacaacaccatcctctgtgaatgaacaggcagtggaatctggcaatggagattataatggatctaatcagtcagagaataactttcaagacatttcttcacagttccgtgatgccctaaggcttgattctcattcccagaatcagaaacctgaggaactcaatggtcaggtttcacctgatgaacacagtggtgctaaatccattgtccctgaaactctagtctcatccggaaaacctgagaggaactcagagtgcgctctgctcgatgaaaggtcgcttttgacatgcatcctccgtactataccagctggtgggagaatcagaatcagttcaacgcttccaaaccgtttgggcaaaatgctagcccctctacactggcatgattacaggaaaaagtacgggaagctggatgattttgttgctagccatcttgagttattttcgatagaggatgactacattcaagttagagacggtgcacagaaaatggtagcagcatcagcagcagcagccaaagtggcagcagcagctgcagcttcgtcatccccaaactccatctatgtggctatgactcctatggctcagtctcaagggttaaagaagaatgacaacagagttaggcagagctctgattttatggtgaagcagcaaagaaagctctgattttacaagtcaagcttttcaaagtaaaagcgtattagagtgaggctaaacaatctcctatcttgtttttcattttttggtgtatccccgaagctaagatatacattcataattacttttgccctttcaatagtatcaatgcttaaagtcgacaatgtttattttaaag

SEQ ID NO: 11676 - protein, 682 aa, Arabidopsis thaliana
METAASSVATTRGGSLQNPSPTAPSRKEWRAVSDSQDTTDYVDLEQLKLNRTDERTIYENGREQDGYSNSEMLQQQILNVSRKKGELQQLEIELRAQMIARHEIMEIQSNYESQFTEYANAAARMQEQLHENERSIREAERKLEEKDRELHAIKLDNEAAWAKEGILREQNKELATFRRERDHSEDERSQNIHKISELQEHIQEKESQLSELQEQNRIAQETILYKDEQLREAQGWIARAQEIDALQSSTNHSLQAELRERTEQYNQLWHGCQRQFAEMERLHVHTVQQLQQELANVREAGGSKTNSGGASQTIQNSGNQFDAHGNSAESANISVHSNGKSADNISSFTSTDDKATQNNRVDGISASNLATHGFLQAGQMTPLHSFVMHQQEISQLVQPQVPSQHIEQSVLLQQKAQAVPDSSQMPMQNHVHPSQGVHGLVQSFGQGYGDIQTSQVAQYGTTTTPSSVNEQAVESGNGDYNGSNQSENNFQDISSQFRDALRLDSHSQNQKPEELNGQVSPDEHSGAKSIVPETLVSSGKPERNSECALLDERSLLTCILRTIPAGGRIRISSTLPNRLGKMLAPLHWHDYRKKYGKLDDFVASHLELFSIEDDYIQVRDGAQKMVAASAAAAKVAAAAAASSSPNSIYVAMTPMAQSQGLKKNDNRVRQSSDFMVKQQRKL

SEQ ID NO: 11677 - protein, 611 aa, Arabidopsis thaliana
MLQQQILNVSRKKGELQQLEIELRAQMIARHEIMEIQSNYESQFTEYANAAARMQEQLHENERSIREAERKLEEKDRELHAIKLDNEAAWAKEGILREQNKELATFRRERDHSEDERSQNIHKISELQEHIQEKESQLSELQEQNRIAQETILYKDEQLREAQGWIARAQEIDALQSSTNHSLQAELRERTEQYNQLWHGCQRQFAEMERLHVHTVQQLQQELANVREAGGSKTNSGGASQTIQNSGNQFDAHGNSAESANISVHSNGKSADNISSFTSTDDKATQNNRVDGISASNLATHGFLQAGQMTPLHSFVMHQQEISQLVQPQVPSQHIEQSVLLQQKAQAVPDSSQMPMQNHVHPSQGVHGLVQSFGQGYGDIQTSQVAQYGTTTTPSSVNEQAVESGNGDYNGSNQSENNFQDISSQFRDALRLDSHSQNQKPEELNGQVSPDEHSGAKSIVPETLVSSGKPERNSECALLDERSLLTCILRTIPAGGRIRISSTLPNRLGKMLAPLHWHDYRKKYGKLDDFVASHLELFSIEDDYIQVRDGAQKMVAASAAAAKVAAAAAASSSPNSIYVAMTPMAQSQGLKKNDNRVRQSSDFMVKQQRKL

SEQ ID NO: 11678 - protein, 585 aa, Arabidopsis thaliana
MIARHEIMEIQSNYESQFTEYANAAARMQEQLHENERSIREAERKLEEKDRELHAIKLDNEAAWAKEGILREQNKELATFRRERDHSEDERSQNIHKISELQEHIQEKESQLSELQEQNRIAQETILYKDEQLREAQGWIARAQEIDALQSSTNHSLQAELRERTEQYNQLWHGCQRQFAEMERLHVHTVQQLQQELANVREAGGSKTNSGGASQTIQNSGNQFDAHGNSAESANISVHSNGKSADNISSFTSTDDKATQNNRVDGISASNLATHGFLQAGQMTPLHSFVMHQQEISQLVQPQVPSQHIEQSVLLQQKAQAVPDSSQMPMQNHVHPSQGVHGLVQSFGQGYGDIQTSQVAQYGTTTTPSSVNEQAVESGNGDYNGSNQSENNFQDISSQFRDALRLDSHSQNQKPEELNGQVSPDEHSGAKSIVPETLVSSGKPERNSECALLDERSLLTCILRTIPAGGRIRISSTLPNRLGKMLAPLHWHDYRKKYGKLDDFVASHLELFSIEDDYIQVRDGAQKMVAASAAAAKVAAAAAASSSPNSIYVAMTPMAQSQGLKKNDNRVRQSSDFMVKQQRKL

SEQ ID NO: 11679 - DNA, 2517 bp, Arabidopsis thaliana
gaggaaaccccaaatccacaaaccccacttgcaatttctccccacatctctctcccatcgccctctctcctctctctcgtcttcttcggctgtgaagcaaataaagcaaattcctttcttcgatttgttctgaaagttttcaactttggtgagtttggagaagaaagaagacacaaatctctttgaatgcaatgtgaaaaaaggaatagttttttccgacgagaatggttgctgcagcgatttcaaccactgacccaagaaacccacctcgagatcgacctcaatctcttaccaacaatggcggacaaagaagacccagaggcaaacaagttccttctcgctacttatctccttctccgtctcactctgtctcttccaccaccactaccactaccactactaccaccaccacctcttcttcctcctcttcttcttcctctgcaatactcagaactagtaaacgatacccatctccttcgcctttactctctcgctccacgacgaattccgcttccaattcgatcaaaacgccgtctttgttacctaaacggtctcaatcagtggaccgtcgtcgaccctcggcggtttcggtcactgtaggcactgaaatgtcggcggctacgaagatgcttatcacttccactaggagtttgtctgtttcgtttcaaggtgaagccttttctcttccgattagtaaaaagaaagagactacttctacgccggtttctcaccggaaatctactccagagcgacggagatcgacgccggttcgagatcagagagagaactctaagcctgtggaccaacaacgctggcctggagcctcacggagggggaattctgaatctgttgtgccgaattcgctatctagaagcttagattgtggtagtgatagaggaaagcttggatctgggtttgttgggaggtcaatgttgcataattctatgattgatgagagtcctagggtttctgttaatgggagattgagtttagatttgggaggtagggatgaatatttggatattggagatgatatccagagaagaccaaataatggtctgacgtctagtgtttcctgtgactttactgcttctgatactgatagtgtttcttctggtagcactaatggtgttcaagaatgtggctctggtgttaatggtgaaatctctaaatcaaagagcttgcctcgtaatattatggcttctgctaggttctggcaagagactaatagccggttaaggcggttgcaggatccaggttcgcctttatcctctagcccgggtttgaaaaccagtagtatatcttcaaagtttggtctttcgaaacggttttctagcgatgctgttcctttatcatctcctcgtggtatggcttctcctgtaagaggttctgctatacgctctgcttcaccaagtaagctttgggcgacaactacgtcatctccagctagagctctttcgagcccttctcgagctagaaatggagtttctgatcaaatgaacgcttataaccgcaacaacacgccttcaattcttagtttctctgctgatattaggagagggaaaattggggaggatcgtgttatggatgcacatttgttgaggcttctatataaccgtgacctgcagtggcggtttgtcaatgcgagggcagactctactgttatggtgcaaaggttgaacgcagagaaaaacctgtggaatgcatgggtatcaatctcggaactgcggcacagtgtcactttaaaacgaatcaagttgcttttgctaaggcagaaattgaaactggcttctattctgaggggacagatgggttttctagaagaatggtctcttctggatagagatcattcaagttctttgtcaggagcaaccgaatccttgaaagccagcacacttcgtctaccaatagttggaaaaaccgtggttgatattcaagacctcaagcatgctgttagttcagccgtcgatgtaatgcaagctatgtcatcttccatattctcactgacgtcgaaggtggatgagatgaattctgtaatggtggaaaccgtgaatgtaactgctaaagaaaaggttttgcttgaaagatgtcaaggttgcttatcaagagtagcagctatgcaggttactgattgtagcatgaaaacgcatataatacaactaagtcggataccaatcacaagcagcttgactccgcaattgtagaaaaactgatcttcctcaagagaacagatttgttccttttgactacactactcaccaagaacagagttgctaacacgggccttttccttccacgaatcccgaccttatcattttcaaaccaagatcaaggtgagattcgcggatatcatctctctctttgctcttgtagtttctacgtttgttttgtataagatttcaggtaattcctctaaagtaagtaagcttagttttttgtatacgtaagtttttctaatgggattctttggcttgtgtacatataaagatgtagtagtaatgtatgctctgatgaatc

SEQ ID NO: 11680 - protein, 659 aa, Arabidopsis thaliana
MVAAAISTTDPRNPPRDRPQSLTNNGGQRRPRGKQVPSRYLSPSPSHSVSSTTTTTTTTTTTTSSSSSSSSSAILRTSKRYPSPSPLLSRSTTNSASNSIKTPSLLPKRSQSVDRRRPSAVSVTVGTEMSAATKMLITSTRSLSVSFQGEAFSLPISKKKETTSTPVSHRKSTPERRRSTPVRDQRENSKPVDQQRWPGASRRGNSESVVPNSLSRSLDCGSDRGKLGSGFVGRSMLHNSMIDESPRVSVNGRLSLDLGGRDEYLDIGDDIQRRPNNGLTSSVSCDFTASDTDSVSSGSTNGVQECGSGVNGEISKSKSLPRNIMASARFWQETNSRLRRLQDPGSPLSSSPGLKTSSISSKFGLSKRFSSDAVPLSSPRGMASPVRGSAIRSASPSKLWATTTSSPARALSSPSRARNGVSDQMNAYNRNNTPSILSFSADIRRGKIGEDRVMDAHLLRLLYNRDLQWRFVNARADSTVMVQRLNAEKNLWNAWVSISELRHSVTLKRIKLLLLRQKLKLASILRGQMGFLEEWSLLDRDHSSSLSGATESLKASTLRLPIVGKTVVDIQDLKHAVSSAVDVMQAMSSSIFSLTSKVDEMNSVMVETVNVTAKEKVLLERCQGCLSRVAAMQVTDCSMKTHIIQLSRIPITSSLTPQL

SEQ ID NO: 11681 - protein, 531 aa, Arabidopsis thaliana
MSAATKMLITSTRSLSVSFQGEAFSLPISKKKETTSTPVSHRKSTPERRRSTPVRDQRENSKPVDQQRWPGASRRGNSESVVPNSLSRSLDCGSDRGKLGSGFVGRSMLHNSMIDESPRVSVNGRLSLDLGGRDEYLDIGDDIQRRPNNGLTSSVSCDFTASDTDSVSSGSTNGVQECGSGVNGEISKSKSLPRNIMASARFWQETNSRLRRLQDPGSPLSSSPGLKTSSISSKFGLSKRFSSDAVPLSSPRGMASPVRGSAIRSASPSKLWATTTSSPARALSSPSRARNGVSDQMNAYNRNNTPSILSFSADIRRGKIGEDRVMDAHLLRLLYNRDLQWRFVNARADSTVMVQRLNAEKNLWNAWVSISELRHSVTLKRIKLLLLRQKLKLASILRGQMGFLEEWSLLDRDHSSSLSGATESLKASTLRLPIVGKTVVDIQDLKHAVSSAVDVMQAMSSSIFSLTSKVDEMNSVMVETVNVTAKEKVLLERCQGCLSRVAAMQVTDCSMKTHIIQLSRIPITSSLTPQL

SEQ ID NO: 11682 - protein, 525 aa, Arabidopsis thaliana
MLITSTRSLSVSFQGEAFSLPISKKKETTSTPVSHRKSTPERRRSTPVRDQRENSKPVDQQRWPGASRRGNSESVVPNSLSRSLDCGSDRGKLGSGFVGRSMLHNSMIDESPRVSVNGRLSLDLGGRDEYLDIGDDIQRRPNNGLTSSVSCDFTASDTDSVSSGSTNGVQECGSGVNGEISKSKSLPRNIMASARFWQETNSRLRRLQDPGSPLSSSPGLKTSSISSKFGLSKRFSSDAVPLSSPRGMASPVRGSAIRSASPSKLWATTTSSPARALSSPSRARNGVSDQMNAYNRNNTPSILSFSADIRRGKIGEDRVMDAHLLRLLYNRDLQWRFVNARADSTVMVQRLNAEKNLWNAWVSISELRHSVTLKRIKLLLLRQKLKLASILRGQMGFLEEWSLLDRDHSSSLSGATESLKASTLRLPIVGKTVVDIQDLKHAVSSAVDVMQAMSSSIFSLTSKVDEMNSVMVETVNVTAKEKVLLERCQGCLSRVAAMQVTDCSMKTHIIQLSRIPITSSLTPQL

SEQ ID NO: 11683 - DNA, 2357 bp, Arabidopsis thaliana
ggttcaaaacaaaaccacttttcaaacattggaactatctaagtattgaacacaaagatggccaaagtgttgacactacttgttcttcgactactcatgaacctcttacttatcggttggatttctctctggatcatcaaacccacgaccatatggatacaatcttggcgtcaagctgaagataccgccagacacactttcttcggctattacggtctcaactttgccgtattttcattccctcctattgctctctctatcgttggactcatttacttgagtttactgccacaacatcatcatccaacaagaggagggaggggtgcagctattactgtctcaagaccagccattatcaatagcttcattggaattgtgtcttgtttcgagatacttgctcttcttttgttcctactctttcttgcttggaacttctatgcccgtgtctctaacgacttcaagaagctgatgcctgtcaaaaccatgaatcttaacttatggcagcttaagtactatagagttgctacaaggtttggtctattagccgaagcatgtctctctcttcttcttttccctgtcttgaggggactctcgatgttccggttacttaacattgagtttgcagcttctgtaaaatatcatgtgtggttcgggaccggtttgatcttcttttctttggttcatggtggaagcactctgttcatatggactattactcatcacattgaagaagagatttggaaatggcagagaacgggtcgggtatatgtagctggactaatcagccttgtaacaggattactgatgtggatcacatcacttcctcaaattcgaaggaaaaaatttgaagttttctattacacacaccatttgtatatagtttttcttgtagctttcttgtttcatgccggtgatcgtcacttctactgggtcctcccaggcatgtttctctttggactcgacaagatacttcggattgttcaatcacgatctgaaagctgcattctttccgccaatctcttctcttgtaaagccattgagcttgtcttgccaaaggacccaatgcttaactatgcaccatcaagttttatattcttgaacattccgttggtctcacggtttcaatggcatccctttagtattatctcaagctcgagtgtagacaaacactcattgtctattatgatgaaatgtgagggagattggacaaattctgtttataacaaaatagaagaagcggcaaattgtgaaaataagattaacaacataatcgtaagagtggaaggtccttatggacctgcctcggtagattttctcaggtatgataatctgtttcttgtggcgggaggaattgggatcacaccatttctaagcattttgaaagaactagcgagcaaaaaccgactcaaatctcccaagagagtgcagcttgtgtttgcggttaggacattccaagatcttaacatgttgcttccgatagcatctataatctttaacccaatctacaacttaaacctcaagttaaaagtttttgtcacccaagaaaaaaagccttccaatggtacaacaacattgcaagagttcttggctcaatcacaagttcagtctattcacctcggaatcgacgagcactattcaagattcccgattcgcgggcctgaaagtttcagatggcttgccacattagtccttataaccgtgcttacgtttctcggcttcttgataggtttaagccatttctttgtaccttctgaacacaagaatcatccaggggttatgaagttagctgcttcaggagcaatgaagacagctaaagaaaaggttccttcatgggttccagatttgattatcattgtctcttacgttatagctatctcagttggtggtttcgctgcaactattctacaacggagacgaaaacataaagaggcaccaagaatgtctaaagaagtagtaattaaaccagaggaaagaaacttcaccgagttaaaaccaattcctcttactgaggaacatgagatacatatcggagaaaggccaaaactcgaagagataatgtcggagtttgagaaggacttgagaggatggtcgagtgttggagttttagtatgtggaccagagtcagtgaaagaagctgcggcatcaatgtgtcgccaatggacccagtgttttggagtagaggatttaagaagaagcagaatgaagatgaatctaaattttcattctcttaatttcaacctctaatctaacaacattttctaagtttgtatcgttagtttctcattctcctgtattttttatcttatagttgtataatttttgggtctctatcttattttaatgtttgcagttaaaac

SEQ ID NO: 11684 - protein, 728 aa, Arabidopsis thaliana
MAKVLTLLVLRLLMNLLLIGWISLWIIKPTTIWIQSWRQAEDTARHTFFGYYGLNFAVFSFPPIALSIVGLIYLSLLPQHHHPTRGGRGAAITVSRPAIINSFIGIVSCFEILALLLFLLFLAWNFYARVSNDFKKLMPVKTMNLNLWQLKYYRVATRFGLLAEACLSLLLFPVLRGLSMFRLLNIEFAASVKYHVWFGTGLIFFSLVHGGSTLFIWTITHHIEEEIWKWQRTGRVYVAGLISLVTGLLMWITSLPQIRRKKFEVFYYTHHLYIVFLVAFLFHAGDRHFYWVLPGMFLFGLDKILRIVQSRSESCILSANLFSCKAIELVLPKDPMLNYAPSSFIFLNIPLVSRFQWHPFSIISSSSVDKHSLSIMMKCEGDWTNSVYNKIEEAANCENKINNIIVRVEGPYGPASVDFLRYDNLFLVAGGIGITPFLSILKELASKNRLKSPKRVQLVFAVRTFQDLNMLLPIASIIFNPIYNLNLKLKVFVTQEKKPSNGTTTLQEFLAQSQVQSIHLGIDEHYSRFPIRGPESFRWLATLVLITVLTFLGFLIGLSHFFVPSEHKNHPGVMKLAASGAMKTAKEKVPSWVPDLIIIVSYVIAISVGGFAATILQRRRKHKEAPRMSKEVVIKPEERNFTELKPIPLTEEHEIHIGERPKLEEIMSEFEKDLRGWSSVGVLVCGPESVKEAAASMCRQWTQCFGVEDLRRSRMKMNLNFHSLNFNL

SEQ ID NO: 11685 - protein, 715 aa, Arabidopsis thaliana
MNLLLIGWISLWIIKPTTIWIQSWRQAEDTARHTFFGYYGLNFAVFSFPPIALSIVGLIYLSLLPQHHHPTRGGRGAAITVSRPAIINSFIGIVSCFEILALLLFLLFLAWNFYARVSNDFKKLMPVKTMNLNLWQLKYYRVATRFGLLAEACLSLLLFPVLRGLSMFRLLNIEFAASVKYHVWFGTGLIFFSLVHGGSTLFIWTITHHIEEEIWKWQRTGRVYVAGLISLVTGLLMWITSLPQIRRKKFEVFYYTHHLYIVFLVAFLFHAGDRHFYWVLPGMFLFGLDKILRIVQSRSESCILSANLFSCKAIELVLPKDPMLNYAPSSFIFLNIPLVSRFQWHPFSIISSSSVDKHSLSIMMKCEGDWTNSVYNKIEEAANCENKINNIIVRVEGPYGPASVDFLRYDNLFLVAGGIGITPFLSILKELASKNRLKSPKRVQLVFAVRTFQDLNMLLPIASIIFNPIYNLNLKLKVFVTQEKKPSNGTTTLQEFLAQSQVQSIHLGIDEHYSRFPIRGPESFRWLATLVLITVLTFLGFLIGLSHFFVPSEHKNHPGVMKLAASGAMKTAKEKVPSWVPDLIIIVSYVIAISVGGFAATILQRRRKHKEAPRMSKEVVIKPEERNFTELKPIPLTEEHEIHIGERPKLEEIMSEFEKDLRGWSSVGVLVCGPESVKEAAASMCRQWTQCFGVEDLRRSRMKMNLNFHSLNFNL

SEQ ID NO: 11686 - protein, 591 aa, Arabidopsis thaliana
MPVKTMNLNLWQLKYYRVATRFGLLAEACLSLLLFPVLRGLSMFRLLNIEFAASVKYHVWFGTGLIFFSLVHGGSTLFIWTITHHIEEEIWKWQRTGRVYVAGLISLVTGLLMWITSLPQIRRKKFEVFYYTHHLYIVFLVAFLFHAGDRHFYWVLPGMFLFGLDKILRIVQSRSESCILSANLFSCKAIELVLPKDPMLNYAPSSFIFLNIPLVSRFQWHPFSIISSSSVDKHSLSIMMKCEGDWTNSVYNKIEEAANCENKINNIIVRVEGPYGPASVDFLRYDNLFLVAGGIGITPFLSILKELASKNRLKSPKRVQLVFAVRTFQDLNMLLPIASIIFNPIYNLNLKLKVFVTQEKKPSNGTTTLQEFLAQSQVQSIHLGIDEHYSRFPIRGPESFRWLATLVLITVLTFLGFLIGLSHFFVPSEHKNHPGVMKLAASGAMKTAKEKVPSWVPDLIIIVSYVIAISVGGFAATILQRRRKHKEAPRMSKEVVIKPEERNFTELKPIPLTEEHEIHIGERPKLEEIMSEFEKDLRGWSSVGVLVCGPESVKEAAASMCRQWTQCFGVEDLRRSRMKMNLNFHSLNFNL

SEQ ID NO: 11687 - DNA, 1986 bp, Arabidopsis thaliana
attacagagttttcagaaaccatatgtagtcttagattctcttttgccaaagaagaaaattttactctgccatacaactttttgtctctttctctactaataataataatccgaactttgtttgttcttctacttcaattcataatctttgacggcgatgactatggagcaagaaattgaagtcttggaccagtttccggttgggatgagagttcttgctgttgacgatgaccagacttgtctccgtattctccagactttgcttcagcgctgccaatatcacgttacaacaacgaatcaggcacagaccgcattggagttgttgagggagaacaagaataagtttgatcttgttattagcgatgtcgacatgccagacatggatggtttcaagctgcttgagcttgttggtcttgaaatggacttacctgtcataatgttatctgcgcatagcgatccaaagtatgtgatgaaaggagtcaagcacggtgcctgtgattatctgcttaaaccggttcgaattgaggagcttaagaacatatggcaacatgttgtgagaaagagcaaacttaagaagaataagagcaatgtgagtaatggttcaggaaactgtgataaagcaaacagaaaacgtaaagaacagtatgaagaggaggaagaggaagaaagagggaatgataatgatgatccaacggcgcagaagaagcctcgtgttctttggacgcatgagctgcacaataaattcctagcagctgttgatcatttaggcgttgagagagctgttccaaaaaagattctagatctgatgaatgttgacaaactcactagagagaatgttgcaagccaccttcagaaattccgcgttgctctgaagaaggtgtctgatgacgccattcaacaagctaacagggcggctattgactcacattttatgcaaatgaattctcagaaaggacttggtggcttctaccaccaccaccgcggaatacctgttggatccggtcagttccatggtggaaccacaatgatgaggcattactcttcaaataggaatcttggtcgtctgaattcccttggagcaggaatgttccaaccagtctcatcatcgtttcctcgtaaccataatgatggaggaaacatacttcagggtttgccgctagaagagcttcagatcaacaacaacatcaacagggcttttccaagctttacttcacaacaaaactctccaatggtagctcccagtaatctgttacttctcgagggtaacccgcagtcatcatctttaccctcaaacccgggtttttctcctcatttcgagatcagcaagcgtctagaacattggtcaaacgctgcattgtcaaccaacattccacagagtgatgttcattcaaaacctgacaccttggaatggaatgcgttctgcgactcagctagtccgctagtaaacccaaacctggatacaaatccggcatctctctgcagaaacacgggttttggatccacaaatgctgcacaaacagacttcttttatccattacagatgaatcagcagcctgcaaacaactcaggtccagtgacagaagctcaactgtttagaagtagcaatccaaacgaaggtttactcatgggacaacagaagcttcagagtggtttgatggcttctgatgctggttccttagatgatatagtcaattccttaatgacacaggaacagagccaatctgatttctcggaaggtgattgggatttggatggtttagctcactcggaacatgcatacgagaaactccattttcccttttctttgtcagcttgagaaacctgttttattcagacacaatcaattattattatcttttggttctgtctcttctctcttctctgtaatgaaagtgtaagctattgtttaccgctcccccactggtttgagcaacttaggaagatccaaatccataaataaaattcaaaaagtaccctctttgctcc

SEQ ID NO: 11688 - protein, 552 aa, Arabidopsis thaliana
MTMEQEIEVLDQFPVGMRVLAVDDDQTCLRILQTLLQRCQYHVTTTNQAQTALELLRENKNKFDLVISDVDMPDMDGFKLLELVGLEMDLPVIMLSAHSDPKYVMKGVKHGACDYLLKPVRIEELKNIWQHVVRKSKLKKNKSNVSNGSGNCDKANRKRKEQYEEEEEEERGNDNDDPTAQKKPRVLWTHELHNKFLAAVDHLGVERAVPKKILDLMNVDKLTRENVASHLQKFRVALKKVSDDAIQQANRAAIDSHFMQMNSQKGLGGFYHHHRGIPVGSGQFHGGTTMMRHYSSNRNLGRLNSLGAGMFQPVSSSFPRNHNDGGNILQGLPLEELQINNNINRAFPSFTSQQNSPMVAPSNLLLLEGNPQSSSLPSNPGFSPHFEISKRLEHWSNAALSTNIPQSDVHSKPDTLEWNAFCDSASPLVNPNLDTNPASLCRNTGFGSTNAAQTDFFYPLQMNQQPANNSGPVTEAQLFRSSNPNEGLLMGQQKLQSGLMASDAGSLDDIVNSLMTQEQSQSDFSEGDWDLDGLAHSEHAYEKLHFPFSLSA

SEQ ID NO: 11689 - protein, 550 aa, Arabidopsis thaliana
MEQEIEVLDQFPVGMRVLAVDDDQTCLRILQTLLQRCQYHVTTTNQAQTALELLRENKNKFDLVISDVDMPDMDGFKLLELVGLEMDLPVIMLSAHSDPKYVMKGVKHGACDYLLKPVRIEELKNIWQHVVRKSKLKKNKSNVSNGSGNCDKANRKRKEQYEEEEEEERGNDNDDPTAQKKPRVLWTHELHNKFLAAVDHLGVERAVPKKILDLMNVDKLTRENVASHLQKFRVALKKVSDDAIQQANRAAIDSHFMQMNSQKGLGGFYHHHRGIPVGSGQFHGGTTMMRHYSSNRNLGRLNSLGAGMFQPVSSSFPRNHNDGGNILQGLPLEELQINNNINRAFPSFTSQQNSPMVAPSNLLLLEGNPQSSSLPSNPGFSPHFEISKRLEHWSNAALSTNIPQSDVHSKPDTLEWNAFCDSASPLVNPNLDTNPASLCRNTGFGSTNAAQTDFFYPLQMNQQPANNSGPVTEAQLFRSSNPNEGLLMGQQKLQSGLMASDAGSLDDIVNSLMTQEQSQSDFSEGDWDLDGLAHSEHAYEKLHFPFSLSA

SEQ ID NO: 11690 - protein, 536 aa, Arabidopsis thaliana
MRVLAVDDDQTCLRILQTLLQRCQYHVTTTNQAQTALELLRENKNKFDLVISDVDMPDMDGFKLLELVGLEMDLPVIMLSAHSDPKYVMKGVKHGACDYLLKPVRIEELKNIWQHVVRKSKLKKNKSNVSNGSGNCDKANRKRKEQYEEEEEEERGNDNDDPTAQKKPRVLWTHELHNKFLAAVDHLGVERAVPKKILDLMNVDKLTRENVASHLQKFRVALKKVSDDAIQQANRAAIDSHFMQMNSQKGLGGFYHHHRGIPVGSGQFHGGTTMMRHYSSNRNLGRLNSLGAGMFQPVSSSFPRNHNDGGNILQGLPLEELQINNNINRAFPSFTSQQNSPMVAPSNLLLLEGNPQSSSLPSNPGFSPHFEISKRLEHWSNAALSTNIPQSDVHSKPDTLEWNAFCDSASPLVNPNLDTNPASLCRNTGFGSTNAAQTDFFYPLQMNQQPANNSGPVTEAQLFRSSNPNEGLLMGQQKLQSGLMASDAGSLDDIVNSLMTQEQSQSDFSEGDWDLDGLAHSEHAYEKLHFPFSLSA

SEQ ID NO: 11691 - DNA, 2380 bp, Arabidopsis thaliana
ggcttttcttctttcttacttaaaaagtcgctatctagtcaaatcggagaagacggtgtttcattgaattcgaatttgtttgtcgattcgattttaccgtcgccggtaatggatccggagtcgaaaaatgcgggagtctctgttgtcgttaatctcgacagtgacagtgacagtgacaatgacgacggagtaggaggaagaggagcttttcgaagcatggcgtccctaatggacaaacatcaagttccaagtacgactgctgacgcgacggttgctcctcgagaaaacctagagtgccggagcttttggaaggccggagaaaacttcgtgatccctaccggtgttactaatccagctgctccaggtatggttgagcatgctcgtgttcatccaaagtttcttcactcgaatgctacttcacacaaataggcttttggagcaatagccgagctaattgacaatgctgttgacgagatacaaaatggtgctacgtttgttaagattgataagatcaatattgtcaaagataattccccagctttagttttccaagatgatggcggtggaatggatcccgatgggctcagaaaatgcatgagcttaggctactcatcaaagaagtctaatacgacgattggacagtatggaaatggtttcaagacaagtaccatgagacttggagctgatgatattgtttttactcgctcaactcgtggaggcaaatctactcagagcgttggccttctgtcatacacattcctcagaaaaactggtcaggatgatgtcgttgttcctatgattgatattgatacatccaaggagcgaccacaaccaattatctatggatctgcagaagattgggctgccagccttgaaattatactcaagtggtctccgttttctacagagggcgaactttggcagcagctcgaggatattggaactcatggaacaaaagtaattatatacaacttgtggcttaatgatgaaggaatctacgagctgagttttcacgacgacaatgaggacatccgactccgagatgaaagtgtccatgacagtaaacgggtgcatcataatttattggaactgagatctcatatttcataccacttacgttactctctgagggcttatgcttcaatgttatatctcaaaaggttcaataatttcaaaattatacttcgtggaatccctgtggagcagttcaacattgctgatgaattaagattacctgagactattaagtacaatccccatacaacaaaggaaaaagctcccactgaaatcaaagttggatttataaaggaggcgcctaagcttgcagtttgtggtttcaatgtctatcacaaaaaccgtctcatccggcctttctggaaggtcactatgggaggggaaaggagaggcagtggtgttgtgggagttcttgaagcaaactttatagaaccggcccacgataagcaagattttgagaggtcttctctatttcagcggttggaggcaaggctgaaaaagattgtctctaattactggtctcctcttcctctccaaaacctttaaaatatatttatgtcaatatcattttggttccaaaccgcaatgtctttggttgactattccactgcttgttatggagaaaaacaggaatacacactgccacgtattcggatactgtacttatggaatgcctgcagataagtcgaaaaggatagcaatacctgatcaaccgcctactgtcaatacattcaatcccttgcctttgccttctgatgaaattagtcaaggtggtcagataatacgtgatcaaccgcctactgttaatacattcaatcctttacctttgccttctgatagagtcagtcaaggtggtccgataatacgtgaaatcagtcttagtaacgccacttcaagccgtatagctgctgttgcagcaccgcatttgagaaattaaacaggtttaagaggtaacttccaaccagtgcagctcaaccctcaacctgcggctaccgatactgaaaacaacctcgttggcaagtcagcgcatgagataagcgaagagaacatacaactcttcatgaggtgcgaggaatatgtaaagaaagagactgaactggaacagacggtaagtaacttagcaaaggaactggaagaaactaaaagtaaatgtgcacgacttgcattactcgtggatgctaagaggagggagatgcaacaagtttagtaaaaatgttaatatggctctctggaatctgaaaaacactagtttaattttgctaatacatatatatgcagcgtatgtatatgtcaggaagacagttataatctaacgcaagtctctggaaatagttctatttaaagaatcataagttgagattgtatg

SEQ ID NO: 11692 - protein, 330 aa, Arabidopsis thaliana
MDPDGLRKCMSLGYSSKKSNTTIGQYGNGFKTSTMRLGADDIVFTRSTRGGKSTQSVGLLSYTFLRKTGQDDVVVPMIDIDTSKERPQPIIYGSAEDWAASLEIILKWSPFSTEGELWQQLEDIGTHGTKVIIYNLWLNDEGIYELSFHDDNEDIRLRDESVHDSKRVHHNLLELRSHISYHLRYSLRAYASMLYLKRFNNFKIILRGIPVEQFNIADELRLPETIKYNPHTTKEKAPTEIKVGFIKEAPKLAVCGFNVYHKNRLIRPFWKVTMGGERRGSGVVGVLEANFIEPAHDKQDFERSSLFQRLEARLKKIVSNYWSPLPLQNL

SEQ ID NO: 11693 - protein, 321 aa, Arabidopsis thaliana
MSLGYSSKKSNTTIGQYGNGFKTSTMRLGADDIVFTRSTRGGKSTQSVGLLSYTFLRKTGQDDVVVPMIDIDTSKERPQPIIYGSAEDWAASLEIILKWSPFSTEGELWQQLEDIGTHGTKVIIYNLWLNDEGIYELSFHDDNEDIRLRDESVHDSKRVHHNLLELRSHISYHLRYSLRAYASMLYLKRFNNFKIILRGIPVEQFNIADELRLPETIKYNPHTTKEKAPTEIKVGFIKEAPKLAVCGFNVYHKNRLIRPFWKVTMGGERRGSGVVGVLEANFIEPAHDKQDFERSSLFQRLEARLKKIVSNYWSPLPLQNL

SEQ ID NO: 11694 - protein, 296 aa, Arabidopsis thaliana
MRLGADDIVFTRSTRGGKSTQSVGLLSYTFLRKTGQDDVVVPMIDIDTSKERPQPIIYGSAEDWAASLEIILKWSPFSTEGELWQQLEDIGTHGTKVIIYNLWLNDEGIYELSFHDDNEDIRLRDESVHDSKRVHHNLLELRSHISYHLRYSLRAYASMLYLKRFNNFKIILRGIPVEQFNIADELRLPETIKYNPHTTKEKAPTEIKVGFIKEAPKLAVCGFNVYHKNRLIRPFWKVTMGGERRGSGVVGVLEANFIEPAHDKQDFERSSLFQRLEARLKKIVSNYWSPLPLQNL

SEQ ID NO: 11695 - DNA, 2411 bp, Arabidopsis thaliana
atctctctctttcgcactttctgcaaatggttctcttcttcctttaagctcaatctcgccactggagtctcaatcgggaaagatctccatcttctccggagaaaaaacggatccgtaaatagtgattttttaaacagagaataatcaattcaatggaggaagagaaagcttctgctgctcagagcttaatcgatgtagttaacgagatttctgcgatttccgattatcgtataacagtgaagaagctttgttataatctagcgagaagattaaagctgcttgttcctatgtttgaggaaattagagaaagtaacgaaccgatcagcgaagatacgttgaagactttgatgaatttgaaggaagctatgtgttcagcgaaggattatctcaaattttgtagccatgggagcaagatttatctggtgatggagagggaacaagtgacaagtaaattgatggaggtgtctgttaagttagaacaatctttaagccagattccatatgaagaactcgatatatcggatgaagttagagaacaggttgagctggttcttagtcagtttcggcgagctaaaggaagagtagatgtatcagatgatgagctatatgaagatcttcagtcgctttgcaacaaaagtagtgatgtagatgcttatcagcctgtgctagagcgggttgcgaagaagttacatttgatggagattcctgacctagctcaagaatcagtggctctgcatgaaatggttgcttcaagcggtggagatgttggtgaaaatattgaggagatggcaatggtattaaagatgattaaggattttgtgcagacggaggatgataatggcgaggagcagaaagtaggagttaactctagaagcaatggacagacttctacggcagcgagtcagaagatacctgtgattcctgatgattttcgctgtccgatttcgctggaaatgatgagagatccagttattgtttcatcagggcagacatacgaacgcacatgtattgagaaatggatagaaggtggacactcgacatgtccaaaaacacagcaggcgctaacaagcacaaccctcacaccaaactatgttctccgtagtctcatagctcagtggtgcgaggccaacgatattgagcctccaaagcctccgagcagtttaagacccagaaaagtatcgtccttctcatctcccgcagaagcgaacaagattgaagatcttatgtggagacttgcgtacggaaaccccgaggaccaacgatctgcagctggggaaatccgccttcttgcaaaacgaaatgcagacaaccgcgtggccatagccgaagctggagccatacctcttctcgtaggtctcctctcaactcctgattctcgtattcaagaacattcggtaacagctcttctaaacctctccatatgtgagaacaacaaaggagccattgtttcagctggagctattcctggtatagttcaagtgcttaagaaaggaagcatggaggccagagagaatgcggcggctacacttttcagtctatcagtgatcgatgaaaataaagtgactatcggtgccttaggagcaattccgccactcgttgtattacttaatgaaggtacacaaagaggcaagaaagatgctgctactgcactctttaacctctgtatataccaaggaaacaaaggaaaagctatacgtgcaggagtgattcccacgttgactagactcttgacagagcccggaagcggaatggtcgatgaggcactcgcgattttggcgattctctctagccaccccgaaggaaaagcaatcataggatcctctgatgcagtcccaagtttggttgagtttatcagaactggctcgcctagaaacagagaaaacgcagctgctgttctagtccacctctgttctggagacccacaacatcttgtcgaagcgcagaaactcggccttatgggtccattgatagatttagctggaaatgggacggatagagggaaacgaaaagcagcgcagttgcttgaacgcatcagccgtctcgctaacagcagaaggaaacggctgtgtcacaaccggaagaagaagctgaaccaacacatccagaatccaccacagaagctgcagatacttaaagattgtctttgttttggatcctcgggtcatctctttcacgtacgtatgtttattattctcactttttgtttgtgctactcatcctccctcgaggtaggattcacggtagacgcggaagagggaaatggcctccttctccgatctacttttaactttatggtgatatctttgtgtggacagagcaatctggtccacaggagagaaaagcaaatatgcatacatacacgtcaacttgtatcattgtaacactatgtttgtaatcatttccacgagctt

SEQ ID NO: 11696 - protein, 742 aa, Arabidopsis thaliana
MEEEKASAAQSLIDVVNEISAISDYRITVKKLCYNLARRLKLLVPMFEEIRESNEPISEDTLKTLMNLKEAMCSAKDYLKFCSHGSKIYLVMEREQVTSKLMEVSVKLEQSLSQIPYEELDISDEVREQVELVLSQFRRAKGRVDVSDDELYEDLQSLCNKSSDVDAYQPVLERVAKKLHLMEIPDLAQESVALHEMVASSGGDVGENIEEMAMVLKMIKDFVQTEDDNGEEQKVGVNSRSNGQTSTAASQKIPVIPDDFRCPISLEMMRDPVIVSSGQTYERTCIEKWIEGGHSTCPKTQQALTSTTLTPNYVLRSLIAQWCEANDIEPPKPPSSLRPRKVSSFSSPAEANKIEDLMWRLAYGNPEDQRSAAGEIRLLAKRNADNRVAIAEAGAIPLLVGLLSTPDSRIQEHSVTALLNLSICENNKGAIVSAGAIPGIVQVLKKGSMEARENAAATLFSLSVIDENKVTIGALGAIPPLVVLLNEGTQRGKKDAATALFNLCIYQGNKGKAIRAGVIPTLTRLLTEPGSGMVDEALAILAILSSHPEGKAIIGSSDAVPSLVEFIRTGSPRNRENAAAVLVHLCSGDPQHLVEAQKLGLMGPLIDLAGNGTDRGKRKAAQLLERISRLANSRRKRLCHNRKKKLNQHIQNPPQKLQILKDCLCFGSSGHLFHVRMFIILTFCLCYSSSLEVGFTVDAEEGNGLLLRSTFNFMVISLCGQSNLVHRREKQICIHTRQLVSL

SEQ ID NO: 11697 - protein, 697 aa, Arabidopsis thaliana
MFEEIRESNEPISEDTLKTLMNLKEAMCSAKDYLKFCSHGSKIYLVMEREQVTSKLMEVSVKLEQSLSQIPYEELDISDEVREQVELVLSQFRRAKGRVDVSDDELYEDLQSLCNKSSDVDAYQPVLERVAKKLHLMEIPDLAQESVALHEMVASSGGDVGENIEEMAMVLKMIKDFVQTEDDNGEEQKVGVNSRSNGQTSTAASQKIPVIPDDFRCPISLEMMRDPVIVSSGQTYERTCIEKWIEGGHSTCPKTQQALTSTTLTPNYVLRSLIAQWCEANDIEPPKPPSSLRPRKVSSFSSPAEANKIEDLMWRLAYGNPEDQRSAAGEIRLLAKRNADNRVAIAEAGAIPLLVGLLSTPDSRIQEHSVTALLNLSICENNKGAIVSAGAIPGIVQVLKKGSMEARENAAATLFSLSVIDENKVTIGALGAIPPLVVLLNEGTQRGKKDAATALFNLCIYQGNKGKAIRAGVIPTLTRLLTEPGSGMVDEALAILAILSSHPEGKAIIGSSDAVPSLVEFIRTGSPRNRENAAAVLVHLCSGDPQHLVEAQKLGLMGPLIDLAGNGTDRGKRKAAQLLERISRLANSRRKRLCHNRKKKLNQHIQNPPQKLQILKDCLCFGSSGHLFHVRMFIILTFCLCYSSSLEVGFTVDAEEGNGLLLRSTFNFMVISLCGQSNLVHRREKQICIHTRQLVSL

SEQ ID NO: 11698 - protein, 677 aa, Arabidopsis thaliana
MNLKEAMCSAKDYLKFCSHGSKIYLVMEREQVTSKLMEVSVKLEQSLSQIPYEELDISDEVREQVELVLSQFRRAKGRVDVSDDELYEDLQSLCNKSSDVDAYQPVLERVAKKLHLMEIPDLAQESVALHEMVASSGGDVGENIEEMAMVLKMIKDFVQTEDDNGEEQKVGVNSRSNGQTSTAASQKIPVIPDDFRCPISLEMMRDPVIVSSGQTYERTCIEKWIEGGHSTCPKTQQALTSTTLTPNYVLRSLIAQWCEANDIEPPKPPSSLRPRKVSSFSSPAEANKIEDLMWRLAYGNPEDQRSAAGEIRLLAKRNADNRVAIAEAGAIPLLVGLLSTPDSRIQEHSVTALLNLSICENNKGAIVSAGAIPGIVQVLKKGSMEARENAAATLFSLSVIDENKVTIGALGAIPPLVVLLNEGTQRGKKDAATALFNLCIYQGNKGKAIRAGVIPTLTRLLTEPGSGMVDEALAILAILSSHPEGKAIIGSSDAVPSLVEFIRTGSPRNRENAAAVLVHLCSGDPQHLVEAQKLGLMGPLIDLAGNGTDRGKRKAAQLLERISRLANSRRKRLCHNRKKKLNQHIQNPPQKLQILKDCLCFGSSGHLFHVRMFIILTFCLCYSSSLEVGFTVDAEEGNGLLLRSTFNFMVISLCGQSNLVHRREKQICIHTRQLVSL

SEQ ID NO: 11699 - DNA, 2409 bp, Arabidopsis thaliana
gaggatttcaatcgtctgggttgctgctttctggatttctccgacagaaacccaaaccctagtaccaccaccttgaagctccttaattctatccgttctcgaattgaatcgtgcataggttagggttttagtggcgtgtatatatatattccaatttgttgattccttgggctctctcattgcggtggcaacaagttaaggtctttgataataatctcgtaaaggaattttcagtgaagatgggaagcgccgatctagtcgatgatcggaccttaacggtgatttcagtgtggaaggagttgctaagttgaaagagatggtcaaggataaactcaaggagtatatgggcgattacacggatgacattcttgtggaatatgtgatcgtcttgcttagaaatgggagaagaaaagaggaagcaaataatgaattgaagatatttcttggagatgatagcgactcttttgtggcctggttgtgggatcatctggctgaaagtgtagatgagtactttagttctaatgtggagggaactaccataaaaagctcattgataagcagtcatgaggataaagcacttgttcctctggattctgaatttgataagggacgatctgataaatcaaatggtgcacgtcgtggtagacaatggagaagccagccgactaatgtctctgagatccctcctcttctgagctctgaggttcacaaaattcataactacgagaagaaagatcataaacaccgacataataaaaggtctccatctccgcaggctcaatctcagaggaaaaggtctagaactgacgactcacggaatgaacagagggaagctaaacctgatgtctctcgccggctgcttcagtttgctgtgcgagatgctctagctatatcaaggccggcaaatagttcgactgaatcctcattaaaacgtcttcgttcagtggtgtccacatctactcaaaactcatctgaccctgatccagctcggaaaattcgatctgttgctagggttgtgaatcccatggctactgttatgaaagctgtcgcggaagcagccgaagatgccaagaaaccaaaatctgggagaagtgtctttgacagaattagtcattctactggatcagagaccctggaccagaatatggtacttggtgaagtttcccccaaggatgaagaatctaggaattttagccaaggtcaggaagcggtacagcttcaatacacacagagtcttgccaataatggagtgtattttgagaacatgacaaataatgacactggcttgaatccagatttttcgtctgatcgaggcagactcggttcaagtgttaatgtgtctcacccaagtacttatcttgggaacagaattaacaatccaaatagtctgcagcatcgtttagtcgatgactccaaacgagttaaagggacaaattatcaaaatcgccttcctgaagttgcaaccaagcataagactgcaagtttctcaggcaatatagatacagggaaaacagtaaagttataggagcagaggaaaataccagatgtgggtctgcaaagatatatggacgaaggcagattagtttctagtgaagctaccactcaattatcgacgcagaaaatcttgggtgatacaatagggaatggaaatgtaaaacctgctgccagtgtgaaagaagaatcaacgaccaataaatctgttcctgggacattatccactacccgccctttggaagatgctagttctcgaacaatctttgtcgccaatgttcattttggtgccaccaaggacagcctttcaaggcattttaacaagtttggtgaagtgcttaaagctttcatagttactgatccagcaacaggacaaccaagtggatcagcgtacattgagttcacacgcaaagaagctgcagagaatgcattgtctctggatggtacctctttcatgtctcggattctcaagattgtgaaaggaagcaatggacaaaatcaagaggctgcatcgagcatgtcatggtctcgaggtggaaggttcacaagagccccatcatactttagaggtggtgcagttaggggtcgttctgttgttagaggtggaggcaggagtatgcaatggaagcgtgattcagctgacacaggaaacaacaacaatgtagctcccaacaatgctcgtagtctcacgtatgtcagagcagaatcaaaatcagacggagttgccaacgattgattgattagaaagagaagcaagagcttaggtaaaacaaaggaagatgagttttatcatctaccttatcggatattattctcaattgtttttttttttggctctataaagctactccaaaactttcacttgtattgactttcatgcttcttcaatcgtttggttattaatgaaaaaagaaagac

SEQ ID NO: 11700 - protein, 402 aa, Arabidopsis thaliana
MVKDKLKEYMGDYTDDILVEYVIVLLRNGRRKEEANNELKIFLGDDSDSFVAWLWDHLAESVDEYFSSNVEGTTIKSSLISSHEDKALVPLDSEFDKGRSDKSNGARRGRQWRSQPTNVSEIPPLLSSEVHKIHNYEKKDHKHRHNKRSPSPQAQSQRKRSRTDDSRNEQREAKPDVSRRLLQFAVRDALAISRPANSSTESSLKRLRSVVSTSTQNSSDPDPARKIRSVARVVNPMATVMKAVAEAAEDAKKPKSGRSVFDRISHSTGSETLDQNMVLGEVSPKDEESRNFSQGQEAVQLQYTQSLANNGVYFENMTNNDTGLNPDFSSDRGRLGSSVNVSHPSTYLGNRINNPNSLQHRLVDDSKRVKGTNYQNRLPEVATKHKTASFSGNIDTGKTVKL

SEQ ID NO: 11701 - protein, 393 aa, Arabidopsis thaliana
MGDYTDDILVEYVIVLLRNGRRKEEANNELKIFLGDDSDSFVAWLWDHLAESVDEYFSSNVEGTTIKSSLISSHEDKALVPLDSEFDKGRSDKSNGARRGRQWRSQPTNVSEIPPLLSSEVHKIHNYEKKDHKHRHNKRSPSPQAQSQRKRSRTDDSRNEQREAKPDVSRRLLQFAVRDALAISRPANSSTESSLKRLRSVVSTSTQNSSDPDPARKIRSVARVVNPMATVMKAVAEAAEDAKKPKSGRSVFDRISHSTGSETLDQNMVLGEVSPKDEESRNFSQGQEAVQLQYTQSLANNGVYFENMTNNDTGLNPDFSSDRGRLGSSVNVSHPSTYLGNRINNPNSLQHRLVDDSKRVKGTNYQNRLPEVATKHKTASFSGNIDTGKTVKL

SEQ ID NO: 11702 - protein, 220 aa, Arabidopsis thaliana
MDEGRLVSSEATTQLSTQKILGDTIGNGNVKPAASVKEESTTNKSVPGTLSTTRPLEDASSRTIFVANVHFGATKDSLSRHFNKFGEVLKAFIVTDPATGQPSGSAYIEFTRKEAAENALSLDGTSFMSRILKIVKGSNGQNQEAASSMSWSRGGRFTRAPSYFRGGAVRGRSVVRGGGRSMQWKRDSADTGNNNNVAPNNARSLTYVRAESKSDGVAND

SEQ ID NO: 11703 - DNA, 1555 bp, Arabidopsis thaliana
aaaaaaatccccaaaactgagagaaactaaacaaattcaaatgaccaccaccgataaatccgccggaatcgtaactgactcggaagcctgaccggagacttctcttctcctcaatcctcacgaaggatctaccaaaaaagctccttctgattcctaccacttcgcttacatcatctacttcaccctcggcgttggctttcttcttccatggaacgcattcatcaccgccgtcgattacttctcttacctctatccttccacggccgtcgatcggatcttcgccgttatctacatgctcgttgctcttgtttgtctattcgttatcgttgtcttctatgcacataagagcctcgctagctttagaatcaatctcggtcttttactcttcgtaatcgccttgcttgtggttcctgttttggatctggtttatgttaaaggacaggtcggattatacgccggattcgatgttacttccgccgccgttgccttatccggtctaggtgatgcacttatgcaaggaggtcttatcggtgttgccggtgaaatgccggagaggtatatgcaagctgttgtcgccggaactgctggctccggtgttcttgtgtcactattgagaattttgactaaagctgtgtatcctcaagatcctgatggtttgagaaaaagtgcgaatctatactttgctgtggggattgttgttatggtgatttgtgctgtgttctacaacgtagcgcataagcttccggtgatcaagttccatgaggagcgtaagaatgaagaactaatcagagagaagagcgaagagaaaggttctttaaccggtttagcgtggaggacaacactctgggatatcgtgacgaaagttaaatctcatggtttcgggattgttctcttatacatggtgacattgtcgatatttcctggatacattactgaggatgttcattcagagcttcttacagattggtaccctattctgcttattgcagcgtacaatgtgtttgacttggttggtaagtgtctgactgctgtattcatgctggaggatgagaaaatcgctgttggtggttccattgctaggctcttgttttaccctctcttctggggttgcttgcacggtccgatgtttctcaggactgagattcctgtaactatactgacatgcttattgggacttaccaacgggtacttgacaagcgtcttgatgattctggctccaaaatcggttccactgagacactcggagactgcaggaatcgtcactgtgatgttcttggttgttggtttggcctctggatctgtcattgcttggttctgggtcatttgattctaccaaagctttgttatctgtatttgttgaattctttaagcttcgacaaactcagcttcattaatctgtgaatcatcctgtgtgaattgttcgtttttccttcagtaatatgtgaaaattcttctttctacaccatgaacacaaaagacttataagctgtaaaaggctacaacgtgtattcagtgtttctcattgtaagtggttcaaggattcttcagtttaatt

SEQ ID NO: 11704 - protein, 344 aa, Arabidopsis thaliana
MLVALVCLFVIVVFYAHKSLASFRINLGLLLFVIALLVVPVLDLVYVKGQVGLYAGFDVTSAAVALSGLGDALMQGGLIGVAGEMPERYMQAVVAGTAGSGVLVSLLRILTKAVYPQDPDGLRKSANLYFAVGIVVMVICAVFYNVAHKLPVIKFHEERKNEELIREKSEEKGSLTGLAWRTTLWDIVTKVKSHGFGIVLLYMVTLSIFPGYITEDVHSELLTDWYPILLIAAYNVFDLVGKCLTAVFMLEDEKIAVGGSIARLLFYPLFWGCLHGPMFLRTEIPVTILTCLLGLTNGYLTSVLMILAPKSVPLRHSETAGIVTVMFLVVGLASGSVIAWFWVI

SEQ ID NO: 11705 - protein, 271 aa, Arabidopsis thaliana
MQGGLIGVAGEMPERYMQAVVAGTAGSGVLVSLLRILTKAVYPQDPDGLRKSANLYFAVGIVVMVICAVFYNVAHKLPVIKFHEERKNEELIREKSEEKGSLTGLAWRTTLWDIVTKVKSHGFGIVLLYMVTLSIFPGYITEDVHSELLTDWYPILLIAAYNVFDLVGKCLTAVFMLEDEKIAVGGSIARLLFYPLFWGCLHGPMFLRTEIPVTILTCLLGLTNGYLTSVLMILAPKSVPLRHSETAGIVTVMFLVVGLASGSVIAWFWVI

SEQ ID NO: 11706 - protein, 260 aa, Arabidopsis thaliana
MPERYMQAVVAGTAGSGVLVSLLRILTKAVYPQDPDGLRKSANLYFAVGIVVMVICAVFYNVAHKLPVIKFHEERKNEELIREKSEEKGSLTGLAWRTTLWDIVTKVKSHGFGIVLLYMVTLSIFPGYITEDVHSELLTDWYPILLIAAYNVFDLVGKCLTAVFMLEDEKIAVGGSIARLLFYPLFWGCLHGPMFLRTEIPVTILTCLLGLTNGYLTSVLMILAPKSVPLRHSETAGIVTVMFLVVGLASGSVIAWFWVI

SEQ ID NO: 11707 - DNA, 1762 bp, Arabidopsis thaliana
gcgtctctttttctccacccgcgagaagataatgagagtttcgccggcggcaacactctcagtctctttgactactccactacctataactttaaccaaagctcgtttctccggcgaaccattgcgactcaaacaatatgttttgagtaatcagatttgctcgcgaccaaaacatctcctctcagagtttaaacccaccagaagatggaccttctcctgcaaatgccgtaacagaggaagaaatggttacgcgaaattcgatgacgaaggagaagatttcattgttgttaacttctatcggtttgtatcggagatcctgaggctgagattgagaagcacctctcattcttaaaggatttgaatatacgaggtcgaatatatctcaatgaacaaggaatcaacgcgcagtacagtggaccatctaaagatgctcttgcatatgttgaatggttaaaaggagatgatagattctcggatttgcttgtccagatgtctcccgctatgaataggcatgcattccctaagttgaagctacagaacaaaccctccttagtgcagtatgagggaggaatttcacaccttcccctacttgatccacccatgcgagcaaaacccttagagccatctgaatggaaaaggaaactgaaagacttaacggatgatgatgaagcctcaccttcaaatagtggcaaaagttacatattattggatgtcagaaatggttatgagtgggatgttggtcactttcgtggggcacatagacctgaagttgattgctttcggaacacttcttttgggctatctgatgaaaaggaagccccttcagaccctttgataaatgttgacaaggaaaagacagatatactgatgtattgtactggaggtatacgttgtgatgtgtattcaacagttttgagacagcggggtttcaagaacctgtatacattgaagggtggagtttcccattaccttaaagaagaaggcaccgccgaatgggttggaaatctgtttgtgtttgactctcgtctttctctcccaccagctgcctacaatgacaacgtcgtggataaagccgtaggtgataacgtcgtggatgaagccggaagaactccacaaacgcccgtggatacaagttttgcaagatgctatctttgtaattcccaagttcaggaactaagacatcggaactgtgctaaccttgactgcaatcggcttttcttatgctgtgcagaatgtgttgtcgacttgaagggttgttgctgttcagactgcattagtgctcccagacttagaccagtcttgcatggagtaaagagatatgaaaaatggcatgtatatcgcgattcagaagagcaaaatgcgccattggtttgatcatatttgagagattttagaggctagtgatgtagggcattcatgacttgtcactttatattatgttcactgctcccccttgtgattgcttacagtgtttcgttggtctaccatgggcaagtgatcagatgagaacagcacacagcaaaagcagatgagtgctgaagcagaagctaatgaagtttaattacaagcctgttccaggaagaactagtagtcattctttgaggttcttcaggtgtaacacttgtcagaactcagaactcaattttcatttcaacatgtacaaacaaagcttgtaacaattcacaacttaatctatctgctgtaatttcggcacaatgcaaactgtaatgcaacaagatggtacttgttaataccaaagtag

SEQ ID NO: 11708 - protein, 294 aa, Arabidopsis thaliana
MSPAMNRHAFPKLKLQNKPSLVQYEGGISHLPLLDPPMRAKPLEPSEWKRKLKDLTDDDEASPSNSGKSYILLDVRNGYEWDVGHFRGAHRPEVDCFRNTSFGLSDEKEAPSDPLINVDKEKTDILMYCTGGIRCDVYSTVLRQRGFKNLYTLKGGVSHYLKEEGTAEWVGNLFVFDSRLSLPPAAYNDNVVDKAVGDNVVDEAGRTPQTPVDTSFARCYLCNSQVQELRHRNCANLDCNRLFLCCAECVVDLKGCCCSDCISAPRLRPVLHGVKRYEKWHVYRDSEEQNAPLV

SEQ ID NO: 11709 - protein, 290 aa, Arabidopsis thaliana
MNRHAFPKLKLQNKPSLVQYEGGISHLPLLDPPMRAKPLEPSEWKRKLKDLTDDDEASPSNSGKSYILLDVRNGYEWDVGHFRGAHRPEVDCFRNTSFGLSDEKEAPSDPLINVDKEKTDILMYCTGGIRCDVYSTVLRQRGFKNLYTLKGGVSHYLKEEGTAEWVGNLFVFDSRLSLPPAAYNDNVVDKAVGDNVVDEAGRTPQTPVDTSFARCYLCNSQVQELRHRNCANLDCNRLFLCCAECVVDLKGCCCSDCISAPRLRPVLHGVKRYEKWHVYRDSEEQNAPLV

SEQ ID NO: 11710 - protein, 257 aa, Arabidopsis thaliana
MRAKPLEPSEWKRKLKDLTDDDEASPSNSGKSYILLDVRNGYEWDVGHFRGAHRPEVDCFRNTSFGLSDEKEAPSDPLINVDKEKTDILMYCTGGIRCDVYSTVLRQRGFKNLYTLKGGVSHYLKEEGTAEWVGNLFVFDSRLSLPPAAYNDNVVDKAVGDNVVDEAGRTPQTPVDTSFARCYLCNSQVQELRHRNCANLDCNRLFLCCAECVVDLKGCCCSDCISAPRLRPVLHGVKRYEKWHVYRDSEEQNAPLV

SEQ ID NO: 11711 - DNA, 2667 bp, Arabidopsis thaliana
acctattattcatgaatgcattgaagatgtcacagtgagaacaaaaaaaaagttttccaggcatggcttcacgtgatgacatcttcctcgaccaagaacttcgagaaaagatactcagaaagtgaagtgagagagagagaaaatgccggggaattttaatgcttcttcttctcttcttagtgctcactaccagaagatttctttccgccattaaagagcagagtagagcagagctctcactttcttcttcttcttcttcattttttacctttcccttttttgcttcgatcgagatgctttagcataatggggcagatctggaaagtgacttaataatagaaagtgatggctttgaggagattcatgggatgctttttacggaaactcgatttcgaactgtatcaatcatttctgtttcttttatgagctgaggaaaagagccactctttctgatttgattgattcatcattcatcgacaatggcttcttcttcttcttcttcgtcttcgagtacggtgtcgttcgtagtctttgcatttacagtcttcttctgtttggttactccggcgagatctagcgacgtcgaagctttactaagcttgaaatcttcaatcgatccatctaattcgatttcttggagaggaacagatctctgcaactggcaaggtgttagagaatgtatgaatggaagagtctccaagcttgttcttgagtacttgaatctcaccggctcacttaacgagaagagtttgaaccagttggatcaacttagggttcttagtttcaaagctaactctctctccggttcaatccctaacctctccggtttggttaacctcaaatcggtttatcttaacgataacaacttctccggcgacttcccggagtctctcacgtctcttcaccgattgaaaactattttcctctccggaaacagactgtccggtcgaatccctagctcgttgcttcgtctctctcgtctttacacgctcaatgttgaggacaatctcttcactggttcgattcctcctcttaaccagacaagtctcagatacttcaatgtatccaacaataagctctctggtcaaattccactgacacgagctttgaagcagtttgatgagtcatcgtttaccggaaacgtcgctctttgcggcgatcagattggaagtccatgcggaatctcacctgcgccgtctgcgaaaccaacgcctatacctaagtctaagaagagcaaagcgaagctgatcgggattatcgccggaagcgttgccggcggagtactaatccttatcttgctattgacgttgcttatcgtctgctggcgacggaagcggcggaaccaggcaccgagggaagatagaaaaggtaaaggaatagcggaagcagaaggagcaacaactgcagagacagagagagacattgagaggaaagacagaggattctcatgggaaagaggcgaagaaggagcagtgggaactctggttttccttggaaccagtgattcaggcgagacggtagtgagatacaccatggaagatctgcttaaagcttcggcagagacactgggaagaggaacgttggggagcacgtacaaggctgtgatggagtctgggttcattgtcactgtgaagaggctcaagaacgcaaggtatcctcgcatggaggagttcaagagacatgttgagatccttggacagctcaaacacccaaatctggtgcctctcagagcctattttcaagccaaggaagaacgcttgctcgtctacgattacttccctaatggcagtctctttactcttattcacggaactagggcttctggaagtgggaagcctcttcactggacttcatgcctgaaaatagctgaggacttggcctcagctctgctctacatacatcagaatcctggcttgactcatgggaatttgaaatcgtccaatgtcttgttaggtcctgattttgagtcctgcctcacggattacggcctcagcactctccatgaccctgactcagttgaagaaacaagcgcagtgtctctcttttacaaagctccagagtgcagagacccacggaaagcctctacacagcccgctgatgtgtatagctttggggttcttcttctcgagcttctaacaggtagaacaccattccaggaccttgttcaagaatatgggtcagatatctcaagatgggtgcgtgcagtgagagaggaagagactgaatcaggtgaggaaccgacttcttcaggcaacgaagcatcagaggagaaacttcaggcacttttaagtatcgcaacggtttgtgtgaccattcaacccgataaccggcctgtgatgagagaggtgttgaagatggtgagggatgcaagggctgaagcaccattctcgtctaacagtagcgaacattcgcccgggagatggtcggataccgttcagagattgccaagggatgatcaagtgagcatttagagaaattgggtgggccttcttcattgctttcatagaatgacacgtatgattcttgaagtagggttcatagtgtaaagcttcttttttattttgtaacgccattttgattcatcgaccttgtaggacttgcataagatctattgaattgaaatgctggcattgagtagttgaagaacagaagaatcttttttttttc

SEQ ID NO: 11712 - protein, 663 aa, Arabidopsis thaliana
MASSSSSSSSSTVSFVVFAFTVFFCLVTPARSSDVEALLSLKSSIDPSNSISWRGTDLCNWQGVRECMNGRVSKLVLEYLNLTGSLNEKSLNQLDQLRVLSFKANSLSGSIPNLSGLVNLKSVYLNDNNFSGDFPESLTSLHRLKTIFLSGNRLSGRIPSSLLRLSRLYTLNVEDNLFTGSIPPLNQTSLRYFNVSNNKLSGQIPLTRALKQFDESSFTGNVALCGDQIGSPCGISPAPSAKPTPIPKSKKSKAKLIGIIAGSVAGGVLILILLLTLLIVCWRRKRRNQAPREDRKGKGIAEAEGATTAETERDIERKDRGFSWERGEEGAVGTLVFLGTSDSGETVVRYTMEDLLKASAETLGRGTLGSTYKAVMESGFIVTVKRLKNARYPRMEEFKRHVEILGQLKHPNLVPLRAYFQAKEERLLVYDYFPNGSLFTLIHGTRASGSGKPLHWTSCLKIAEDLASALLYIHQNPGLTHGNLKSSNVLLGPDFESCLTDYGLSTLHDPDSVEETSAVSLFYKAPECRDPRKASTQPADVYSFGVLLLELLTGRTPFQDLVQEYGSDISRWVRAVREEETESGEEPTSSGNEASEEKLQALLSIATVCVTIQPDNRPVMREVLKMVRDARAEAPFSSNSSEHSPGRWSDTVQRLPRDDQVSI

SEQ ID NO: 11713 - protein, 596 aa, Arabidopsis thaliana
MNGRVSKLVLEYLNLTGSLNEKSLNQLDQLRVLSFKANSLSGSIPNLSGLVNLKSVYLNDNNFSGDFPESLTSLHRLKTIFLSGNRLSGRIPSSLLRLSRLYTLNVEDNLFTGSIPPLNQTSLRYFNVSNNKLSGQIPLTRALKQFDESSFTGNVALCGDQIGSPCGISPAPSAKPTPIPKSKKSKAKLIGIIAGSVAGGVLILILLLTLLIVCWRRKRRNQAPREDRKGKGIAEAEGATTAETERDIERKDRGFSWERGEEGAVGTLVFLGTSDSGETVVRYTMEDLLKASAETLGRGTLGSTYKAVMESGFIVTVKRLKNARYPRMEEFKRHVEILGQLKHPNLVPLRAYFQAKEERLLVYDYFPNGSLFTLIHGTRASGSGKPLHWTSCLKIAEDLASALLYIHQNPGLTHGNLKSSNVLLGPDFESCLTDYGLSTLHDPDSVEETSAVSLFYKAPECRDPRKASTQPADVYSFGVLLLELLTGRTPFQDLVQEYGSDISRWVRAVREEETESGEEPTSSGNEASEEKLQALLSIATVCVTIQPDNRPVMREVLKMVRDARAEAPFSSNSSEHSPGRWSDTVQRLPRDDQVSI

SEQ ID NO: 11714 - DNA, 2500 bp, Arabidopsis thaliana
ggcgcaacgttgtaacaaaaatcgtcctctcagttccaatctctctcagattctcctcctcatcacaattcctcactcctttgattcttgtcccagagtcacgtcctctcctattcgggtctctacagagtctaactctgacccgacccgacccaattcactaaatggaggacgaaccaaagctcccaaccgatgacggtccaactttcgacgaatcgtgtaaaatctcgtctgagatattgaccgccggtgatcggaaattacttaaagttgaactcctcaaagaggagaccacgctcgtatcgtggaagaagcttatggatgaggctagcaaagaaaacggcggcttgttcgtttcggctcccgaacggcctcttaatgccaaccctaacctcgagtttcgccttgcaccgggggcacaaacagagaatgaaatggtgaatcaacctcatcctaatcgtcttaactctgttatagccaagattgagagactttatatgggtaaagacggtagtgatggggaagagttagacggtgctcctgacgatgatgactatgacactgaagattcatttatcgatgatgctgaattggatgagtattttgaagttgataattcgccaattaaacatgatggattttttgtcaatagaggaaagttagaacgaattgaaccttcagctacatcgaaccagcagcaaccaaagaaaaggcgaaggaaggagtcagcaaaaccttgtggcgatgttgttgatgtatccagaaaacaagccaagatggctaagacggctgggggaaaggatcaatctgcttctcctgggccctcttcgaagaaaatttccaatgattcaaagacggtgcaagattcgttttcccctttgaaagcgcaaaatggcaatgattccttagttttggaaaatgtgaagcatactgataaagcgaatcaccagccaatgaatgccacgagtccgaagtcaaaggcagctggatcttctggcccccttcatccgaagtgcagcagcaaaagtgttcatgaacaatctaattcccctccaggaaaatctcggccaaatgtttcggcaaaatcagcagtagttcgtcagcaagttaacaatggcatgcctgacctggacactgcaacggaaagcaaaacatctattcaaatatctaaaaaaagcggttcaaatggccggcctaaatactcgacacttgagaaagccatcaggaatttggagaaggtggtcgctgaatcaaggcctcctgctgccactgagaatcaagatgccgatatctcttcccaagcagtgaagaggggattgccaggagatgtaaaattgcatcttgctaaagttgctagaatcgcgtatgcgagccaaggtgaaatatcaggagagttaatcaatcgtctcatgggcattgtcggtcatctaatacagattagatcacttaagaggaacttgaaaatcatgattgattcgatcgtcactgcaaatcgagaaaaagatactagatttcagcggatcaagagtgaaataactgagatgttaaaaacacaagttccacttatggaatcccaggaaacaaatcaagaagctggaacatcagacgattttcaggatgttggatctcttggaaagtcacctgtgaagaagtttgtcatggatgtggcgctggaggaaaaattgtgtgatctatatgacgtgtttgttgagggaatggatgaacattcaggttcacaaatcagaaagctttattcagatctagctcaactctggcccaatagtttagttgacaatcatgagatcaggcgtgccatttgccgggaaaaggaaaggcggagagcattggaaggaaacattgggaaggagatggatcaaacgaagataacaaagaagaaacagacacaattggtccctaaatctgagggtattacttatcccgacaaggcttcaggtgttgaagttaaagcaagtgttgtcctaactgcaaccaccacgtccttagtggactgtcaacctgcagcagactcgtcctttgaaaggtcaaagcagcaacatgagaaattaaagcgaacttcgagcttaagcaatcctgcagcagaaggaaagaaagtcagaagaaagacagaaccagctctagaagaaactcacctgcccgcagagaaacccctcgttctggccctgaagcggcagacacatctaaaatccaagacacataaacaggtacaggtacatccacagtccaaggcacataaacaggcacaggtacatccaaaggccaagacacagactcctccagacctgaacctgccaagttaggtactacagcttagattttttttctcaaagtctggctctagccttgcctttgtttttcgtagctatagtttcgcttctaatttttgcgcctagtattgattttctagtcgtttcttacgtagaagacgaagtccctctcctctgtacaaattaaagatgttaagagaagctccaattctttc

SEQ ID NO: 11715 - protein, 717 aa, Arabidopsis thaliana
MEDEPKLPTDDGPTFDESCKISSEILTAGDRKLLKVELLKEETTLVSWKKLMDEASKENGGLFVSAPERPLNANPNLEFRLAPGAQTENEMVNQPHPNRLNSVIAKIERLYMGKDGSDGEELDGAPDDDDYDTEDSFIDDAELDEYFEVDNSPIKHDGFFVNRGKLERIEPSATSNQQQPKKRRRKESAKPCGDVVDVSRKQAKMAKTAGGKDQSASPGPSSKKISNDSKTVQDSFSPLKAQNGNDSLVLENVKHTDKANHQPMNATSPKSKAAGSSGPLHPKCSSKSVHEQSNSPPGKSRPNVSAKSAVVRQQVNNGMPDLDTATESKTSIQISKKSGSNGRPKYSTLEKAIRNLEKVVAESRPPAATENQDADISSQAVKRGLPGDVKLHLAKVARIAYASQGEISGELINRLMGIVGHLIQIRSLKRNLKIMIDSIVTANREKDTRFQRIKSEITEMLKTQVPLMESQETNQEAGTSDDFQDVGSLGKSPVKKFVMDVALEEKLCDLYDVFVEGMDEHSGSQIRKLYSDLAQLWPNSLVDNHEIRRAICREKERRRALEGNIGKEMDQTKITKKKQTQLVPKSEGITYPDKASGVEVKASVVLTATTTSLVDCQPAADSSFERSKQQHEKLKRTSSLSNPAAEGKKVRRKTEPALEETHLPAEKPLVLALKRQTHLKSKTHKQVQVHPQSKAHKQAQVHPKAKTQTPPDLNLPS

SEQ ID NO: 11716 - protein, 666 aa, Arabidopsis thaliana
MDEASKENGGLFVSAPERPLNANPNLEFRLAPGAQTENEMVNQPHPNRLNSVIAKIERLYMGKDGSDGEELDGAPDDDDYDTEDSFIDDAELDEYFEVDNSPIKHDGFFVNRGKLERIEPSATSNQQQPKKRRRKESAKPCGDVVDVSRKQAKMAKTAGGKDQSASPGPSSKKISNDSKTVQDSFSPLKAQNGNDSLVLENVKHTDKANHQPMNATSPKSKAAGSSGPLHPKCSSKSVHEQSNSPPGKSRPNVSAKSAVVRQQVNNGMPDLDTATESKTSIQISKKSGSNGRPKYSTLEKAIRNLEKVVAESRPPAATENQDADISSQAVKRGLPGDVKLHLAKVARIAYASQGEISGELINRLMGIVGHLIQIRSLKRNLKIMIDSIVTANREKDTRFQRIKSEITEMLKTQVPLMESQETNQEAGTSDDFQDVGSLGKSPVKKFVMDVALEEKLCDLYDVFVEGMDEHSGSQIRKLYSDLAQLWPNSLVDNHEIRRAICREKERRRALEGNIGKEMDQTKITKKKQTQLVPKSEGITYPDKASGVEVKASVVLTATTTSLVDCQPAADSSFERSKQQHEKLKRTSSLSNPAAEGKKVRRKTEPALEETHLPAEKPLVLALKRQTHLKSKTHKQVQVHPQSKAHKQAQVHPKAKTQTPPDLNLPS

SEQ ID NO: 11717 - protein, 627 aa, Arabidopsis thaliana
MVNQPHPNRLNSVIAKIERLYMGKDGSDGEELDGAPDDDDYDTEDSFIDDAELDEYFEVDNSPIKHDGFFVNRGKLERIEPSATSNQQQPKKRRRKESAKPCGDVVDVSRKQAKMAKTAGGKDQSASPGPSSKKISNDSKTVQDSFSPLKAQNGNDSLVLENVKHTDKANHQPMNATSPKSKAAGSSGPLHPKCSSKSVHEQSNSPPGKSRPNVSAKSAVVRQQVNNGMPDLDTATESKTSIQISKKSGSNGRPKYSTLEKAIRNLEKVVAESRPPAATENQDADISSQAVKRGLPGDVKLHLAKVARIAYASQGEISGELINRLMGIVGHLIQIRSLKRNLKIMIDSIVTANREKDTRFQRIKSEITEMLKTQVPLMESQETNQEAGTSDDFQDVGSLGKSPVKKFVMDVALEEKLCDLYDVFVEGMDEHSGSQIRKLYSDLAQLWPNSLVDNHEIRRAICREKERRRALEGNIGKEMDQTKITKKKQTQLVPKSEGITYPDKASGVEVKASVVLTATTTSLVDCQPAADSSFERSKQQHEKLKRTSSLSNPAAEGKKVRRKTEPALEETHLPAEKPLVLALKRQTHLKSKTHKQVQVHPQSKAHKQAQVHPKAKTQTPPDLNLPS

SEQ ID NO: 11718 - DNA, 2468 bp, Arabidopsis thaliana
attgtcacttgcctgcgcaaattagggcttctccttcgcaagactctcttcgccagcttaaatcagtgcaaagtgctgaatataccttaggagctaaatgtcggatgatcctggacagatgttgctcatctatgatgatccttcagatcagcgatccttgtctttagatgatgctagtagtactgaggaatctccagacgataacaatctctctttagaagcagttcacaatgccattccctatctcggacaaattttccttacacatgatgctgcttacgagttctatagtacatttgcaaagcgttgcgggttctccatacgccgtcacaggacagaaggaaaagacggagttggcaaaggacttactaggcgctactttgtttgtcaccgtgctggtaacacacctatcaaaactctaagcgaaggaaaaccacagagaaacagaaggtcttctcgatgtggatgtcaagcatacttaaggattagtaaacttactgagttaggttcaacggaatggcgtgttactggttttgctaatcaccacaatcatgagctcttagaaccaaaccaagttcgttttcttcctgcgtacaggtccatatcagatgcagataaaagtcggattttgatgttttccaagacaggaatttcagttcagcagatgatgaggctcttggagcttgagaagtgtgtcgagccaggatttttaccattcaccgaaaaggatgtcaggaatttgcttcagtcattcaagaaactcgatcctgaggatgagaacattgatttcctgaggatgtgccaaagcataaaggagaaagaccctaactttaagttcgagtttactttggatgcaaatgataagttagaaaatattgcctggtcgtatgcttcttccattcagtcatatgaactctttggagatgctgttgttttcgatacaacacatcgcttaagtgctgttgagatgccacttggaatatgggttggagttaataactatggtgtcccttgcttcttcggttgtgtgcttctacgggatgaaaatttgagatcgtggtcatgggcactacaggtttgtggcacactaagctgattaagttccttgtccacttatttctgtttaaaattcttggcaattgtctgtgggtagggagaataagcaaatcaatttgtatttgttgtagaagttatttgtagaagctcctatatccaaaaagcaaatcaattttgtttgtactctgacattttctttaatttgtctcttatggaaggcattcacagggttcatgaatgggaaggcacctcaaacgatattaacagaccataatatgtgtctcaaagaagccatagctggagagatgccagccactaagcatgcactctgcatatggatggttgttggaaagtttccatcctggtttaatgccggtcttggggagcggtacaacgactggaaagctgaattttatcgcctctaccatctggaatccgttgaggagtttgagttgggttggagagacatggtgaactcttttggactgcacacaaacagacacatcaacaacttgtatgcctcacgttccttgtggtctttaccatacctgagaagccattttctagctggaatgactttgactggccgatccaaagccattaacgcctttattcagaggttcttgagcgcacaaacccggctagctcactttgtagaacaagtggctgttgttgtggattttaaagaccaagctacagaacagcaaacaatgcagcagaatctccaaaacatcagcctaaaaactggcgcccccatggaatctcacgcagcctcggtgctcactccttttgcattctccaagctccaagaacagcttgtgcttgctgctcactacgcatcgttccagatggatgaggggtatctcgtgaggcaccacacaaaactcgatggaggaagaaaagtgtattgggttcctcaagaaggcatcataagctgcagttgccaactgtttgagttctctgggtttctctgcaggcacgcactccgtgttctctccacaggaaactgttttcaggtccctgataggtatcttccacttaggtggcgcaggatcagcacgtcgtttagcaagacgttcagaagtaacgctgaggatcatggagagagagttcagcttctgcagaatctggtttcgactctggtctcagaatcggctaaatcgaaggagaggctagatattgcaactgagcaaacctccatcctcttatcccgtatcagagagcagcctgtctcctcacttgctatcagagacatttcttcttctgtgcagaggaatttttgataccacaaatgctatgcgtgtctaactatttttagataacataattactttattaacctaatcttacaagattgtaactcttatcttaacttatgcattgttaaaaatatcaatcttatattcgttgac

SEQ ID NO: 11719 - protein, 349 aa, Arabidopsis thaliana
MNGKAPQTILTDHNMCLKEAIAGEMPATKHALCIWMVVGKFPSWFNAGLGERYNDWKAEFYRLYHLESVEEFELGWRDMVNSFGLHTNRHINNLYASRSLWSLPYLRSHFLAGMTLTGRSKAINAFIQRFLSAQTRLAHFVEQVAVVVDFKDQATEQQTMQQNLQNISLKTGAPMESHAASVLTPFAFSKLQEQLVLAAHYASFQMDEGYLVRHHTKLDGGRKVYWVPQEGIISCSCQLFEFSGFLCRHALRVLSTGNCFQVPDRYLPLRWRRISTSFSKTFRSNAEDHGERVQLLQNLVSTLVSESAKSKERLDIATEQTSILLSRIREQPVSSLAIRDISSSVQRNF

SEQ ID NO: 11720 - protein, 335 aa, Arabidopsis thaliana
MCLKEAIAGEMPATKHALCIWMVVGKFPSWFNAGLGERYNDWKAEFYRLYHLESVEEFELGWRDMVNSFGLHTNRHINNLYASRSLWSLPYLRSHFLAGMTLTGRSKAINAFIQRFLSAQTRLAHFVEQVAVVVDFKDQATEQQTMQQNLQNISLKTGAPMESHAASVLTPFAFSKLQEQLVLAAHYASFQMDEGYLVRHHTKLDGGRKVYWVPQEGIISCSCQLFEFSGFLCRHALRVLSTGNCFQVPDRYLPLRWRRISTSFSKTFRSNAEDHGERVQLLQNLVSTLVSESAKSKERLDIATEQTSILLSRIREQPVSSLAIRDISSSVQRNF

SEQ ID NO: 11721 - protein, 332 aa, Arabidopsis thaliana
MSDDPGQMLLIYDDPSDQRSLSLDDASSTEESPDDNNLSLEAVHNAIPYLGQIFLTHDAAYEFYSTFAKRCGFSIRRHRTEGKDGVGKGLTRRYFVCHRAGNTPIKTLSEGKPQRNRRSSRCGCQAYLRISKLTELGSTEWRVTGFANHHNHELLEPNQVRFLPAYRSISDADKSRILMFSKTGISVQQMMRLLELEKCVEPGFLPFTEKDVRNLLQSFKKLDPEDENIDFLRMCQSIKEKDPNFKFEFTLDANDKLENIAWSYASSIQSYELFGDAVVFDTTHRLSAVEMPLGIWVGVNNYGVPCFFGCVLLRDENLRSWSWALQVCGTLS

SEQ ID NO: 11722 - DNA, 1607 bp, Arabidopsis thaliana
ggggaaatcaatcgaaaaccctaggagagataaaaacaaaaatctagacggagatttatggcgacagcgaatcctggccgtggaggtggtagaagaggcggtggagctatggatgacgataagttggtcttcgagactaccgatggaattgagcccatcacgagcttcaatgatatgggcattaaggaagatgtgcttcgcggtgtctacgaatatggattcgagaagccttccgcgattcagcagagggctgttatgccgattcttcaaggacgtgatgttattgctcaagctcagtccggtaccgggaagacatctatgattgctctctccgtttgtcaagtcgttgatacttcttctagagaggttcaggccttgatattatccccaacaagagagctggctacacaaacagagaagacgatacaagctattggattacatgccaatattcaggcacatgcttgcatcggtgggaatagtgttggagaagacatcaggaagctggagcatggtgttcatgttgtgtctgggacacctggtcgtgtctgtgacatgataaagaggagaagtcttcgtaccagagctattaaacttctgattcttgatgaatcagatgaaatgctgagcagagggttcaaggaccagatctatgatgtttacagatatcttccaccagatcttcaggtttgcttggtttctgcaactcttcctcacgagattttggagatgacatccaagtttatgacagaaccagtgaagatacttgtgaagcgtgatgagttgactcttgaaggaatcaaacaattttttgttgctgattgagaaggaagagtggaaatttgatacactctgtgatctttatgacacgcttactatcactcaagctgttatcttctgcaatactaaacgaaaggtggattatcttagtgagaaaatgagaagtcacaacttcactgtctcatcaatgcatggagacatgcctcagaaggagagagacgccatcatgaatgagtttcggtcaggtgatagtcgtgttttgataacaacagatgtatgggcacgtgggattgatgtgcaacaagtttctcttgttatcaattatgatctccccaacaaccgtgagctctacatccatcgtattgggcggtctggtcgattcgggcgtaagggtgttgcaatcaactttgttaaaagcgacgacatcaagattctcagagacattgagcagtactacagtacccagattgatgagatgccaatgaatgtagctgatcttatctaaaagagcttgtctgagatttttgtgctttcagcggggaagtgtctggatgaaaaagtattgttgagcgcttctgtcaaattattgcactatcttaacggtgtatttcctttgatgtttctgtgggctcttttgaacaaacttaaactcgcgtgtggtaaatgtttaatgacttgagaagcgatttaggtttagggtttggaccgtttggtttttcgtttcctcgtaattgattctgggggctttgattgtggtttgtgggtcaaaactctcaactatcactacttgtaagacttttgctcgacagttgaaacggttcattgtt

SEQ ID NO: 11723 - protein, 255 aa, Arabidopsis thaliana
MATANPGRGGGRRGGGAMDDDKLVFETTDGIEPITSFNDMGIKEDVLRGVYEYGFEKPSAIQQRAVMPILQGRDVIAQAQSGTGKTSMIALSVCQVVDTSSREVQALILSPTRELATQTEKTIQAIGLHANIQAHACIGGNSVGEDIRKLEHGVHVVSGTPGRVCDMIKRRSLRTRAIKLLILDESDEMLSRGFKDQIYDVYRYLPPDLQVCLVSATLPHEILEMTSKFMTEPVKILVKRDELTLEGIKQFFVAD

SEQ ID NO: 11724 - protein, 238 aa, Arabidopsis thaliana
MDDDKLVFETTDGIEPITSFNDMGIKEDVLRGVYEYGFEKPSAIQQRAVMPILQGRDVIAQAQSGTGKTSMIALSVCQVVDTSSREVQALILSPTRELATQTEKTIQAIGLHANIQAHACIGGNSVGEDIRKLEHGVHVVSGTPGRVCDMIKRRSLRTRAIKLLILDESDEMLSRGFKDQIYDVYRYLPPDLQVCLVSATLPHEILEMTSKFMTEPVKILVKRDELTLEGIKQFFVAD

SEQ ID NO: 11725 - protein, 216 aa, Arabidopsis thaliana
MGIKEDVLRGVYEYGFEKPSAIQQRAVMPILQGRDVIAQAQSGTGKTSMIALSVCQVVDTSSREVQALILSPTRELATQTEKTIQAIGLHANIQAHACIGGNSVGEDIRKLEHGVHVVSGTPGRVCDMIKRRSLRTRAIKLLILDESDEMLSRGFKDQIYDVYRYLPPDLQVCLVSATLPHEILEMTSKFMTEPVKILVKRDELTLEGIKQFFVAD

SEQ ID NO: 11726 - DNA, 1075 bp, Arabidopsis thaliana
ggaaaaaaaggaaatctaaagagacaaataaaaaaggaaatctgaagagctctttgaagagaagaaagaagaggtgaagtcgaggcaggctcgatgttcgtctgaagggagcgatgttacttctaactcgtcagggtcttatccttctaaccatagatatcagaattgcagagagagtgatgatgaagaggaggatgtaacggattgtgacgatagcgatcttgaggatactgatgatgatgattgtgggctgctagatgatgactattataatgatgacaattatgaggacaagctgcacaactgggataaagtagtttatacggaggagattgcggataatgttatggatatagagagggttgaagaaaagggtagtgtgagtgttagagacagaagtggatatgtcaatgcagtactgaacccgattgagaatctttcccaatggaaagctgtgaaagccaaaggaagaacaacaactcaaacacagcctcggaaggagaatgtgataaatgcttccttcagcttggagtctcaggttgatgatttatcatcaacattcagcttgaaccggaaatcaagagatgaaactgagaaacagagaactcaagaaatagctgttgatgctagtctttcaacttggttatccacatcacaaaccacgaccagcggttgtagcagtgttgaaaccacaatgtccgagaagaagaaatactcgaaactggttcaatgccatgatgaaagacctatattgggcgcgttaactgcagaggagataaagcagttctcagctacgaattcgccaaggaaatcgccaagtagaagccctgaatcaccgataattggaacagttggtggttactggaacagtcactcaatggcaacgaacaagtacagtcgaagttcttagaactccaattccacaacagagaaagaattccacacatgtttggttactacattgcctttgtgaaattatttttatcactctgtttgtttgtgtgtgtgtggttgataacaaaatcgttgtgttttgtgtgtgatttgatttagtaatattcattctatttgtttg

SEQ ID NO: 11727 - protein, 187 aa, Arabidopsis thaliana
MDIERVEEKGSVSVRDRSGYVNAVLNPIENLSQWKAVKAKGRTTTQTQPRKENVINASFSLESQVDDLSSTFSLNRKSRDETEKQRTQEIAVDASLSTWLSTSQTTTSGCSSVETTMSEKKKYSKLVQCHDERPILGALTAEEIKQFSATNSPRKSPSRSPESPIIGTVGGYWNSHSMATNKYSRSS

SEQ ID NO: 11728 - DNA, 1310 bp, Arabidopsis thaliana
gacgccgactcaaagaacccaaagctcttggaggaggtgatcttctcttctcagatcatcttctactcttgagtatacccttcctttgaagataattcctagtttgggacttatccttacttctccgggatttcactttaatccaccgaagagttttgacatctgaattgtattgttttgggtgtgatcccgatagaattcgagggtaggaatctgaaagtagggtgatttggtttagaagaagaaagaaatggagggttttgtcgatcactacattgttctaggtttagcttctggagaggaagctctgaagcttaccgagaaggagattgcaaaagcatacaagttgaaagctttggacttgcatcctgataaacgccctgatgatcctgatgcccatgagaaatttcagaggcttaagacatctaacgaggttctcaaagacgagaaagcccggaaactgtttgatgatcttcttagaatccagcgtgagaaacaacataagaaatcgcaagtagattccaagaggcgtaagatgatgtcagatctggaggaaagggagcgttctgctttttctcctaatccttccgctagagcttatgatgaagaagagagaatcgctaggaagcttaaggaggagatagataggatacgtgcaagacatgcgaagaagaaaagtggtttccaaactccagagagtaatgtagatgaaaagagaaaagaagaaagaagtggtgctggagctagtgttcaactcgataaagagagaatgttgaaggtttcttgggaaaaaagtggtgaagggtatacagctggaaggctaagagaagtgttttctgagtttggtgaggttgaagatgttgttattaggagtaccaagaagaaatgttctgctcttattgtaatggctacaaaggatggagctgttgcagcgacgaggacattgtgtggcaatctttctaatccattgttggttgtacctcttcagaaagcagcccaaaccgattttctgacggctaagaaatctgcagaagcagaaccgcagagtaacatagtaggtgccggtcttcaagcttatgaagatgccgtcatgcaaagactgctacaggcggctatggaccagaaaaagcgaaagccacatgatcaagaacaaagctccttcaagaccaaagtgataaagaataaagctctgcttcatgattaagaattaagctccttatacattgtttgtgtacatccaatctcatatcagttgttgttgtagaatttaaaattctaactcttctcgaaaaaaaaaaatgcttcgtatc

SEQ ID NO: 11729 - protein, 317 aa, Arabidopsis thaliana
MEGFVDHYIVLGLASGEEALKLTEKEIAKAYKLKALDLHPDKRPDDPDAHEKFQRLKTSNEVLKDEKARKLFDDLLRIQREKQHKKSQVDSKRRKMMSDLEERERSAFSPNPSARAYDEEERIARKLKEEIDRIRARHAKKKSGFQTPESNVDEKRKEERSGAGASVQLDKERMLKVSWEKSGEGYTAGRLREVFSEFGEVEDVVIRSTKKKCSALIVMATKDGAVAATRTLCGNLSNPLLVVPLQKAAQTDFLTAKKSAEAEPQSNIVGAGLQAYEDAVMQRLLQAAMDQKKRKPHDQEQSSFKTKVIKNKALLHD

SEQ ID NO: 11730 - protein, 222 aa, Arabidopsis thaliana
MMSDLEERERSAFSPNPSARAYDEEERIARKLKEEIDRIRARHAKKKSGFQTPESNVDEKRKEERSGAGASVQLDKERMLKVSWEKSGEGYTAGRLREVFSEFGEVEDVVIRSTKKKCSALIVMATKDGAVAATRTLCGNLSNPLLVVPLQKAAQTDFLTAKKSAEAEPQSNIVGAGLQAYEDAVMQRLLQAAMDQKKRKPHDQEQSSFKTKVIKNKALLHD

SEQ ID NO: 11731 - protein, 221 aa, Arabidopsis thaliana
MSDLEERERSAFSPNPSARAYDEEERIARKLKEEIDRIRARHAKKKSGFQTPESNVDEKRKEERSGAGASVQLDKERMLKVSWEKSGEGYTAGRLREVFSEFGEVEDVVIRSTKKKCSALIVMATKDGAVAATRTLCGNLSNPLLVVPLQKAAQTDFLTAKKSAEAEPQSNIVGAGLQAYEDAVMQRLLQAAMDQKKRKPHDQEQSSFKTKVIKNKALLHD

SEQ ID NO: 11732 - DNA, 2259 bp, Arabidopsis thaliana
gatacagtggttaagctcgttggaccaatatcaatggcgtctgcaacgactcttctcttccaccacggttccactcgagtcctcgtcgctcctagacggtgccaagcttcagtccatagaccctacggcggtttaaagccctttctttccttctgcagcttacctaactccactgcgccgttccgggattcgttgagagcaaaatccgatggattggctcgggcctatgttaccggagcgccgcctatcgtggaagaaccagacccaaagattgaagaatccaaatctgaggctgaatcgaaggatttaattagttgggggcttctgtggagcttgatgagcaagcacaagctcaggctcagtgtttgcttattgactctccttggatgcagtacttgcactctctctatgcctgttttttctgattctttgaagtactgattggggtgagaccggagcctttgtggcggctgctgagcaaaattgctgttttgtactcgttggaacctatctttactattgtttttgtgaccaacatgactgctatctgggaaaacgttatggcgacattaagagctcagattttcagaagggttttgatccaaaaggcagagttcttcgacaaatacaaggttggagagctaacggggctactcacgtctgatcttggtgctctgaatagcattgtgaatgataacatctcacgagatcgtggatttagggcatttacagaggtttttggaacaatatgtatcctatttactctatctcctcaacttgcacctgtacttggtctattgatgctagctgtgtcagttctagttgctgtgtacaagagatcgactgttcctgtttataaatcgcatggattagctcaagcaacaatgtctgattgtgtatcagaaacgttctctgcaatccgaactgtaagatcattcagcggcgaaaaacgtcagatgtctatcttcggtagtcagattcttgcttacaagcttagcggcttaaagcttggtactttcaagtctataaatgaatctataacaagagttgctgtttatatttctctgttggctctttactgtcttgggggaagcaaggtgaagacgggtgagctcgctgttggaacagttgtttcgttcattggatacacattcactctaacatttgctgtccaagggcttgtaaacacgtttggagatctacgtgggacttttgctgctattgacaggatcaattccattttaaacgcggtggacatagatgaggctcttgcctacgggttagaaagagatatacatacaaagaaagtccaagatgaaaaccttaaattgttcttgtctgctggcccaaatgtgaatatccgtcacctcgataagtactacatgtcaaatctgaaatcaactaacaatctacgtaccctaacatgggctggagatgtctgtcttgatgatgtgcattttgcttatcctctacgacccgacgtgaaagttcttgatgggctgagtttgacgttgaattctggtactgtaactgctcttgttggctctagtggtgcgggaaaaagtactattgtacagttattggcacgcttctatgagccaacacaaggacgtattactgtgggtggagaagatgtgaggatgtttgacaagagtgaatgggctaaggttgtctcaattgtgaatcaggaacccgttctcttttctctctccgtggccgagaatattgcatatggtctccccaatgagcatgtgtccaaggacgacatcattaaggcagccaaagctgccaacgctcatgattttataatctcacttcctcagggatacgatacactggttggtgaaagaggaggcttgcttagcggaggacaacgacagagagttgccatagcccgatctctgctgaagaatgcccccatcttgattctcgatgaggccacaagtgcgctggatgcagtgagcgagcggttagtccagagtgcgttgaaccgtctaatgaaagacaggacaacattagtcatcgctcacagactgagcacagttcagagcgcgaatcagatcgctgtgtgctctgatgggaagatcatagagcttggaacacattccgaattggtagcgcaaaagggatcatatgcttcacttgttggcactcagagactagcctttgagtaatttaccttaactcggtgtaatttgtaacaaattactacaaaattacaaatggtagaatctggttttatatacaactttgattaac

SEQ ID NO: 11733 - protein, 545 aa, Arabidopsis thaliana
MTAIWENVMATLRAQIFRRVLIQKAEFFDKYKVGELTGLLTSDLGALNSIVNDNISRDRGFRAFTEVFGTICILFTLSPQLAPVLGLLMLAVSVLVAVYKRSTVPVYKSHGLAQATMSDCVSETFSAIRTVRSFSGEKRQMSIFGSQILAYKLSGLKLGTFKSINESITRVAVYISLLALYCLGGSKVKTGELAVGTVVSFIGYTFTLTFAVQGLVNTFGDLRGTFAAIDRINSILNAVDIDEALAYGLERDIHTKKVQDENLKLFLSAGPNVNIRHLDKYYMSNLKSTNNLRTLTWAGDVCLDDVHFAYPLRPDVKVLDGLSLTLNSGTVTALVGSSGAGKSTIVQLLARFYEPTQGRITVGGEDVRMFDKSEWAKVVSIVNQEPVLFSLSVAENIAYGLPNEHVSKDDIIKAAKAANAHDFIISLPQGYDTLVGERGGLLSGGQRQRVAIARSLLKNAPILILDEATSALDAVSERLVQSALNRLMKDRTTLVIAHRLSTVQSANQIAVCSDGKIIELGTHSELVAQKGSYASLVGTQRLAFE

SEQ ID NO: 11734 - protein, 537 aa, Arabidopsis thaliana
MATLRAQIFRRVLIQKAEFFDKYKVGELTGLLTSDLGALNSIVNDNISRDRGFRAFTEVFGTICILFTLSPQLAPVLGLLMLAVSVLVAVYKRSTVPVYKSHGLAQATMSDCVSETFSAIRTVRSFSGEKRQMSIFGSQILAYKLSGLKLGTFKSINESITRVAVYISLLALYCLGGSKVKTGELAVGTVVSFIGYTFTLTFAVQGLVNTFGDLRGTFAAIDRINSILNAVDIDEALAYGLERDIHTKKVQDENLKLFLSAGPNVNIRHLDKYYMSNLKSTNNLRTLTWAGDVCLDDVHFAYPLRPDVKVLDGLSLTLNSGTVTALVGSSGAGKSTIVQLLARFYEPTQGRITVGGEDVRMFDKSEWAKVVSIVNQEPVLFSLSVAENIAYGLPNEHVSKDDIIKAAKAANAHDFIISLPQGYDTLVGERGGLLSGGQRQRVAIARSLLKNAPILILDEATSALDAVSERLVQSALNRLMKDRTTLVIAHRLSTVQSANQIAVCSDGKIIELGTHSELVAQKGSYASLVGTQRLAFE

SEQ ID NO: 11735 - protein, 457 aa, Arabidopsis thaliana
MLAVSVLVAVYKRSTVPVYKSHGLAQATMSDCVSETFSAIRTVRSFSGEKRQMSIFGSQILAYKLSGLKLGTFKSINESITRVAVYISLLALYCLGGSKVKTGELAVGTVVSFIGYTFTLTFAVQGLVNTFGDLRGTFAAIDRINSILNAVDIDEALAYGLERDIHTKKVQDENLKLFLSAGPNVNIRHLDKYYMSNLKSTNNLRTLTWAGDVCLDDVHFAYPLRPDVKVLDGLSLTLNSGTVTALVGSSGAGKSTIVQLLARFYEPTQGRITVGGEDVRMFDKSEWAKVVSIVNQEPVLFSLSVAENIAYGLPNEHVSKDDIIKAAKAANAHDFIISLPQGYDTLVGERGGLLSGGQRQRVAIARSLLKNAPILILDEATSALDAVSERLVQSALNRLMKDRTTLVIAHRLSTVQSANQIAVCSDGKIIELGTHSELVAQKGSYASLVGTQRLAFE

SEQ ID NO: 11736 - DNA, 1959 bp, Arabidopsis thaliana
gaacaatactcataccatggcttcctgcttccacccttctgctatggctacaagccaccgcgaggaagactccatcattcttttctcagcatcaaactctcctgatgaattctcctctgcttcctcttccttttcttcttcaccactcccaacccctaaccgctactctttaaccgtcactaacctatcctacaccatcaatcacaccccaatactcaattccgtttcattagctgctgaatcctctaaaatcctagccgtggttggaccgagtggaacaggaaaatccactcttttaaagatcatttcaggaagagtgaaccacaaggcactagatccgtcttccgcggttttgatgaacaatcgtaaaatcactgactataaccaactacgaaggctatgcgggtttgtcccgcaggacgatgacctactgcctctacttaccgtgaaagagacgttaatgtatagcgccaaattcagtttgagagattcaacggctaaggaaagagaagagagagtggagagcttgttgagtgatctcggtcttgttctcgtccaagacagcttcgtgggagaaggagacgaagaggatcgtggcgtttcgggtggagagaggaagagagtctctatagccgttgagatgattcgtgatccaccaattctgcttcttgacgaaccaacctctggtttggatagtcgaaactcgcttcaggttgttgagcttttggctactatggcgaaatccaaacagagaaccgtcctcttctccatccaccaaccaagttataggatcctcgattacatctccgattacctgattctttctcgcggatcggttatccacttgggaagtcttgaacatctcgaggactcgatagcgaaactagggtttcagattccagaacagctgaatcctatagaattcgccatggaaatagttgagtccttgagaacttttaagccaaactcggtagctgtcgtagaatcatcatcaatgtggcctgaaaacaacgaaaacgatgggattatctctaagaaagaagcgtttcgtgtcctagacgtcaccgagatctcatacctctgctcaagattctgcaagatcatctatagaacaaagcagttgttcctggcgcgaacaatgcaagcggttgtagctggattaggtctaggtagcgtctacacaagactcaagcgtgacgaagaaggcgttgcagagcggcttggactctttgccttcagcttaagcttcctcctctcttcaacagtcgaagcacttcccatttacctccgagaacgtcgcgttctgatgaaagaatcatctcgtggatcctaccgaatctcatcctacatgatagccaacaccatcgcatttgtaccgttcctcttcgttgtatctctcctcttctccatcccagtctactggatcgtaggcctaaacccatcgattcaagccttctccttctttgtcctctgcgtctggctcatcattctcatggccagttctctggtgcttttcctcagcgctgtttctcctgacttcatctctggtaactccctcatatgcactgttcttggagccttcttcctcttctccggctactttatcccaaaagagaagatcccaaaaccatggatgttcatgtactatgtgtccttgtaccgttacccgctggagtctatggtggtgaatgagtactggagcatgcgagaggaatgcttctccagtgggaacatgggctgcttgatgaccggagaggatgtgttgaaggagagagggcttgacaaggatacgagatggatcaacgtcgggatcatgcttgcctttttcgttttttatcgaatcctctgctggtgtattctactcaggaaggcttccaagtcaacccattaaagatttcattgtatagagagaactgtattcagtcttctatgttcatatacaattacaacttctttttt

SEQ ID NO: 11737 - protein, 629 aa, Arabidopsis thaliana
NNTHTMASCFHPSAMATSHREEDSIILFSASNSPDEFSSASSSFSSSPLPTPNRYSLTVTNLSYTINHTPILNSVSLAAESSKILAVVGPSGTGKSTLLKIISGRVNHKALDPSSAVLMNNRKITDYNQLRRLCGFVPQDDDLLPLLTVKETLMYSAKFSLRDSTAKEREERVESLLSDLGLVLVQDSFVGEGDEEDRGVSGGERKRVSIAVEMIRDPPILLLDEPTSGLDSRNSLQVVELLATMAKSKQRTVLFSIHQPSYRILDYISDYLILSRGSVIHLGSLEHLEDSIAKLGFQIPEQLNPIEFAMEIVESLRTFKPNSVAVVESSSMWPENNENDGIISKKEAFRVLDVTEISYLCSRFCKIIYRTKQLFLARTMQAVVAGLGLGSVYTRLKRDEEGVAERLGLFAFSLSFLLSSTVEALPIYLRERRVLMKESSRGSYRISSYMIANTIAFVPFLFVVSLLFSIPVYWIVGLNPSIQAFSFFVLCVWLIILMASSLVLFLSAVSPDFISGNSLICTVLGAFFLFSGYFIPKEKIPKPWMFMYYVSLYRYPLESMVVNEYWSMREECFSSGNMGCLMTGEDVLKERGLDKDTRWINVGIMLAFFVFYRILCWCILLRKASKSTH

SEQ ID NO: 11738 - protein, 624 aa, Arabidopsis thaliana
MASCFHPSAMATSHREEDSIILFSASNSPDEFSSASSSFSSSPLPTPNRYSLTVTNLSYTINHTPILNSVSLAAESSKILAVVGPSGTGKSTLLKIISGRVNHKALDPSSAVLMNNRKITDYNQLRRLCGFVPQDDDLLPLLTVKETLMYSAKFSLRDSTAKEREERVESLLSDLGLVLVQDSFVGEGDEEDRGVSGGERKRVSIAVEMIRDPPILLLDEPTSGLDSRNSLQVVELLATMAKSKQRTVLFSIHQPSYRILDYISDYLILSRGSVIHLGSLEHLEDSIAKLGFQIPEQLNPIEFAMEIVESLRTFKPNSVAVVESSSMWPENNENDGIISKKEAFRVLDVTEISYLCSRFCKIIYRTKQLFLARTMQAVVAGLGLGSVYTRLKRDEEGVAERLGLFAFSLSFLLSSTVEALPIYLRERRVLMKESSRGSYRISSYMIANTIAFVPFLFVVSLLFSIPVYWIVGLNPSIQAFSFFVLCVWLIILMASSLVLFLSAVSPDFISGNSLICTVLGAFFLFSGYFIPKEKIPKPWMFMYYVSLYRYPLESMVVNEYWSMREECFSSGNMGCLMTGEDVLKERGLDKDTRWINVGIMLAFFVFYRILCWCILLRKASKSTH

SEQ ID NO: 11739 - protein, 615 aa, Arabidopsis thaliana
MATSHREEDSIILFSASNSPDEFSSASSSFSSSPLPTPNRYSLTVTNLSYTINHTPILNSVSLAAESSKILAVVGPSGTGKSTLLKIISGRVNHKALDPSSAVLMNNRKITDYNQLRRLCGFVPQDDDLLPLLTVKETLMYSAKFSLRDSTAKEREERVESLLSDLGLVLVQDSFVGEGDEEDRGVSGGERKRVSIAVEMIRDPPILLLDEPTSGLDSRNSLQVVELLATMAKSKQRTVLFSIHQPSYRILDYISDYLILSRGSVIHLGSLEHLEDSIAKLGFQIPEQLNPIEFAMEIVESLRTFKPNSVAVVESSSMWPENNENDGIISKKEAFRVLDVTEISYLCSRFCKIIYRTKQLFLARTMQAVVAGLGLGSVYTRLKRDEEGVAERLGLFAFSLSFLLSSTVEALPIYLRERRVLMKESSRGSYRISSYMIANTIAFVPFLFVVSLLFSIPVYWIVGLNPSIQAFSFFVLCVWLIILMASSLVLFLSAVSPDFISGNSLICTVLGAFFLFSGYFIPKEKIPKPWMFMYYVSLYRYPLESMVVNEYWSMREECFSSGNMGCLMTGEDVLKERGLDKDTRWINVGIMLAFFVFYRILCWCILLRKASKSTH

SEQ ID NO: 11740 - DNA, 1831 bp, Arabidopsis thaliana
ggttgcttcaaattacgcattcgaatctgatcttcgttgatctctgtggaagaaacagataagagaaaatcgcatgaatttttttagaaaactatgttttaattcttcgattgcaagctacttcactaatacgagtcttctgatctcaattcttagtttttctcctcaattgccgatttctctctttcttttcgagcagaaatcgttagatcctttatcgctgtgtaatagtaatactaattttaataatcttgagaataattactccgttcattgttgaatcatggagtccggaggcaaaactaatcgtcagctgcgtaaagctatttgcgtctcaacagacgagaagatgaagaagaagagatcaccttcagtgatagtaattggaggtggtatggctggaatttcagctgctcgcactcttcaagatgcttcctttcaggttgttgtattggagtctcgtgacagaattggtggacgagttcacactgattactcattcggttttccagttgatctcggtgcatcttggttgcatggtgtctgtaaagagaatcctttggctgcagtaattggtagattaggattacctctttatcgtactagcggtgacaattcggttttgtatgatcacgatcttgagagttatgctctgttcgacaaggctggtaaccaagtttctcaagagttggtgacaaaagttggcgaaaattttgagcacattctggaagagatctgtaaagtcagggatgagcaggacgaagacatgtcaatagctcaagccttttctattgtatttaagaggaaccctgaattgaggttggagggacttgcccataatgtgcttcagtggtacttgtgccgcatggaaggatggtttgctgctgatgctgaaaccatctcggcaaagtgttgggatcaggaagaactgttgcccggtggacatggtcttatggttagagggtatcgccctgtaatcaacactctctcgaaaggtcttgatatacgactaagccacagagttaccaagatttcaaggcgctacagtggtgtgaaggtgactacagagaaaggagacacgtttgttgcggatgctgcagtcattgctcttcctctaggagtcttaaagtcaggaatgataacattcgaaccaaagcttccacagtggaaacaagaagctatcaacgatctcggtgttggaatcgagaacaagatcatattgaattttgacaacgtcttttggccaaacgtagagtttttaggagtcgttgcagaaacttcctacggatgcagttatttcttgaacctgcataaagccacaagccatcctgtccttgtttacatgccggctggtcagctcgctagagacatcgagaaaaagtccgatgaagcagctgcaaattttgccttttcgcaactacagaaaattcttccagatgcctcttcaccgataaattatttggtatcaaggtggggatcagacatcaattcaatgggatcatatagctatgaaattgtgaacaaacctcacgacctctatgagagactgagagtgccattggataatctattctttgcgggggaagccactagctcgagctacccgggatcagttcacggtgcttattcaaccggagtgctggcagctgaagactgcaggatgcgtgtgcttgagcgctatggagagctcgaacatgagatggaagaggaagctcctgcttctgtccctcttctgatctcccgtatgtaatttaaacctcaggtgttttatatcacctccatatgggaacattgttagatttgattttatgagatttcacgagttggaact

SEQ ID NO: 11741 - protein, 488 aa, Arabidopsis thaliana
MESGGKTNRQLRKAICVSTDEKMKKKRSPSVIVIGGGMAGISAARTLQDASFQVVVLESRDRIGGRVHTDYSFGFPVDLGASWLHGVCKENPLAAVIGRLGLPLYRTSGDNSVLYDHDLESYALFDKAGNQVSQELVTKVGENFEHILEEICKVRDEQDEDMSIAQAFSIVFKRNPELRLEGLAHNVLQWYLCRMEGWFAADAETISAKCWDQEELLPGGHGLMVRGYRPVINTLSKGLDIRLSHRVTKISRRYSGVKVTTEKGDTFVADAAVIALPLGVLKSGMITFEPKLPQWKQEAINDLGVGIENKIILNFDNVFWPNVEFLGVVAETSYGCSYFLNLHKATSHPVLVYMPAGQLARDIEKKSDEAAANFAFSQLQKILPDASSPINYLVSRWGSDINSMGSYSYEIVNKPHDLYERLRVPLDNLFFAGEATSSSYPGSVHGAYSTGVLAAEDCRMRVLERYGELEHEMEEEAPASVPLLISRM

SEQ ID NO: 11742 - protein, 466 aa, Arabidopsis thaliana
MKKKRSPSVIVIGGGMAGISAARTLQDASFQVVVLESRDRIGGRVHTDYSFGFPVDLGASWLHGVCKENPLAAVIGRLGLPLYRTSGDNSVLYDHDLESYALFDKAGNQVSQELVTKVGENFEHILEEICKVRDEQDEDMSIAQAFSIVFKRNPELRLEGLAHNVLQWYLCRMEGWFAADAETISAKCWDQEELLPGGHGLMVRGYRPVINTLSKGLDIRLSHRVTKISRRYSGVKVTTEKGDTFVADAAVIALPLGVLKSGMITFEPKLPQWKQEAINDLGVGIENKIILNFDNVFWPNVEFLGVVAETSYGCSYFLNLHKATSHPVLVYMPAGQLARDIEKKSDEAAANFAFSQLQKILPDASSPINYLVSRWGSDINSMGSYSYEIVNKPHDLYERLRVPLDNLFFAGEATSSSYPGSVHGAYSTGVLAAEDCRMRVLERYGELEHEMEEEAPASVPLLISRM

SEQ ID NO: 11743 - protein, 451 aa, Arabidopsis thaliana
MAGISAARTLQDASFQVVVLESRDRIGGRVHTDYSFGFPVDLGASWLHGVCKENPLAAVIGRLGLPLYRTSGDNSVLYDHDLESYALFDKAGNQVSQELVTKVGENFEHILEEICKVRDEQDEDMSIAQAFSIVFKRNPELRLEGLAHNVLQWYLCRMEGWFAADAETISAKCWDQEELLPGGHGLMVRGYRPVINTLSKGLDIRLSHRVTKISRRYSGVKVTTEKGDTFVADAAVIALPLGVLKSGMITFEPKLPQWKQEAINDLGVGIENKIILNFDNVFWPNVEFLGVVAETSYGCSYFLNLHKATSHPVLVYMPAGQLARDIEKKSDEAAANFAFSQLQKILPDASSPINYLVSRWGSDINSMGSYSYEIVNKPHDLYERLRVPLDNLFFAGEATSSSYPGSVHGAYSTGVLAAEDCRMRVLERYGELEHEMEEEAPASVPLLISRM
